United States Patent Application Publication US 2008/0220983 A1 - sequence listing, part 6

SEQ ID NO: 13270 - DNA, 1796 bp, Homo sapiens
catggcatctgccacagcagaatggagcggtgtgaggaaggtcccttttcctctgttttgtgtttgccaaggccaaactcccactctctgcccccctttaatcccctttctacagtgagtccactaccctcactgaaaatcattttgtaccacttacattttaggctggggcaagcagccctgacctaagggagaatgagttggacagttcttgatagcccagggcatctgctgggctgaccacgttactcatccccgttaacattctctctaaagagcctcgttcatttccaaagcagttaaggaatgggaaccagagtgttttaggacctgaagaatctttatgactctctctctttcactcttttttttttttgtcactaagttaaaagcgaagtgagagtattaacgtttttgttctcctccggccccctgttacaatgaaggggcaaaagtatttgctcttagtctattcctcccttaacttctgtgactaatttttatttcctttctagatttgcccaattaatactagggtgcagtgtatcctggagaggtagggtgtgtgggggaggaatcccttgggggagatattaggagtgctctgttgtttacaaactcaggtacccgcagggcctagcaagagacttaaatgactgataagaaccgtgagaaacatgttgcttccaggcttgatttcgatttttcgctttttttttttttgagacagaatctcactttgtcaccaggctggagtgcagtggtgcaatctcacctcactgcaacctccgcctcctgggttcaagcaattctcctgcctcagcctcccaagtagcttggactacaggccctgccaccacgcccggctaatttgtgtatttttagtagagatggggtttcaccatgttggccaggatggtctcgatctcttgacctcgtgatctgtccaccttggccttgcaaagcgctggattacaggcatgagccactacacccagccgatttttcctttttgattaaagatgctattacaatgtaaatatttcttacacagaaagtcacagcacatgtgcccattgatacaaggctgctgaggcctggtctccagttggaaatataattaagggtggcaaggactggagtcagttggagagtgcatagccagtctgtgaagacaactgccagatactggcaatactccagcctggtgacagagtgagactctgtctcaaaaaaaaagtttcaatgtttactcctagagaagccaaaaatccagatttgtatatgaaatcttaccattttaaaagattggcagctaattatttttttaaaaagctgtgcagtgtgatgtgtcccaaacggactggctcatgggtggccacgtcacaacctctgatctcagaccgtgcatgccttgtcctcttaagacaactcctgtggcaccgtttctccctccacagggccaaagccatagtgtccggtcccaaggacaaggctcttccagtgctaggagaggtatgagcagcctctcacctgtgagctgtggggatcacaaggctgcctgcctcagtcttggagtcctgttgggtgaatgaggcagatgggaaagagcctcaccagcagctgcttttggagcaggggtccaaggaagagagggtggcctcgacatcaaactgcctggatttttctaccaccctgttacatcataacaacttctgaaacacacaccagccctgagttctgggctcatttgaagcctggaatagcaataaatctttttaacttgcggacagttt

SEQ ID NO: 13271 - DNA, 4124 bp, Homo sapiens
ggatctgggttcgtctctgcagctgcctacccctgccccatgtgtcccccgttacctgtcctcagagcctcaggtatggtccaggctctgaggaaagtcagggttgctgtgtgggaacccctctgcctggcacctggataccctgggccaggtaacctgagggcaggggagaggtggggtggcagacacgcagaagtgctactagtgacagggctgccatcgctcacctgtacctatttacacccagaactttccagctccccctcatcatgcctcctccttcctacctgcctcccctctgctggtgcacctcgcccaactcattcttactgcacagttcactttatttaacaattttcatgtcccccacctcatgttttcaccttttctgggccaggcatagattaagtaactgggaacgccccctctttataaagctgggcttctttctcatctctctcccaaatgttgtatctcagtattcttcctattcgagtctccagggggtggctggacctacctggtcatttgaaacaggcccccaagctggagtttttaatctggactctctggcttgctgtgacccctaaggcaatgcttctcttccctggattccttagtgtgggtcacagtactgtgttcttagttgctttagctcttaaaacatacgaagtgttgcctaaactgaaaatatttatcttttatttaaaatcagatttttgtttttagactgtcttagatctggggctattacgaatcacttcttcttcagtaaactttgactcaacttctcctgctgaaaagaagctcgctccagatgtctgcatgggtcctcggcactcttggctgaggactcaaaggttttaatcaggatcgtctaaaaatgtacctcggtgaggaggcacagattttgcctcctgttgaccagcctggtttcataccgaaaagacattgaaggactgcagaaatgtatgggtgcaccgggccgagggaagggtggctgagtgagaggcgtataaaatggggctgtgtgcatgcaggcccatgtttcagcctcagcccacgccaggtgaaaggatcagcaatgctctgttgccatcgtgctgggacgacaccagctctattgccaccgatgagtagctgaggtcagtgtgcacagagtttgaaattaagttaatagactttacagcagctggtctgacactacgcgcagtgctcggttgtttacaatcagtggggaaaagggcagaaccagtgcccggccccacactgcctctgtggcctggactttgaaaggaacccactgaacactaattatgagccctgtctttcccccagaatgcctccctgggtttcacaaacagccttgaggttggccctcctcaaggtcagccttcagatttgggagcaaacttcagagaaggcagaggaagatacattgccttgctgtgggctgcctcttctttcctcttggtgtgcgaagtatttcagaaggccattgatgaattccccctctttagctgtgtatttgtgcacgtgtgtgtgtacgtgcgtgtgtgtgtgtgttcctgtgtaagtaacagaccagactccttttctcttctgtcccgtcaccaggctcttgcttcactgcagatacagttcactctgaaagctggttgaaggagagcagcaaaaatgtatcaggggttttgcttctgtgtttcgccaaagctcataagggctgtgacccacccatatggccccagttttttctgtctcttctgttccaaagccaggagagctgacttccaggtgaagggatgggaaaagtggactctcattgtagtgactcccaacctacctaataatttgttaacttaggaatatgctatcattgttgacttgttcttccttaggagaaggacgattttcacccaccctttctgttctatggtggactcttaacaggtgctatgtgaccaggaatctagccgggagtagcagaggccctgtcttctgaagtctcaggcttagaagttaccaaagtgggctcagaaactgtcatctcctggttccaagttcgggctctggcagcccagccgctatcttagctgtctttcccagcggtgctaagagtggtctcagtgagaaggtagatgccaactggagggccagacctgtgtcctgcccatgtcctccttggtggacgtttctgtttactcagagctgctagagaccatcctgcccatccgagttctgagattgggactgtgatgttgggacctgaggactggatggtagaatactggggtcccccagctcttagcaggatgcaggctattgcttccacacccctggccgtgagaacgtggtatgtaggagagttggctgtagctttaggatttctggaagccaatttggcatggcctatttgatctctggcttgtgctcctgctacactgacagactgattgcgtggctctttcagaagacccaggaagggcagctccagccagaggaccttcctggctatgcaggtgcacagctcttaggcatcaagcaaagggtcagccagtcagtagtagtgggaggaagcccttcctcctcttatgcaagcagctcgcagccagcccagaatctcttatgcagcccaaagggcttcttgaggtagagagccctccccagtgtcttcccaggataagtagaaatatgatcacagagcaacggagcaaaggctttcgggagtgtgaggctgcatctgctggagcaaagggaaaccgtgggcttttccggccagatactcttgagctctgtgaccctgctcctgtcaccccaatttctccaagccagaggtagctttctcagagccccttggtggttctgtcctccaaatgctgctgttgggagcgggcttccagctctcagtgggcagtgcacctcctcctaaatgcaggcacttgctaggaagagtgtgagctggcgtcttctgttcaccctgcctagcagttgtcaccattcacaagtggcattatttatgttgtgctgctgtccagctgctaagatcccttcatctgcacaagccctggctagatatgtgtgaatgtgtggcatcatttcacttcagccgcccaattccatctctcctctgcagccagattcactggctgatgctcactgctcactgtctatccccacgaaatttagttttatcagtagtcttaaagtgttgatctcaaacaagtacattagaaaaatcatgtttcttctctctcatcttactttttcttctcagatttctcccttcctagaacattctctctgtttagcactaatgttcacctcgtattttttggaagtgcaaaaatctcaatttgtgtctgtttacagctctctctcctcactgctcacagcaaggggttctgtatcagtggatttcattttgtagctgctgagatgttaaggcaagcctcagcatctgcccctgctgggtgcacaatgctgcttcctcgaagagaagacacagagtccaagtggcaggacttgaggttggcttccactctgccttagaagttaattttccaaagtacattacaaatctctgaggccattaggggaaaaggaaggggtgtggtttgtctttgaaattacggttaatacttttagacagtaagtccggctggttgcagggctatttgccccgacagcatcagcctgtaacatttcttctctttcctttgtgccactgagtcgttccctggccagaggacataaatggtgctggtaggaggttatcagagtaaggaaggtagcagatataggtgcagggtgcctgtcattcactgtgttatttggtttaaatcaaagtgattctgggggaagctatgctctttcagtggataataaaattggtaactctattgtaaaacatgtcaatggtgtgtgaagaaaaatcaaccaatctgtaggtgttgataactagacagtactgtgtatgttacgtgcctgtgtggatgtgcacttccagcatggtatgtgtagcgatgtggatcatgccagagttcgtagatcctgttttggggtttgcacatggatcgtatgttaagctttttcttttcaataaatgaattttatttttatttttg

SEQ ID NO: 13272 - DNA, 1261 bp, Homo sapiens
atcttcatggatcttcatgcagccatacaaaccctggttccaacagaatggtgaattttcgacagcctttggtatcttggagtatgaccccagtctgttataaactgcttaagtttgtataattttactttttttgtgtgttaatggtgtgtgctccctctccctctcttccctttcctgacctttagtctttcacttccaattttgtggaatgatattttaggaataacggacttttaaagaagcaaaaaaaaagactgaatttccttgcttactttgcatatacagactggattttttttttttttttacagccatttccccaaaggaatgtcttgcatattactgacatttggtatgtttcattcattggaatatttcttattttctacgtgtttgaaaagcctgtaagaaatacaggatttgataatattttgaaggcaggaaaaacccaaattgtttcttctttgagagtcatgactaccttctggtgtggagaaattgccattggaaaatttgacaattttgattctcactggtatgtttaaaaactgaataaaaggaatagaatttttttttgataaaggatcacaaaacaattctaaaacctaactgtttttaccattgaaatttaaattgtgataataggttttaaatgtctagaatgcaactgataggcttttcttgaactgttagtttttttgaagtagttttttcatgtttaatttgtatttgtaaaaaaacaaaaagcaaaaaaattcccaaaacccagataacaaccagagcaaaactgttgtgccttctatttatctttgatttcagtcttggcaattgtttaaaaaaaaaatctagatttgttttattaggttcagagtatgtggggaattatagaatccctctttcatcactttgtgtatgtcttttgttaacatatttgttatgccttattctaaaattgagtctcaaactggaatgcctttgaagacagatgcttctatagaggttctttgacctaaatagttcagcatttgtatttttattctggtatctaatcagattcctaatcatagcccgtaagaaggaatgttactttaatattggactttgctcatgtgctcgtgtccgcatttttttttttcttaaaatcatagccatatggtaaattttctattttgttatggttctcttttattgatgggcatgcagtgggtgttacttggaaatggccaatttttattaaaatatttctggaagaaaattt

SEQ ID NO: 13273 - DNA, 376 bp, Homo sapiens
ctggagcagatggagaccccttggggagcaggctcgggctccccagccccatcccaaacccttcagtgccaaaaacaacaacaaaatgaaacgcaaccaccaccaaccactgcgaccacaagaaggatgattcaacaggttttcctgaagaattgaaaaaccattttgctgtcccttttccttttttgatgttctttcacccttttctgtttgctaagtgaggatgaaaaaataacactgtactgcaataaggggagagtaaccctgtctaatgaaacctgtgtctctgagagtagagtcactggaacactaatgaggaaactgcactgttttattttaattcagttgttagtgtgtcttagtgtgtgcaattttt

SEQ ID NO: 13274 - DNA, 1319 bp, Homo sapiens
cctacaatgctgtaacccagtacctacaaaatcagctcgctctcagaaaaggaacctgtttcttagaagaagtaacatttttgccaaaagatgactggggttttccgtttgttaatattaagcacatcagaacgtgaattgccaaagtcttcattagaaggcagcatttttcctctctgatacttttcagtcattttccttagagctttattaaattatgcatgctaagatttaaaggagccccagataaacatgatggggaaaagcactgaactaagagtcccatggtttctcttctggtcacagttcttccattggttggatctgatacttatcttgggacttcagtttttccgtcaataagatgagggattaggtgagatctgaagttgtttctagctctatagcttcttaacccatcacctttaaattaccagaatcttcactcatctctaagtaaacctttcccgggacttttactcgcttcttttggaaaggattaagctgagatctaaatttccacaccaatgtcataatgcacagaggtttttgaaaaacatctgagtgtttttcagatgttttgccatgtggagcatataatgatatgtgcaagattgaatcttttcaatgtagcacatgtctgtagggttatacagatgtcagagagctaactgctctgtaaactactttccatgagtaaattggtccttggtgggggtgtatcatatttttaacttactgagatatcattttagttcattgaggttggcagggattgcctaactgatcttccaaagtgagcagtttatttctaaggtataacgtctttgatgcttttagaataagaacagtgtcaaatcatctgtcttctggaaaatcatggattttcatatttctgttaacagaatttctcaggctttccctttttaaaagtattggactctacaaataggttctatatttgggatctcatcctaggagaaaacccaaaactggattcctcttaagacctctgtcaaccctcctgccctttgtggtcttaggtatggtgctataggttgcatgcgtctttatcttgtttgtttggttaatattttgttgttgaggtttttatttttgtttacttcagatacataattctgagctatggctgcttttgtagcctttccaagaagcactaacctgaaataagattagataattgtgagggtgtgttactatattaaaatacacacacaactgatctagacatcaagaggaagaaaaatgatggatgatgccacctgcttcaactgtatataataaacacttatgatgac

SEQ ID NO: 13275 - DNA, 3277 bp, Homo sapiens
gccctcatgtccccttggcaggccccccagggtctggcactcactgcagacttcctctttcaagggaggcagggcccctgtgggcactaggtgtaaaaggtgctggccaaatggttcagggtgaagagggctcttgattcaggggctggggtctgcctggtccttgagcccctgagttgtgggggtagggtgaagagcatatcccacaagaggccccacagggagcagagactgctttaatccctgctgacatcacggaaaagcaacagagccttttcaactttgtcactatgtccccttgaacattatgtgggagaacaccaaggtagcctaggccacccaaaagtgagtcctgcgaggttgcccagccctcagatggctctcctacatgatggtgctttagaaacaaaggtaaaatttgcctgtttggggcagcttttagtatcgatgccactcatctgcagcagaagagaaagaagtcctcttggggctttttagtttctgccgtcctggggggaacattgcagttactgcacagcttctgttctctgtcacaaccccaggtgatttggtccggtcaaaggccatacttggggccctaagagtgttcagtattgaatgctgatcagctgccaggtgaggagtcagaagagggagcccccctagacatttctttgcagctatggacatgcgggatatctccccctgctctctgggtatttgaaatgtcaattttagcactctccaggcacaaggacagcccagcaccagctttacagggcagtgtttcagatggccctgagcccacggaaaaggccaggtagacctccaaactagaaatgctggctgatttgccctgatccatgcttccatttccctgtctctcttccccaggcaattactggcctcaaaagaggaacagaggtgctgcgaggtgctcacctcacagagtctggaggcctccaggatcaactgtgggcaaagtgcctgcctctgacctcatcatggttctagttctcatacagaactccagaatttttaaagaactctataattggattgcaaactaggatgctacataggattctggtattccacatccaatatggatttctagaatgctgtgattaaaggagccagccaggtgtaatacagtcaaggcagcccccagcctagagacaatctgtgaaatccaaagttggtggtgttgggaaagcagggggacatgtgtccctcagctcagcagaggctgtggtacaacatggtccttggtgaagacctgcacccctggaacctcccaccatcatcacaactgtagtctcatttgcagtggagaaaagaacccgacgtcccacagccagatatacacccagctccatgccagcccttcatgtttaccttttgctttgttaattacatgtcagactcctagagggcctccagactaataggaagcatttctgtaaccaacctgccacccactgattcagaaatggaaatcacattccacaatctatggcttccaccagctagcccaggaaatacttgaaatcagcattccaattagtgttgagtctcttgattgtgtcatttaccaattaaataactgagacctaagtctgggaacagagccacgaatctgcctttgagatgctggcagatctcaaggccatcaattattgggggagggagggacaaacactcccaatcatccaccagtcagactgaatgtgtagctggcgaggaattacttccacttctggcccagcacaagccctgctttggccacctgtctgcaagagaggcggcccctgtgcttgcaacgcttacgtgttgatcccagtgtccttttccaaatgagtgctgtagctttagaagtggccctctatagaaagaagtcaaaagatgaggccccttctagaatctaggataacaagagtgttgacagtttgaggagtcgaattgagattcatcatcaaagagcaatgcagcgtcgttaaaataaaaactgtgccttttaaaaagaaaaatgcaaatatagagcaaatccctaaacttgaaccatttcctagtgccttgctagacaaacataaaggggcagggttgtggggaggggaacgtttttggtggtgtgtgcagttcctactggatgagtgtgtgtttcttaatgtctcatttcaagcaggagatgttgggtctggagcaagatctgagactgagatgtcccccaagggtgacaggtcagatttatttcagtcagtgcaagtcacactccaaactaaaggctgggcagtgcgtttagtctgtggcctagaagacctcatcagcccccgagaggaggccttgcattacctcactgggacctgtttgggggccatccctgcggtccaccctctgaacccccagcatgtttgtcctgtttctcaccattgggttaaggggtgccgagcactagctagacttccacatagtcccaccccaagtgggcggcagtgttcctggcatgaccaggattcctgtgaaagcaggagcagcagcaagccgtcccgggcctgcctttcccatcctttggttctcctttccagtctgggttcacaccctgaaaagggatgggtgtgtcctctgagcactctggcatttgtcattgctgagcccatatcagtaggtcctgggacttgacaaagtatgtgggaggggaaggaaggacagaacttgactggctccatttcatggaccaactgatcaattgccagtactaagccactcattgttatggcttcctttttgaaaaccacctgtctcaaggattcaggtttctgctcacatccccagctgatgctcaataaaactcagccaggagcatatggagatgctgacagccaggtaatgggtgagactgtggggtcccttttcctctaaagcctttactctgaggataaggtcacaaagtagggtgtgacttgaaagtatcgtgaccatgtggcccaccagcagcctttccaaaggggaactccagagacatttcataatgcaaacagcactgttgctttaagaacaaggcctttggaggtggctaaacttgcacgcacgtgtgtgaaaagccatcccatcttctgcctccagttggagctttcagctgttaaaacagtcagaaactattgattcttccctttaggaaaaaatgctcaggcagaacggggtacatccacaggaggaatcggacgagaggatgtgacattcggtccaggagagaaagagcagtttctgttaaagatgt

SEQ ID NO: 13276 - DNA, 285 bp, Homo sapiens
ggatgaagcacatcttaaaggaatgaagtgtaatgcttgatgcacaggtgatatctactacatttaagcccataaagactgttaaatattattgtaaataaaaaagtttgaatgatgaatactgtaaatctttttggtcaggaggattatattctcatgattcagcatgtgtatagaaagactttcttttacgataactctggactaaaaaaatcaggatcattaaaagaattaaaaactatgtatttcagcattcaacaaagcattaaatcaattctactggaa

SEQ ID NO: 13277 - DNA, 3505 bp, Homo sapiens
aaagctccttagccctggggcttgaggggggaaaggggtagggtgggtaagagtccatgggggtgcccagtcccaggaaaggggacaatgaagggacaggcctggagttactaggacaggcctttgtgctgagtagcaatgtatacaccatttgggctatcagaggtacccctgggcaggagcctctacatccccttccccctcctctctccatgactcttgacatcctagcttcttctaaggggggagggaaaggggggagatttttatatatatatacatatatatatatcaagttttaaattattgatagttcatctggattaccaaaatcactctgcagccctgcccgaggctagtaggctgcaaccctggtccccacccctaacctcctgctccccctcaagccaactatgcagcccacaagaaggccctgcgggcccccccattgcccagcactgtctcatagaaggctctggtggtacctctgggccccaggagcatcagccccttgatcatctggggtttgtcatcaccatattttctccctgctgttcccaccatgcccttctgccatcttctgggagaaggaaaccaaaggatctaaaactggggtttgggggaaggtttcagcctctccccactccccttgccccacaccctttactccccagcccagagagacgctgcttttaccaggaaagactattgaaagatgttttattttatttttctctgacctttccatccttgaaaaaatggggaaaaaagaagaaaaaagacaaaatcgaccataaaagaccaaaaaaaaaaaaaaaatcagaaaacccccacctaatccacagaaagtaatgtctttcccctccccttggaatttttgttttgtttttggaaataatatttttttaaaagttgccttattgtggagcgggaatctgaaatacccaaatgcctgttttcctcggtggagtcaacccgaagagctcccaccttctctggatgtgcctgggcttggactggctagaatctttctctggactgttgcatgtacagtgcctccatcctggaggcaagagagttgggagtggctcgaatcagagccgtgcccaagatatccctgctgttgcatcgtttgaagctgacgtcctgtgtctgtacactgctgccactgttgtgtcctcgctctgcttgctgttgcctcacgccaggccccgtcctgccgtgacacccttcatcctacccttggaaccccaaggccaagttggttcaaactgttggagaacagagttggcctgcatctggaacacacttgtcctcagcttaccatctcctcacaccccagagtggaaaggtgaacacctgcagctgaggcttggaaacgtttcttgtgttgccctgaaaaatctttgagacctcagggaggctctgtctctcttaaaaggtggagaaagatgccattctctccctaaggtctggtggagtctccccatcttgcatacccttctgcaagccatctatctctgctcactctccaattgacccgcctgggaacaagggatgaggaggagttgggggctggggggaatcctgccagttggtgaagccctgtggcaggaaggtatatgtggacatagagtatacctgattctctttcttcagccactgactgcttgggttgggctgtgaatgataatggaatggctggagtctgctgttgtcagaaggcagggagggtgatgaaggactgacccacatggactgggatgtgtgtcggttatgggcatgactgcacgttcactctcagtgggatctgggcaacatggagttcattgtcctgttgcttacttactgcaatgtctttggccctccttttcaactggttcctctgttgggcccaaaggttgggagtaggagacagtatcccaggctgacaagggcttgccctttaccttgggcaccttgttaatttttagcctgtgcccttccccacctttgccctcccagtggttggtatgtgggaagcccatctcagttcctgtgacttcatgtctcaaaccaaggatgagcgtctggtctctgctatgatggtggtatccgaggcctttccctgcccagtctggtgcctgccccacattgtaccggacactggattcctggacccccttctcctttcctttctttccttcaggtcacgcagccctgtactgtatccagcaccacagaaacctcagtgtttttcctctgctggtttggggcacaaggaagccttagggtatggggaaaggctgttattacctagagtttactcccaggccagggggctgccatcttcttcacagacatccctgaaaggaagcccctttggggcagggaggtgaggacttcatctcaacatcggctggtggttggtaggggagctttttcttttctttcctttttttttgtttttgtttttgtttttgtttttggtaacatgttaggagttaatgttgcaaagagtagtttacatcttcactttctgaagacacttgaatttaggaccgatgtatctgtgacaagcatgccagaagtggcaggggccatcagggctaaccacttcacacctaccatcgtcccatggggatccaagacctgagataaagcaacagcctgcccagatccctctgttcatcctatcccttccaaggttggtccatgccaacataacctctgggcatcagacatcagcaggtctgtgtgcctcagccctgttaaggggcaggtttctctttagccctcttcctgcacttgggagcaaaggcactaccagtagagaagggccatccagccgtgccccagcctggacccctggggctcagatagaggtgctgagcccctgtgtcaaagttgttaaatgtttttgttttgttccattgtagctctttttttttttttttcccctttcctggtgattgattttacaaaagaaagtaagctgcttagaaggccctggaagggaagtgaggaggagggacaaggaagatgactagttacggagggtgagggttgttttttgccaaaaagcctgggtagagtgatctgaattatctggcaccctcctgaatggaaccccagagtacctcctgtgtggaagggtccctggattttccctaacacccaccctctcccccttcagccatgctgatggcagagaagataagaacttggagcccatttctcactggagaggaaaacttgtcatctggctttgcggagaaggttccaccttacgctcgtagtacattatctttactatgtgctaggatatcatatttaaaaggacaaaaaaatgtaaaatacttgaatgagcttgtattataacattaatattattgagagtatctgctttccaggctgaagtgattcattcattattctagtcctgctttagtcctttgtaatttgtggtaattatgcttttctttttaatacaaaaaaatgtataaaaataaacacttgaaaaggc

SEQ ID NO: 13278 - DNA, 1352 bp, Homo sapiens
tggcgccaggctctgcagggtgggcctgatcccagagtggtgcttactgtgctgactgtgtacttatcttccccaagagaaaatgcttcttttgagcacactgtacctaccatctgcattgagcagaaagacttttgttttactgaagacaaaagatgtttttattttagacccagaagagaggagtttgctctgaatttgtaaataagtcttccccattcctcatactcgagcctctcctctctggttgcctcctgccaccagcatccatggctcatttgacacctttttaaatatcaggacaagtctgaaacaaagtagtaaaatgtatataactcttacctgttgtcattctttttcttttaaatttgttgctaatctctgataatgaagattcttactctgattctcagctgagctgtgagggcttccagggaaaatggaacaaaatggtgttcttaggtaatgggttgtagatactgagtcttcctttccttttctgacccttctcgaggacatttgctttcctcacacttttgtagtctctctttacatattactatatggaaatgaattgctctgtgctgaaatttgaagaccagataatgaaactgaaaagcaaacaattttactgaatctgtctacccttcattcatgagaactccagaatgagtgttgaccactgaagcatcttttaagtctgtgttccattgtgccattcaggtttgctgtcacatatgcatcatctgaaatcatttgaaatttttgtacaataaaatatcctggatttgatcctgaaggaaactagtaagatcagatttttgggtcatgtctgttgtattttcagtaatgtgatttcagatggtcatctggattctcccacttctctactccattatttctctacttttccttccagcaaacctgaaacgtgagggagatggattaatgtgagtaacaggaatgtgtctttaaaaagctagagtggttacatttaatcaggcagtaagataatttgggttcttgagttgttttggagtaatatcccacaactggggtaggaagctcaggacttttttctttaaagctagtcatttcaaaagcatattgtatttttttgaatgactacagtatggacaatttcaaaaaccaaaacccactttggattggtggaagtaaaaactggtaactcactcaagtgaatgaatggtcttgcattttaaaagcttatgggaaactcaatttgaaatgattagaaaatgtcaagtattataagctggtatttaagatgcttgtaaatactatttatgtttttaattttgtaaaataaagatttctttttaaccactggc

SEQ ID NO: 13279 - DNA, 71 bp, Homo sapiens
tgaggagattcagactccacagtgtatatattttgccatttattttctaaaaataaacaaaaattgaaggc

SEQ ID NO: 13280 - DNA, 8258 bp, Homo sapiens
cctcggagttggatcctacagtgtatcaacaaaaggagccaagcaggttttatttctgaaacaattaattgagcagcatgattataagccaaacccacaatccatcaaagtgatgatttcttatttgtaaaatgcagagataatggcatgtattccaagtacagaattatatgaccatgaaaatgaatgctattttcaaattctctcttgtcaccttaaaataagattttgttagccaacataattaagctgtatatattatacacatctggctcaagatgaacttaatttacttgtcattactttgtgtcacatgtttctgttttcactgaaaatggggaggcagattgaacagctgtcccaaccagaacaagccaaaactttatagggtaagactaggcagcaagggaatgaaacactgcagatattcattctcttatgccaacacagtcccagctgggtgaacagaaatgctgcttgtgtttttgctagcaagacaagccaattactacccacacccaaaatgtgatttgtctgtaaacttttaaaaatgccttcaaagtgctcataagtgaactttgctatttaatcatagagttaaaaaatctgtgtgtttttttttttttaagaaaaatgctattccacctgactattcaatgagagaggttatcagtctctacctgcttctatacatccactcgatggatataaaagtcccccttttgattggtatggcatttcctattttgttttagaagagatagtcagaacattcagttatcacaactgcctcttcaagcagctacaaactgcaaaccacacacatataaaaatagtggctacctcacatatgcagtttatagctatcagaatttgaactctggaggaatcagttataatcgtaaatctaatggcagcttccacaactgcttatttttataggcatatttttataggcatgtttttctcaaagtatattctatagaccatcagccccataaattgttagaaaaaaaaaaagcagaaaggctcactagcatttaaaagttggaaaatgttacatactctattctcttcttgaacactcaccttgcacacagtcatagtaggatctgggaagtcccatagtaaagaaaattgttaaatgtcacattttcacatttatttgactctaggactctatttacattctgtatgacatttttttgcaaaatgctaacatagatcaatgcagcattatcttgctagaatctaagcttctgtgaaggtagagactttccatcttgttggtatccaaatccccagtaccaaaaataatcaacacatagtaggtgctcattagatttcagttgaattgaacattcacttgctgtttctgaatgtcaagagaagagacgacagcctctgaccaatgctttccttcctattctctgtctttagattaagttagatgctgcgaaaatcaggctacctagactgcctcatggatcctacacgcctacaggaacgaggcagaaggtcttcgagatctgcgtctgcgccaatgggagattattcctgtctcaggcaggagctgggtccacttgtcagataaacacaagtgtctgcctctgaaagactatccatagtggacattgttggcagcataaaggccttttttggctttagacactggctgccagctatttttactagaacacagaaagcctatcaaagaccttgtgtgtatgtgtacgtgtgtgtgcgtgcttgagtgtgttcgcgtgtgtgggtggatataaatatatataaatatatataaataaatatatatatcctctgtataaaatgaggtttcagtacaaaaggaaccatgggtgaccctgcgatatccactgtcattttccatcccatccccaccacctgagtgacagaaatctaaacacacatccgtcccaacattccccagaccattcagaatcacacagcgtattaaacactgacagaatcttcatctagatattcgagtagcagcatatcttctcttttagtgtcattacgagggagtgatggcgggaatctcagtcgcactcaagctctgagacctttgtatcaaaaataggcatttgatttcctgttttagctttagtaaggctggctaacttccccctcttcaagctaggaactggcaatgctgtagaagtcagccgtaggaattcaaaatggctggcctaccttggctaccagacatattggggtttttgtagttgaatgaatgaggaggatgaatttcagcaaattttgaactgctcacccaacttctgctatcttgctccctccaaactcacagattctcctacagtcaaattaggagctgtaaatcagcacaaaataagataacagctgttcctcagtgagctggaagctacttaatggcctgatgggcaatgaacaaacgggtgatatgtctctgtttaagggaaaaatggcttaaaagctgttctgttctcacttctgactttaaccaaaagatttcaacccacaatgatcaggtcaatcaaaatccctaagagcagaactcctaccccaaaagaagcctggaagtctaattaagagtagcataaggaacctaattatgtttaccatgtttcttgggattggtgggaaatgtcaaaacatgccctttatttttaaaggcattcacaaactctctgactttgttcttcttatatattttttcagtgccgggatattcatattcctaaagccactattgtgttttctctaagaagcactacatgccaccagaattgtgcactgaaagataatacaaactgagtgtctttatgagaatcactgtgtcccctgaggcccagcagtacctgcttccctgtatgtggaagcagcacctcattcccgccatcagctacctctcatcaccccaccttcatcatcatgctccagggtcaccctggccagctcttgtgctgggacaggggattacaccatctctgttcaaagagggggaaatgtgcctatgccttaagtcaatgcactcagcaaggagaagcacatcttatttatcttgttacctatagtttactttgggtgattggaggggaatgacttagttatgactggacatcttaaaagctgatagacaagccaaatggctggcagatgatgtggatttcaaagagcccagaatgaactcatcactggcttagacagtcctggatgccatttggaaagtagtggccctgcaagcctaaatgaagtagtatttgtaggcctgggtggcatttggatttttcttttccctcaacaaggttttactttttcttactttacaagcaagggaagttttgtgataggagagaaataaaagatttgatattttttgagatgacactcaagcatcaggctgagatttgcacacatgggatgtaaaagcaagctgtgtgttgcttagtcacttacttagaagtagatggtgggggacagcggcgtgggtcctagcctggccagtgatgctgctggcgtccagaccccagactcactccaagcactcttgttcaatatctcatgcagaagagttgggctggtcactcttaggggtgagaccccgtgattggttggtttgtagcactaaggtctaaaaaggaaaaccataaaagacatcagattacgctggatcagtataattaatattccatagggccatgttgccagaatctgtatgtatcaatacagggtttttccaagccaggaaacgccctccttggctactaggagcacctatcccatatcattcagataaacaatgatagctacaaagtcatttgtggctagataggttaagacaggtgattttttaaagtagactgtctttgcattttgccatctgaagttcattaatctttagatgacaaaaaagcaaaaagttcccagaacgtttttgcttagattttgttctaatcaccacgtgaaggaatgagattagcaccacaagtttcatgccaataaaagagactggtgtgatcccacatgcaaaatttaatcctaagggtagtgagatcacaaacagaataaaaataagagcaatcaaccatataaatcaagtacctattgggaacagacataacattcaatttttcatttatgctaagtgaccacagtatacaaagtaataagcaggaaatttgatatgggttaaattatgcattttgttcagattttggaaattggtatgcattataagtttctcaatgtacatctttttatcccaacaccctcaaactagaatatttgtcagtggtcaagagaaaaaattttacctgaattcttgggggccggcggggagcttttacattaaaaatctactaacgcctactttttaaaaaatgagattctttctaatctttatatatgacattttctagacaatcgcacctttgggtatattaaacagctggtatcataacaaagaatccaaatgaaccttcaatatactagaagttctagtaggttaatattgttcagaagatttttacaaattaaaaactgatttccaaatatgttcaacatttacttctatttgatatctgctcaagaagtcatagaagtcttgggaaactattcgagtatcacagaggttttcaaaagcccttatggtgacatctacctaggtaaaagcctgacatgtggctttataattgttatgttacccaagggataaacttgaactggctttgaacatcctttaggtcattttctctttggataattttcatcgcatatccagcaactatagaccaaagtttgcttaaggtttgaccctagagcagaggtgggcaaactatgacctggaaaccaaatctgacttaccaccttttcctgtagttaaagttttattgtcacatagccacatacattcatttacatgttttctgattttacactacagcagcaggatggagtagttgtgtcagagactatgtatcccacaaagcatagattacttactatttagtcctttacaggcaaagtttcctcacccctgacctagaggtttttgtggtatgcattggatatagcaggaaagaaagcacatttccaaacagcagggagtaagcttacatttctgtgtaggtttgggaatatagttacttggcaaagtctttcaggaaggaagcccttccttatgttacatgtggaaagcctgccttccaagacatgtggaagtaattgatccacctgccagagaaacacaggctcagaggatgcctgggaacagggaggatgggattagtggaagcttaatggaaaaggaaagttatgatcctccaagacccttaattgatagaccataccaggttctgcaggtcagcatcattgtgtaatgagagtgaagtaggggaccctgtggttcaaccttagaatctgtttcctgtaggctctttctgctgtctatattcattaaagttttccacttcaccctcccatagtctagagggatgcccattccatggtcctccagagaatagttttgacttaacatgtctgtttagcccacatcacgtcagttatcaacaccgccactgtgcttactgttcctacagccacaccaggcttgaagagttagtgagaccaacaaataattggaagtattggaaaaagcaaaatacatggggacaaaaaaaatacagtgaaattctttttatcaaactgatgctgtgagaaaccagatgaatgccagtttggctttatttctaagaatctgggtcttcattctctggtgtagaaggaatgcaaaaaactataacaacaacaacaaaaacatattttgaaaagacatattctgacatctctgcttgtgtgtggtaaggcaggttcctatcagacatttatccctttggtcaagatcccttttgctcatccagggtttcatactcaatatcgcttaaaaaaaaaaaagtatcagctagggatgactctggaagtatgagtatcatggtggggaggaaggaattttttttaaatgtaaatgacccccatttaccagaccctaatcaaagtcacttaagggaatccctcagccttttatttggaaacagttgaaataaactggcagcagctagatcagagtatcttgctttattttataaaggccaaaggtagtatgaagtttggaccaaaaaggtaaatagatccattccagcacctgatactgatttttcaaggctctatgaaaggtcaaaaatttcattaaacaagaccagttctccctcttccccctgtcccaagaaatcttaggcatgaaaaggataaggaaacagctcctggaatgatacatttgcatagtgccctagtagcaggttgggaaaaagttataatataagaaacaaccttcgaaaacaggccttttatctcaaagataaaatgtctttcttgtggtctttcatcactatctccgtggtggaaggttcccctagttccaacatatttccattaaaatagtcaaagccacggcattgggatgtcagatgcctctctttctttgtggtaatcggaatttaaaattatacagttgcctctgaatttctcatgcacaaagccaaaccactgataagagataaagcagtctgaagcctgctgcttcagccagcacagcacaccacacacgctcgcactttcaaaagcaatgtgatttctatggttcttaaaagctttcttcataagggagtccctgaaatttctcaaggcaggtttgaatggcaaagggaaaataattacttgtgggaggtcctccttttgagtattgttagagcatacatgtaaaagaaaataacctttttggggcaactcatgctcacacatgctgttttctttggttctccccctaccttccttttgtagatattgacagaataggaggaaatgagcatccttatttgagaaagagcaagaatgtcatgagcccttgatgcaatagtaagtgtgatgtcatcatacagtgttaatgatgctatcaaatccatcaataaacagtctcaaaccttccaacaacagtgctcactgctgctcctcaacttcagcccagcaagcagtaatatcatcacccattttgagatatgcaggtggaatagaacaaagaaacagccactgtaatcgagaagcatgtttactgtctaaatccacctgttgcagtaggaagccagagtggggttccaaatgcctcattaagtatgtggacagcctcactagtaagtgagtgaatttggcttcatcactgaacattagctaaggtcagcttaataacacaaatatgaggccgacttctttgcgagaagagaaaagaaaacatctgcttgatttaaaatccaccccacatgcctagagttgtctaatagtccctcactttccaatggcttcacatcctacttctacatttggggttttttggtgaaatcagagatagctcaggatttcataaaacgagaaactccaaactggtctattaggttccatgggaacacttgtagccaaaggattgtctgagggcaggaagacgacacttgtcaacaaggaagacagtgtttctttagttcccatattcatctaattcatggggttctaacattttggggggccatagattcttttgacaatctgagccaatctatgaaacttctccccaaaaagaaccaccccacaaaatcttgcaaaacgtaagagattttcctggatctgaagctacccgaagacatgggaagagttgtattctattattcaattttaagaatatttattaatattcactgagctattgctagccactgtgctaaacattttacatacattctcctatttcatcctcaaaacaatcctttgagttgggttttaatatagttccaatattcggatgtgaaaactgaggcttatagtggctaagaaacttgcccaaagccactacctagaaaatggcagagctggaatgtaggtttaactcctgaccactatgctataaagtcaccacatgtcaaactaattttcaagttgttgggacatgtcccctactaggttttaaactagatcttccttggtagatgaagctatagaacttctattttccctgctttctgtagtctctcacagtgacagcatctatactaaagtatagatacctaaggggaaaatatagaaagcctgcctgaataatagaatctagaacaacaacaaaaatattaattttttctgtgtatgcttaggtcaagctt

SEQ ID NO: 13281 - DNA, 2421 bp, Homo sapiens
tagagactgagtaccaggccacgggctgcagatcctgaatggaggaaggatatgtcctcattccatagagcattagaagctgccaccagcccaggaccctccagaggcagcctggcctgtggcatcagtccctgagtcaccatggaagcagcatcctgaccacagctggcagtcaagccacagctggagggtcagccaccaagctgggagctgagccagaacaggagtgatgtctctgcccttcctctagcctcttgtcacatgtggtgcacaaacctcaacctgacagctttcagacagcattcttgcacttcttagcaacagagagagacatgagtaagacccagattgctatttttattgttatttttaacatgaatctaaagtttatggttccagggactttttatttgacccaacaacacagtatcccaggatatggaggcaaggggaacaaagagcatgagtctttttccaagaaaactggtgagttaagtaagattagagtgagtgtgctctgttgctgtgatgctgtcagccacagcttcctgccgtagagaatgatagagcagctgctcacacaggaggccggatattctgagaagcagctttatgaggttttacagagtatgctgctacctctctccttgaagggagcatggcgagacccattggatggattggggtgaacagttcaggtcccatgcttggagcattgggtatctgatgtctgcaccagaacaagagaacctctgacggtggagaaccatgtggtgcaagaagagatcttaggtctcttcttttataccaagctcatcttttataccaagctgtgcaggtgactatgcctcctcttctgcacagaatgcttccaccagcatcctgagaagaaatgattacttctgaaaaacatccttttttccagcctctgggaatcagccccccctctctgcactatccgatcctcatcaacagagggcagcattgtgttggtcaatgttcccttggcgagcaattgaaacttgtttaggccctagggttgagcaattttaaggttgagactccaagtctcctaaaattctaggagagaaataaagagtctgtttttgctcaaaccatcaggatggaaacagtcaggcactgactggggtgcttccaagaggcatgagagtgcctactctggcttgagcacttctatatgcaaggtgaatatgtactgagctaggagacttccctgcaaaatctctgttcaccctgggttcacatccccatgaggtaatattattattcccattttacaaataatgtaactgaggctttaaaaagccaagacatctgcccaaagtgatggaactagaaagtctagagctggtattctagcccaaatctgtctgaccgcaatacacagattctttattcctattcgacactggcttctactgaaaatgaaacggattgcagagggaataaatacaaagatggaaagccagtaaagaagtcagtatagaaccactagcgaatagtgttgctctggcacagaccactgtggttgatggcatggccctccaacttggaataggattttccttttcctattctgtatccttaccttggtcatgttaatgactttggagttattcagttaatgaccctttaattctcacaaccaaccagtcatgttgcttgaagccatttatagacgagcttcaaagcaactttaaaagattcttctgtagaagtatgagttcttcctttaattatcattccaactttcagctgtagtcttcttgaacacttcatgaggagggacattccctgatataagagaggatggtgttgcaattggctctttctaaatcatgtgacgttttgactggcttgagattcagatgcataatttttaattataattattgtgaagtggagagcctcaagataaaactctgtcattcagaagatgattttactcagcttatccaaaattatctctgtttactttttagaattttgtacattatcttttgggatccttaattagagatgatttctggaacattcagtctagaaagaaaacattggaattgactgatctctgtggtttggtttagaaaattcccctgtgcatggtattacctttttcaagctcagattcatctaatcctcaactgtacatgtgtacattcttcacctcctggtgccctatcccgcaaaatgggcttcctgcctggtttttctcttctcacattttttaaatggtcccctgtgtttgtagagaactcccttatacagagttttggttctagttttatttcgtagattttgcattttgtaccttttgagactatgtatttatatttggatcagatgcatatttattaatgtacagtcactgctagtgttcaaaataaaaatgttacaaat

SEQ ID NO: 13282 - DNA, 2596 bp, Homo sapiens
gcagaagatcctgcagacccttatctggaggaggaagagaagcaggagagagaaagccacagccagcctgccataggatccaactggacaacgtgtgggatggacctggaaacaagcacctccccaaacacatcaccactccctagggcggggcctgtgcatgctctcccatgacatctccatgctggtttctccatagcataaatgaaaaaaaaaaaaaaaaagtaaacagggcagtgtgtgctttttcttttctcccccctcaactatattaagaactcctagtttcaccctttctccatcccatcatcccacctatctgtggttgcttcccaagacctcctcccaagatagacatctcctacccagtgcccttgtgtgaccccaggactcaagtctcagactgtgaacagatgtggccatgcccagagacgccagcctggccagaagggcatgcctcagcttactacttcatctctcctggttccctccctgcagtgccccgggtgtcatcttctcccactctgggtaccagggattctaccacataggcttcccaaagccccattctaactcccctctctcagggaagccctagagagaggtccaaaaagcattcacagctgtatcacactctatgcaggtggggtaggagactgatcaggcctgctgtggggaagcagtatgtatgaacacagccagaaatgtcatagtccaaacaggatgctttcaggccatctcagctgcttgatggtgagatggttcccttattccttcaggaaaggcttagcattgggccacataggggaagcagctttgaacaaatcagtcatagcactgcctatagcattagccagtgaccaaattagggacaacgtcttggcacagaattgcttatcaaggaacatttccacaagaaagaaaatattaaggggttatttccacagaagcccaaaacgtcttggaaacacagaggtgaggaggaggaatagtaattgtcaatgagcttttaataccaagatacaccccctgcccccaaagaagagtcctcttttagggaatcagaaccttcattgtcctagaagctgaaagattcttggaacattttagcttttactctcaacttgctgttctctttacattccttaagttagactttcgggtgtggcttctctcccaggggtaacatttacttccattttctagactgaaccaaaagtcttctgcagaatctcccaccgagtgtggtaagaaggaaggacaaaaggctttaggatataaatttcatgttacagagcatgtcattgtcaaaggaaatctgtggccctgagattttaagaacataaaatgtgacatttgatatttctccagcccagggaagtaagatggttagcaatggttgccttaatcaaatggtcccatttttaaccccaaaggaagtgcccacagcaagaggtttgtgtgatgcacttatgtcctccggtgaggaaagggggccacatatgaaaggccccttaggtcagatcctgagagtagcacatttgagtgcagattcctgggccccacctcaaacctactaattctgaatctctgggaatagggccaggaaatctgccctttctacaaactacccaagttgttctgttgcacatcaatgtttgggaaccactgctgtaagggaatcattctggtcaccttgagctttgagctaccactaagccatgaaagaaaatacatcatacagggaagagagaagggaggaggttccaagtagtaactggcagatcctcctgtctggaggtaccaccttctattctggtttctgacttttccttcttgatgaccatagatgtgttccagaggcaaaagagacacattatcccagatggcagaacatgctttcaaaacatataaaatgtcaaagttccagatccttctacatctttagtcctgtctgaggatggtagctggctctctgtagctgatagatggctagagttccatccaaatccttgaccacgacttcatggagatttgaataatctatttgatgagatttctatttcaataacccacctctctcaccccacattcatatccctaaatttgaccctctgggccgagtcacattaccttcaggagacttgatcccagtagactgaggtcttccctttcagcagaaagatttcatttccctggcttgccagtggcactgatttccgaacacccaatgagtttaatattctttcctccttggcattactgccccagcctctttttattttttttgtgtgtgtctaataaccaggaaaaaaataaagcttaggttttaaaaagttttaaaaataatctgtttcagaaactgtcaaatgtaccatatttgtattaagagttgttgggaatttttgtacaatgaatttacatttatttatggtgacatatttacgcttgtgatcaaataatgatgttaaattcttaaatcatatttgctatgcagctgaagatgatattttgatttgtattttgggggtacctgtgttgagttgataaacatttccatcttcattaaaactgcttccaaactagtaaaaccagc

SEQ ID NO: 13283 - DNA, 281 bp, Homo sapiens
cccttttgcgcttcagttctggtgtgcttaaccatgcaagccctcccacctcccagggctccttgccttaggtggctgtagcatccctaccacccaggacactggtgcgaatgacacaactcaagttgggaggggaacagggaaggaagggatggatgggggtggtgtatcttactctgtttaagcagaacaccttgtttgcggtgttggaacatggttcctttggcagaagtgctttttttttaatcgcagtactatttttataaagcaagaactattcc

SEQ ID NO: 13284 - DNA, 1474 bp, Homo sapiens
ccagctcagcctgagctttggtttttagaaataaagtgcatgaattgctgctatgctgtatcctagtatcccagtgaaactctgagttggaatgattccctctggtcctgcatatgcagaggacggagcaggctcagccccctggaagatgagctcaaggggaggacaggccttgggagggcaggcgtttgcattaatatcaaggcaaaaagcattcatagatacatgcatctgatttggtattgtgatttacttcagaccctgaaaccaaatatctgatcttccattagacttaggggtcatgatatgagtggaatttacattttagatactataggggaaagaaaagtctcaaaaagaagtattgcatgtctaaaagctagtgccctgagtactcatgaattcgattccaagagtagtggtgtaaattgccttggagccctgcatccacgtcttgtaactaacttttgaattttgcctgacatgattctctcttgatgaagaaatgacatatattatctttgaatatctacaaggaaagttaccaacttatgtaggggtgaaatttggataggcggtatgctcaaagcagccagcaatgagtgctctgttttgatccttcttcttattatggaaaggagtacaggacctcttcagtcttccccttaccagaggtagcctctgcaaatggcataccagatgggactctaagatgcttgtgtggtggcttcttgtccttctctttgacttctgtggcatggtgctagtgcatgtaccctgtggtattgcccctctgtccgtagtgtgaactgtcctgtgagctttatgtcaggagactgtgaccttcatgtccagcttcaaagagttgtgcatgaactcggtaatacacatcacacggctgagagtcccctttccaggcagggccagcatgtgtagaatatctttcagaatatggtttcaccatgaaacaggggtggtagatttattcccttgtgtcaggccaaagaagttcttacaaagtacagtgggtagtgtctaaagcgacactttactcacagcctggcttgagtcaacaggaacaccatagcacccacaaatacttctacttgaatcatattctgtgctttttcaatcactagtgcagaataggctgcatttgacacagactgttaggcaatattgatttttttgttttgtttttatttggttttatctgagataacttatgttcaaggtgagaataagaaatagccaactagttaaaatgtatgaaaagaaaactttcccctgctgtatttgttgtgtaacataaataagccttctgagaagcagggtgaataaagtttagggagctgggacacctggtcctgctagctggaccactggctcatcatgcaatgaaaaggtgagcagacttaacccctccgtgcctcagctttttccccacagacacctacctcacaggggcattgag

SEQ ID NO: 13285 - DNA, 1100 bp, Homo sapiens
ttacaagttatactggcagttattgaagatacttaagatccaagaacttcttgcttttatgctagaaatcattatgatagtgctggacactgaagcaaataccatactgcttatacttggtcttccagttttttgtaaatttaattttatattttttgaagatgatagcaatatgctaaaaaatgcttgtcccctatatgaatattctgttacgcttgaaaaatattttctccagcgttggttactgaccaccccaccctcccaccacacacacacacacacacacacacacacacacacacacacacacacaaagtggagaaaaatgtatactcaacaatgtcattttgtgactttggaaacaagttatgttttgtgtttttgtctcattgtgttattgtctgactaaatctaaaaccaaacccatgttgaaactagtacttttccctttaaaaacaaaccaaaaaaaaaaacaaaaaaaaactttttaattaaagaacctagtttgctatgcttaaaattaccaagaattttttatttctttgtcatagacacaatttctcttctgtatgccactagttacatttctaaattctgagcggtctcagttaggcctgtatgtgtgtacatgtccaagtaaagctggaaaatgtcagtcttgacacagctgtgtcttagtatgagaaacagaagactgaagaataaaaactaaggaacaagaatgagtctctttttggtggctaagtagaatcttcctaaaaccattgtcataaaagcagttaaaggcaataaatttttaaaagggacatatcactgattcattcctaaaaagcatgaacaaaaagtttttgttctgttccagctatatcttgtctaagtgctaacactgtttcagtgaaaatatctagccataagattaaaaaaatatattatttgcaatgcttaagcctgcagatacgtaatgtgaccactgttttgtgttgacaatattgctttatacagttcttgtatttgaaaggaattgatccttttaaagaaacatggtgtatattgttcttacaggactaatttcagtggtgtaaataataaatatcttttct

SEQ ID NO: 13286 - DNA, 520 bp, Homo sapiens
ggcccccgtgcgcagctttctttccctggggaggaaaacatcgtgggggggaggggagggcggggcggaggggggaggggagcgtccacgccgggtagacgcgcgccccaaggggaaccggggggagggccggggagaggggcagctgcttttctggcaggggcatgggtgccaggtaccacgcggaaagccgggccgagcatgctgagagcctgggggacccgacgccgccgggatttacctctctctctccctctgtgtatatataaacgagtccctctctacttgtatttaaccgtgggtgcacgtgagtgtgactgtgcggtgtgcgtgtgttccgcttgtgtgtgtgcgtggggccgccctgtgagggcgcggcgactgtgcgcccaggaggcaaccgggggcgttgtgtgtgtcgtgacttcgtacctctcaagcccctccttgtacttcactgaaggatggcactttggtggggttggaaacaaagtcgacattaaaggtcatttctcctgtt

SEQ ID NO: 13287 - DNA, 477 bp, Homo sapiens
caaagataacaaaagctttacaagctgacttggaattgtgtgctgcttgctgttagctaggggaaaggccctgccaatgtttaacttttaaaagcatcttatctaaaagaaaggctatccagtagagcccagtgctcccttgtccctcttttatgatcagggtgaaatgtacttcctgatgtaatgaacctaatttgatttccattttaaggtggtgtctgtgcagctggtgtccccgattctggctgtcctatgtccaggaagaagcccatttgttgaggctgaccttcctgatcatacacacacacagcccagcaaaagcctctcctgaaccaaacaaacctgttggttgggagactgcccagacatgattgatgacgggttcccgcctgctgtcccctccctgatcacacagctaacgaggctgcctccagcatttcctgatttcctctgtggtaataaaagctttctgtgctt

SEQ ID NO: 13288 - DNA, 63 bp, Homo sapiens
gcagccaggcccggcccagggagctacaaacccaccaataaaactgatataaggacagacgct

SEQ ID NO: 13289 - DNA, 57 bp, Homo sapiens
atttcttagtgcttcagagtttgtgtgtatttgtattaataaagcattctttaacag

SEQ ID NO: 13290 - DNA, 332 bp, Homo sapiens
cttgcggccaggacaacctgaattctataagttcttgttttctgtttcctatgttttcttaaaaaatagcattgagacttgtgtagatgcttctcagaacatgaaatcaaattggaaatctgtaacgcagcttccgtaagcatgtgtgggcaaaaaagcaataatcctactcctcaaaatagaaagttgaagattgctgaaaaatatgacttttctgtatgttagagaaaaactttatgaggatgaaatgggttcaagatgaatttgtcaacttttgtcttccattgttcagtatttttaattgtcactgtaaataacatttaccacaaggc

SEQ ID NO: 13291 - DNA, 1986 bp, Homo sapiens
atcttttactcacattctgttgttcagtcctctgcactgggaatttatttatgttctcaacgcagtaattcccatctgctttattgcctctgtcttaaagaatttgaaagtttccttattttcataattcatttaagaacaagagacccctgtctggcagtctggagcaaagcagactatgcagcttggagacaggattctgacagagcaagcgaaagagcaaagtcatgtcagaaggagacagaatgagagagaaaagagggggaagatggttcaaagatacaagaaaaagtagaaaaaaaaataacacttaactaaaacccctaggtcatttgtagatatatatttccaaatattctaaaaaagatactgtatatgtcaaaaatatttttatgtgaaggtgtttcaaagggtaaattataaatgtttcatgaagaaaaaattttaaaaatctacgtctttattacacaaactatggtgtgcttatgtttttgttttgctttttaaactgatgtatagctttaacattttgtttccaaagctgaagatccccattctttctctttgaaaaaaaaaaaggcctaatgcattattttgtcataaaatgctattttaaaattcatggaactttcatacgtaaaggtgcagttgctcattgtagagcacatttagtccaatgaagataaatgctttaaatagtttacttcactttcatctgagcttttaccactagactcaaggaagaataattttaacagacatgtatactccatagaaactaaactaaaatagtttaaaaatattccctttttcaccctattttcagatagcacatgagcccaacactcacttaattctcattatgaagatgtttttagaggggcaaaaatattttgcaagctctggaattgttgaatgtattcttttatataactacattaaaagctttagattgaaatttatgactagcaaacaaaaatagaatatataaacgatatatgtaaatatacagcatgagattgtacattttttacttttttaaaattgtgttcttaaaatattgtgtaagaatcactgcacttagctgttggaatgttgttaaatgctatggaaatacatttagaacctgcatttaagaacagaacagcaagtatgaaccacatggaacttaaaacatatgggtgtgaagtccacttatgtagacaaaacttataatttccaaactgttgtctagtatacagtgatcagttgctctctgttcaagtcattccacacatttccctattttaggctattataatatagaaagaaaatgggaagcattagttggagctagaaaatgaactgtatattattgctatatttgctaataccaactatttcaataagtgttgtaccatatgtagcattaaatataaaatacataaaagaatgtacagaaaatagcttttattgagtaatattacatttcatttatactgtagcaatatatttgtaggtatactatgtaagggctttaaataaaagaggtccattaatacttccttataaaaattctagtctgtttcattactgcccagatgttttagagataaatatttatgcagaaggtatttttgaagtctccttttgtctgatagagtttaacagatatttaaatttagtgctcagaatccacaagtcacggtctaaacacacttagaatactacagcataaatctgttagcattattgccaaataagacagttgggatccaaacccaagtcttgagcaatgtttttctcaaaaagctgctatccaatgatataggaaaatacattgtgttttcctaaacacacttttctttttaaatgtgcttcattgtttgatttggtcctgcctaaatttcacaagctaggccaatgaaggctgaatcaaagacatttcatccaccaatatcatgtgtagatattatgtatagaaaataaaataaattatggctctaa

SEQ ID NO: 13292 - DNA, 2152 bp, Homo sapiens
ggaggtatgggttttactgatatggttcttattcactgagtctcatggagagatgtctgttctaagtccacttaaataatcctctatgtggttgataatgatctgaatctgtttctatgtccaaacctggtaaattttataatgtcatattgtttgtgcccagccctcctttggttagtgtactttgaacttcgatgtttgctgtgtttcaaacctgcaaggcaaagtaaaattagagcaagaacattcaaaccaaataagatatttttcagctacagcaaataaaacagtgaaagccctgactatttacagtagtggtatccttactagattcataatgcaattagatagaaaaggtccaaaactgtaccctatgttcactccgggtcaagttgtgataaatttgatcccaatagaatacctccctcatttaagaaaaatcataactcactttaaatatgaaagcctagtccagaaatctattacacctttatctcaagataggaagaaaatttcctccacattcatgtacaatgatgtaaatatttcaataacttagaatgcttcaagtttagtgcatgcatctctttagatccaaaataaatggactgaagttatcatcctattgtcttttattttgtgtccttgggctataaaagattcctgaatgtaattataaggatttgggtttggaaatggagggaggaattttcattgccttctccctcatgcatgaagattcgaacagcttattttttccttgtatgacatattacaacactttaagtaaaatatagactggataatcaacatttgccacctctaaatatgcccaatttcataactagagtataaagtaattgtatgtgcttgccgctatttttttcttccttttaggatgatagatcataacagaacttattctccatctcaagatctgcttctagtgattgtgagtgccttgtgggcagaatccttgtcatttcctctttgggtctgtagcaccttgcatagtgcctggcatatagttggtgctcaataaatatggtttgaagtgaattgccctcacatgcttctggcaaatctctgtgctggcctgaaaccagtgactcatcttctcacataggtgttgtcaagtgatatttgattttgtaaaaataaccagtaggatccaaagaactttagctatttatgttcatcttcaaaaaattattttaggcaaagtccatactccttttaaaacaatatttatgtcctatgtttgtgtatagacatgactctactagggcataattagagtttgtgtattatttttccaggtttggggatgagtcagtccttgcccatccacaattttgtttgtgaacttataacaggaataagcaaaattcatacctgactagtgttcagaatgtagcattctgtgcgaaaaagtattgaagattagcttttaaaaactgaaaaaaaaaaatgaatgactcacatagaggttgagccaatgactgtggcctcattagattacattgtagttaaacaaagcaatttctccagacttaaaacatgatgagttgagctctatcttcatgtactcatcctgaatccttatttttctaaaatagcaccctttgttaattatttttatggaaattattactctgtcataattaaatcatagctagtataactttacagataacctaaaaagaatagaaaagaagagagagtggctttgtcagtataaaaccatgtaaagtcatcatcaagtcatctggatgaatcttgaaacacatttagctgccagttttacaaacctttaatatatcagtgctccagtatataacctcaaacaaatgtaaatagaacgaattattttcttgttttgaattgtcaatatattaaatgttgactctttgggagagttgttggcaagtttcaatggtgagaaacattattgtcaacttgaaatgtgttctgtaatggggacactacaaaaagctagctttccaatgtgtgcatagtattggcaatatgaatatatattatatataatctaatacttattataagctgctccctgtctatgtatttggaaaccttttcacaaagggaattgcctaacatgtggacttttacaataaaaatgctgcattct

SEQ ID NO: 13293 - DNA, 1341 bp, Homo sapiens
gattattacagcaccaaaaaacttctctgaagcctttctccacaaccttgttctatggattccataatgttacaatggatttaagctatgaagcctcaaaacatcacgagataagcatgatggtctcagacttgggaaaactgcctaatattatgctgtagtggaattatgtttagatttgaattcatctgtgaagcattcaaatcaaagctaaaagcctaaatgtgaaatgctaatgacaagcctgagaaggtaaactgtgaatcttcatttctatcattgatctaactttagatattggatcaatatatttaggtggtattgaaaatgctattggaggagtcacactaatactatcaactatcagtcttcccacagcttcaatcactgtcattattctaatcctactcctacttaaattttaagttatgaggtttatgtcaaaagcaacatttcacaaatgtacttttaaggcataataagggttaacattctaggcagtataaacacaccccataatgcaagtaataggtaatctagagatgtggactttattgctatatgggaattacatttaaatttgagggcattttatataaagaaaaatacagacctataaagtttggcatattcattaagttatcttttaatatttttttctagaaaacaggtgacatttgtatctacgataaaaatttttatacagaacctactgcctcaaactgaatcccatcaagaaaactagtttctattgtattagtaactcaaaataaattatcacttcgaaaacttgctttcccacactaaggtaagttcagactagattgaacactccagaattttttactacagactgtttttaagttagaagtgatggcaattttataaatagagaatatacttccactgatgcccttactgtgccaaaacaaaaatcttaagaaaagcaagtagacaccttcataactatgaatgaagctgctgaagtagtgtttaggatcctccatggcagttagtgaatgtaagaagtacagtgttaaagtgttgtaaacagttactcagtgcaatgtatagcctgagtctatccatgatggctatatccaatttgacatcacgttatggatcagtacacaatgaaaaaccaaagaaccacagtatatcttattcttaacttttgtaaaccatgttttatgggtaactttttagttttcccaaaaggctgataaatttcaatattttgaatacatcattgttaattttgagttggcagaggtaaactaaccaactaccattatgttttagtactaagggatatacctttcaataaagttaatgaaattc

SEQ ID NO: 13294 - DNA, 775 bp, Homo sapiens
acatctgagaaacctgttgaagattatttcattcgtcttgttgttattgatgttgctgttattatatttgacatgggtattttataatgttgtatttaattttaactgccaatccttaaatatgtgaaaggaacattttttaccaaagtgtcttttgacattttattttttcttgcaaatacctcctccctaatgctcacctttatcacctcattctgaaccctttcgctggctttccagcttagaatgcatctcatcaacttaaaagtcagtatcatattattatcctcctgttctgaaaccttagtttcaagagtctaaaccccagattcttcagcttgatcctggaggtcttttctagtctgagcttctttagctaggctaaaacaccttggcttgttattgcctctactttgattctgataatgctcacttggtcctacctattatccttctacttgtccagttcaaataagaaataaggacaagcctaacttcatagaaacctctctatttttaatcagttgtttaataatttacaggttcttaggctccatcctgtttgtatgaaattataatctgtggattggcctttaagcctgcattcttaacaaactcttcagttaattcttagatacactaaaaatctgagaaactctacatgtaactatttcttcagagtttgtcatatactgcttgtcatctgcatgtctactcagcatttgattaacatttgtgtaatatgaaataaaattacacagtaagtcatttaacc

SEQ ID NO: 13295 - DNA, 956 bp, Homo sapiens
tttatttgtgttgggttcttttttttttttaaatgaaaagtatagtatgtggcactttttaaagaacaaaggaaatagttttgtatgagtactttaattgtgactcttaggatctttcaggtaaatgatgctcttgcactagtgaaattgtctaaagaaactaaagggcagtcatgccctgtttgcagtaatttttctttttatcattttgtttgtcctggctaaacttggagtttgagtatagtaaattatgatccttaaatatttgagagtcaggatgaagcagatctgctgtagacttttcagatgaaattgttcattctcgtaacctccatattttcaggatttttgaagctgttgaccttttcatgttgattattttaaattgtgtgaaatagtataaaaatcattggtgttcattatttgctttgcctgagctcagatcaaaatgtttgaagaaaggaactttatttttgcaagttacgtacagtttttatgcttgagatatttcaacatgttatgtatattggaacttctacagcttgatgcctcctgcttttatagcagtttatggggagcacttgaaagagcgtgtgtacatgtattttttttctaggcaaacattgaatgcaaacgtgtatttttttaatataaatatataactgtccttttcatcccatgttgccgctaagtgatatttcatatgtgtggttatactcataataatgggccttgtaagtcttttcaccattcatgaataataataaatatgtactgctggcatgtaatgcttagttttcttgtatttacttctttttttaaatgtaaggaccaaacttctaaactaattgttcttttgttgctttaatttttaaaaattacattcttctgatgtaacatgtgatacatacaaaagaatatagtttaatatgtattgaaataaaacacaataaaat

SEQ ID NO: 13296 - DNA, 734 bp, Homo sapiens
tcgccagaaaagtatttcctttgttccactgaccaggctgtgaacattgactgtggctaaagttatttatgtggtgttatatgaaggtactgagtcacaagtcctctagtgctcttgttggtttgaagatgaaccgactttttagtttgggtcctactgttgttattaaaaacagaacaaaaacaaaacacacacacacacaaaaacagaaacaaaaaaaaccagcattaaaataataagattgtatagtttgtatatttaggagtgtatttttgggaaagaaaatttaaatgaactaaagcagtattgagttgctgctcttcttaaaatcgtttagattttttttggtttgtacagctccaccttttagaggtcttactgcaataagaagtaatgcctgggggacggtaatcctaataggacgtcccgcacttgtcacagtacagctaatttttcctagttaacatattttgtacaatattaaaaaaatgcacagaaaccattgggggggattcagaggtgcatccacggatcttcttgagctgtgacgtgtttttatgtggctgcccaacgtggagcgggcagtgtgataggctgggtgggctaagcagcctagtctatgtgggtgacaggccacgctggtctcagatgcccagtgaagccactaacatgagtgaggggagggctgtggggaactccattcagttttatctccatcaataaagtggcctttc

SEQ ID NO: 13297 - DNA, 112 bp, Homo sapiens
tccttcataggtttgaacactgtgtgtttttaccaaagtggccattggcactgtttgcttttttacaatcatgtggacacaagcataagtaaagaaaatttgtcaaccaggc

SEQ ID NO: 13298 - DNA, 570 bp, Homo sapiens
agacttgtctttaataagagtacggtgccacttgcctcaaaagttactatggtgcttaagattgtcttgatctgacatatatcaccttctgggttatttactcattgtgccaggacctggcattttcatgtgcctttgaccaagtgttcagaatttgcttgactctaacctggagagcttcttaagtgatgccccttcatggagcttctatgacagtgaataaactattaattgaaggaaaatgttataattaatgtatctatttgctgcattgtatatggattaaatgataaaaaacaagtaatctaccctcagagccatgtatttgagaatgcttcaatcatattttcctatgtacttttttttataaacttagttttagactatgttgtaaaaatgggaaggttgtaaactatgttgtaaaaataggaaatgtggcttaaaatatatacattatattgtttcaggattttgtcagtgtttaaagaaccaatgttcatctttgtatttatatacatgatttaaattttgtctaaaattttaaataaaactgcagtgatttatccttaa

SEQ ID NO: 13299 - DNA, 519 bp, Homo sapiens
gctgctgctgactagggctgcatgggagagccagggaggggagtttctggaagaggaaagccatgcgtggaacatcgaagcctcagagagtgggagactgtccccatcagttgtccttacttagaggagacagagaggccaatcaggtcccagagcttgaatgctaacaagcccagcatcccctggggctgtgatcatggtggatgaggaagcctcaacgtagattcctgaactcaaggtaccagcaagaatgccttctcccagtgtgctctccccaacatcctaggcacagctttcataacccagtttcttaggtgtaagaaactgtttttatctcatttattaagtctcagaacttaacagaaaaggaagccttttaaatattctttttaattttattttagattaacagttttgtactttacatttttttatacaaccaaccagtttcttttctagccaatcatctctgaagagttgctgtttcttactgacaataaaaaatgttctcttggttcg

SEQ ID NO: 13300 - DNA, 1114 bp, Homo sapiens
gtacagaacagctcctgagccaggtggacatgccagagagaaaagcagtagaggtcctccatgccagccccacggtggtccatgactgcggaactgcccagacataagcaggagcctccgaggaatccaccctctttctagaacactggttaaggcttctgtttatcacacataggcccacacacagactcaccaactttgcaatagaaatactggtgcctgcagagcagcactaacagtggcaggtgctgtactaggctctgtactggccacacttactattgacagtcaccccgtaaggttcacaaaccaccccattgaacagatgaggaactgaggctcaaggaggttaagtaacatttccagggttatataaactagtaaatggcagagctaagagtcaaatccaggtctatgtgatcctcagagattggaggccgggatggagaattggttgagtagccaaggaaggtcagtgtgaaaagcttgctatggcaaatatagcgaaatctctccactgccttctgtccaccaacatttagtgccagcctaggcacaacttgtcctggtccaagtccttattctgcttgccccaacttacctgcagacactccttttgctaccactcaaggaaggaagtcaccagtggccttagtgcaggaaactcagccctggtggccctgcagaacaatgcatctgacatgtgcgatgcatccccatggagagacagcattgctccccagccctccagaaaccttgagcagatccagggatcagtgagaggagtggtgtgtacccctaaatcctcccaccccagcactgcccatctgtaaaatcttgtaaagcccagtttcctgtgtgcatgtcatggaccagtgagctggagatggctgaatcttccaagagaaacaaggttggataagcgcttccttttttttagcccaggagaggtggatgtttgtctgagaaaacaatggcctcaagggaggggccttgggcccaccctcacagggggtctctgtgtgatctcttgggatttctccttgtttttgtgagtacctgggaagtgttgtttgttttcttattttctttttaattaaaaaacaaacaaaca

SEQ ID NO: 13301 - DNA, 824 bp, Homo sapiens
ctggtgacactcagccattcagctctcagagacattgtactaaacaaccaccttaacaccctgatctgcccttgttctgattttacacaccaactcttgggacagaaacaccttttacactttggaagaattctctgctgaagactttctatggaacccagcatcatgtggctcagtctctgattgccaactcttcctctttcttcttcttgagagagacaagatgaaatttgagtttgttttggaagcatgctcatctcctcacactgctgccctatggaaggtccctctgcttaagcttaaacagtagtgcacaaaatatgctgcttacgtgcccccagcccactgcctccaagtcaggcagaccttggtgaatctggaagcaagaggacctgagccagatgcacaccatctctgatggcctcccaaaccaatgtgcctgtttctcttcctttggtgggaagaatgagagttatccagaacaattaggatctgtcatgaccagattgggagagccagcacctaacatatgtgggataggactgaattattaagcatgatattgtctgatgacccaaactgcccatgtcatttgtttccagaaacgaggaccaataattctctcacactggcatttgtgctggtagtacaagtcctttaatatgtccaggaagggagccattgcccagtggtccatatctccaccacatcccctgcttgagcccagcgctgcatgtccctcccaagaagtccagaatgcctgcaaattgctgtaattttataccatgttctaaccaataaacagaactatttcttacactctc

SEQ ID NO: 13302 - DNA, 1786 bp, Homo sapiens
gtcaatgttaaatttcttgcatgccataggtcttcaacaggacaagataatgatgtaaatggtattttaggccaagtgtgcacccacatccaatggtgctacaagtgactgaaataatatttgagtctttctgctcaaagaatgaagctccaaccattgttctaagctgtgtagaagtcctagcattataggatcttgtaatagaaacatcagtccattcctctttcatcttaatcaaggacattcccatggagcccaagattacaaatgtactcagggctgtttattcggtggctccctggtttgcatttacctcatataaagaatgggaaggagaccattgggtaaccctcaagtgtcagaagttgtttctaaagtaactatacatgttttttactaaatctctgcagtgcttataaaatacattgttgcctatttagggagtaacattttctagtttttgtttctggttaaaatgaaatatgggcttatgtcaattcattggaagtcaatgcactaactcaataccaagatgagtttttaaataatgaatattatttaataccacaacagaattatccccaatttccaataagtcctatcattgaaaattcaaatataagtgaagaaaaaattagtagatcaacaatctaaacaaatccctcggttctaagatacaatggattccccatactggaaggactctgaggctttattcccccactatgcatatcttatcattttattattatacacacatccatcctaaactatactaaagcccttttcccatgcatggatggaaatggaagatttttttttaacttgttctagaagtcttaatatgggctgttgccatgaaggcttgcagaattgagtccattttctagctgcctttattcacatagtgatggggtactaaaagtactgggttgactcagagagtcgctgtcattctgtcattgctgctactctaacactgagcaacactctcccagtggcagatcccctgtatcattccaagaggagcattcatccctttgctctaatgatcaggaatgatgcttattagaaaacaaactgcttgacccaggaacaagtggcttagcttaagtaaacttggctttgctcagatccctgatccttccagctggtctgctatgagtggcttatcccgcatgagcaggagcgtgctggccctgagtactgaactttctgagtaacaatgagatacgttacagaacctatgttcaggttgcgggtgagctgccctctccaaatccagccagagatgcacattcctcggccagtctcagccaacagtaccaaaagtgatttttgagtgtgccagggtaaaggcttccagttcagcctcagttattttagacaatctcgccatctttaatttcttagcttcctgttctaataaatgcacggctttacctttcctgtcagaaataaaccaaggctctaaaagatgatttcccttctgtaactccctagagccacaggttctcattccttttcccattatacttctcacaattcagtttctatgagtttgatcacctgatttttttaacaaaatatttctaacgggaatgggtgggagtgctggtgaaaagaggtgaaatgtggttgtatgagccaatcatatttgtgattttttaaaaaaagtttaaaaggaaatatctgttctgaaaccccacttaagcattgtttttatataaaaacaatgataaagatgtgaaactgtgaaataaatataccatattagctacccacc

SEQ ID NO: 13303 - DNA, 1156 bp, Homo sapiens
cccgacttttctgaccatgtgcggagcagcctttatcaagagactcctgaaggtctgggtctcaggacagtgatgttggctagcccaggggaatgtatttttcaaaacatacaagcaacagcaaaagccctaacttcttatacgtctagcctaattataagaatttctaacagtaccagtgtaaattcagtcttttctctgaaaagcaaaggatgtgttttcagtctttctatcaaatattatctttgttctcctaatgctctgaaaggatgtagaaacaatatttaaccaaagaacgtaataaaccaggtttgcacctaagtgtgtactagtttatggttctgcagtcaaggttgtcaatttgttggagatgcagccttcaccatggatcctggattgagacgaatgccattggaacctgttaaatgagtagtttgttatgtgtctggaagaagcagcgttagggactttgggctgtgagcatttagaacgagcctggaagcactacagagcatcccacaggaccacacgcaggcctccctgcctcagctgcatctgataaagttgagagacagtaacacaattaaatgacttagaaacaatgtttgcttttcactggcataaatctgaagtggttcagtctagaagaattaagctgtgcaattactgcctgcagagatatttcttcaggaggagtcatgtagccccagtcagaagttctgggtggtgccagcacccagtcctctgcctccatttaatttttaagagaaggtgaaggtaactattagaatataatatttgaagcagctctgccttcttagggctacccaaaacagttctaggtgctaaaattcagattttcagaggatgagaaatagctggtttccaactctccacaaaaactcttattactgttgggacttgggattctgactcaccccaaacccagaacatgaagaagacctttacagtttgtgctctactgttactaggctattaatttgagatcgtccactgtcaagtgttttactatctcactgctgtttttatgattcaggcttataacaaatattgtatcctttatttctgataagacatgaaaggttggccttactgttgaacaataagtaaatccacaggctcctgttgtaatctc

SEQ ID NO: 13304 - DNA, 534 bp, Homo sapiens
gcccaccagcgcgcaccgtcgccacggatcgccgcccccacccagccgggcgccccggaccccccaggcgggctgcgggggaaccggcgccgagaggggaaggggccgcctagcccgagtaggccccagggcgcggccacagactggcgggccgcggaagggggtagggcccgagctccgcgcggccgcacaatccgagcccccgccccgcgccccgtcccgccccaggcccgggcctgacaagaaagcgccttacgtttctccgccccccgcccgcaccccccgggccgggcgcctgtattatactttgtacttttgcccaaacgtgtaaataataaaaaagttttggcttttttctttagaaaccggccacctgcttcccccgcgggggccgctggaggaagggcagccgacccggccgctgggggaagtgccaggggcccggggcaccctgcgtttaggctgggtccactcttcttcttttccgttccttttatttaagtctttttatttaataaaaaagttagctatttc

SEQ ID NO: 13305 - DNA, 320 bp, Homo sapiens
acagtcctgggcactacatgtaaattaagcccaaagatggggagaaaggaaaaggagagacaaatatagtccatactgagtgtcatcaacaatccagactgaagtcttctattttaatctcaatccccttttctgatttgccacccatgcctcttcaggctggaaacaatctcttggttccctaaagcactttcttctgactgctgtgattcagtgaaccttgccctttgctttctattacttgtgcatttgcctcacctgacaatgttttaaatcgcctttgtatctccttagctgctcaataaatatttgaatgcatc

SEQ ID NO: 13306 - DNA, 318 bp, Homo sapiens
gaaaatagtttaaacaatttgttaaaaaattttccgtcttatttcatttctgtaacagttgatatctggctgtcctttttataatgcagagtgagaactttccctaccgtgtttgataaatgttgtccaggttctattgccaagaatgtgttgtccaaaatgcctgtttagtttttaaagatggaactccaccctttgcttggttttaagtatgtatggaatgttatgataggacatagtagtagcggtggtcagacatggaaatggtggggagacaaaaatatacatgtgaaataaaactcagtattttaataaagt

SEQ ID NO: 13307 - DNA, 353 bp, Homo sapiens
gccaccccgccgcggcccctcaggtcgccctggccacactcacactcccagaaaactgcatcagaggaatatttttacatgaaaaataaggaagaagctctatttttgtacattgtgtttaaaagaagacaaaaactgaaccaaaactcttggggggaggggtgataaggattttattgttgacttgaaacccccgatgacaaaagactcacgcaaagggactgtagtcaacccacaggtgcttgtctctctctaggaacagacaactctaaactcgtccccagaggaggacttgaatgaggaaaccaacactttgagaaaccaaagtcctttttcccaaaggttctgaaagg

SEQ ID NO: 13308 - DNA, 1223 bp, Homo sapiens
gttgagagttgtggatccaagtctcagagcactgaagttttgtggcagagaagaacttgttatggtcccttccaatagagttcaaggacagtctttctctggtgtcatttccaaaggactcaatcgctgagttttggactctgagaaatctagttgtcatctgctggtgggtcatgaaggccccccctttttttctttttctttttctttttctttttttttttgagacagagtctcacttgatcacccaggctagagtgcagtggcgtgatcttgactcactgcaacttctgccacccaggttcaagcaattctcctgcctcagcctcccaagtagctgggattacaggcgcctgccaccacacctggctaatttttgtatttttagtagagacgggatttcatcatcttggccaggctggtcttgaactcctgacctcgtgatccgcctgcctcagcctcccaaagtgctgggattataggtgtgagccaccgcgcccggcctgcctttttttttttttttgttaacctagtgaaagtatgctttggcataatgcattaaagccttgcactactgaatcatagcagagtttataagagtagaagatacatgaggttctattcttaggggcataggccttccagtgactgtttcttttctttctttcttttttttttgagatggagtctcgctctgtcgccaggactggagtgcagtgacacgatcccggctcactgcaacctccacctcccaggttcaagcaattctccttcctcagcctcccgagtagctgggactacaggcgcgtgccatgacacccagctaattttttatttttaatagagatggggttgaaacccccatgttggccaggctggtctcaaactcctgacctcaggtgttctgccctcctcggcctcccaaagtgctgggattacaggcatgagccaccatgcccggcccagtgactgtttcataaggggtcaagttacattttccactgagaggggaatctgattgccatcaaggccaatggtaatactgttagccaaggcaatccagtcaattcacttaactttgccagtttcagttccaagatgccatttgtcctttcaacctttccagaagactaaaggtgatagcaacaatggtaatgccattgtgtttgtaacactttattttattgctttataactttccgagtaaaattggtatctctgtc

SEQ ID NO: 13309 - DNA, 1864 bp, Homo sapiens
cgccacacccagcctaatggccgaggaccctgggcatcgccagccttgcctccagtgccctgtctcctttggccctcaatctggtcccaaatctggctgtgtcccaaagggtgtgtgggaagtggggggaaagtagaggatggctcgatgttttgcagctacctcttttccccgtgtttctttttagacaaattacactgcctgaagttgcagttcccctttccctggggagccccaagaacagagtcaggcaaggggtggggagtccagggatcttggggacccctcctaggagagctgcagtctcttccctcaggggaacatcccagaatgcatatcgatcagctctcagccaggcttcgacaatctcgcagcccccactaggtggacacattaatgatttggtttctcccctgggcagccaacctgccccagaggcaccagacctgggctttcagctttgggaccaggctgcccaaaggtactcctttatacacccggcaccttccacgaaagatggtacttcccaagcaagcccctatgatttgtcactatagatggaaccctgacttctgccccatcccttcctgcccaacctagaacccaggcctcaagtctttaccccacccctttcttgttcttccaagaagcagatgcccagttgctcagcagcagcggtagagacttgaatctgcccaccagtcacaaggcgggtcacagattcctcttcctctcttctcctcgttcctctgaaccctccaccaatgtgcctcagcctgtgtgctgtgtggcaacagcattctggttcccactgccaagatctcccaccactctgctgggatctgcagtggcagggagtgggggttgtgtaaaggggaagtcatcttttgagatccagatagacatggtttgtgcacttacgtccagatgggaagcatccttcctgcaaccctaaaataatcatgcagcctctcagacggacgccatcggtcccaaggccttaggtggaggaagcaaagcaggccaggcctgtcctgtccgtggacctctaccttctggactccctacgggtgcagagcacttgggtttctctacagccatcgtggcccacttgacactgtgctcctccatcagctggtcacatgccaacacgttcccagcccctgaggcagctccagggtgccccacctgctcctgaggtgggtccctaccctgctgctcctcttcatcctttcccttttgtcctgaaagggaggagcaatggtccaggcattaattccacccagggaattttagctatgccctcatgtcccagggagagagccacacgcctgttttccatttatagcaagattgtttgcatacttttgtaatgaaggggagtgtccagtggaaggatttttaaaattatcttatggatagctcaagtctctgccatttgtaatttttggctctaagctccgattggagacgcttctccttgtgcatgtgagttgactgatgttgtgagtgtaaatgcatttggttatttctggtatcggtggccacttggatggatttttttacattctgttccccagttacaggaaggagtccctttggtgtgtgaatatgtgtgcctgtagagggtggggcagggtggggtggggatggaaatgtgtggcatgcacatgagttgaaattcttttatgcatttttttgaagaaaaaaaaaaaaacaactctgaggacataggggatgtcagtttcctatggaagagacacctctgacccgttattcttataatcaaaatctgaagggaaaaaaatgttttagttctttccccactcgttgggttcaactagattaaaaggctgattttcag

SEQ ID NO: 13310 - DNA, 3253 bp, Homo sapiens
gggggacaatgatgagaagacctgaggatttgcagcccccagccctgggttcaagtcccagctctaccccttcttggcccctacaagtcacttgacccatcttaggctgagggtgtgatggcgataatagtatcacgataccacccacttcacaaagtttgtgtggggattaaatgagctaatgcagattcattcattcagaaaaatttttgaatggcacgttctgtgttccagggtcggtgataggctctggggcagcgttcctgggctggtggggctcccattctggtagagggagacagtctacaaaccagaaagcatcagggatgctaagtgcagtgatgaggaataaagccaaggggagtgagatgaggtgggcttgaaagtaccttgtccgctcagaaggaccattcaaggttcactgttgttttgtcctcagaaccaggagcttcagatcctaagtcaagtgggtgaacgcagtgcccttgggagggccgaggcacccggtggcagctggcagggttttgctcagcacgtgccggccttcctcgaagctcggtactgtcacagtggagcctctcaacaacgctgtgaggcagcaccatttgacaggttaggatgctggggcccagagaggttaagtgtcttgcccgaggtcacacagctatctgcatgtcccacaactccccttcccagccccagccaaactgagccactggccactcctggcttctccttgtccctcctgcagcctctgctcagaacgcccttcctccagaccctgacacctgagctggggttgcaaagtcactggccacatccagcccaaagataaattttgtttgtccagtatagcatttaactgcatcagaaccagtatgaaaagaccaggaatccagatttctggcttttaaaagtcagaggctctcactacactgggtccgtgttcccgctatgacaatgacctggcaccaatgggcagtgttcccctttagagagggtgtgtgctgtcccttcccacagtccctggcaggcggctggaaggccaggcctggtcatctgtcaagcagggtggacttcttacgtgacagttcagggctcccttaagtgctaaagcagaagctgcaaggctttcttaaggtttcgagtgttgctgggagaaatctgctgcatgttgtgggttaaagggagtctctcaccagcccaggccctcaggaggaggagataccaggaggcagggatgctgggggtcgtggttcactgggggctctctctgcccatgagctgccacacagcacctttgccatgccccgtaatttggattttatggtggttgtgatggaaagccatttgagggttttgaacagggaggcaatgtaatcagatttatgccttagaactggactatccaataggttgccaccagccacataaggctatttaaattaattcaaattaaatgtacaattcagtcactcattctcatcaaccacatttcaagtgctcaaagccacgtgctggctaggggccacagcgttagacagtgcagagagaaagcacttccatcgctgaggaaagttctgctggaccgcacacccttagaaggatggctctggtggccgggcgcggtggctcaaacctgtaatcccagcactttgggaggccgaggtgggtggatcacgaggtcaggagatcgagaccatcccggctaacatggtgaaaccctgcctctactaaaaatacaaaaaaaaacaaaattagccgggcgtggttgcgggcacctgtagtcccagctactcaggaggctgaggcgggagaatggcatgaacccgggaggtggagcttgcagtgagccaagatcgtaccactgcactccagtctgggcgacagagtgagactccatctcaaaacaaacaaaaaaaggatggggctgggctggagagggtggcaggcagtggttgtggcagtggagctggggagatgtggtcggattagggaggtagaatcaataagactcagtgaagaatcggatgtgggggtaagggcacatgtggaagcaaagaaacctttgacgtctttgtcttgacaaccgggtggtcctgtttctagacatggaagcttagaaaagcctggagtctgtgggaagtaggtagggctgggcactggtcattccactctggtttcctttggggttcccattaggtgtctacagggagaggtgaaattggaagttggaggtgtggagagttcaggagagggttctggaccacagatgttgaggtgggagtcattagtgaatagatgatgttggaagtcatgggtcctcagagtgggggctccttaagcctccaggccagcagcatcagcatcacctgggagattgttaggaatgcagattctcaggcccccctaagacccaccgactctgtgctagaacaagcgcccctcagagattctgatgccactgaagtttgaggagcattggtttaagcaagattacctacggagaggctgtagatccgtgttctaaacctggggtccacagacacccccaagaagagcggattgaatgcaagagatctatgaagttggatgggggaaaaattgacatctttatttttgctaaactcgatctaaagtttagcatttccatctgcgatgaatgtaggccacaaaccacagtagtattagcagtgcctgggacctcctcaacaacagaaattgccggtatttatagcacgttacagttgttgcagataatttccagagactgtttatatgcaccactgttttaaaattacggtgattggccaggtgcagtggctcacacctgtaatcccagcactttgggaggccaaagtgggtggatcacttgaggagttcaagaccagcctggtcaacatgtcaaaaccctgtacctacaaaaaaatacaaaagttaaccaagcctatgcttgtagtcacagctactcgggaggccgaggtgggagggtcttctgagcccagggaggtagaggcttcagtgagctgagatcgcaccaccacactccagcctgggtgacagagtgaaacccttaatcaatcagtcaataaaaattacagtaattattagacccaccactaggtcatcttatttgatgcatcagtaaagcagcatattcaaatgtggatttttaaatattttaattactatttaaatatctctttactttgtaatcctatgcattttacgcattaaaacattttaagcattt

SEQ ID NO: 13311 - DNA, 228 bp, Homo sapiens
atagaacctgttgtgcaaccacggtttaaccggagattttgaggctagggtgtgtttctttcgaacttttcggaatgtctggaacatttcatttcctgttttgttacctgtgcctctgtaaatctacttttgcaattttaagtaataattttatgaataaaaatgggaaatgcttcctaattccacatagtatttgcattgttttataaataaattccacttactatc

SEQ ID NO: 13312 - DNA, 499 bp, Homo sapiens
gtcacgagaagagaatgccttctagatgcaaaatcacctccaaaccagaccacttttcttgacttgcctgttttggccattagctgccttaaacgttaacagcacatttgaatgccttattctacaatgcagcgtgttttcctttgccttttttgcactttggtgaattacgtgcctccataacctgaactgtgccgactccacaaaacgattatgtactcttctgagatagaagatgctgttcttctgagagatacgttactctctccttggaatctgtggatttgaagatggctcctgccttctcacgtgggaatcagtgaagtgtttagaaactgctgcaagacaaacaagactccagtggggtggtcagtaggagagcacgttcagagggaagagccatctcaacagaatcgcaccaaactatactttcaggatgaatttcttctttctgccatcttttggaataaatattttcctcctttctatggaaatctgg

SEQ ID NO: 13313 - DNA, 3213 bp, Homo sapiens
tcagcctcattggaccactggtcagaaatgtctgcgttttgtcacgttatccattgtaaattttcattctgttttgcatgtcagttagcattatgtaaacatttacaattaggttacattgttttaagaactaagtagcataagtgaagcatgatccaaaatacttgattattgcattttcagagcataaaccatgattaaaactgctactggcatcagaattgaaaatcatatgtttaagtaaatgttaggtacagattacaaaaatctgttaaagcaaaacattttggaggagtgaaatagtaaaatgccaagtattgtggcagatttatgctctgaaccacacaaaaaaattgaggaagcatttttttaaacagtcggtttaaattgtttttagaattattgctttttgttctaattttccacaaccattaatctcacttgtatatggcacacccagcacttgtgcctgtgggccatattagatgttcattgtcagagctcaagatgatatatataaatatatatatatatatatatatatacacacacacacacaaatgtctgtgcaagtaagaaaaaaaaagcatattctttgtgccttgtattttggggaaactctaaaactggtaatattttgtatgatgaaaaccctaatgagaaaaaacaagatatatagatggaaaaattatggggtttaaatgtttttttgttccaactctttttcagattttttgaatgtatataggactatgttgaaatgtagatatatgccacagagtctgtgtattgtataaaaaacaaaacaaaaaacaacaaaaaaaagatggctctagaaaactcatatttcggtacttgaccggaagaagacaaatacttgcacattattgcgattgttttattttttgtaccaaagacaaatgcaactgatatggcaaactgccagtctaagtaaagttttgcacagcttacatgatactgtatgaatgtatgaaaaaaaaggagaaaaaaaagaaaaaaaaaggtcagggttagggatcttactgaactgtgaattttatttctgtttgggtccaattatctacagaaggagcatccatacatacaaatattattttgctgttcctctagttcgcttccatagtagataagttggtggccatttagatgtcttttatttctgcacttattgtaggaaattttaatatatttcattttagtaagctattgataaaatagtttttgactttgaaaattaaaatgtttatttagcttattgtagtatacttccaccagacaacaaaatagattatttttattgtattatgtatatatatatatgtaaagaaagaaaaaagctaaaaatatctaattctttagttgccacttttccgattgatgtattattgtgcatgtaatattttcaaagatcaacacaggctaaaacaaaaacaatttatagatttttatatttttgtacaggtattttcaaactagcttcttcaaacttaacatgtgacttattcttctatagtttctagaattgagaaacattaacacatttagtttttaggtgctcttttttgctcatataaaacagcttcattagtcagtgttttaactgtgttcaagctttacctcttgatgagaaatttcttatgtcaaggcagcattataaaccttcccccacagatttttccatcctgtctctcttactgttttattctcaaatcttgtgctttgaactctgaaaactggtggcttaaaaactaaaaaaagaaaaaaagcatatttagcaaggaaaaaaataccaaaaatttcaggcatagctgctggaaaaattatctatttctccattacccactgtaggatttcttttttaattatactttgactataaagtgtcaaagtataatttgttcttttcttttactttgttaccccatttgtaagctatagcatatgaagctatatatatagcttgtgaaggtttgatctagaacacccagtaacaaatgaacaatgttgcttacctgcttctttgacatcttaaaaaagaaatccaaggaggattgtaaggattgtcttaccaccttagctgaactgtgatgcacaagatttttctatgtgtttggtggaaatgtacctggtttgtacattcacgctaaacagatgataagctcaagtctgatggtttaatagaatgtaagttcatcgtttaaagcttttcctttttaggttggagaaggcaaaacacaggcttgcaagttggaagtatatgaagtcttgacagagtgtgtctggtaaattgaaaagtgtttcaaactatggcagttttgcaatcaggtgaaaatcacctcatgatattcagctgataaggtttataaaattgcccctttctagctgctctgttaggaattctggtttttgatacttttttcctgtctgcaaaccagaatttgattttttggtcttgcatttcaaaaaaaaaaagactttgaatctgtttagtagattccatatctttgagtttcagtgttttatatgtactacttaagttaaatagttaaaagcttttaaatagttgagctttttaatgttgacactttattttgtacctatttatatatgtatgtatatcttagaaaagcactttgttaaaaaaaaattgcattttatatgattcctgccatttgctgctaaatctgggctggtcagaatgctgcagcgatacttgatctatataaaaacctggcagtaaaatgtagagtgaaagttaaatcctcttgctgttttaactttatcataaagatgacataggcaagctgtgcagctttacattttaaccaggggactctgtggcatttaaaaccgtctagaaatggttgtactttaatgccagtaataatctgcttcctctattgtcattaaaatatatacgtttagtgtatcacacaaaccaatcttataagggtaatgtaaaaaccccaacaattgtacatgttctgtttttgaaaattgtggcatgtatttttgggtgaagatcattagagaagagttctctaaaggttttctgtgttcatacatggtatacagatagctcataatgaagtccagaatcttacttttaagtgaaggcattgtgaattcacctcaagtaaacccattgttccaaagcaattataaactttgactctagtactactatgattt

SEQ ID NO: 13314 - DNA, 466 bp, Homo sapiens
gatcccaaaggtgccagttctggccctttcagctcctgtttcaggatctgtcctggttcctgagctctaggctgctaagctgagccacacacccctccgtttgcaccagttgcctgcaggttggatggaacacagtgccccacttttctgcaagtagctggcttgtaaagggtgaacagagccatgggaggaaggtctggcattgggatgccgccctggggacatacgaaccgcctccttccaccattgtgcactatgggaggccgctgctgcgtggagcacttaaagtccagcctccaggaccggatgcccctcctgtctcccgctcccatcgtgcccttaaatgccagatctggtggagggaagagagaagaggtaggaagaaaggtgatgaaaactcctggtcattccttgaataaacttgattttatttaatagaataaaatgtatttgattttgtaagata

SEQ ID NO: 13315 - DNA, 4170 bp, Homo sapiens
aggataactgcagtgctcattttcaggcctcagaataagtgcactcttctgttcattctgaccccttcctcaacctcttcacgctggcatgtccttttgtagcagtctgtaacttaactatagtataatgaaaagaatgacctataatataggtgttttgtagattcttgtgtcactgcaaacaatatgaactcctttttcgtattgccatcgggttgcatggaagttttattctcttgttttgctggaaaccaagaggatccaaacttcctgcaacattttcttagaggagagagagaaatattaaaagagaaatgaaacaatagagtattttgggtttttaattaaattattgttaataatataacatataagaatacttttattaaaataaccatgcaacaataacactatcggtctatctgacagtttttcccccagggaagtgcttttgccttttcctttcttttttttttttttttcatcttttttgtctctctcttttttccatccctttttaatttttttaacagcaatggaggaagttaacaatttttaatggaaagagcatgttagagcaaacaaatgcataagcaagactgagcagcattataattaattttcagggttttgaggctgaacataatttcattatccctcaaaaagttaccaccacatcagaaaaaataaaaaaaaaatagtaaagtaggcagagctaggtttattttctcttaaacaatttttaaaattcagaatgtaaaaattgggtaaatttactactgaggggagtgcacttatttatttaacttacttatctggtcaaagccccaggaaacctaccaaagctagaattaatgacaactggtgggaaacctagcatttcctctcctgaagaataaatgtataaatgttatttttgatgtttatatataaactctatatcctaatttactaatactcatcagatgtcagcctttgctctccattttgacgttaaaaaacaacaacagatctagagatacctcaaggatatcatttttgattttgtgttacagtacacttgtagccaaaactggaagacaaaaccaatatataatttggctgctgattggcttacttttagatttaaagttactttgggtatcctgtaatttagttgtaacatagaaaatgaaaaaacagttaaaaaaagtgaagtagttgcaaagtgttttgcactgttgaactaagtaactgtgtaaatctgtgcaaaggtacgtatgtttatcttactcttcctataaactaaaataacattacagtttccgaatttagcatgggacatagtcagtgtttgaagtgccaacttcatcaagtaatgcatgctttattataaataaaattctagctttgaaaggcgttatgtgttgaacagtatgcttcaggggtaaatttaaaatagtctcttgaagccctagtcatggaagtaacttttattttaattgacattctcttattaaatgccctatccatcattaaaaggtttattatcagtgggcaaaacatgaaataatatgatcgaatggcaatcttgctagttgcgctacctaacagtaccatcttggatccttcaaaaccaaagacttgccccagcactgctgtggaaccacctggcttatgacccctatggatgatctttaggaaaagcagccctttacttttaatacaggctttaatgaactatacctgttaagttccaaaggtcaaaatggaggcatttgctgtctaatattcaaacatagaaagggagctgcttttaaagaattccctgcaaatactgaaagcagtcatgcgaatggagggtgctcttgtgtagctggtcagggacttttttttcttttctcctgaactacatgattctaattggaatgttcatttgcctctttttactcttttaaatgcttgtaggtggcttggggtgtgctatcgtgctgttcctactcagtaaacaggtgtgatgagttaacaagaaataacactgtttgagaactagctttgaataataatttttccctttgtacatgacctgctgaatttcggtacagtgtttttgtagctaacttattttgtcatgcacataatgtatatttgttatgcactacttttgtatatcttgtttttccaacagtgaacatttttaggcacacttttcactgacgggatatctctttatgcaatacctcaatttttcatattgcaaagagtagctttttgtacttttattactgagagatcttcatatacttcattttttaatataaataattttaataaattttattttcttatattctgctttttatacatttcagtgctctgcatacattttaaattatgaatgtcgtgcactggcaatgctattttagagtctgcagagaagagaaagcatgttgcttaaacatccttccccagcaccagctattggtgtacctataatttaagaaatagtctatgtaaagtcacaaattaatgaaaaaaattcgcatgaaaatgacagataacactgtagttcctaaaaaaaaaattaaatgcataagcataaggtagaaattaaaataacaaaattgtctacagcttcttactaagtttttaaaattattcataaaatgcagacatttttggtgaatgtttagccatttttaatattaataaattgatgttaagtgtttgattcagagatgtctgctcttttaaattatatataaggaaaaaaaatagcctgccttgggacaggtgtgtaatgttagtgtgcatgactaatgtaagaaattgttattctactaatatttacttgtgattgtgtgacaagtgtgtttacagattattggttacacttcaatttacagggcataaacaatgattatctattactctgaactttatgattacatgttcttcagattacatgggattgtagttgggagttaccatgtaactcaaacataattaacatgtaattagtttacagattgtagggcatcacttcaattcaccaagcatgtagttctagcgcactagcatggcgccagccatgtacttacaatgtagttacagagtaattacatggtgatttttgcaatgtaaaataaagtgtttctgattattttctatgtaaaggaaccctctcctttccccttctggtccctgcgctttggtataatatatatacttctccatacacagacctctgcagaatgcaaaataaaacttgcagtgaatgaatttagcattttatgagagtgctgttggaaagacttgataattcaccccttttgttttgaagagttgaatcttctgttaaaaggtgatttaaaacttgaatgtgatgaattgtggcaagttaacttcaagttatgtgcaatacttatttcaaacttttgaaagatctttgcagtgtaattctttgtttttaattgcagacatttaaaaatgtcattttctactgttaagagtaatcctctttcttgctggtgtttctaaagaaaagaatcagaaatcaatctttctactaatgtaaatttgagattatttttaaaaatggaataaaagaggttttggtcatttgctttattttattattttaaagctactgtgattgatagcattgtaagaatcgggacaatattgtattcaactgttttattttttatatttttaaaatttaaagtataattagtttttataattttcatcagatttttgttatattttttggaagtgaaacttttagcaagtgggtgtctagtttttactaatccctaattttttttccagtgtattgctcatattatcagaaggaaaagttatttaagtatgtcagttaattgtactacttggctgaatttccatatagtttttactgtgtatggggaggttgtagtatttattatagcattttaaataagggtaattcattttttattaaagtcattttcacgttaagttcctatttttgtatgttctactcttaagttatataacacagttccttttttaaaagagttcatttgttgaagtgctagtgaaaaattaatgttattaaatagtttgcaaatgactatttataccagtatgcatataatttttaaatatttgtaatgtgagatgttgaatgaataaaacttttaactc

SEQ ID NO: 13316 - DNA, 1673 bp, Homo sapiens
aggcctgccccagccagaatggggggcggggtggagaggaggacccccattggctaagccaagctccagttacaagacaacactgtactcctgggatatgggggcgggggcggggcagggcagggtggggggaagaacgcaccaaaaacgtggtgtgtgctggagttgtctgaaccgatatttctttttgttccttggtattgttgattcgtcgccgagtcaggctcatgtacaaaggcatgtttcgtgttgattgttcccatgtaagatatttttaaagccactgcttattctttgttaggaaaatgtaacagcagaaaaggaaagaaacaaagaacatgaacaaaaagcattaaactggctccatcagaagacgttgaagggcagtgaagagcacagactctgtgggcttcttagataagaaaacgtagcttcagtgggggctccagggttgcagagtatgagtgacacagaccgggactattccattagcctgtggtctgcagggtaggcccgcaggaaatgaggaatggccgagctggagagaagagctgattttggcattactaagcccagaacgcacataacccatagtgaaatgtgctggcctctggtgcattttgcaagatgagcacaaactttctgggcctccatcctaggacctgggcagacccacatggcctgggctctgaatgcccaccctgcgacggtgggttctgcatcagcaaacgctgaggagtgggcagattttctttgtcttttgcttgcattttctagatccacacctggatactgcccatgttgacgagacagcagcagggggagagggagggaaggaaggtgcggctgcaagaaggaaggcacgggacaggcatgtgacactaggccacaagcgataagcacaggcacctgacttttaagtttttgtttgtttgttgtttcccaaagtgctgataacaataacaacaacaataggattccaaccaggagcctcaagtgacagccaggaagagacctgaaggttggggccaccacaatgccaaatcgtttctaaaggaagctgaaaaatgggactgtcttttgcccacttcgttgtgttaaaaggggacatttgtccaaactccccaaccgagttctagaagctcctgacaaggaggcagcatccagccttgaccaggcctcccagttccctggaaccgtatcaggcattcgcctgcctctcacaaatgtttcagggaggccagttctgcagggtgtcagctccaggacccacagggccagaaccagctgggagaattggttatttgagatgtggtactgcttcctcacaagtctcccacaggccatgtaaagggtatttttttgtggcttgctgtgttgctgagatcatcgtatgcaacagctgggtaataagactagcatagctcaaactatcctgccaaacgctctcatctgatttttcctcccttctcccccaacctccaatcaccctgagtcacctgtaaattcatttgtcattcaaagcggaataacaagttgtccctagcaaaaccgctgagcgctttataattttgtggtgtatttttgtcagtaggtagcagaggcggaagtattttttggtgtaattcttgaaattttctgacaggaaacaaataaagatagatgtgtctgag

SEQ ID NO: 13317 - DNA, 1315 bp, Homo sapiens
ggaagaccagatcaatagactccatgatggatgcttgtttcaaagggtttcctctccctctccacgaaggcagtaccagccagtactcctgctctgctaaccctgcgtgcaccaccctaagcggctaggctgacagggccacacgacatagctgaaatttgttctgtaggcggaggcaccaagccctgttttcttggtgtaatcttccagatgcccccttttcctttcacaaagattggctctgatggtttttatgtataaatatatatatataataaaatataatacatttttatacagcagacgtaaaaattcaaattattttaaaaggcaaaatttatatacatatgtgctttttttctatatctcaccttcccaaaagacactgtgtaagtccatttgttgtattttcttaaagagggagacaaattatttgcaaaatgtgctaaagtcaatgatttttacgggattattgacttctgcttatggaaaacaaagaaacagacacaatgcacacagaaaatattagatatggagagattattcaaagtgaaggggacacatcatatttctgcattttacttgcattaaaagaaacctctttatatactacagttgttcctatctctcccccgccccccaccgccccaccacacacatatttttaaagtttttccttttttaagaatatttttgtaagaccaatacctgggatgagaagaatcctgagactgcctggaggtgaggtagaaaattagaaatacttcctaattcttctcaaggctgttggtaactttatttcagataattggagagtaaaatgttaaaacctgttgagaggaattgatggtttctgagaaatactaggtacattcatcctcacagattgcaaaggtgatttgggtgggggtttagtaattttctgcttaaaaaatgagtatcttgtaaccattacctatatgctaaatattcttgaacaattagtagatccagaaagaaaaaaaaatatgctttctctgtgtgtgtacctgttgtatgtcctaaacttattagaaaattttatatacttttttacatgttggggggcagaaggtaaagccatgttttgacttggtgaaaatgggattgtcaaacagcccattaagttccctggtatttcaccttcctgtccatctgtcccctccctccggtatacctttatccctttgaaagggtgcttgtacaatttgatatattttattgaagagttatctcttattctgaattaaattaagcatttgttttattgcagtaaagtttgtccaaactcacaatt

SEQ ID NO: 13318 - DNA, 1875 bp, Homo sapiens
agcagggaggaaacctctgcagctcattctgccactgcaaagctggtgtagccatgctggtgagaaaaatcctgttcaacctgggttctcccagttacggaaaccttttaaagatccacattagccttttagaataaagctgctactttaacagagcacctggcgtgggccaagtgcctgatactcccttacactgaatcatgttatgatttatagaaatacctttcctgtagcttttatagtcattgtttttcaaagacgatataccagccctcacccaggttttaaaaaagcactggtaggcatagaataggtgctcagtatatggtcagtaaatgttctattgattatcaatcagtgaaaaaagaaatctgtttaaaatactgaattttcatctcactcccattgcaaatcaaggagatctcagcagtgaactgggaaaatacaaaagctctgggctaatctataaaaacttaccctgaaatattaagggcagtttgcttctagtttggggattgcgctagcccaatgaaggtgatgaagcttttggatttggagggtaaaagctccttcacaccccttccaaaagtcagtcacagaccactgcaacatgccttccctgctggatcattatatacattcagattgtgagtggattgccttggttgacttttaatttattgttttttgttcttataaagatgataatcttaccttgcagttattgactttatattcaattatttacatcaaataatgaaataactgaaatgtacaaatgtcaaattttggaagtatattcaataccaatgctgtatgagtgggctgaatccagttcattgttttttttttggtaagaagtgagactacagttccagctacctacatgtcttttcttgtcatccttatagatctctttggctttcagaaagatacagtgataatgtgtgtatgaatcagtcacaatgaattttacttgaatattgtatgttgcattccacttcatttgaaaataatgaaaccatgtaccactgtttacatcatctgtagtgatttcatagataatatatttaatatgacagattatgtttcaactctgtagatgtttaacgtcatagacagttggccctctgtatccgtgagctctatatctgtgaattcaaccaagtttggatggaaaattttttttttttttttttttttgagacggagtctcgctctgtcacccaggctggagtgcagtggcgtagtctcggctcactgcaagctccgcctcccgggttcacgccgttctcctgcctcagcctctctgagaagctgggactacaggcgcccgccaccacgcccggctaatttttttgtatttttagtagagacggggtttcactgtggtctcgatctcctgacctcgtgatccgcccgccttggcctcccaaggtgctgggattacaagcgtgagccaccgcacccggcctgaaaatattttctaaaaagataaaaaatatacataacgatgaaaaataatacaaatttaaaaaccaatacagtataacaactatttacatagtgcttacattgtattaggtgttataagcaatctagagatgatttagcaagtatacaggaggatgtgcctaggttatatgcaaatactgtgccattttatatcaggaacttgagcatctgcagatattggtatcggagggcggtcctggaaccaagcatccacggatactgaggggtgacatttcatgaagtgtagatcattgtattcagagattgtaaatgaaaaaaatatagaaactatttagttttggtagattttttttctgacaatgtgaccagactgaatttcctcataaagaaaaaatggcg

SEQ ID NO: 13319 - DNA, 240 bp, Homo sapiens
tagccctagccattggtgcacaggatgggggcaatgggaggggatgctactgatgggaatgattaagggagctgctgtttaggtggtgctggtttatgttctaggaactcttcatgagcactttgtaaacaccctcttgcttaatcctcccaacggcccccaaaggtagaacttagctcccttttaaaaggagcacattaaaattctcagaggacttggcaagggccgcacagctggggc

SEQ ID NO: 13320 - DNA, 3975 bp, Homo sapiens
ccaggcctcctgccccagcctactccacctgttactacttctttttggttctttcttttctttttattaggttaagtctcaattctgaaggggaaaacctcagttggcctctgcccctcttccctggccaggggcttctccccctcagctctccctcacacctcccttcatcccagggtatccacctgcaccccactcccaagtagcttgaaaaagggaggacagtctttccccagcaggggtcaggggggcccctcaggaagcctaaggtcgtgctagtgtggtgacccccatacattcctccctgctccccactgccaggaggaccactgtccccagccagccaaagtaatgacacattccagccctgcccagcatgctgacctttggcctctaaccctcagtgggcccccaggtcagggcaggggcactgagtggcctggctctgaggaagggagtcaggggaagcctgtcccgggaaggcccaggctgagaggccctggctctggccaggctgggatctgggtgggaggctggggctcttcttcttccatctccttggtgacacccagcccaggggcacccccttccccagcccccacctggagagacatggcccctgccaagctggtcccttcaaatggatcctttgtggactttagctcatttgtggaggaaccccaggtagggacgccccttgttcctcacccccaccccacttaggtcctgggcccccactgccaggctgggcccagcttgctcagtcaaggggctgccaggcccccagaaaacacttggagccatcgggtagcgatggtctatgccatggggaacacctccattggtgtggccaagctgcccccattcctatccacccctctccccaccccgtcctgtccatgcgcttccagggccccacggtccccaggaggacgcttcctggccaaagccccaagcctttggtgagaagccaattcccacttgacagaaggcgtccatccattcatctcattggccaaggacaaactctcctctgggacgtctgggactggcatttgtcccccactcaaattatcaaagctttctgctcagtcagttgtgtggggatggtgagggaagaggggtcacatgagggaggaaactgtatccatgcatgcatgataatgcgtggcagagactgcaacagggattgtgtgttcagagatcatatgcatatgtgtagggctggagcgtgtgtgtgtcttgagattgtgtgtgttgcagtcatcatatctatgtgttacagattgtgtatgttagccttgtgtatgtgtgcttgattgaggtggtgtatttgggttgaaattgtgtcatatgtgtgtgctatccatctcgtgtttagaggctgtatatgttagcttgtgtaagaatgtgttttcaaaacagtgtgtgtattgggagtgatgggtatgtgttaggtatgtgatgggttgtagaagcgtgtgtttgagagaattcagagacatttgaaggctgctgtgtgcatgtttgggggtctgaaaagacagttgtgtgcatggatgtgtgcgtggggagaaagaacgtgggtaagatgtcccttcccagccctgagaccactggtcacagttggccacctccaacgggagaccttgtccttggcctagagtcctcccacccttggggggctcctgcctgaggtcctcagaatcccactgcaatggacccaggcagcgccccaggaagccatgctgggcccccgccagggcctatcccaaaagcaggggccagggagggggcgacttgcctgcccctgaagcccttgttcccattggccccagtttgcattctgcaggttttccattttagtgggttctgcttttatttcagagacagacatgtgtcttctctgtccgtttccaataggtaaagccatatcagttagactgcaatactttaaacacgagacaaaacaatccatatgtttagggaaccagaaaagtcccctggtctgtcccttctttggggagcagggcctcgacagctccagctcccttgacctaccttcctccccgcaccccgcccccaccttgtgcccctgtgtccagccccccagggggcctgtgtctgtgtctgtgcctgtgtctgtgatggggagccgcctcgcacccctgttgtctgcttgtctctttgtgtctgttatcctgggcaggatggtcattctcaaaaaccctggggtcctgggccagagacaggcagggcccagtccaggggccccaggcctccccagtcccagtgtgcgagccccacttggacacaagtgttcagagaggtccccctctgccacttgacagggaccttcaaacctcgacagtgatgcaaggacacagagagtaccagataggtagcagagaccaaggcgcagggtgcttcagatgagcaagagaacccagtcgaaccagataccccaggtgggccggagggaccccagaccttcagagggctgccctggtgttctccacagtgcagtccctctgtattcccagagtgggatcggggctttcagccccaccctgatgcctgccctccaggatggctggtttagtctgggtccatgtcccagacccctctattctgctccaggacagcaggacttcaggtcttcctgggggtggatataggagaaaatttctgcctggcacacacctggctccaaccactgccaagtgatcactcttaggcccaggggaacacaatgactatcattactgatgcagacctggctgtggagagcagctaatgtgtggcccagagagcctgtctgtgtggagcacgtagtgcacagaatacgtgagagttgctctggcaggggcagaatcctcacaggatcgcctgggaggtgaggtgtgtgtgacccactggatgggagggcaatgagtgtgcacatacaaatggggcagtgtgcatgcaacacacttaggggaggagtggccccagaattcagcacgcacacaacacacaagggagagaacccccagatgagaaaataggaaggagcaatcatttgtagatgggtgaaaaaagaatgaggttcaagggagcgtgcaccaggtgaggtgagcgtgtgtgctctcagggaagggcccaggatcccatgcctgggaggagctgccagagagaagcaaaaaggcggctgtggatcgccctgggctgggcaccagtgacaggtcaggatctccaaacatggacgtcctcccctccaaatccagaagctcccagaaggtgtccttaactgcaaagctgtgcagggtactcctccagatggaatcaggaagtcgagacaccatcccaggtgtgtgtaagagagagagagagaacagggaggatacagaagtattgcagcccagatcccctatcagggggacagctggtgggcaaagcagccaccccacagccttgtggctagagtacagtggggtagaccctccagccccaatagccctagtacccagctggcagggttgcccacccctgctgtccacctgctccatcctctagggttccacaggcccctgaccgcacagggaggctggggccagcctggtctcccaggcctgaggacatgcctcccaccaaatgtcccctgctccagtcccactcctgtcaccccacgctctgcactggggagaaaacgggaggtgctcgtgctggccctgggtgggagcggggagtcctggtgagaccccggtgagatggaccatcctgcccccgtgggggatcccctttcccacatccgtgctgtgtcattgttgctctgcttcctttcaatgtgtcagtgcctggggggaggggaggagcaccccctcagcccccctgaacctgaccaaaagccatggctgttgctcccccctttgtatgatgcaaatgctgaaatgtacaaaatcaaccatgacaacaaagaaaaagaccttgtacagc

SEQ ID NO: 13321 - DNA, 542 bp, Homo sapiens
gggcctgccaagcactgaatgccaagaatacctcctgaactctctctccaactgctcagaagctctaaaagcatgaaaagtggttaaaatcttacaggaccaaacctgcattatttaatcagtaggttgtaatttctaactctagtaaatatctttttttaaataatcctatcctagcctgttctcaaatatggcttaaatatacaaggtatatatattttttaataaattatttatctatacttttttgaaacaggttaatactctgtgcatcacatgtttaacattttcattcaagatgtggaaaaaatccctctgctgaacctagtctatacaccaatattatgtcattcaaggtaccgacaacctgtttcaggagagagacgttcatttttccctaatgaaatgcaagcattctgttagacctattatattgcctgttaatttgactgtaatgaatagggggtagaaacaaaaggatcaagtgtgttataaaacatttgatgttaaaaggagacaataaaaaggcaatggtttttcaa

SEQ ID NO: 13322 - DNA, 1605 bp, Homo sapiens
gctggagctctcctgcttgccacctgcctgtcaagaccatagttgtactgctgctgcttcattgccagactgggcctggggcaagagccacatggcagcatttcccttttcccctcctttgcctttcaagagcagggcctgggcaaggccaagaaccatgcagaagccttcctggtgaggtggccgtgaagccgaagcagggaggtgggtgagacagagggtggggaggatagtgtctggctcattccaggctggaatgtggatccagctttcccttctcttacctgtacagtgagatgctcagtgggctcaatcctccactacaggtcccggtacctgaggaaccagtgtaggtgtcagaaatactcctagagcctcaaggtctcccagtccagaaacagtctggtgacgtcatgcccttctcatgtgggcagcttctgagtggtgacacagcaagcctttgttcctgtcctgcattgtccagccccagctccacctaagtgacttgtggccttgtgcaatctctgcctctctgaccccagggccattatttttaaagggaggtggtttcctaattcggagatgcctttcccagccatgggagtgtgaagtgctaggatgaacctggccatcctagcaaggagctttctgaagacctccctgcctttccctgagcccaggcctggcctgccagcctctcttgactacagaataactgatattcacccaccaaacagaaaaagtgaaggctgggtttttcccctctaatctggagacaagctgctgctctcgtactaactgtgccagtgcccatgtttacagaagtcaggggaaggaaggagcctgtgtccctgggacgacagtcaactggagctaggtgttgacctcagaactgcattttatttattaatttataagcagaacaggccagagttctaggctctgtttctaggtgctgttttcaaaaccccagatgacagtcatagaaaatttggaacttaggaaaatagctggaatcatgaatgacaatgagataacatacagatgtcagtggagacaaagttgtgggttcctcctcccacctggctttgaggctgtcgtcgatatcatagtactttacatggattcacatgaactgaaacgccaccacttggcccaggatgttgaaagggtgcaaattccttctgggtagataagaaatgactctgggagaggatttcccttatgtgaatctaggtaaaaagatggaaaaaaattgtattatgtgatcctaaggacaggaatagcagaccagccaacgggatggccttgggtacatcactcagcctttctggacccaatttttccccagtgaaagccaagttggactgaatttctggagttctcatcagtgcacattccatagttctccagtgcttggcgatcagcccaattgaaggactggctctgtactgacacttattatcggtacaggcaaagaggagcctgttgtctgttagggaccactaaatcaacaaccacaaatggattttttttttaagaggagctgtgcacctcaatttgctgtctagttgagaatagagattgtgtgccttcatttcattt

SEQ ID NO: 13323 - DNA, 252 bp, Homo sapiens
gcccagggtctggccttgaaagctccgcagaaatgattccaaaacccagggagcaaccactggccctaccgtgggacttactccctcctctcctttgagaggcccatgtgtcgctggggaggaagtgaccctttgtgtaactgtaaccgaaagttttttcaaaaatcctagatgctgttgtttgaatgttacatacttctatttgtgccacatctcccctccactcccctgcttaataaactctaaaaatcc

SEQ ID NO: 13324 - DNA, 3124 bp, Homo sapiens
catttttttcttcctgtcccctcctaccccagtccctaaaagaaatggggaaaaaagaaaacaacagcaagtcagaaaaaaaaaacaagagagagaaattcatattattattattattataatacaatattttttttaaaagactgctgcatccttaggaaggatcagaaaccatgctgcccgtaagagtcacaacctgtgtgtgcgcgcaaggttagcaacaaacgtacccgcttggcaagcccacccttcctgtggcctctgtgcacgcaccttccagtgaacagagactcttcaccttcgacccatccattgtcccagctgggaaggggacattcccactagttctcattcattcttgcttttatgaaaaataaaagtgaaaaacctccatcaaccagctacttgcagcatctcctgaggacttgcttctcctgcctctggggaagagagggaagagaaagcacagagcagagaagcagagatgttccttgaactgcccacaagttttcaataacttttatttctgttttgtaatgaccaaaggaatgaggctgacataggtatatatatatatttttttcctttatttgataaagagccaattctttaaacccatgagtttatgccctgggctccttagcccacaatagtgtaataaaagtgccccgggctggtttgtgcttatttctgccattgtccctctcacgttcccagagaggtcattctttttggtccaactcttgctgtcctttcttaccacctgtgcaccccacttggagcagtgggaggaaatctgggtttgtggccccacaaaggctgtatatgtaaagatacacctatgtatgtggtggaactcacctttacacacaactgcagcttttccttggagtctgtaccaggtggtggttatggggtctgaaccaaaggatagcagctcttcattcctcttctgacatgtgcatgctgctccccccagccctgggctttcctgaattgccaagcctggtgcctttccaaaggactagcagggcctgtggtggagccagcagaaccacaggagagtgccctgcctgtctcagtggaagtgtattattgttttaaggatagaaccagaggccttgaagggagccaagacagaactcccagcctgtgtaatctattggaaggcacattttcatttctgatgcagccaccttctggaggcagcttttatcctttctctctattgctatgttgaagtaatagggttttttttaacctctggatgtctcgtctgtggttgagtttatggtaatgggtacatgggtcaggccatgtattaacagatgccagtgcgctctgacaagtattccaaagtgttctgtagctagactggtgcaggctcgttgtaccactgcaaccgactgacgttactgtagttcctagaatgctgtgagggcggggggttcagatcaacataaagcctaacttgctggagttgtagtctcaaggctttctctcttgcttaactaaaacctaaggaccactgtttttggtagcaattatatggttactatccactgcagtcctcagttgttggggtaaatcccacatggcagagtaaggcaccccacagaaattaacttggagagcctgagaaattcccagtggccttggcatagctgtctagaacaccatctctaggaaaatttaattctgtccctggccagctattgttcttccacttcgttttctgctgtcccaaggccagatgagtggaatcaccatctgactgctgtcaataaaatgtatctggcgtgaacagcaggataacccatgttctccacataaggataaccttacgtgaaaccttcctgctgacaaccatgcagaggaatttttccacttaagtcagagccttcctccccatctggaattcacagctgttccctggcagcacacaggagggtattaaggacctttgtgaggctaggtacactgtccacacctctttggggaagttacgattttttttttccatcataattcagtctcttcttattctacagtgtgcactttatgcctctcgccttttgataatagttgttcagtgaaggaagtcagctgccagaatattaagaagggtctccctttatgtcagtacaactgttagggcggccttcccatttactttaggtttcaagaggattcaccggaagcacatgccccggtctagtcccatttgaaacagttctgctttactgagaccctaggccggtctccttgctgaccctagcgctgctgcctaggtgccatttcctttcctcctcagtcaaatacaggctgcacattttgtcacttaatgccagtacaatctgtgttactcctaaggacttttgggattttgatgagacctgcgagggagaagacactgagaagccagtgatctgcaagcatttgctcttgtttccacatcacctctgggatatttcagctgttgtttccaaatggcaaatcatcaactaaaagcacttgtttcaagttttgttctgcactcccacgactgaagttgtagattgagctgaataaccatgggaagtgaccaagcaaagacactcgattggagtcagttgaatatttgtaccctcagtggagcccttctggtcttttcttccacttctgcagaatttcctctagcaaatacttctttctccttgcttgcctccaccatgatatttgaataagagatggccagaggataacacttgtctcttaaaaactaagctaaaaagaacctagaaccttcaattgagcagttgtgaaaattgctaatggtgccaaggccaagcaaagagtttcagaaaatgactgagaaggagcgataacccccagaatgcaaaatcaggggcatcattatccggtgcttgaacaaggagctccgctctacaactggtttttttaggacttgtgaggaacacagcaacggaaatccatccacaaaggatgcagtgccccaacttgtactgcgcctgaatagtcatgtgataatttactgaagaaatctagtgtactttaaatttttttcataaaagtttacattgtattgtaggttaacattaaatgttttatagcaaaaacttca

SEQ ID NO: 13325 - DNA, 96 bp, Homo sapiens
caggggcccccactcttctggaccccttgaagaggccctaccacaccctaactgcacctgtctccctggagatgaaaatatatgacgctgccctgc

SEQ ID NO: 13326 - DNA, 1525 bp, Homo sapiens
tgactttgaaaaccactggcttacgcccaccatttccgaggtcctgtccacggcggggcctcagcagaactctctgactggggcccctggcccggccccacccagccgacatgttttctttggcctgggtggtttataccctgagccaacctttaaaaattggtagatttcacataaaagtccagatccacagcttctcttgaagaatgaccacctggctacgccggctcttcggtggcaacactacctgggacactgcctccccagtcaccaagggccccagctggcccgttctactcacctaagtgccgcctgacccttgtacactaggagctggcctcccacctctgcagggttattccctgcacctcgaggccgctgcgggccaatctggagtgaaacacggggacctgaaggatggagaggctggaccccgctttgaagagggtgcagcctgggaagggcggccttgctggggactgcggtgggagtagagtgcccaggagagggtctgaggggtgggatgggggtcaggacaattttgcaaaagaagtagctggaagccatgggactggcgggagcctgtttgggggatctggatggttgactcctaggagtcaagttcagcatcttcaccgtggctgcagagctgcctgatgggcactagagggcatgccagccccacactccctgggtctggcttcctcccgcaacctcactctagtagagcctgtgcctgcctactagcgctctggggttcggagagtttgggaatttctcagagccaactggctcaggcttgggaaggctggctgctgccctcagctccgcctcatcagctatgtgaaggggtgtgtgtggagtgatcctgccgccccctccctgggctcgtccagagatctcaaactccgatgcccctggggccacgtatgttgtataaatggatgaaacaggcccttgagttgggagcctgcttcactttgactttcccactgttgctggagacaaagacatcgtgatgagagaaagttcgcacaatctagtcggtaacagccactttccttgagaccaagagagtgcggtggggatgggggggagagcacgggtccccgtctgacagtggccgctgccatattcaggtgtagctaattgctctggtgtgggaatgcaggcctaatgacagaaatctggagaagccagaaatacagatttgtatgtgagatgtcctgattttttaagttgttggcagaaattaattcagaaatcaaatctgcaggccaaacaaggtgcaggacccagctttggccccatgcccctgtaggtccctctgggacagtcaccgctggggtcctggctgctctgtcattgagggatgctgggcactgctgccgggtggccagggtatggggcatgtgcccagcaatgtggctccttggccccgctggccagtgtcctgggcccctgacaggcgctggctgtgagtggtttgtacatgctacaataaatgcagctggcagcattgtgc

SEQ ID NO: 13327 - DNA, 1010 bp, Homo sapiens
ggccggccaggcccgacacctacactctcaccagctttggcacccaccaaggacaggcagaagccggacaggggcccttccccacaccggggagagctgctcggacaggccccctcccggccgaagctgtcccttaatgctggtccttcagaccctgcccgaactcccacctctccatggcctgcctagccaggctggcactgccactcacactcggccccagggcccaggagggacagtgcctggagcctgggccaggcccagcccatctgtgtgtgtgtatgtgcgtgtgatgctacctctcctcccgtccctctccaggggccccgcatacacacggccatgcacgcacacactgggcctgggccagggccccagagctcctgcctgagctggaccttatgcaaacatttctgtgcctgctgggtaggggcacgtctgaggggccctgctccaagcctgcaggaccgagggccacagccggacagggggtagcccctggattcaggcacacgaccaccacacgagcacgtgccacgcatgcctcgtgtgctcatctcacacacacccccctcccgggtcacgcagacaccccccaaccacacacatctcatgctgtacacctgaggctgctcacgtctcacgcccagtgttggtgcacatttgcctctcacatgctgccctctccacccacccagggacaccccacggctcctccctgcccctgcccctcccccagccttgaggtgccctgcccggcggggcctgtgaatatgcaatgggagtcccaggctgtacagtggtgagtgtgtgtgtggcgtggcgtgcccgtccccagggctggctggtgccccacgcggggcctgtcatgtgaagctcgtgtcctgactttgtcttaagtgcattcacgcacttactcttggccttatgtacacagccttgcccggccgccggggcacataggggttttatcgggcgtgaatgtaaataaattatatatatatattgct

SEQ ID NO: 13328 - DNA, 2143 bp, Homo sapiens
aggtgattctgcccagcatcccatattgggccagccatgagccagcttcccgtgactgctcagcccttggctccctcttgctcgttgttctcaccaggaaagtacacgggcctgaggcaggattgggccacagacagcctctcattggtccgggctaattcactcctgctgctcccctttggcaggggtcctgtaggtcatgacaggggaggcaagggtattgagagactcggggtctcgcggggtggtagtttggagggtggctttccccatttcccaacccctctgggccttaggtgctgaggcccctgccacctgtctttcctctaaaggtcagttttgggccagttcttgcaactaaagagcagagatctctctgggccctagacatttccagcaaaacctggaactttcatgccaaacctggggcagggcaggaaacagaggaaatggctgcaacatgggagcttggagctaatacgacactctgccttcccccagaaggtgcaggctttcctgagtcttagaccagatatggccagttgcgcaggtttctgccaactgtgaagtatcctcctggagcagtgacacaatcttggcggagcattgctacccccgctgccccctccacagttcctgaatggtgctaaggatctgcagcagttggcaacgagctggggctgggggcggcctccatgtccactgagatcataggacactccaatggggatgggacctttcccctcctccatcagaggtgctctgaccctaggttacacgggaaagtgccccacatgcaagtctccctgagggttctgcccctaaaggcagactgcctcatgcccgctagctgtgaggttcattgctaccctcggccctactagccctctcttcccccttgtgcagcggaccacttgcccagtttgctgtggtgctagccttccccatcatccaccgggtgatttctgggtcccagggaaagaaagagagagctgatgcaggtttctacagtgaggaacaggcgtttcccaggccccacacccagatttctctatctttgctgtgttttatggcctgggactgagtccacacggatagatttttccttgtaaccttgagacgagaattccaaggagtgtcaccatcagaggcttctcttcattgtgtcaaagaagcccctagctgctctcgtggcctccttcccccactccctatcccttcacctgtgaaatgcctttgctttgcatattgtgtgtggatgtgtgtgtgtgtgtgtgtgtgtttgtgtgtatgtgtgtgcttctgtgtgtgcctaatgctctgtctcttggtcactgaagcatccaaataaagaatttccctcatgggccagactacaacttaacagacctagggttttgagccatattgccattggatctagtatgtctgtcttgacccctcacccccaccccattcagacctcagtagtccccagtagtcactttaggagttgggacagagtcgagcaccctgtgaaagtctcccttgagttcaggtgccctgaactcagtacagcctcatcttctcatccaccaccttctcctgcttctcctgtcacatagggcctcatgaaggtctttaaagggtttaagctggggatctgctttatgtttgagagaactgttctggctgttatgtaaaggagtgcagggaggggcaggaaaggagacaaggaggccagtatggacactgtgtccagtatggctttccaggctaatcacttagggcagagacccagccttattcatctctacttcctgatgtccatagtggtgtgtcatgaatttttattgaatgaacaaatgaggtgtatgaggagagatggttttctcctgctcagctcttacacagtgataggtttgttccatgggacttatcataggcctggtgattcttgaaagagcatttttcatgactcaaaaatgagctgagaaggagtgttatggccaggtgcggcgtcatgcacctatagtcccagctgctcaggaggctaaggcagaaagaccattcaagcccaggagttccagcctgaagtatgctgtgatcatgcctgtgaataaccactgcactccagccagggcaacataacaagactctatct

SEQ ID NO: 13329 - DNA, 447 bp, Homo sapiens
gcaaggctcaaggctgtgcaggcacataggctggtggccttgggccttggggctcagccacagcctgacacagtgctcgaccttgatagcatggggcccctggcccagagttgctgtgccgtgtccaagggccgtgcccttgcccttggagctgccgtgcctgtgtcctgatggcccaaatgtcagggttctgctcggcttcttggaccttggcgcttagtccccatcccgggtttggctgagcctggctggagagctgctatgctaaacctcctgcctcccaataccagcaggaggttctgggcctctgaaccccctttccccacacctccccctgctgctgctgccccagcgtcttgacgggagcattggcccctgagcccagagaagctggaagcctgccgaaaacaggagcaaatggcgttttataaattatttttttgaaat

SEQ ID NO: 13330 - DNA, 301 bp, Homo sapiens
taccaatcaatgtcacatgaacaaacaagctgcccccagggtaccatttggggaggggaaatcttttctttctttcccccttaaaaaaaaacacatctgccccgaacactttcccactgttattctttcctcatatcccaacactcagaactcttgtgacattagccagtgggggcttatggttgtgtgaaccatgtatgaaaatccagtgggccccaaccaaggagacagacagacttgggtctctttcccccaacttttccacatggtcatcgtgaaataaaaagtccactctggagtc

SEQ ID NO: 13331 - DNA, 378 bp, Homo sapiens
ccagtctaccaccaccacagcaccccagacagctaggcttagcctctctgccctcccttcattgtactttatcattaaaaatcaacttccagccctgtctgctgtctacgtggtgggttgtggggatgcagtttggcatctgcagtacaccaagcacatgattcatgtctgagccaggtctgcttattctcccattgggcagctgaggaccgaggcacagaggtgcggtgacttgcccggggctccaggtagcctgcaggttaactggcggtaagtgctagactgtaagcccgacaagggcagggcttttggttttgttctctgatgtgtctcagtatctagcacataatagacactcaataaatacttgttgaattc

SEQ ID NO: 13332 - DNA, 522 bp, Homo sapiens
cagctacccaacagtccaggacagctgcatggcacccggcgggccgagcatgccatgggtccgctctgcatgccctgtctgtgccatgagtgtccctggccccttcctgccatgggcaggcccgcaggaagagccggtaggggtggaaaggggactcagatgagacacaccccacagctgccaccgccttgtccctcaacaagctcacccccaatcccttgcagccaggccacaatgggggaggtgagtccagccccttggaacaggcttgcccaacatggagggatggcgttggcagtgccagcctccccagcctgtgccaagcttcaacaggggcaagaggaggggccggcccctcctcaggaagctggtatgagtaaggccttgagggtgcaggcaggcagccctgtaccccacccacatagactatactgtacatacagattttgcagtaggcttggggcagctgggtttgtccttgatgtatgatactgttattataataattattattattctgcc

SEQ ID NO: 13333 - DNA, 561 bp, Homo sapiens
gctgtgggcccagactacagcctggaatggggaaggcctggggtggaaaggcaggggagggagggtgtgtgtaggtatgtgcatgtgcctgtgccaccctgggtgccagtctctccttctgtagctccgcaaagctctgggcttgtgtgagagtgtcggtgtgtgtgcatgtgtgggggtgagtctgcatgtgcacctgtcatgtgtagaagcttgtatttgtgtacaggtgtgccagcccatgcaggtgtacacagacacacctgtgggaggctgtgtgcaggctgcaggatatctgggtatgatttcaggtcctctgcacgtgtacacatgactaggataggcaggagtaagggtgggtctgggtatatgactgtgcagctgtttgtgcatagatgttggtgcctgcgttactgaatttgcacacctccttgccaccttccttcctccaagataccatctcctcatcctaacccaggtcttcggcaccaccacaattaattcccttcccaacacttgcctgatggaaaaaaaacaaaggaattaaaactctcctcaggc

SEQ ID NO: 13334 - DNA, 1059 bp, Homo sapiens
cccccagcccgaggcccccaccagcagttggcggtagcagctactccgagcgccgtttacagttttgcacagtgatcttccccattgtccactcaagtcgtggcctggggaacacagacggagctgtccccagtgtcctccgtccctcagcccctggcctggctgagtttggcagggcctgggccatccctgggacaaaggtgcgtcccttcagctcttctccgtggagctcggggctttctgtatttatgtatttgtacgaatgtatatagcgaccagagcattcttaattcccgccgcagacctggcgcccccgccttggctcctgggggcagccagccctggctgggagagcgggagctggcagaggagccactgccaaactcaaggctcctctggcccagcttggatggctgagggtggtcacacccctgagccttcagcactgtgctggccaccccggcctctgagtaagactcgtgcctccccctgctgccctgggctcaggctgctaccctctggggcccaaagctgtcccttctcagtgcttgtcagcgctgggtctggggcctctgtatgccctaggcctgtgccaaagtggccagagattgggctgcctgtgatacccatcagcccactgccccggccggcccagataggtctgcctctgccttccagctcccacagcctggtccctgatactgggctctgtcctgcagacacctctttcagaaacgcccaagcccagcccctaggagggggtggggcatccctggtcaaccctcaaacattccggactcccctcataacaatagacacatgtgcccagcaataatccgccccttcctgtgtgcgcctgtggggtgcgtgcgcgcgcgtgtgtacctgtgtgggtgaaggggatagggcgaggctgtgcctgtgccccaggtcccagccctggcccttcccagactgtgatggccatcctggtcccagtgttagggtagcatgggattacagggccctgttttttccatatttaaagccaatttttattactcgttttgtccaacgtaa

SEQ ID NO: 13335 - DNA, 103 bp, Homo sapiens
gcagtgtgggctccccgtgggttggccttgctgcctggcctcggggagccacgggcagcccttccatggcaaaggcaagatgtgggagaaagaagtctggtgc

SEQ ID NO: 13336 - DNA, 161 bp, Homo sapiens
aggggcgcccggcgccccgggccccaccggcggactcctggcctgactgcggggctttttaaatgcttccctggactgcggggaggggcggggggagggagggatttcttatcccgtttgttacattttgaggataataaaggtgtgtgatctggtttggt

SEQ ID NO: 13337 - DNA, 680 bp, Homo sapiens
ctgtcccaggcgtcacaacccatcctcccaggctgggggagaaaggacctcctggaactgacttcttctgtcaggaggactggtttccagccatacctgttctggaagggagaggggctggaggcacccacaggcacaagctgaaggcagcagcttggctaatactgagcaggtagtggggcaaattcctgccctctctctctggcctctgggccgtttggtagtaatcacccaagggctggtaaagcccctcctcttggcacctcagaatcacagtgttactgatcagggatgtgaggctgctgttgggggtggggggaggggaatgggcaggcaagccagtcttctgtcttcctttgctaacttagggttttgagcaggttggggtatggtgcctgtcatacccacctgccaccctgggaacctcactgttctctctttcagcctagacctgctgatccagggtgtgtgtgagttgagggtgggtggaggggtttgcagtgtgggaatgtggccctgcagttgacctgagctgcttcacatggttgtccattctggggcttaaagaactgggaccagaccaagtagaggccttggtgctggttggggtggggcctgcagagtcttagttactgatttcattttcaataaatgtaggtttgttacatgagtttcccaat

SEQ ID NO: 13338 - DNA, 627 bp, Homo sapiens
gctggatggacagtgaggaagcctgtacctacaggccatattgctcaggctcaggacaaggcctcaggtcgtgggcccagctctgacaggatgtggagtggccaggaccaagacagcaagctacgcaattgcagccacccggccgccaaggcaggcttgggctgggccaggacacgtggggtgcctgggacgctgcttgccatgcacagtgatcagagagaggctggggtgtgtcctgtccgggaccccccctgccttcctgctcaccctactctgacctccttcacgtgcccaggcctgtgggtagtggggagggctgaacaggacaacctctcatcacccccacttttgttccttcctgctgggctgcctcgtgcagagacacagtgtaggggccatgcagctggcgtaggtggcagttgggcctggtgagggttaggacttcagaaaccagagcacaagccccacagagggggaacagccagcaccgctctagctggttgttgccatgccggaatgtgggcctagtgttgccagatcttctgatttttcgaaagaaactagaatgctggattcttaagtgatatcttctgattttttaaatgatagcacctaaatgaaactttc

SEQ ID NO: 13339 - DNA, 4105 bp, Homo sapiens
ggccagcagagcgagctgacagcagcaacactgtcagaaggtgccctgagacggccggctcagccttcccttgcactggttggggtggaacctgcagaggccagcccggggctggggaggcgcaaggagaggagggatccagtggggccgtgggctgggtagggtgccttggcaggagccaggacaaggccctcctggcagaggagcacctaggcagggcccagccctgcttcctggagtggatgtggcccagagaaggaggctgggggatcaccagccccaaggtcccgaagggcaggtcagagggagagaggctggagacctgggctggggccttcctccagggaaggaggctggggtgggaacactggcctcccccagaataaaaccatgttttctaccagaggctcagaatacgctgagcctgtgaccagaggatgatggatggtcgggattgaggctgttgacctgggcagtagctcctcccatggccagtggtcagtgggagggtgtgccctgcgcctgtctgcatggccactgggcatgtgtgttgggagcagaggagtcctactccttgcctcagccccacacggttccttagctgccgtgtgggctgaaattcctttctttagcaccagtggagttttcagaaggaacaacaccagggaatgccaaaaaaacaaagggcaagtcaaccaaggcattttgagaacatgaaatgtcttcttggtgggaaggctgggccccaggagtatccacaggctcaggccatgcccctccccgcacccacctcctgtctccctccctccctccataggagtggggggcccctagaagtgctctgcctcattccctgttcgtaggaaggtgcaggagaggaggtgggcaagcttatgggtttcttggtaaagagcctttaccacagcaaggaatgggaacatttccccatcagcaacggggctctagggcattattaagtaggggtgaaatatgattgatttgcattctggaaagctctcccaggaggaagcattccccaccccaccttgcctctgtcctgcgctgggctccaggacggtcagtcctcccggatccctgctctcagctaaggctggtccctaaaacccacacctgcctttggtctctcagaggcctggcttgccctctgggcctttgctcccccgctgggtgcccggcctggaacacaggttctgtctggctgtgtgagtggcgtctctcccttcctttgagggaagctcagctttcttacgcgctcatcgttggacgggctgccatgcattgcgtgcttactgggcgccaggtgctgtgctgggcccttgtgagtgtgggggcacaggctgaattagatgagctcctgccgcagggggccctgcacactgatgtcagctcaccagtctcttccctgacagggcagctcagggaacttctgagaagttatctgcagagagccccacctcactccctttggctaccctggccgtgcctggcagcccctcaggccccacaggtgggtcctggttgtgaagtggagttagtgcacatggatgtcaggggacgggtgtgaggcatgagctgggggggccccctttttcagggcagagaatgaggcgtgtgcactgtctgctgtggggatggtgtgtttatggccatgtaagtggcaggtgtgtgtaaagatgtgcttgtgggtggtgggtgtgtctgagggggtgtgtttgggagcctggcctccaaaagccagtgtctgggttggagacagtgcaggccccttcttggccccaccctctaccccattccttcctgtcagccccagtctgtcttggcactggccaggcttgggtggagcctgtgtcccagacagatcccctaggcctatctgagacccatacaggcccacacctgagctcctgtctgcctgaggagggaaagggggagtggccaggtcaggcaggccagtcgtctacacacccccttggtacccattcccatttcacaaactcctccaaaccccaaaccccaaacggaaatctctgggacaatggctcctccagagggcccctcagagccaggtgctggccagatgccttgatcacagcctccatggccaggggcctgtcaagccaggggcccacacacctggtgccagggtccaccttggtataccagctcggcagaacagttccccacccagcgattagggagctgggctggccagtacagccagtggggagtgggtgggaggcaccaaaacttggcagctgtgccagaaaccaaagccaggcccagatgtagggggagggcacgagagctgaacctgagcctggggcgtctcggagctggatccccgtcagctcatccaggctggacaaaccagttcctgggtcccccagccggctgggtggctctggggccaaccgaccacaggtgtcactgatcacaggtgtcaccgtagtggctaccacctcagggcagcccctccctccagctggcggggcctcagcttcccagctgccctggcttagccttccctgcagcccctccccaacaggcttggtccgggcagcctgctctgcggaaggtggcagcctcctggtgctgggctccctgcctctggggcctccagtccttcactcagtgtcatcccttccagcagctccctgggcctcttggtccatcccttcaggcttctgacacactagtggcctcgagtcactgatagtggtgcctcctccttaccttggcaagcccttgtagccctctgagccctcatcctgcaggcagagcccctcagtgctctgagaaacctgccctgaactcaccgcctcccctgcctgggcactccctcctccctgcgcccacagcccccatgccaatctccgtcagctctttctgtgctgctgtaattgttggtttgcctgtctcctttgagctgtgggcattgccggggtagggtggtgtcttcaccacagctccagaaggcactggtgggatgtggagtcaggagcaaccagagaccccccaatactagaatgggtttgagcttggggtggggtggatggggaagacttactctgaatgttcgttcaccatccgtgggcaccaggtctgtgccaagcacagggactccaggggcagctgccattcgttccagtgatgtatttggggccttctcaggtgaggaagccaaggtggccaaggccctcggtcccctgccctgatagggcttacctgtgggtgggggagggagaccacacatgtcagaggtagtgaaggccgctccaaatagtgactggggccaggcaggcggaaaagagaacagaagagaatccagaagtgttcagacagaactagggacaacagaggggcctccatggtggcatgggtcagcagagcatggagcaggcagaggaagcctatctgtggggctgggtacatttctctgagactcacggaatgtaagtgttgaggtttctgcaaagagggcgcaggccctgcagtgacggttcagatattgataacccatcccccttggcaggtgggggcttaggcatccatattggattcagaaaagaaaaagaatgatgcttcttgcaacaaaaacaaaagtgattatgtcacgagaggagaggctggagggccatgggagttcccagctggctcactcatccgtccaggaggtgggtctcatggtttcattttgctttgggcttacttagagttttggcaaatgcagagttatgtaacgaacccaacaatgaagatacagttctgtcacccccccagcattctcctgtggccctctagtccaccccccgccccaccccagcccctggcaaccactgatctgctttcacaataaccgtatggggttttttctctttccttttttgtgagcggtatttaattcctttgctctaatatgtaatattagaacatattacaaagtagcaagaaaaatacgacattggtgtaaaaataatctacacctcatggaaagaatgaagagccagaaatagattctattctgtagaaaatcttacacaataaaggacttcaaaataagggtaaggaaggatgctttaacaag

SEQ ID NO: 13340 - DNA, 445 bp, Homo sapiens
ttcctacctggaaggaattttgttgaaaggggttttcacctgtgagccttggtctgtctcggtagggtggtcaacttcagtggactgtggttggtttcagagcgcctggctgaggagttccactgaggggagcactggagcagccctttggcagaggctgaggagggagatggaccagcccacgcctggcacctggctccatggcataaggaaagggagatgctggcctctgtgctcctgctgtcttttcctgtttctgtttgcgtttgacttagtagcaaccgacagagtggcaagggatttggtcttcagcagtagacatccttccacccctgccctcagccaagtctcttgctgccatgccaatgctatgtccacccttgcccctcggcccaagagtgtccagcggtggcccacctcttcctcccactacagcctcaacagt

SEQ ID NO: 13341 - DNA, 559 bp, Homo sapiens
ggcggcagcaggagcgaccaactgatcgcacacatgctttgtttggatatggagtgaacacaattatgtaccaaatttaacttggcaaactttctattgcctgtcccatgtgcatcttatttaaaatttcccccatggaaatcactctcctgttgactatttccagagctctaggtgtttaggcagcgtgtggtgtctgagaggccatagcgccatcatgggctgatttttattaccaggtcccccagaagcaggtgggaggctctgcttcctgctgccgctctgcagcctggacctgtggaccctggttgtaaagagtaaattgtatcttaggaaaccagtgtcacctttttttcaccttttaattttatattatttgcgtcatacatttcctgtaacggaagtgttaattttactgtactttttggtaccttttgggaatctaatgtattgtaaggtattttacacgtgtcctgattttgccacaacctggatattgaagctatccaagcttttgaaataaaatttaaaaacccccaagcctgggtgagtgtgggat

SEQ ID NO: 13342 - DNA, 123 bp, Homo sapiens
aagccttaaaccaaaactcatcagagaatacatgcttgagagtgatttattaaatataatgaatatgagaaaactcttagttctcatcagatactaagttttaagaataaactttagctatgt

SEQ ID NO: 13343 - DNA, 510 bp, Homo sapiens
ggaatgttttcactggcccttacctcatgattaactcttcagtaataatcatatgagacatacaatgtagaaacctaataaatgtaatgattgtgggaatctttcagttgaagtacaatatgtcatatcagataataccactgcagagaatccatctaaaagtagagaaatcttgattcagaatgtataatttcctttatatcagaaggtttaaatagctaatataaacaatgaagagtcatgctgaagataagttctgttatatcataccgcacattctcctttggctatcagagactttacactggagagaaaaatgtgagagtgtttaactggacagcccagagacctggtatgtagtcctaatctgccactgccttggacaacttgcctacttccaccaggttatggttctttatttggtaaatgaatgattttggagttagaaatcttgtaggagctctgttagctctaaaatgctacaactctataaatataatgaatgctggg

SEQ ID NO: 13344 - DNA, 460 bp, Homo sapiens
tatgaatgcagtttgtatggaagacctttgagactgagtagatgaattattgaatgtgagataatccgttctagagaataactatgaaagcttgcatcaagatagtcactttatttactgagggtcaggtttcacagtgtcatggggtttgggcatttaagaatggcaaacactcggctgggcacagtggctcacgtctgtaatctttgggagcactttgggaggccgaggtgggcggatcacgaggtcaggagatcgagaccatcctggctaacagggtgaaaccccatcgctactaaaaatataaaaaattacccgggcatggtggtgggcgcctgtagtcccagctactcgggaggctgaggcaggagaatggcatgaacccgggaggcagaggttgcagtgagccgagatcgtgccactgcactccagcctgggcgacagagcaagactcagtctc

SEQ ID NO: 13345 - DNA, 591 bp, Homo sapiens
ttcatctctcaaataatccaagacttctcactggggaataagggaataataaatagggtacaaactcctaatagatttgtcttttttacttctcctgaaggaaatatgttagttgccactaagtcatgataaaattgatcagtgagactatgaagagcactgacttgttaaattttaaaagaaccataaattctaaggtatctaaaaacctatgagtatttaattcatagaaaaaatgtaaaaggtctttttaaaaatcatgaaaaatagttgaatatacattttgtttctctcataagaccatattccctttaaaagagtaagcttcaatatgtgaattttcttttaaaaacagtcactgagttaataatgtaaataagtgtgtggccttctttaaaatagctggctaacataggaggcacttcttttcataaagagaagctaaacataaaaaggaattttaaatttaactcttcacatggaaataataaagctctttatatgagctgtcccaccagcaacttatatatgtaaacatacatatatacacatatgcatgtgtgtgtgtaaacataaaagtcctttattatt

SEQ ID NO: 13346 - DNA, 499 bp, Homo sapiens
acgtccgtcctcaggagcacagcctcacggacagtgccaaaccctgtgggtctccaggggcttgggaaatgtgttctttcccaagagtatcaaaggaaagaatcaaatttcttgcccggtcactggcactccagaagacagcgtgccggaaccggcagctctcacctttctgtgacttgttcggaattaactcctctggatggaaacttccatcttacttggttacatcacggctctggttcagatacaacttcatgattttgctactatcatttttcacttttcaaagaatttaacctattttacagcagttcagttctgctagtgagtagttttcctctcctaccttccttctaaaaacctgattcatgcacagcgtttgacacacatggagtctgccagtgtgccttctctgcttcagacaagagatctgccatttcatgcccttgtgactacctatcattggccctgcaataaaatcatttatttttcactctgg

SEQ ID NO: 13347 - DNA, 2992 bp, Homo sapiens
aacaatcttaagagcttgatctgtgatttcttctccctcctcccctgcaagagtggtcctaggagaggacctggcacaccttaggttgacattcagaaaacttcaagacatcaccatcagcaggctccagttgaacactagtctgtgtaactttaaacatctagcagtaaatacttgcagttgtgatataaaggaccctgtttctgtagaaaagaaaacatttaacataatggttgtgaaatgtaacatgaagcaaactaacttttttttttttaacatctttgtttttaaaatagaatgatagaactttgccagtctttaagatcttggcttaatttaatgtattaatctgtttgtgcaaacataataccaccatttaaaaatgttagggagatgagttgcagtttttataatagattttttttaaagtttggtattgtaaaacattcacacctctgtccctcaaaattgataattacgtttaaagtgcagtcatttgtggttagaatcttgttttgtttgcttccattattgagttcctcctaaggaaattgaggagagggactgaatagaagcccaaattcatataaaagttgcgtttaagttgtattaaaaatagatatataagaaaaaattctttcacttgatgtttgttagaccagaaagtgtgtgtgttctgtagctcagttcccagacagctttttaggtagtggaggaggtggcttcatgtggcacttgggcatttatattccacttgggagggtcaggctgtggccttctggagcaggtggcttgttaaggaatgctagcagggcatggcacgtgagctccggaatagatgtcttcatcacttcttccactgtgtgttgacactgttttccttacctatttcctcagatccccagctttctcctctgctatgcattttcttcacagtgcagcttgcagtccgttgctgaaaatgattataagccctgcataatgttaagctttattgtgattacgtgtatgtttcttctttcttttaagcagacccatacctttccagggtcaaagtacagaatagaatacattgatacaaagtacagaaaaatactttgatttttatccatttcttttactctgtgtaaagacttgagaagtctaattcacaggcaaaccaatacagaattgactgcagttgaacagactagaagtatttgtgggaggagtgacatgaagcatgagttatctgattttttttgtagctgctatatattttaagccttcatttgcaattcatgtaacagttgtgtcataaattacacaataaagcagtcctgttcaaatttttttttaacgtggcttgtagaatttttaaaaaagtgatcttaggtttgttttttcatgcgggatgcagatgggtgctatcagagcctctcccacaccactatagtgtaataatgttattattactctacactgaaacgtattcagagttagatattattttagcttcagttgttctttagaggctttcaaatgtaccgatgatactgtttcttgcactgaatatataaacactccacagtgtttatattgggaagatattgggaaggaaatatatttgtaaaagatgaaggctgtatctatttttttttctttttaaagtttgttcacttaaattcttttgaggatgggatgtatttttcttgctgttcagtgctttttccttttcatctgttgttctgtggtcacagtgaccttagctacatagcagactttcccaaatgtattgattacaaataaacagttgttacttagcaagacctgaaaatatgtctgcaggtttctccttgaagcaaatgtgtgggatcattgcatttccagaaatctgcctccttcaccctccgttgacagtatatgtcatgcctcactttcttctagctgagctttaaatcattagagcttaaattgtcagatcgttcattgcctttccagggttatttagtaaagtttgttgaaaacaaaaacgccttttcttggttcttttttcagttattttgaaggtccagcatcctgattaaatgtctgacacattaatgaatgaccagcagcagctttcagctcttaaaaagacacttatattttgattttacatgctggttacctgttccattgttgtcaaatgcccactctccatcagatgtgttcctccattttcttatccacaaagtactcctcacttttcaatttgtcatgttactaaatggtgttacattaaagccctgtgttaagtgtctgcttttgactgaatttcttcatagtaaccttcagtgtgtgtgtgtgactatgttcaattagtgggttgatcttcgtataattggccactatgtgagagttcactactaggcagaaactattatggacagtgaaataatgacttttatctcaccacgtgagtttgatgcagtcttttctgtctagcccttgcctcttcctgcccatgtgattgcggtgcagtagtttctgttgtataatagtgtggacagcagctcagaaaaggagggaatgctactgataatttgtagataatattctttaagacttaggggaaccattgaactttgaaatttttattagaaaattatttgttcagaatcagactccattattttacatatacttaaatactttaggggtatttttgaaagttagcccagttttttatgtgctattaaatttttagattacatactaaagaaaagtatgtacacagaatgtagtgctcctagttactattttttctattaagaaatagtttagttctggtgtaaaatttgtttgaatgctaaaaaaaaaaaagcaggactgcattatggcacttttgccttggtggcccactttctccatttaaaacattaggatttgtatttttctgctgcgtttgtatgaagacatatttgattgttgttttctcttgattttaaaataaaacctcatgagccctagt

SEQ ID NO: 13348 - DNA, 2403 bp, Homo sapiens
tggaaggatttgtagtgtttttagtgttcattcatcctatatttttattctcagattcaaagaaagagcaactactttggaccaaaagcccatggcctggggagctgggcaggtagagcccaagctccaggtgaggcctggccctgggcagggtctgtggctgcgcccctcaggccagcagttgaggtccatcgggctggccccagcccatctgctggcatcagtacctggtgttgggacagcaggatagggttctaaaggtggttttctatccaaacgaccaaaaaaccaacagtaacaccagtgaaaccccacactgtcgggcttataaaaatctgtgccatcatggtgattttatccaagactgctccacttaccccagtgctggggacaagtttctgttgaaactttagatagcagaattatttgcaatttgtagcatagaaaagatttttaaatttttttacaaaaggtttttaaacagattagggtaggtgatggtttaaatcaattaagtggcattggaaacctagggtttccttttgattaagagccttttttgtttctgctctttgtcagctttcaggggagaaggaggccactggaaaattatttccctaagtgcaggctgttgactgcgtatgccaaaaagggacaggaggcatgggatagcaggtctggtgacacagctagggtcttcctagcagctcctcctcctccctcccaaggcccccaggaatcccttcctcccatgtcctggcagcaggaccccaggctacatatggaaggtagagatgtgggggtcctgtatcctggagtattatgtctccccaccttctgcagttttctctgaacatgtatgttgcccatggtgggagcgtggtcactgtgcagttgtgcacagatgtctttcctttaccgttggcctttctgtctgcctctccttcctctctgcagcccaaatggaaaacaattatttactccattggagggaaaggaagagtcttagaattcctaagggaaccttagcataaaggttttggggaaggaggccgtaggccggcccggaggaagcaattccacttggtttgacaacttctgccactcccatgtcagatgacttgcacttcttaaagagattgctttataacactaagacatcctttctaaagattcaagtggacttgactaagctgagggtccacgaaatagaatatgacatgtgagctgtttttggaaaacgaagatggagagagcacttccccgtaacgaaagcaaagtggtaagcacagggtgagacccttttacacagaatggtggagagaaaagagaatgctgaaaagtggctcagatgcagagtgttctgtggagaaactgcagccccacttctgtttccctggagtctcccaatggatcattcaggagtgtcctatgtgagaattgagccaaggaaaatactcatgcaaccagcctgagtcgcggtgaggggacgagaggttgtacacacattggtagttattttgcaccagcagtgcctttctcactgggggtacttggaccctcagatcttcttttctaatagccatttgccaccccaagtggtatgtcggccatttctccttaaaacaccttccctacctttcccatgtactcagtttagctctcaaagaaggggtgaatcataaagccagtgaaaatttcaccctctgagggagttccccaatctgaaggggaagagggtgacctcagcggcttttctcccaaaaatcggctgaaggctggttgtggatccttgttcctctcctgaccccatctggctgctgccccgtctcccacccctgtccccggggctcgctggccctgcactccgccttagtcctggggccggcgacacagtgggggctcctcacttgctgcagtgtcatagcaataaaatgtgattcttggggtccccccagggagctgcccatggctttatttatgaacctggttttcgggagtcaggggaggagatgactttgcttctgtgcacagccccgtcttccaggagccacaactcagaagaaaagggtgctcagacttttgttatacacatttgctttgtgtaaataaatgtttacaattttatatgaaagatggaataagcgctagagcttccaactgtatattttttacttttatagattttaaaactatgatcctttatatgtgtgttttgggggagctatgataagttttatggcaaacggttggtattgttaactttttattgtcatcaaaagttcataaaagtcctattaatccccatattcttctactgcccttaactctggtatacaccaaaaagaaatctttactttccttgttttatcattataaaaataaagtattttgctagtatgg

SEQ ID NO: 13349 - DNA, 117 bp, Homo sapiens
gaccaaggcccccgggccgacggagccgggaaagaagagccggagcctccagctgccccggggaggggcgctcgcttccgcatcctagtctctatcattaaagttctagtgaccgag

SEQ ID NO: 13350 - DNA, 1482 bp, Homo sapiens
ccacttttgcccacctcttctgcgtgcccctcttctgtctcatagttgtgttaagcttgcgtagaattgcaggtctctgtacgggccagtttctctgccttcttccaggatcaggggttagggtgcaagaagccatttagggcagcaaaacaagtgacatgaagggagggtccctgtgtgtgtgtgtgctgatgtttcctgggtgccctggctccttgcagcagggctgggcctgcgagacccaaggctcactgcagcgcgctcctgacccctccctgcaggggctacgttagcagcccagcacatagcttgcctaatggctttcactttctcttttgttttaaatgactcataggtccctgacatttagttgattattttctgctacagacctggtacactctgattttagataaagtaagcctaggtgttgtcagcaggcaggctggggaggccagtgttgtgggcttcctgctgggactgagaaggctcacgaagggcatccgcaatgttggtttcactgagagctgcctcctggtctcttcaccactgtagttctctcatttccaaaccatcagctgcttttaaaataagatctctttgtagccatcctgttaaatttgtaaacaatctaattaaatggcatcagcactttaaccaatgacgtttgcatagagagaaatgattgacagtaagtttattgttaatggttcttacagagtatctttaaaagtgccttaggggaaccctgtccctcctaacaagtgtatctcgattaataacctgccagtcccagatcacacatcatcatcgaagtcttccccagttataaagaggtcacatagtcgtgtgggtcgaggattctgtgcctccaggaccaggggcccaccctctgcccagggagtccttgcgtcccatgaggtcttcccgcaaggcctctcagacccagatgtgacggggtgtgtggcccgaggaagctggacagcggcagtgggcctgctgaggccttctcttgaggcctgtgctctgggggtcccttgcttagcctgtgctggaccagctggcctggggtccctctgaagagaccttggctgctcactgtccacatgtgaactttttctaggtggcaggacaaattgcgcccatttagaggatgtggctgtaacctgctggatgggactccatagctccttcccaggacccctcagctccccggcactgcagtctgcagagttctcctggaggcaggggctgctgccttgtttcaccttccatgtcaggccagcctgtccctgaaagagaagatggccatgccctccatgtgtaagaacaatgccagggcccaggaggaccgcctgccctgcctgggccttggctgggcctctggttctgacactttctgctggaagctgtcaggctgggacaggctttgattttgagggttagcaagacaaagcaaataaatgccttccacctcaccgc

SEQ ID NO: 13351 - DNA, 4152 bp, Homo sapiens
tcaagcaccttcagaggacagccttgattcacttgtaaacttgtgaaaatctgaacataggggagtgaggtatggccactgaggatttttgcttgcttaagaatgatttggactttcaatctgattatttgataaggatatagtatgaaagccaggtgctagcaacagacaaattctgagcccaatatgctttatactgctagacagggattggtgtgtttgcacctgtctttcatttgtcataagagattttcctatttcttctacccaatagaatattttcatgcctggaaataggaaaatgtgtgaacagcgtattctcttcacacagaaatctgtagcactgcttttttgaggccagtagcaacatccagagatcattcttccatactttactccctcctttttcagacttgtttgtaaagtacagaatctgaatttagcctttatgattgtatatgatccacagaagacctgatttatgaaattttgtactaaaatcatttggaaatgattgtattgtaaactgaggctaaatttttttttaaacctgtttcatgtgttataaaggccagcttgtaaaagaagctgcaacagactttctctgctcatgatttgcactcttagggttttgttagcccttttgtactactttctttttaaattgagaacatggttctttacatataaatctgcttcaaccttaggatgttttcagaccagaggcaacttattcatgaatttttatgaaaactatctactaggacagataagctgaacagtgatgatctgtagacatttatggactgaatgtaatggttgatatatgtacattctgatatttttaaatctttaactttttaaagttaaaaacctacagctgcttaggtccagcttcttaactctttttgagacacttcctgtcctatctccactgtgcctgcctaaatttgttctcaccaagcactgcctgtgcatgcagagaaaatctgtgcatcctcttttatatttttaaaatactgtttaacatttgtgagaattttatgaaaatgcttttgtatgagctgtggctttttcccattgtgaagcattgaatatcacattttggaacatgttatagggtgagtccctggatctttgctcaccagatccaagcactgcttctcggtgtcattgcagtgtgctgcttgtcacccagaatactactatcatgtgaattctttttgtcgtcagtgtcttttccttagtctttttgttgttgttgttgttgttgttttaatcattccttttttaagaagaagtaattttccatttatgaagcagtatgaattagatgtattttcaaaacaggtccctaagacaattcttcagatcatttttaaaatgactaagtcattttagtatgtcaagcaagataaaaattacatcataccgtctattttgcccatagtgccatttagagatgaaaaccagctttaactttgcaaagtgaacatgtacatggtctgctctcatttattcattcttctctcaaaagtcaaatgaatgcagagggagcttggtcaaactgcttttgtttcaactgcaggcaggggagcaaaaggacgccatgtgagcattaggaaaaaaaatactcactcttactaacaatttttatacagaaaatgagtcattttggaaatgattcttatgttttttttttttctccttttagaaaattctccaaaaggttttgatgttgaatcttggtcttggacctgttttttcctttgagggttttttgttttttgttttttctaggatttcattgtgatgttttggttttgttttttgctttttgtttaagttgtgctgacaccaaacacatccagtttataatcagtacattggaaagctggtattgatgtagaaccagtgcataactttttatggggttttgttattggtttttttttgtaaagtgtgaataaaaggtatgtttactcatttttcctgaacactgtgttggtaatgtgcatcatgacaatttccagtgaaggtgagctggagctggttggactaatgagactgaggaagcagcttttcctacgatctgcattatgtaatcacaggtccagagagctttatggaagcgggagaggaggagcacttactcatgttgtatttgttaatggaggatgtcatcttttcatagatgctggaactagagtgcacttgttagatgctaaaggtttgagctttacacaaaatgtcttcatctgtatttgttattgtctacaatatatttgaatttggggcagcatattaagatgtaatggcctgttatgtcttgaaaatacttgttttgcctcttccaggcatactgcattctgtggatcagtttgaacagcttctccaccttatttggacagtgataaattgaaccaagagtgtagatttacaagtgtaaccttcaaaagaggaagaactatttggggtctgtaggtaatgaacagtcacaccaaaatagactatgatgcttttgttaagaaaggtttcatgttttagatattttccgtgtcctaaataattttcaataatctataatccctaaaatgcaataaaaactagtatgttttcacggtgtatattttttttcaaaaattctgtaacaaatatatttaatgtgttgccataatgtcatttcagtatttttgctggataaatccattttagaaatgtcttacaaaaagtttagggcatgttttctgttttaaagaccagaagtttgaaggcacccaaatccttgtcgccaatctcctgaagtacagctttaccatattagtggtcattatttatgctttgagagtttcaatattgttcgtcaagttaacttatggcataatttaagctaaagttgtagaaatgaattgttgagtgcaactttcatagtcccaaagataggcagagaacatctccagaaatgtgtgtgtgtgtgtgtgtgtgtgtgtgtgtgtttaatatgatttagtgacaaccaggaaaacttacttgggattattagcactttcaaacttagggacattattaaattggatggaatgcacttctaaatgtttaaattaaaatttcaaagctctttcgagattcaggttctcaataataatattcaagttttagagtttcactttgtactatttaaatttatggaactagtttccatactgacttgtaaggttttggggtcatatataaggactaaagccaagctaggcaaaacaatgacagcaccgttttttcagtgaagctctcagaatgtccagtacagatgttgcagataattccaagaactccttcagcaggtgttcttcaccattcgtaaacagtattttaagatgttcactttgctcttctttttggttacatacattttaataactggtatgttgaagtagtgtctaaaagtatctagtctttattcacagtacattatattgtgtgatgcactggactaactcttgtttaccattcatgtaacaaaacccagcacattatctgcactataagctcaaagaatgtcacatccgcccagacagctctttgatgagggtgatgggaactgaataaaccatacggactggcagtaacaagggcttttactgttctgttcagtggaaccttcttggtcaaattgtaattagctagcattatatttatatacagggtcttttttctttaccgatgtattttcctactcatagccaaccaataaattcagtatctgtttcaaatattttagaagtgtagtttgtatagctgtagtactgaggtttgaggaaaaataaatgttgatcagcagaccacgtatttaaaattctgaatcttctgggacagggttgtaactcagccttccaaagggaagagtgcagggggacggggccatgatatggggaaatggtgtaaactaatgtatttctttattggctgttattctgtataacactcatatctttgccaaagttcaattttatatttaggcaactgatggtccttttgcatttaggattttcgttgttgttaccttatacctcatgatataaggaatgggctcatgtgtcttccgtcttttggaaggaggttgacatattttaaataaatgcttttaaatacagt

SEQ ID NO: 13352 - DNA, 949 bp, Homo sapiens
tctgaaaactgtaacccatagaaaagctccccaggaggtgcctcactctgagaagagatttacaaggaagagtgtggtggcttctcagagtttccaagcagggaaacattactgggaggtggacggaggacacaataaaaggtggcgcgtgggagtgtgccgggatgatgtggacaggaggaaggagtacgtgactttgtctcccgatcatgggtactgggtcctcagactgaatggagaacatttgtatttcacattaaatccccgttttatcagcgtcttccccaggaccccacctacaaaaataggggtcttcctggactatgagtgtgggaccatctccttcttcaacataaatgaccagtcccttatttataccctgacatgtcggtttgaaggcttattgaggccctacattgagtatccgtcctataatgagcaaaatggaactcccatagtcatctgcccagtcacccaggaatcagagaaagaggcctcttggcaaagggcctctgcaatcccagagacaagcaacagtgagtcctcctcacaggcaaccacgcccttcctccccaggggtgaaatgtaggatgaatcacatcccacattcttctttagggatattaaggtctctctcccagatccaaagtcccgcagcagccggccaaggtggcttccagatgaagggggactggcctgtccacatgggagtcaggtgtcatggctgccctgagctgggagggaagaaggctgacattacatttagtttgctctcactccatctggctaagtgatcttgaaataccacctctcaggtgaagaaccgtcaggaattcccatctcacaggctgtggtgtagattaagtagacaaggaatgtgaataatgcttagatcttattgatgacagagtgtatcctaatggtttgttcattatattacactttcagt

SEQ ID NO: 13353 - DNA, 854 bp, Homo sapiens
gacagagaagaccctgcttaaagggccccacaccacagacccagacacagccaagggagagtgctcccgacaggtggccccagcttcctctccggagcctgcgcacagagagtcacgccccccactctcctttagggagctgaggttcttctgccctgagccctgcagcagcggcagtcacagcttccagatgaggggggattggcctgaccctgtgggagtcagaagccatggctgccctgaagtggggacggaatagactcacattaggtttagtttgtgaaaactccatccagctaagcgatcttgaacaagtcacaacctcccaggctcctcatttgctagtcacggacagtgattcctgcctcacaggtgaagattaaagagacaacgaatgtgaatcatgcttgcaggtttgagggcacagtgtttgctaatgatgtgtttttatattatacattttcccaccataaactctgtttgcttattccacattaatttacttttctctataccaaatcacccatggaatagttattgaacacctgctttgtgaggctcaaagaataaagaggaggtaggatttttcactgattctataagcccagcattacctgataccaaaaccaggcaaagaaaacagaagaagaggaaggaaaactacaggtccatatccctcattaacacagacacaaaaattctaaataaaattttaacaaattaaactaaacaatatatttaaagatgatatataactactcagtgtggtttgtcccacaaatgcagagttggtttaatatttaaatatcaaccagtgtaattcagcacattaataaagtaaaaaagaaaaccat

SEQ ID NO: 13354 - DNA, 1653 bp, Homo sapiens
ggcgccctcgtggccgcgggactggccccggggggccccctggatcccaggccagcgctttgctctcctgctccgtctgaagggagcaggtgcaccagccaaaatgtcagcgagggggacaaagagagggacctttgcctacgtagatgtgtatgtgtagtgcgattttcttcaaggaaaggagacaagtccaaagctcgtttgtggattgtgggactgagcgaaggagtacaaatatatccacgtcgctcagagctggggtgctcacggtgggcggtgggcaagaagccagcatggaagaaagaagggagaaaactttggtgactgccttagagggatcagttaatttgtatagttttatattttttgtatatgtttgctagctctaaaaaggtcgagatgcaataacacttcgtaagcaacgagttcacctaagtaaggctcagatcctagttttaaaaaccatttcccattaaaatgaagttggaggaacagctgcttctggagccggggcaaaaatttcaaggtgagcctggagcattgtgtgtggtgaagtaaaataaaggctcaaaacgtgacggcaacccggcaaaagggtagggagccaggccgaaggggcctcactgaccaattgtgggacaatttgaacatcaggatgaataatgacaggagagattataacacactgaataaaaacataatccatgagttcatgctgatactcaaatttctttttaaaaaggagaaacaggaaggtttcttttggaggtgaaatctaattattggtgagagtcttggagaacaggctgtttccagtctcaaagcagtaaccttatacactacttataagtttgaaaggggaaaggttacctttacaatggagacatctaccagatcatccaagtgattaaatttaacatcatcaatgatgggaccaaggacattattagtttgacaactggggaaagaagtgttcttcaccccctacccccaagacattgtctctgtcggccaggctggagtgcagcctcaacctcctgggtccaagtgatcctcccacctcagcacacaacaccatgcccaattttaagtgcgttatagagacgggggtctcactttgttacccaggctggtctcaaactcctgcgctcaagcaatcctcccacctgggcctcccaaaatgctgggtgtacaggcatgagccgctgtgcctggcttcattttcagagtgagacatttgtactgtggctatgtaggagaacattcttgttcttagcaaacatactgaagtttttagatattaattaccacagtgtctgccactgaatttccagtgactaagtggaaaaatataaaacatatgaatataaagaaagaaagagacaagtcaaatgtagtaaaatgacaacacttggtgactctaggtgactggtcgacagatgttcattgtactatcaatgtggctttgctgtgggtttgaaattttgcaaactaagagttgggtggcggggagaaggatacaccaaaaaactaagtgattatctttggatgggaaaatgtttggtaattgcattcttaaaatgtcttctttgtattttttaatgttcaataatgtatatgtatcagttctgtaataaaggggaaaacactttt

SEQ ID NO: 13355 - DNA, 537 bp, Homo sapiens
gacaagagtgaaatcaaactgcttttagtgactcgaggccaggcagtcatgcgccttctgggtctccggcgtcttccgttcccgtgctgcccgtgtcatggccacaccgtcacccttcagcagcgacctccactcccgccaccgtctgagcagaagtgcaccgaagcctcagagacagagggtctcctcccgatgctctgccgctgttggggatatggtttcttgaagcatttttaggctgccagtattgtattaagcagaacagtataacctcgtattttagctccagggtaaaaatggttttttaaaaagtcaaatacaatactggtccttaccacaagtaattttctgtctgtttcatcactccctaaatactttctcctcaaattatttttctctgtcaccagattacattaagaatttgtcagataatgtgtagaactgcataacaggtaataggaagtagtaatattatattatcaagggtttatattttaaagatctctctcactccataaaggggaaataccaagtgtt

SEQ ID NO: 13356 - DNA, 69 bp, Homo sapiens
caccggctccgacacgccgctaaccggccgctcgtccccgcgccacggtccgcccaccgccgccgccgc

SEQ ID NO: 13357 - DNA, 5240 bp, Homo sapiens
cccccgctccatgcctcgcggcactgccggtgtccccagagcagggactctgtcacctcgcacttcattacattcctgtactaactggggcagaactcagacgggtgccccagagggggctggggggcggccaggcccaggcctccctcctgcccctcctcctaccggatgcccccagcactcccctctcaaaccaggtttgggccccagttcgctgaccctcctaatacacctgcctcgtcctcagccatttccaaagtgtctcgcggatcacaccacactgggcacgtggtttgcaggtcaaaggggcgttttaaagcagctggctgtcatggcaacaggaggctgtgctgacctcctgagcggcagacaccttccaggagccctgagggtggcaggagctaaccccaaccagcaggcaactaacacggaattggccccacaccggacgtgggaggtgtctgtggggcccgaggcctgtcctgtgtgcagcggacaccacggggccttcctgctttcctgggcagagggcagagtgaggccacctggcgggggtgctgggcgcctggcacatgtgtggggaagccggtcacatggacacacctgtgcacacatgcctacaggccagctctgtgccaagggcaacctaggtaaaacgaaagccgtcaggggcagtgggcggcttcccggctgaccacagtggcttggactgtgagggtagagtaggctcgctttgctttcctgagaagatgcggtggctgcctatgttctcagagcgggtctgggaagattcagaatgtccggtccctgtggtgttgccaggcaagagacacgaagtgccgagacactcctcgcctcaccgcgtgacagagcctctgcccggccctcccgttcgcccgtcctcactagctgcaccctgtttgctcgcagacctcccattgccacagcccaagcaccttcttcaactctcccaaaatggctcagcctaacctctcctggccaatcccccccgccggagagcaggacactagggaggacccccagtcctgcagtgtctgtgggggtttctctgccagcagggggctgagcagagcccatccaggacactccacactgccaggacacacccaggcggcccgcccttgcctgtctgcacctggggagaagccggcgctcctgctccctcctggggaggctgacgggtgtggccacccgctgtcacaatggcacactgccactgtcccttggcacgcacacagccacagccacacgtgtgacctgctgggccgtggttctggagtctacctgcggatgagcctgcggcagtcctggggaaacttttccagagcctgttagcccgtggctacggtcaggctctggccagggcagagggctgcccagggccaggctcacagtacaggagggtggcgaggcccctccctcactggcacgcatgagcaccacccgcctccccgactcccaagagtgcacctgctgcggccacagctccgtggaaggactccccctacctgagcagagcagaagccccagggcggagctcccagccagcatggtccgctgagggctggggggcggtctccgaggcccctcaacagagaagcctccacctgaggatggggaggacctggcaggcagcttccacggcagggctgggaagttcagtgcctggaaataaagagcaaggaaaaatggacctcaggcttcgtggctcctttaggatgtcacctcaccggcctggggaaggcggggggtgcccaagcccagccctgtgcccccgctgaacctggctggaccgcgtgtgaaaggcagaactaacgtgcggaaacatttgaaaacaactctgaatgtgcggttcggaatcacccgatcacagacgagcggtcaccggaatcgcccggtcacagacgagcagtcatcggactcacccgatcacagacgagcggtcaccggaatcgcccgatcacagacgagcggccaccggaatcgcccaatcacagacaagcagtcatcggaatcacccgatcacagacgagcagtcatcggactcacccgatcacagacgagcggtcaccagactcgcccgatcacagacgagcagtcatcggaatcacccgatcacagacgagcagtcatcggactcacccgatcacagacgagcggtcaccagaatcgcccgatcacagacgagcagtcatcggaatcacccgatcacagacgagtggccaccggaatcacccgataacagcccatcacaactccaaagcccttgtgttgaaaaggccgaggacgagtggtcaccaaacagggtggctccccaggtcccgaagcctgagacccggaaggccctggcacccttacaccctcggactcctgccctcctcggcctccctggccccagcgcggctccaccctgggctgcgtctcctggtcacaggctgcgtttctcctttctgtccgtgggcagcccagtccccacagtcacggccaagccacgcagaacgaacatgactccagaggacctcgccctggagctgagcctggcgccgggtcaggacggagggaagggcgggttggggtccgcgggtcctcacaccgcacggcaggcacagaggctcgccaggccctgatccggtctgtggggacgagggacactgaggagaggtgctgggcaccaggacgctgcctcctggtccctggttggcctcagacaagcacggcctcgagaaaagagccaagcgcatcgggagcacaccagaaaccggccctgagcacgagaagagcctccgcccggcccgggcaccacccgacctcgcagggagcaggccctgtcaccgacgggtcacctcgcccacacggccagcaccgactcaccacagcccttcccagacctggctggagtggccggagcggcggggctcatggctcccatcttggcccctggaggtgagctcattcacagaagtggtcccttcactctgagagagaaaatcgtggcgtgcatcccaaaccctaggccacgcctgtgggtttcgtgaatgagatcgaggctgctgtggcaccctgcccgtcctggcctggagcaccctgggatcctggagggagaggccccacgcccccactctccctccacacttccagggttggtgcccacgagttagaggcacgccctcccccagcggccctcaggcttttctcagacatgcgggagccaggagagcacccttctccactcagctccaaagcgaatctttgaaaacacccactcggctcccatctctgtcacctagccaggaggggtagcaaaaataaagtcacgaggacatagtggtcaccactgtcagttacaacttgtctgtggaatccgtaattgcatctgtgtgccgcctccgaacacagaacattgtttggacggcagccccactgcacataacagacccgtgcatcttcctcagtcagtttctgaatattgtgaattcaggcaggtgtgtgttctcttctgcatgtttttatgcactgccaattagcttctactaaccacggttcaacagaaaataaatgtgtatttgtgaataacaaactgcacaacctgcaaaccaggagagagggacaggttctgtcaggggtgacaccaggacacagggacaggttctgtcgggggtgacaccaggacacagggacaggttctgtcatgggtgacacgaggacacagggacaggttctatcatgggtgacaccaggagagagggacaggttctgttgggggtgacaagaggagacagggacaggttctgtcgggggtgacaccaggagagagggacaggttctgtcaggggtgacaccaggagagagggacaggttctgttgggggtgacaccaggacacaggaataggttctgtcgggaggacagtgctgatcgtgtctcagcatcaggaaaggagaaaggcagagggagagcgctgagaagactgttcacgccagagtgcttatttatttttaatttactgctataggataagcaaccaggtagtgttcctaacaattagcgttaccaaaattaaagttcaaattatatgtttaaaatattgtagaagatatatatttatactggactacttttacaccttctaatatcctgtccaagtttgggcgcagatggtggagttgggctggcatcatgtcctgtggccgccccacttgcctgttggtgccactccatcccgggccccagggatgccagctcagggctgaccacagcagccctgcgtgggcatcacctcctaccccagcccccatcctgggctgctgcggccgcctgcttttgtgaatggtgttttgttggcacagggcctgtcctgtgttttcacacaggcctgtggctcctgctgtacaagtggagtggggaggagttgagatggagatgccttggccctggacacttacctgtccctctactggcccagctcatctcctcctgtgggcaatcacgcgtgcactggccaccctcccaccccacagcacacaccacgaggggatggcacagggggaagatgaggctggaccgtgatgttatcaataggctagaacgtccttcaaacactgaacctgcatctttcctcctcttactactgaacactttgtgagctctggtggtccagggtgcagcgtttgtccctgggcatgtgatggggagtcctgggcacatcgagatgctttacttctttctttcgacctcttaaaaaactaaaccaagccaaaccacaaaggaaatctgcacaacttaagagaaacttgaaagggatcgtgtaactactagtttgtactaagtttttttcaagaaagggaaacaaatttatatatatatatatatatatatatgtgcaatatatttttacactgtgtgattaacattagggagtactgagtgcatcactttatcagtgtgacgggtgatgtccacgtcatggctgttctgactctgaaagccacttctgctgatgtctaaaccgcactcaccgcggacgtccgcggggtggggtggccctgctgttcctcctgcaggtgagaggtgtggtgttgcctgttggacttgctgttgagcctggcttgcaaacctgtagtgaaacagctcgtgtctgtgtgcacactgctcctgtgtctgctgtcgttaacattgtgtgtcaagttggtaaagtgacaaataaaggtgttaaaacatgga

SEQ ID NO: 13358 - DNA, 974 bp, Homo sapiens
gagctcaggtgcccctgtgatccaggtcttctaccctgaaaccccaccctccatcaaggtcctgcctgtagagtctaccttgcaaagcctcctgctcctacccatgctacaggccaggaaccagagcccatcatctcagaggcccctggatgtccttcgaaggaaccaggaccctcagagcccagcatccatctctgtcatcatcttcatcacacccaaagaagagccagccttgcaggagggtttacatctccaggaagatgggctgccagcaactgcagaggatgcagccacctgcttaactgtgctgtccagccagccagccagctgcagggcctcttgctgcttaagagctgatgggccgggcatgttggctcacacctgtgagcacagtactgggaaatgggagcacagtactaggaaatgggagcacagtactgggaaatgggagcacagtactgggaaatgggggctcacagcactgcaaaatgggagcacagtattgggaaatgggagcacagtactgggaagtgggagcacagtactgagaagtgggagcacagtactgagaaatgggagtacactactgagaaatgggagcacagtactgggaaatgggcatacagtactgagaaatgggagcacacagtactgggaaatgggagcacagtactgggaaatgggagcccacagtactgggaaaggggagttcacagtactcggaaatgggagcatagtactgggaaatgggagcacagtactgggaaatgggagcatagtactgggaaaccccagacctggattctgagtttttcagcctagcccagacttcttatcttagtagacaaaaagagtcaataccagagaaccagaggcatcctctgtattttaatgaactctgcattttaatctgtttagtagtcattttttaaaagataatcagttttccaaatatatctataagttactacgtg

SEQ ID NO: 13359 - DNA, 727 bp, Homo sapiens
ctctagaccaccttcagctcttttattttatttttttagttttattttgcacgtgtagagtttttgtcatcagacaaggactttgatcctgtcccctttggcatgcgggaagcagccgcggggaggtaatgaattgtctgtggtatcatgtcagcagagtctccaagccccacgaaccctgaggagtggagtcatacgcgaaggccatatggccatcgtgtcagcagagagagtctctgtacacagccccgtgaaccctgaggagtggagtcatacacgaagggcgtgtggccatcgtgtcagcagagagagtctctgtacacagccccgtgaaccctgaggagtggagtcatacgcgaagggtgtgtggccaggctgcagagctgcgtgccgtttgtgtccgagcatcacgtgtggctccagcccttgtttctgccagtgtagacacctctgtctgccccactgtcctggggtcgctcttgggaggcacaggcatgggtgtgtctggcctcattctgtatcagtccagtgtgttcctgtcatagtttgtgtctcccaggcaggccatggtaggggcctcgcaggggccattggggagcacagggccaggctggggtgaggagagctcccctgttttctgtttaattgatgagcctgggaaaggagtgtgttctgcctgcccgttacagtggagcgttccgtgtccataaaacgttttctaactggg

SEQ ID NO: 13360 - DNA, 1986 bp, Homo sapiens
tgcccaacagcatcacggcactctgggacaggcacggaggacggcgtgggcagcctgggcctgggcttggcccagggaaacagacggcagacacacctgtcccccagtgatgccgcccaagctgcccatggggcttcctacggaagtttctaggcccgtcacctagggctctcctgttcagccttaacaggctcagcaaatcagggcgtggctggacgatttccttgcatctgagggcagacgctgctaccggagtgacctggacgtggccagatcttctcgcaggtcacaagaagccagtgagcccttgccttggtttctggaagttcttttccttggctggatttacccagtggttaggttgcatttctaccccatccagaacattcttggaagagcacccggagctgaagctgtccctgatgatgaaggtgaaacgtcagccctggccatggctccgctcagggccccggtcacctccgagtcactctgttccttgactgtctttgtgtttctgtacctcaaggcactgaagctggaggactctgtccatgcccgtgtcaccctcgtgtgggagcctctgggctcggcaggtccacatttcatgagctgaggcgtgggccagggccatctggaaagggaactcggcttttccagaacgtggtggatcatctgtcgggtgtgtggtgaacacgttcagttcatcagggcctacgctccgggaaggggcccccagctgtggctctgccatgccgggctgtgtttgcagctgtccgagtctccatccacctttagaaaaccagccacttcttttcataagcactgacagggcccagcccacagccacaggtgcgatcagtgcctcacgcaggcaaatgcactgaaacccaggggcacacgcgcgcagagtgaacagtgagttcccccgacagcccacgacagccaggactgccctccccaccccaccccaccccaggagcacggcacacagttcagcctctgagctggctcacacgtgccatccccaccccggtgctccagggaaggaggacacggacccgacgtgggaggtcctcaggcagcagtggcgcctggtgtcaggtctgtctggctgagtcccgggcgtcccctgccatggcctgtgccttgcatggaggcggcggtggcactgaagagatagctttcaagggcccaacactttgcacttcggctggctgtgagtttctgctttgtaggttgtggtcacatttgcaggctgcgggcagtggcaccgacttgggcctccctttctatgtggcatatttatttatttaaacaccccagggagttacgtggtaacaaggttgtccataaagaggttgcttctatatactagaggccccagatggccaggccttgggctacgtctggcttgcatggtctcccaagggaatcagccccatcaacaaagttcaaatcggggcagaggctgcacttgtgcccccagatgtttctgaggagccagactagggctggcattgctgtagagtgacggctgctgcccagagcgtgtcccagacatcacagcggggctcagcagttcccacagcctctgcctgccttggctaagcatgagttaagcagcaaaacgctcctccatgtctggatggggccggcaggtcctgtgtcccctgcacctggaggagagcaggctagaggcacagcggccacatggtgctggctctgaacgttggttggtggctggaaaacagccctgcttctgagggccgctcagttctgcacacgaaaccacctcctgagggctcagctctgcccccgccctgggctgcagcctctgcacgcaagcaccaggcatcctttgtgttgtcaactccgtgtaaccagtaactacagccatttacaattgactccgtttccttttgtaggtttccctgtctgtctgtgttagtagaaaaataaaatcctatgaaatctgagtacgttgaa

SEQ ID NO: 13361 - DNA, 556 bp, Homo sapiens
tggccacccgcccacagccaggccgagagcagacaccagcagccctgtcacgccgggctctacgtcccagggagggaggggcggcccacacccaggcccgcaccgctgggagtctgaggcctgagtgagtgtttggccgaggcctgcatgtccggctgaaggctgagtgtccggctgaggcctgagcgagtgtccagccaagggctgagtgtccagcacacctgccgtcttcacttccccacaggctggcgctcggctccaccccagggccagcttttcctcaccaggagcccggcttccactccccacataggaatagtccatccccagattcgccattgttcacccctcgccctgccctcctttgccttccacccccaccatccaggtggagaccctgagaaggaccctgggagctctgggaatttggagtgaccaaaggtgtgccctgtacacaggcgaggaccctgcacctggatgggggtccctgtgggtcaaattggggggaggtgctgtgggagtaaaatactgaatatatgagtttttcagttttgaa

SEQ ID NO: 13362 - DNA, 484 bp, Homo sapiens
aggccgcccgggctgccgccagccaagtgcaacttgaattgtcaatgagtatttttggaagcatttggaggaattcctagacattgcgttttctgtgttgccaaaatcccttcggacatttctcagacatctcccaagttcccatcacgtcagatttggagctggtagcgcttacgatgcccccacgtgtgaacatctgtcttggtcacagagctgggtgctgccggtcaccttgagctgtggtggctcccggcacacgagtgtccggggttcggccatgtcctcacgcgggcaggggtgggagccctcacaggcaagggggctgttggatttccatttcaggtggttttctaagtgctccttatgtgaatttcaaacacgtatggaattcattccgcatggactctgggatcaaaggctctttcctcttttgtttgagagttggttgttttaaagcttaatgtatgtttctattttaaaataa

SEQ ID NO: 13363 - DNA, 1940 bp, Homo sapiens
agggagcagagacgaagaccccaggaagtcatcctgcaatgggagagacacgaacaaaccaaggaaatctaagtttcgagagaaaggagggcaacttctactcttcaacctctactgaaaacacaaacaacaaagcagaagactcctctcttctgactgtttacacctttccgtgccgggagcgcacctcgccgtgtcttgtgttgctgtaataacgacgtagatctgtgcagcgaggtccaccccgttgttgtccctgcagggcagaaaaacgtctaacttcatgctgtctgtgtgaggctccctccctccctgctccctgctcccggctctgaggctgccccaggggcactgtgttctcaggcggggatcacgatccttgtagacgcacctgctgagaatccccgtgctcacagtagcttcctagaccatttactttgcccatattaaaaagccaagtgtcctgcttggtttagctgtgcagaaggtgaaatggaggaaaccacaaattcatgcaaagtcctttcccgatgcgtggctcccagcagaggccgtaaattgagcgttcagttgacacattgcacacacagtctgttcagaggcattggaggatgggggtcctggtatgtctcaccaggaaattctgtttatgttcttgcagcagagagaaataaaactccttgaaaccagctcaggctactgccactcaggcagcctgtgggtccttgcggtgtagggaacggcctgagaggagcgtgtcctatccccggacgcatgcagggcccccacaggagcgtgtcctatccccggacgcatgcagggcccccacaggagcatgtcctatccctggacgcatgcagggcccccacaggagcgtgtactaccccagaacgcatgcagggcccccacaggagcgtgtactaccccaggacgcatgcagggcccccactggagcgtgtactaccccaggacgcatgcagggcccccacaggagcgtgtcctatccccggaccggacgcatgcagggcccccacaggagcgtgtactaccccaggacgcatgcagggcccccacaggagcgtgtactaccccaggatgcatgcagggcccccacaggagcgtgtactaccccaggacgcatgcagggcccccatgcaggcagcctgcagaccacactctgcctggccttgagccgtgacctccaggaagggaccccactggaattttatttctctcaggtgcgtgccacatcaataacaacagtttttatgtttgcgaatggctttttaaaatcatatttacctgtgaatcaaaacaaattcaagaatgcagtatccgcgagcctgcttgctgatattgcagtttttgtttacaagaataattagcaatactgagtgaaggatgttggccaaaagctgctttccatggcacactgccctctgccactgacaggaaagtggatgccatagtttgaattcatgcctcaagtcggtgggcctgcctacgtgctgcccgagggcaggggccgtgcagggccagtcatggctgtcccctgcaagtggacgtgggctccagggactggagtgtaatgctcggtgggagccgtcagcctgtgaactgccaggcagctgcagttagcacagaggatggcttccccattgccttctggggagggacacagaggacggcttccccatcgccttctggccgctgcagtcagcacagagagcggcttccccattgccttctggggagggacacagaggacagcttccccatcgccttctggctgctgcagtcagcacagagagcggcttccccatcgccttctggggaggggctccgtgtagcaacccaggtgttgtccgtgtctgttgaccaatctctattcagcatcgtgtgggtccctaagcacaataaaagacatccacaatggaaaa

SEQ ID NO: 13364 - DNA, 2222 bp, Homo sapiens
gacccagggttgcggagagacgcggcccctcccgcgtggacatcaccgccatgagcctctttgcgagtgacctctgggctccgctcctcactcctgctgtacaggcactgtcttcagcccgagttccaggggcctcgggggctgtttgtatcttgttcctttgtgaagtgtgttgcagaaccgacgcttactgtgcgagaatcggagggcgcgcacgcggatcccccgcctggcctggaccccgtggggtcaggttccctgccgggcggggggcaccggtgccgccccgtgttctcccacggggccctggtttcgagtctctgtcacagcctcttccggcggcagcgtgcaccgggcgggcctccgtgcacactcagcacacgcctgccacacagcgtgcgcttgcgtgtcactctggcacgaaacctgtctgcctctgtggatccacagcctggcagagccgagccgtcacctgatttttcagtgtttctacctgtgtgctggagctcatgagtattttataaactccatttaggtacttcaggaaacatgcagcattttttaaaaaatgaaaattgtttttctacttcatttttccttttagagtcaaaggatatttatttataggcctttttttttttaatatagaatctgaggctgtttgggctttgacttaaatttccatcaggcctctctccagcaggtaatccctctccttccgctgggtcccctggggaggtgtgaactcaagggcctagccccaaaacactttttctgcttttcttaatccttttccagtcccctctttttttataaacgttggcagtttgatgtttctgtttcggcataacgtaatccatttcactgtagcctaaactccagtccgaggttggatattgttcaaatgagcagggcccgagctggaagcgcaaggcagccgccgccgtgccgctcctcccttgccctcaggccaggtccctgctggaagcggctgcatcttcctgtcagccctggtttccatggtgactggcgtcacgctgccacccgagtatggctgaccttcctgcagagagaggagccgcagtcttttgcttgtggaaggagacgctgggctgtgcggtgcggagggtgatgaggatgtctggtgacagccgtgcggacaccactcctctctgcagcactgcctcccagcgccagggtcgcgggcacatcccactgagagcgggggtcctgccccatcttagagtcaaaggcagaggggcttccaggccctggatggggtattttggtgtcacctgaagtccctctgacatcaccttgtttcatcattttttatgacagaattagaaacccatccttcaagcacaataatcatcacagacttgagtttgcttcctaaagcaaaggctccgggtttgtttggaaaatttttttgatttctgaaatgaattgatttttatatttggggcatctctatagaaagtgaccaccaaggccagtaagtacgggaaaaaatgtttactaacttcctcagagattcgtgatacgcgtttctccactgacagacatttaaaaacaaccttcagctccgtttcaatcaatcacctcgacttgttttttagcatggacactgccagcaggacagacagggatggagtaaaccgaagtcaatttcagggctcttggcgtgttggacacagaagaaatcctagtgcagcctttggtagctaacagtcactgattttataattggagaatgcgtaaagattcatttttcaaggagaagagcctgcaaatggccaatgaaggaggtaaataaactaagatattccgagggaagggacccaggccacctcccttccgcaggtctgcagatgaagggttttttgaatgaaatgccactgtgcattttcagaaaaaaaaatctctgataaacagactttgaatggatgtttgttcctcctgattctcttttctcttcgtggcgacttagagttggcggatattcggaactgtgaatgtacatagcgttgagttaaaccccttgtgtgtgagacaggacgcagcgggcccctggtggcctgggggccagacccgtgggcaggtggggcatgggccctggcctgcggggacctgctggggtgtgagggcagagggagggttgccatgaaggaacttgggattttcaatggaataagtaaaacataaagtctatacttggg

SEQ ID NO: 13365 - DNA, 238 bp, Homo sapiens
accctttccctccagagtcacgcacatactcgtcatcgcatcacttgggagaatggttgtatcttatggaaggaattatcacatcaaggagtcaggggaaagtgactggaagcaaacgccctaaaagttacccatcacgtttcagtgtaaatgagtaactatagaagacattgcgttatcttatttccaaaacgttccaactaaaaaacattttcctattaaaatagaccttccgaat

SEQ ID NO: 13366 - DNA, 534 bp, Homo sapiens
ggcgggcgggtcccgagcccaggagggaacccgcgctcaggcggacggcgccgactcttttcactgagtttccagaggaagactagcgcggccaccgcgaagccgccaacccaccggagagggggcttctgaacttggactcctgggaacatggacaagcccggcgctgccacgccggggcctccaccgcctgggcctgagcctgaccgggccattcccaaatttgggacgcggaaggagaggctctcggagcagaagaggccagataccctgaagcataaagtttacgtcaaaagtttacatggagaaggcggttccgttctgaagcgtggtctgctgtcccctgggcgtgaggcctcctgggcctgtcgggcctccgatttcatcctcagcacgtaatgctcaccaacagcacttgcactgagttgactcttgcacactcttgactccataatatgatgctttttaagatgtatgttcacaccaataattgcctgcttcagaggctaatataacaaaaccaataaaaccgag

SEQ ID NO: 13367 - DNA, 798 bp, Homo sapiens
aagggccgagcacagcaatgcaagtaagtgggcaccctggtgcttcccagaccctgtggagcctcccagcaccaacttgcttaatgtgtttttcttgcttctggtcatggggttagaagacagagcatttcaatcttgtccagcttttctttccttaagggggaaactatattttctgttttatagattccctctttttggcacaagttctatcactcctttacctagggaaggaaaaaaaaaatatatatatatatgtgtgtgtgtgtgtgtgtaatatatatatgtatatatatagtacatgtatatatatagtacatgtgtatatatatattacacactactgttgttttcttttgaaacaatagattattaaaatctgggcatttatatgcaatttagagccatttttactatgctagacacataatagacacatgctttgatgagcttgggctaccaaaacttggagtagcaaaaacctttatagatgatgtttgcaaaataagactgaagagacacgaggcgtactagtcttttatcagccctgtccaacctcccctccacccatgtccaagtggacaggactctgacattctcccggggctcacaacagtatctcaaaaaatatgttgctttgcaacgagtcagaattactaatcatagatcttgaagataagaaagatttggaaccacttcagatcaactcgtttttataatggtgttgttgtggaactgaaagattggggatgatttggttttttccttggtccacaggtaggtgtcacaattgctttg

SEQ ID NO: 13368 - DNA, 1929 bp, Homo sapiens
cccagtcttgaaccccccctttttttctggctcatgtggtgctgcctggtgtcagagcctggccttctcatatctgccttgtccctgcacagcctgaacgcaggcccccagaatagtcctggctcagggcctggaaaaaaaatcacctagtcagaacaccaaattacaactcagaaggttgcttagtgagcataaaattggagcaaagagaagtggatattctgaagggatgcttccgatgtgctgtggtagcaagatgcattgttcttttcgactctggggctatttccagaaaaagacctgggaggggacctctaaaattgggacatccatcctcccagacagtgctgaagggcatgaatgcactcctccctctccttcctttgtttaaaatattcctatcattctccaaaggcctccgcaattacagcattatgcattacaggtttcaagattgcatttaatcttttattagttccatctgcatcacttgcttcctgatgagattttgaggagttgccttaatctcatcagccctgtatttacagatcttatcctcataggattgcctctgggaagatttttgctgatgggcaaatctaaccattagagtcaaggcctggatttcatgccactaatcatgtccatagcctgcatgcggacagatcacctgcccccctcgggttcccagggcctcctgctcccaagctcctctgcctatttgcccacaggctttgcttctctcccaatgcaagtgtggcttcctcagaggcaggtctctgagtctcctggccaggaaagaccctctgatatgaacctgtagcactgcacacctcccttcatagtgcccagccgtcgttattcttcccacctttagggtttgagtagatgactgtgtgtattcatttcctagggctactgtgacaaaacatagattaggtgggtcctacagttctggaggccagaagtccaagatgaaggtgccctcaggggaggatctgtcccatctctctccctaaggctcccttaagactctagggaggatctgtcctgtgcctctctctgttgcccaggctggagtgcaatggcatgatctcgactcactgcagcctccgcctcctgggttcaagtgattctcctgccttagcctcctgagtagctgtgactacaggcgcccaacaccacgcctggctaatttttgtatttttagtagaggtggggtttcaccaggttggccaggcttgtctcaaactcctgacctcaaatcatctgcctgcctcggcctcccaaagtgctaggattacaggcatcagccaccacgcctggccctctcccagtttctgttggccacagaggtcccttggcttgtttccacactgtgcactctaatcctccatcttcacatggccgtcttctctctgcattgtcacatcatcttctctctgtgtatgatggtgcccacgtttccccttgttttaaggacaccagacatattggttagggcccaaaccctgaggccattaggcctgattttaccttgattatctctgttgggaccttctttccaaataagatcacattctgaagtccttggagtcaagacttcaacactccatggcatcctaacgaagtcattgactttctttgttgttactttcagcatatcccctgtctggcacaaagggagcacagttgacctgtgaacagtgcagaggttagggactcagacctaccttgcagtagaaaatttgagtataacttttgattcccccaaaacttaagtaccgatagcctctgttgaccaggaaccttactgataatttaaacagaagataacacatattctgtatactatatgtgttatacgctgtatttttacaataaggcaagctaaagaaaataaattgctaataaaaaatcgtaagaaag

SEQ ID NO: 13369 - DNA, 576 bp, Homo sapiens
ccagctcaccctccctgtgtgaagatcccctgggactgcgatgcggcgtgaggctgggactgcgagtgctgacgccaccttcctgctgaggtgggactgggccctggacacacccctcagcccctctgtcctcattgtttggcctcatgggaccgaggggctggaggagaggcggagctgtgccccagctgttccagcagcttgtctggcgtcaactggctttcagagtgctgacccctcatcactgtggggatcattctctctgagggcagatgaggcgcaggaaaatagtcttggaaatgttaaatatgatgggtaaattaaaagttttacaacattctacctaatatttttcttttaacatactctttctgttctattgtattatggtgtccgaaagctaaataacgactaggaaaaatttttttaaaaaaagaaaaatcagtttaatgtgggaagtacttaagtggtattatattttacattttcaagtatagtgcataaagaatgttttaaatgtaactgttttcatggatttcaattagacatgcctataataaactaagtatgtggctt

SEQ ID NO: 13370 - DNA, 684 bp, Homo sapiens
gcaggcccaaggcagcgggggcccacacccctcacacgcaaaactggcttcttctggtcactggtgtctgaaaccaaatccagagcagcctgtggcctgtaaagcatatatttctaatgactgcagactggtgggatcataggagccttctgaatgaccaggactgctttctttggagctgatgaaaatgtactcttttagcgtgttagaaatcacttgttttattttgtttctttggccaagctgggtctagtgtttcttttgctgggaatagactttcaaaagttgtacttctatcaagaaacaaaactgcccttgcagaaatttcaggtcttttgttaagcctgtattggtcttaaggtgcagtattttttaaattattatttatagaaagaatctataaattcttggggaagtgtgttataagctttaataattacattgagctgcacctcagtggtgtgtcattaacatgcagtggggttaatatctgaggcctcagatgactttgtgccttttggaataaagggtaaaataaactctcccagagtaagagctgtatcgtgaattgtcatactaattattgagggggacttatgtgcttttattgaatggagtgctttacaatttttatttttaaatggggttgggatccttggaatatttcaataaaattgataaaat

SEQ ID NO: 13371 - DNA, 275 bp, Homo sapiens
atactgacttcagaactcaaacaatggaagaacttgcatttttatggaactcagtattaaaagaaaaatataatgtgaattagccactttgcagaatatgttctagactggtgatctgaaagcatctgtagttttccttatactatgtatacatttattgtggtaaaatttaaaattaattttaatttaatactagtgtcatagatactttttgtacatcaaacaattgatcatgtgctgtaaaggaattcaatgaataaatgttatttttaagt

SEQ ID NO: 13372 - DNA, 7871 bp, Homo sapiens
cagctttcatgtttttggcttcttgtaaatccccagttcctcaaggcctgtgccccatgactgcccatgtttctgaggcttcagagtcgaagtttggatacatttcaagtgcatttcaagccaccagagtgtcccattgctgccaaaaatacacgtctttaaaagcaacaaaaattgaaataagacatcgtgaaaatcttgaccattgttgaatgagccagggtgtgaagtttttaattgtgttcatcctatttttctgacaagtccattggtttgttttttgagcattattttataaatgtgccacccacattggaaggagtctttctttagaactttggagtgtaaatcttcatgatgttgtaattcaagaaaataggcactttctctgaaagacctgctccttccacaagaagtgcataggtccataatatttcataaaatgaagaaaaagaatgtggccaaacaattattcaccatggattgcccaactttccaaatctggataaagctgtgggattcttggaagcagcttgagtgttttcatcttgcctgggaagcccaggaattccacctggtccacaccggcagaagttacagtagactgtgaggcaccccaccttgctcctgatgcagtttctgtgccattgctggtgctggtggaggcagcggagcagaggctcaggcacaatgaagcgtggatgtgttctgcaggttgctgcaaaactcaccttattctgacttttggatttcatggcattccaggaagctccttgccatgctgttggcctggaagtccacctgtctggtccatagtgacgtcctgaagagccagtctgtaaaataaccaaccacttacttagcgtttggatagactccatgccttctctctccctgcaaagaaaaatcttgaacatttatgatgtcaattagtgaaagtattgaaaatactaaattataactaaaagcaactttttatgttattgaaaatattgaaagaactgatattaatgataatcattttatttttcatctctctgatatacccaatgtgtggcaatcagcccctaccacgagcattaataccatgtaaagctggctttctggagtctgccaggtccacacgaagtgctacccccagtttctgctgttacttgctgcctccaggccaggggagcaggagatgctcagctctggtgccttttcttttatttcagtgctgccttcccacccacccagtccattcaccctcacctctccctgcatggaggcaacagcatttcaagatgtaccttgggaagtcaggatagctggaagtaagggtttttgggatccctgtggtctcttcactgatcatcgataagcatttaagagtgtgctaacaccattcacagaggtccctggaaaaaaatatataattttctcacaaacaaccaatacataacctatggcagttggttgaataattattgaaaaaaagaacacgactgaaaaagttcatctgatgcctctgagcatgtgataaagtcctgggtagacacggaaacgtgttcttacaaatgaaccttcggatctatgaaagaaaatatagtagggggactaaggaacatagaattttattagcatatgtgattttacccttatctttgtttctaatttaaagaaacaatttcagaaagtgttagaagaattctatgtttaataatgaatattgttgagttcaaaatattctcatatacccagatttacagagatgacacagtattgaaatggcaggtgggctctgtaagttattttggattaatgacattcagggtctttgcagtggggacttcatgttgcctctcactcattcctcatatgtcagagtcttctgtctatatgcacatgctcaaagtccatactcagtaggggaaatctagccggatggttctccaattgttcctcggctggattttcatcatcagatatttcaactcatctcatcagtttcttgtaagaaaaaaacattttcactttgtagcacattttagttatttttgagtcttcttccctaatagtttgtaagcttaaagggacattttattttccctggtaaagaggattctaatatttcaagaatgtttcactggaattgatgggaaatggtttctaaatggcatcgaagctggtctttaatgagtcttttgcaatgacttgggaaaaacaccctccctcactacaggatcttcatgttgttaataatataaacaaacctttgaaattagcattgcaaaagaatcccatttttgtttcgtaccacactgttcaaaggaaaattgtttatctctcttcctttctctctctctcttatttgacagaatagcaagtgtttagataatttcagatatattctaagtattttaccagctgtggaataagttgtgtttgtccatcactgtgtagctaccgttcacatgttctggctctgtactccacgcttatcgcgtgaaccctcacatgttggactttcacagtgtgatctctcacctgtcttggaaactccttcataaagccgctcttccttaggcctgggctgtttggaagtcctggtgaaactttgcggttcacattttaaattcctgaatgaccttttcattctctctttctttatctttgtttttgtccttcattccctccttttgttcttccttcctgccttcttttcttctttcctttcttctttctttaattcttcctttcttcctattttcttggtacaagtggaacaaaaaccaacacatagttttaagctacacctttctgcacctgatgtaaaatgacattaatcactatttaacttctaaaattatttctgaatacagttggagataggctggttttcatgaggaagctggcttggctttagtcttacatttaaattctttgaaagtggctcccagtgctattcagggtcctttcttgaggccagactcatcaccatctactattgattttacagtgcactgacagtttacaggaaggagaagaacagaatttctgcacactacacaacatgtgggcttcctgtagctccagggacatgtagctttggtgaaactggggttttgtaacctctgaatgatatggacttagtgaattctaaggaactcagggggcacgtggtcaggctccaccgcacagaagagccacagtctccagactcatggcgttccctccagaactccccattcccctctgagcatatttctatgctgctgcttcttgtgacttacatgaggcatctcagcttcttcatgtttgtagggatggttccctaagcctgttcaagtaggctctcactagagttaccattcatatttgagaagaaaagaacatttaataaatgtatgtgtggggctgaggttctaaaggaattgaaaagagacgataaacattgaatgagggtgagggcatccctgctggggagaaacctctgtccctaggaagagtccgttcatgtcatgtggtttgggatgaaccaggggtctggccccatcgggtcacaggtgatggcaaatagaaaagaagcaaatggaggaaatagtcggataagtaggtgacgtgaaaggcaggacctggtcaccccagcaagtgctatggacagttcccggaaacggttgcccacttcacaggtccatgggtctgacccttggactctgccaggatcaactgcccagagtgccagagttttagccaaaggtgtacttacttccttatttatctgcaaaaggatggaaactgtgggagtcaaagcctattttgctgagtgttcccactggagtctctggtagaattagcaggtcatgctgtcaaaatcatggacaaaggctgggtgcagtggctcatgcctataatcccagcactttgggaggccaaggtgggcggatcacctgagctcaggagtttgagaccagcctgggcaacatggggaaactccatctctacaaaatatacaaaatattagccagccatcgtggtgcgtgcctgtggtcccagtttcttgggaggctgaggcgggagtatcatttgagccaggaggttgaggttgcagtgagctgagatcacatcactgcactccatcctgggtgacagagagagaccctgtctcaaaaaaaaaaaaaaagaacaaagtcttagcggggggtctctatgtccccaagtggctctctaaggggatccattagcgtataattgaatatcaaagggaattttaccttaaacatatatcaagtctatactcagctaatcgttttgtctaaacacagccttgttagcatttgaatttacaaatattcatttgcttatttgcagtgttccttttgcttttagaataaatcataaatatttccccaatactgtcaagatacttcttcaactttgtccctgaaccatcagctttctttagggtccgggtatcctttacacttcaatggggttttcttgtgtgtgtcattgggggtaactccattgacctcagcatttctatctcaagagatggctctggaacacagaaccagaggcaacaggtactaatggttgataaaattaacagcgactgcataaccattttccacatggcagggctgtgcttaagccccacacctccaataatcaatttctatgacggtactaataaccttaactatatgcaaattcttcaccacttatgatatggtacaaactggagtttacagatggccttggccttgcctagcccatttgttcatcctaacttcttcatcacttcctgatgcacttggggaagcatgttgacacaacgttaccaatatttgattacctatggttatctgcaattacctacgcttatcttatcagaccctagatgccatttgagccccttacttctttgggcagtgggtgaaatgggagaacatagagaaatgttcactttgacctaagaaacgcataaaagggaatgccatgcacaatgtaagataaaatgtttggggacaggggatcatcgtgaaatttatttctgctattctgccctattgaggtcattaattataatggatttaaagatttttttttaaactctacaaacactaagccaaggaattcaggttatctgctatgttaacctaataaagcaaaggaaaataagttgctttaatccttgcttgttaacctaataaagcaaaggaaaatatgttgctttaatccttgcttcttttctcttttggtaatagaaaaggtaaataagatgtaatgttgaactgctggtgatgatttctaaaacgactctttaaatactcctttcctatggacttatattaaagatgcattgtacacattgttttagcagatagatcaaagatatactcagtggtcatctgttgcattatcagaaatttgatacatgttacagaagcatgaggaagggaatcctatccacttttgaaaatagagttcacattgcaagcgacatagggcattatcaaaaccaattcagagcctggcacaaaatgtatacttcctagtgaaagctgtctcaaaacacagcctttttgatggatcatattagctcatatctgccatagaaaggcaatcaagcttactccctgcaatcggagtcaatatcaattcttgctcaagcaaacatgttttacagtgttggcgcaatggcaggaactagtcaagggcactttcagatctggaaagaggaaagaggaggtagaaaatcactcttttgtgtttcttaaactgtcaatcaagcaagaaaatttattccaccccttcatatttgctctaaaatctggggccagtagttgaaatgtgatcttgttctttctcagccttttggcaatttaatgccaaatattccaaatgttagatgaatggcagtaataaaatgattcaaatgtttgataaatacaagctgagagcaaaatctggactctgaaaaatcggaactattttatcatgttgctaaaatgagagcatcattttcttccctctctgtaagtgcggtagtttaatttcctagaaaaagttgctagtgccttgtttaagatgatcatttatcatttcatgtggatattattggtctaattagaaggagaagattgattggatttactttaaagaaaattattctcctatgtctctttgaactcaggaatagaaaatgaccaagaagcacatcatcttcagatgtgatttttgccctcactggggatgtagaaccagaataggtacaacatatgctcagaagagaggtgacttcagtattagccttctagaaactaacatcactttaatttttacatgttccaaaaaaaatcatagtgattgttctgtaataagaatgttaacgtgatgcctatagaagttagaggtttttgtttctgtttctcttcaggcaagtccatagatagaggaaaatcagacacaggctggtgacaactggtatagatacagtgagcatggaatgagaaccacctacaacattgcctgattatttttaagtttatatcaaaactgcttcacaagttcacaaaagttgtcactcttaatttgggttaagaaaagtaatagtattatctctgctgaagttgattgtttttctcttttaccatgactgttggccaaaagcaagctgaacctctgcactttgaaacaaagcacagtatgaatctttaacccaagcacttagtttcaccactgagattctacatcatctgcaagaaaatgcacaaacttttggtccaatgttggattcttcaaaagtgcatagcaaaacttttgtgctatgccgcttgatgtaacttttaaagatgttatcaaatgttaaatgcctcattctgcgttaatttgctgttggctgttttgtgaacacaaaataaacttgagatttttttttttttttttttttgtgaaactcctccaaagccaatttcagcccttggtaagcttgcagacagttactgatcttaaatttaattttaaaagacaatgtatcttaattataatttagctttttaaaacaatgagatagctttacatttcccctttgtttgaatgagaaaatggatcttgggttgctatgctagaacacttgtagattgctgggtcctttgtaagggggccatggacacaccacactttctttcaatccttacatttgaagcattgatattcttcaaaaccttcttgttacatgtgcgcaatagaaatttctaatgttcatgacttttatctttcctgtccatcaattcactggttgtaaatgcttcctgagagctgtctaggtctgtatcccagattgttgcttaatgacatctgacagatgcattgttttctgaaatcagcttaagacaccaattgtggcaactggaaactcattacctgctgcattggatcaactatggaagttggagcaggggtgggcggaggtcacctaaccaatcaatggaaggcaactcacacctgctccaagcctcagctttgagaaacaaacacgtttataagaaaaaatatatagctattattacagaagtgaatatgttgtgctctcttactgctcttggtgcattgacagtttctgtatctcaaccctattcatctttatgaaaaagcattctgaagatctatcctcagcactgctgagtgtgcagtcacactttcctaccaacccccttcttaccatctctagctgccatttgtggggggaacaaaacaagggaatcctgattgtgtacagtataaattgtattatattttttgtacttatgttttatgtaaatagtttgtctcattcaattgtatgtgagcattgaaataaatcctaccatttaggggacaattta

SEQ ID NO: 13373 - DNA, 136 bp, Homo sapiens
gagagaagttggatcagttcaaagaacccatgattcaatgatttacccatgcctgccacacttccctcagccagacaaagcagcctgttcataaatatacaacatgtccccttcaggcctgtttatccagcctgag

SEQ ID NO: 13374 - DNA, 1115 bp, Homo sapiens
acttgactgggagtgtttttctgaaatattgtagtcttccctgatcttgtagagacttacagctgtgtccttagcaaaggagcataattgtctttggtttggaatgagaaattactattactttccttaactgttggagaaaacaaacgaagaaaaacaggtagatttaaaatctgcttttgatgctattttcttaaaaattgtacttactgcctttccatgcacctggatgcatgaaaagatgaataagtgatggtcatggttatgggtaggaaaataagatgccaatagctcttcacattataaacaatatggcttaatgcctcgataaggagaaatgatttttaaagacagtatatattaccaactgtttgtagtatcctataactttgttcatacttaagttgtatctctttcctttttgtacttcatggcaaaattaattttctaaaggattcagagaggcgtttatattttataacatttattagaaataatttgttccaccactagattactgtattttatggaatctaagctgtatatgtgtacatttgtatacatgtatgtgtaaatgtaagcctgacgtgggttcagattccagttttgtcatcagcaagaggcctcggacccatgacttactgcctctgagccttggctttctgtgtatctctgccactgggataatggtacacataacagtggagtggggaccaatttctaaaactcatggcacctagtctttggtccataaatggtgtttgttattttagacactgagaaaaatcttattcacagaagttgcagattatttctgctagtcacttttttatttcttgagagctgccactcatttaatatttctcatttatgagaagagacttgactgatttagataaaagacgaattaaggaaaacctttgaacgtgagtagacaagcttcatatatctgtaaagtgaatattgaatggtagcttgagtcattcgtacttatcacagaaaagaattgaactcccagtcatacacctgtaactgaaataccaaactgtcttaatggagatgtaatgaagtaagatggtcacatctttaactaaacttataaaaattggtcagtt

SEQ ID NO: 13375 - DNA, 2857 bp, Homo sapiens
caagaatcaagggcaagccttcctagaatagctttcatcccaaaatttgcttggaaatagttagatcatttgatttaattttcacttttataaaataagtgtaggaatcctaaaattgattatttcatttgaaacacaaattcagtaggacgtaatgcatgaaataatttaatttttgacatgtacatcgaatcataatttaaaaacaaggtctgaccaggtgtagtgcctcatgcctgtaattccagcactttgggaggccaaagtgggtggatcacctgaggtcaggagtttgagaccagcctggccaacatggtgagaccccatctctacaaaaaatacaaaaattagcctggtgtggtggtgcacgcctgtagtcccagctacttgggaggctgaggcacaagaatcaatagaacccaggaggtggagactgcagtgagccaagattgtgccactactgtactctagcctgggcagcagagtgagaccctgtctcaaaaataaataagtaaataaataaataaataaaataaaaaccaggtcagtacctggagaatttgaatgatagagaatgatagagtaataccctaattattagttaaaacctacaggccgggtgcggtggctcacgcctgtaatcccagcactttgggaggccgaggtgggtggatcacttgaggtcaggagttcaagaccagcctggccaacatggtgaaaccccatctctactaaaaatataaaaatcagccgggcatggtggcatgtgcctgtaatcccagctactcaggagtctgaggaggagaatcacttgaacctggaggcagaggttgcagtgagtcgaggttgcgctactgcactccagcctggacaacagagggagactctgtctcaaaaaaaaaaaaaaacctacagctgttcaaggaccagctgacaggtcaagtgtggccttttctggtctttgaacacatcatagaaagtgacaaatgctgcaaagccatgaagaacatgaactataaacgggtagactaactgcccagcttagacacttatctatgccacaaaacagctgaatttgtcacatttatatattgcaatatgggaagtattgagatcaaaacaggattccattgacctaattatattaagctaataaactaattttttgaatttttgaatttgcagcttttttaaaaagatagcagagaacggtgggctagagttgtcacccagctgttgtctcctaagcagtggatttccaagcactggcatttttgggtcccagggcctgaggctacctcagaaatatctcctgtgtttctggtggtggcgtaaaggggagagccggtgagaaactctgcacctgcacctacggggtgcgtacatgtgactttgggcaagtgacttgatgttgtagtttttttcctaattttgtcttgacgtccttctcaggagagagtggctgtaaactctagccctgccctgacggggatcctggggatgtggtcgtgggtgtttcccatgtgcctttcatgggatccttctttgacctcacagacggcctgattcctgagtgtccaacctgtggccaggtgtccctctcgcaggaagcttgtttatcctggcacatgaccttgtggctctcatctgacctgtgtccagtttattcctactgagacagccactctcccggagagccctgaccgggaaagaagttaggatggggtagaggaggcaactcatcagaacccaagaaatgacagaagcagtttattgcttacagatccagagaacagagggcagcacgcttcacagggccagcaaaaagggggagccattcaggacacatgggctcaaccagaaggtggagaacgagagagagagggagctatgagccaaagccttcactggggcccagggtgtcatctatgcaggtttcccctggaggttctaactggggggtttagagcaagcaggcatgagccccggggactcacgctgtgactgagaggggtcggtgtgggtaggatatcggcatggtccatgtgggtgtgggggtcagtgggacaagtcaagcaggtggtatccagctgtccatgggaaggtggtcccaggaggcggttttgtaaggcagatgtctggatcgaccaccttggggaacagtgagaagttgtataactggaaactgtgttactaatccctgcttctagtatgagaaagtccaacttacattcaaatagatgctcaggaaacataaaattcaaagaattcccaaacttgagcttcctgagcctcagtttttgcatctgtcaaatgggtatggggagaccctttgcctaatgttgagagaatccaagcctgagcagggctggtctactgtggacacttagttgtggaccccaacaggccaaagcccttgcctgctgagggctgctcccaggaggcctcacacattcatccggcctcccaggaaacccctgagatgtgctgggcttttgccgtggaacggtgtcggtgagcatgtggccagtagccagagtcttcaacataggtgggaggtctgaaattcgtgcgagaatgaaccaagggtgtggctgtatccttcatggtgagcttggggcctgggcagccttccctctgctgagtcctttggtcaaatgtcatggtgttctgaaccagcactgcagatagaagtataatgtaagtcacacacgtacttctttaaaaagatatgttcttcagtgactattagacaaacagataaatgaaggtaaagggaaaaaatggcaactttagcttttttccccatgtatgtaattttaaattttcttatagccccattaaaaaaaggaaagag

SEQ ID NO: 13376 - DNA, 1826 bp, Homo sapiens
gcctggagtccaccagcctgccccatggccccggctctgctgcacttggtatttccctgacagagagaaccagcagtttcgcccaaatcctactctgctgggaaatctaaggcaaaaccaagtgctctgtcctttgccttacatttccatatttaaaactagaaacagctccagcccaaaccttgtttatggggagtctggttggatgtcatttgaggatcattgtgcccctagaggtgccattagcagaatttgccaagatccgagaaaaattttagctttagttctatttcagcagtcacctgacgtccttgtctatggtcttaaaaacaagaaggcacacatttgagaagatgagattaaggttaggagaaaacctcagtcattgcatgctttttagtatgggccaataaaatctcaacacctgtgggagagtaagaactaagggaatgagtttgggcggcccctcataaaggaccttagaggcagggaacagcaatgccaaatttccctctctcgtgagatgggggatcctgtgcaggctgatgaggcacccatgagaaaagccgaaaaagcatgcatcttagaaatagcccctcaattccaggagtcaacatgccaaagaatgaggctggagacaggtagctccgagggaggacttctggcatgagatctcggcacggcaagcccagcatcgcctcagcccagacaggctccaccaggagatcaagcaagggctgcctttcaggagtcacctcctgagccacttcagagttctggaagtgaccacggaccagggtggaggaatagacttctagttcattctgggacacttgagccagagagttgaaagcttggaaagaccagataagaaacctgccctttgtctccctagggacatgagacaccacattccatttgtgctagaaaaacctatccactgatgagtctaactgttccaaacgcctcccacctggtgtgcacagctgcctgggtccattgtcacttgggtgcatcaggttgtcctccgatttttagatgagtttcctgtctagagatgtcctagtctgctcactggctggtggcagtagggtaccctgcgtcctcgaaaagccagagggttcacctagtcagacgaaactccagaacagtgcttgtggagggcctgactgtcctgctcacccacagccgatctgctgcaggtcagcaactgtgtcgtgagcagctgccaaccaccagcctttctggtgctgttctccagttcacgtctgccagctggtgagggcagaggcagacctggtcagacccagcgcccctcctccctgagggagcatggcacagcctcacacttgaaagacggtgtttggtttcccatctaatcaacttaagggaagccggcatgtacccttcaaggccctgtcaccacctatttcctgatcagttggtataaactgagggtggcttttagagacccagacttggttggcagcgctgccatggaacaccccagcaagcacctcccagcctgcctttcggagcagcacccaggaggggatgccgcgctccagcaacaccaggtcaggcctgtgcagacccctgccctgccgctgcagaaatccagaagcatccttaatgcttctcagtcttcagccagagggagggctgttatttccagaggtgcgctttttatgtacttttagctagatgtggcatgcatctgtgagctttagatcattaaatccaaaatgtttgcctaaatgagtttatcagttgttaacttcaagaatattaaatgatttataataaagctcctgcatttctctcca

SEQ ID NO: 13377 - DNA, 1613 bp, Homo sapiens
ggagcagggcacaggcgctccgggaacagtgcatgtgcatgcataccacaagacatttctttctgttttgtttttttctcctgcaaatttagtttgttaaagcctgttccataggaaggctgtgataaccagtaaggaaatattaagagctattttagaaagctaaatgaatcgcaagttaacttggaaatcagtagaaagctaaagtgatcctaaatatgacagtgggcagcacctttctagcgtgagctgtagagtaacgagaagtgctttatactgaacgtggttgatgggaggagagacgaggcattcgggccggtggggcgtaagggttatcgttaagcacaagacacagaatagtttacacactgtgtgggggacggcttctcacgctttgtttactctcttcatccgttgtgactctaggcttcaggttgcattggggttcctctgtacagcaagatgtttcttgccttttgttaatgcattgttgtaaagtatttgatgtacattacagattaaagaagaaaagcgcgttgtgtatattacaccaatgccgccgtgtttcctcatctatggttctaaatattgcttcaatttcaaacttttgaaagatgtatggatttccagtttttctttactttctcccagtatgttttaacaaaaaaaaaaaaaagcaggaaaaaaggaatatttagcagtattgttcgttctgatatgtgaatttgtttgtgacaactaaacaaggcattcagcagtttctgacaattaacatacatcattccacactccttgtcaacaaagtgctttttcactgcctaaaattttagatgtagatatttgaaatagattttttcatttataccagttttctttatgatgatacagtgttaaaagaaaataaattacaattgatctgtcatccatatttgctaagaatgtctatttccaagaacctatatcttacaaaatacacattcttgcttgtgtgtctgtgtgtgtgggtgtatgtatgtccacgtactagaaaaattacctgtgtgagattttattttgacagaagctatttcatttgctgttcatcttgtacaaactttgtttttggttttttagtataaatgtacatcagtttgttccttttgtactgtatctattcttctgaccatctagtgactcaggatattaggccagttgaagtggagttataggattttcacacattcacgcatacttggatatcaaccctctctacaggtccgtttccttacacattttatcccctcagaacacgataaaccatggccaattcagtttcactttggggccaattacttgaagtatccacagaaaatgtaaactgctcgccttattcccccaaactttttgttcatgtggcagggagcagtacacaactatggaatagattattaaaactgaacttgaagctaacgttagaatagtggttaacagagctaagaaataaggctaaccatcgaaaagaacatgggccgcgggtaaactagctttgctctttagatgcaagtggctgaggccaataggtgcctagtaaatgttaactgttcttggaaaaaataaaaacatcagtaacaaaa

SEQ ID NO: 13378 - DNA, 54 bp, Homo sapiens
catgtggggagtgtccccacccaatgctttggaaaatgcaagatctaaattatt

SEQ ID NO: 13379 - DNA, 2287 bp, Homo sapiens
ggcacgggacgccatgggcactgcagggacagtcagtcaggatgacacttcggcatcatctcttccctctcccatcgtattttgttcccttttttttgttttgttttggtaatgaaagaggccttgatttaaaggtttcgtgtcaattctctagcatactgggtatgctcacactgacggggggacctagtgaatggtctttactgttgctatgtaaaaacaaacgaaacaactgacttcatacccctgcctcacgaaaacccaaaagacacagctgcctcacggttgacgttgtgtcctcctcccctggacaatctcctcttggaaccaaaggactgcagctgtgccatcgcgcctcggtcaccctgcacagcaggccacagactctcctgtcccccttcatcgctcttaagaatcaacaggttaaaactcggcttcctttgatttgcttcccagtcacatggccgtacaaagagatggagccccggtggcctcttaaatttcccttccgccacggagttcgaaaccatctactccacacatgcaggaggcgggtggcacgctgcagcccggagtccccgttcacactgaggaacggagacctgtgaccacagcaggctgacagatggacagaatctcccgtagaaaggtttggtttgaaatgccccgggggcagcaaactgacatggttgaatgatagcatttcactctgcgttctcctagatctgagcaagctgtcagttctcacccccaccgtgtatatacatgagctaacttttttaaattgtcacaaaagcgcatctccagattccagaccctgccgcatgacttttcctgaaggcttgcttttccctcgcctttcctgaaggtcgcattagagcgagtcacatggagcatcctaactttgcattttagtttttacagtgaactgaagctttaagtctcatccagcattctaatgccaggttgctgtagggtaacttttgaagtagatatattacctggttctgctatccttagtcataactctgcggtacaggtaattgagaatgtactacggtacttccctcccacaccatacgataaagcaagacattttataacgataccagagtcactatgtggtcctccctgaaataacgcattcgaaatccatgcagtgcagtatatttttctaagttttggaaagcaggttttttcctttaaaaaaattatagacacggttcactaaattgatttagtcagaattcctagactgaaagaacctaaaaaaaaaaatattttaaagatataaatatatgctgtatatgttatgtaatttattttaggctataatacatttcctattttcgcattttcaataaaatgtctctaatacaatacggtgattgcttgtgtgctcaacatacctgcagttgaaacgtattgtatcaatgaacattgtaccttattggcagcagttttataaagtccgtcatttgcatttgaatgtaaggctcagtaaatgacagaactatttttcattatgggtaactggggaataaatgggtcactggagtaggaatagaagtgcaagctggaaaggcaaaaatgagaaagaaaaaggcaggccctttgtgtctaccgttttcagtgctgtgtgatcatattgttcctcacagcaaaaaagaatgcaagggcataatgttagctgtgaacatgccagggttgcattcacattcctgggtacccagtgctgatggggtgtgcccacgtggggacatgtccttggcgtgcttcctcagagtggcttttcctccattaatacatatatgagtactgaaaaattaagttgcatagctgctttgcagtggtttcagaggcagatctgagaagattaaaaaaaaatctcaatgtatcagctttttttaaaggacattactagaaaattaaacagtattttttaacatgtgtgactttcatgcttctggggttggagcttaaagatccaaactgagaaagcaggccgggcatggtggctcatgcctgtaatcccaacactttgggaggccaaggagggtggatcacttaaggtcaggagtttgagaccagcctggccaacatggcaaaaccctgtctctactaaaaacataaaaattagctgggggtggtagcacatacctgtaatcccagctactcaggaggctgaggcaggagaatttgcttgatcctgggaggcagaggttgtagtgagccgagatcgcgccatcgcactccagcctgggtgacaagagcaaaactccatctc

SEQ ID NO: 13380 - DNA, 137 bp, Homo sapiens
gagtctgctgggattgagcaatcatctcctgcccaagtttcctccttgccctgaggaccagtgaaagacagatcataggagagacccttttgctgctacttcattcgttctgacctaataataaaagttagaaccat

SEQ ID NO: 13381 - DNA, 1702 bp, Homo sapiens
tctaggaatcagcttgcaacagagcacaaaaaacaccaaaaaaatttcaaacaagaaaaaaaaaaaaaaaaggaaaagaaaaaaattgaactgtaagctttaatgattactttagatttgttttattttccctcctgcagtgaattaattggatatatatcagctgacactgatagattgatatttctgatcgttatttttgtgtaataagcatggaaatgaactttatacacaccactgtgttgtcagagataaatattaggggttgtttttaaagcaaaaagaaaaaaacaaaaaccaaactattaaaatcctcctataaatattctttttctttacagtttttcaagcatgcaaaacagtttattgtaacttactgaaaaatattaacaattaattgtgaatacatgctgttaccagcttccttattcctaatacctggaaaatttttttttcaacggatagattttgatgtaaaaaagaccgaaattatcaaggtatcttagttgaaggacttgggaaatactatcaaaattaatttcttaggaaaaaatttaaaagtatatttaagtactctggatagactgaaacgtttccatgttatttctgcagttgtagacttaggcttatttgtaaagaagcatgctccattgactgccatctctagtcttgcagtgggtggtattaacccatagaaagcaagcagttgtgtatcacatagacaatggttatgatgtaaacagattcagttgttttgttgttcattcgtcatatgtttgtgatagggatgttgggagcacagctctattctgcctgctcagacttaagttagacccttatcttttatattatgtcatgaaaaaagtctcctaaaattgtgaaactagttcttgatgagtgatgtgatcatcagcaataaagatataataactctgttttcttagcctgtatagaggagaggaacttgcttggctttaaaatatatttatttgccatttaagtataaatatggaatctgtttcttattgggaagatagaatatatatattttcctttaaactttttaaggtcacttttaaataaccaaatttgatttatggtttttaacaaaggactaaagagctgaaaccaacctagttttgtttttgtgatataaactttaagtgtcgagggaccatgccagcaactaccaaaaatctcttaaatcttcaggtacagctggcattttggcagatgcatagagacatctgagaccctcagaaaggaaggataatccaagaatataggaaatctgtgttctcttcctttcattttatcccttatatttctaaagactaattataagtaatctgacattttaatgtagctactcttatttattttttctttctgaggtattaaaatatctggactgagttttgccaaatgttaaagggagaagagttactgaagactttgaacacttgctttttgtgattgcttatgtcattagtgcctcatgactgtgtttgatgtcctttattgatacaaagtgagcctgtgccttcattatcttgcccattttaatacaaatggaaacctggtgtttgaaaatctctgaactgtgtgggttttggaggaatatacctgaattttattcaataacagtttctggacaggaagaaaaatacagttacatatttataaaatagtcgttatcagt

SEQ ID NO: 13382 - DNA, 4785 bp, Homo sapiens
aggcgggacagagcccacctgtctttgctacctgaacgcaccaccctctggcctaggctggctccagtgtgccatgcccagccaaaacaaacacagagctgcccaggctttctggaagcttctggtctgagggaggtgtctccgaggatccttttgcctgccgccttcattgatcctgtattaagctgtcaactttaacagtctgcacagtttccaaagctttactactcttagaggacacatgccttaaaaaaggaggggaggaaccacgctgccaccaaagcagccggaagtgccttaacttgtggaaccaacactaatcgaccgtaactgtgctactgaagggaactgcctttcccccttctgggggagacttaacagagcgtggaaggggggcattctctgtcaatgatgcactaacctcccaacctgatttccccgaatctgagggaaggtgagggagtgggaagggggatggagagctcgaggggacagtgtgtttgagctggagtgctgcgggcagcctttctcatggaatgacatgaatcaacttttttctttgtttcatcttttaagtgtacgtgcttgcctgttcgtgcatgtgttcataaactcaacactttaatcatggtttcatgagcattaaaaagcaaagggaaaaaggatgtgtaatggtgtacacagtctgtatattttaataatgcagagctatagtctcaattgttactttataaggtggttttattaacaaacccaaatcctggattttcctgtctttgctgtattttgaaaaacacgtgttgactccattgttttacatgtagcaaagtctgccatctgtgtctgctgtattataaacagataagcagcctacaagataactgtatttataaaccactcttcaacagctggctccagtgctggttttagaacaagaatgaagtcattttggagtctttcatgtctaaaagatttaagttaaaaacaaagtgttacttggaaggttagcttctatcattctggatagattacagatataataaccatgttgactatgggggagagacgctgcattccagaaacgtcttaacacttgagtgaatcttcaaaggaccctgacattaaatgctgaggctttaatacacacatattttatcccaagtttataatggtggtctgaacaaggcacctgtaaataaatcagcatttatgaccagaagaaaaataatctggtcttggactttttatttttatatggaaaagttttaaggacttgggccaactaagtctacccacacgaaaaaagaaatttgccttgtccctttgtgtacaaccatgcaaaactgtttgttggctcacagaagttctgacaataaaagatactagctaacacgctgtgtgtttcctttatcagaggaggctctaaaaaccatggaggggaggcttatttttgttttggctttttggtggttttttttttttttctttagagacagagtctcactctgttacccaggctggagtacagtggcgtgatctcggctcactgcagcctctgcctcctgggttctagcgattctcctgcctcagcctcccaaggagttgggagtacaggcatgcatcaccacgcctggctaggttttgtatttttagtagagatggggtttcaccatgttggccaggctggtctcgatccacctgcctcagcctcccaaagtgctgggattacaggtgtgagctaccgcacccggccggctttttggtgttaatgctatggtttcagtgtctgggctttgtgtttgtttcatggacttgctcatcaggtctaaacacagatctgcagctgtctccactgctcttgtagacactgagtgtgacttcaagaaagcaaaagaagggactggtaaatgaagtcacacacagctgaggacttgaaatgtgtttatgtcagacagtcccctatgtcagccccaaagtgtgcctgatcttgcaaccctggatcctagaacctgcctgcacctccctgtggaccagaacacacaggtaggcagtttggttgccaatgtacccaaaccaccaggccaggcgtctagcatgagcaagcgccacttctcttgcagaccactgactcccaccctctgctcatgctcacggatggcttcttcccattctgcagggattgggatggaacctgaagccaggtgctgcctgaagcctgtggccccgccaggcacccaaggaaagccggcaaagacttggatgtgtgttgtctttgtttttattttaggctcagaaagaatttgacagaagtcttctttctactgctcacctctcaggattccctctgtgacttaatttactctggaaggctgtcgcccgccctcaattatagatggggaaataggcaaggaaaggcatgactcagattgggggggttagagcagcaccatagttagaacatagatttacatgtgagcctttacatggcatagttgtggttttgttttagccttttatttagaaataattacagactcagagaaagttgcaacagaacgtacagggaggcctgcgtgcccttcagtttccccagtggtagcatcccccatcactgtagagcagcatcacagctgacaaagtaccgttgagcttcccctagccacagaacctattccaattttactgcttttacatgcactcattggtgtgtgtgatgtcagttgctttcaacaaggtcagtgaagtgcagtcgtcccttggtatccaagggagattggttccaggaccccctccccccacccctgaggatacaaaattcacagatgctcaagtccctgctatacagtggtataatatttgcatagaacctgcacacatctttccttaccctttaaatcatctccaggttacagatacctagcacaacataaatgctgcataaatagctgttataccgtgtgtgtctgtgttttaaacattgtttatttgagacagggtctcactctgtcaccaggctacagtgcagaggcacagtcacagctcattgcagcctcaacctcctgggctcaagcagtcctccacctcagcctcccaaagtgctaggatgacaggtgtgagccactgtgccccaccaaaaaaagttttttcaaatattttctatctgtggttggattcagaccacatgaacactgagggctgactgtagttttgaatgtctgttactgaggaggcaccagcataaagtattttatcacttcagacgctgacaatctagtatttttaatttttaaatcttttgaaagctaatacatataggtgatttgtaaaaaaaaaaaaaaaaaaaaaaaaaaaaaaaaaaaaaaacaactagaagtaaaatgttacttttttccagctgtagccctaattacccattttcctttcccagaaacagctatttttactgttttattgaatattctctcaaaaataatttaagctgtccaatcatttactcatacatacatatatatccccatcctcatttttaatagatggaaacaaactgttgtagcttacttttttctcagcatagtattttagctctaatcctacattaatacctatagaattgccttattctttttgatgattatatagtacctcagatagctctgtggaaaaacaggataaggccatctgtattagtccattctcacactgctagaaggacatgcctgagactgggtaatttataaagaaaaagaagttgaatggactcagtctcacatgcctggggaggcctcacaatcatggtggacagcaaaggaggagaaaaggcacatcttatatggcagcaggcaagagagcttgcacaggggaactcccttttataaaaccattagctcttccgagacatactcactatggacaagaacagcatgggaaaacccacccccatgattcaattacctcccatcaggtccctcccgtgacaggtggggattatgggagctataattcaagatgagatttgggtggggacagagccaaaccatatcaccacctaagttctctgtaaaaatagtttcagccaggcatgctggctcacgcctgtaatcccagcatgttggaaggccgaggcaagaggatcgcttgagctccggagttcaagaccagtctgggcaacatgacaagaccctgtctccacagaaaattaacattagccaggtgtggtggtgcgcatctgtagtcccagctactggggaggctgagatgagaaaatcgtttgaacccaggaggtcaaagctgcagggagccatgatggtgccactgcattctggtgtgggtgacagagcaagactctgtctccaaaaaaaaaaaaaaaaaaaaaaaatagttcagaaatctaagacagcactttttttagttactaagccttttattcagatagcacactaaattggggtcaaaaatctgctatagtaaagttctgtatttgtgtgtattgggtataaaaataagcgctttaattaatttgaaaatccctattcaccaaaagtttatactgtaataggggacaaaacaagtgcataaagctaaatttagccagtacatttataactgtttcattcagttgatcagagaagcatcacgattgctggaaaatatcggacctggattcaaggtttggcattgctgttttcaaagtatgtaatcttttagatcaggggtcagtgaactacagtacagagaccaaatctaccctgccacctgtttttgtgaataaagttttattgaaacaga

SEQ ID NO: 13383 - DNA, 178 bp, Homo sapiens
ggggtcagttcttgcaaccttgtggaatttgcttcctgagtaagtggatatacaacctcagcaatgacaaggaagaagtgtggaaacagtacttggaactgaggaagctggacacagctcctgtagaaacaagtgcccttttcatgatcgaaactgggttatttaattggaagaaagt

SEQ ID NO: 13384 - DNA, 692 bp, Homo sapiens
gggagtcgtggaggctaaaatacaaccgagaggggagatttttaaaaaagaaaaagaaacacaaatattaatagaaatctctctcacacacacacacacacacaaacacacacacacacacacacactctgggacaagattcctttgattacctggtttctagtaagttactaaattaatcatattgtcagttttggtttattctgccaacaagagatacatcctataatgtgtacttgctttgttttgttgttttgttttttcacaatcacactgagacaagctcaggcctattcaatacaatttactgacatgacaacctagaacgaagatagctatgtggcatcacggtggaagagtgttagatttttcttaattccactaaagtgcctattgaaactcttatcatttaaagtggtgtacagtacactctgctgtgatggtattgcgggattcagagataaagacataaaacaaagacaccgtctttatgtcaagaagcaatagcgacactctgactctcctcattccttttgagaacaaaagaagaacactttctgatctccaccttcttctaattcaaaaggttttctttttcttttttaaactgtatgctaaaacgtatttgtttatcctatcctttcagaaaattgaaataaatatgaaaatatcaagttcaatatgtaagtccc

SEQ ID NO: 13385 - DNA, 562 bp, Homo sapiens
cgtaggatatatgttctgttcaaacaagagaaagtaactctacccatgctgtctccacttcacaatatttgatattcaggagcattttcctgccagtcagcacaattttttttctcatttacttcttaatttgttcattaattacattaattctttcctgtaggatgtctcatggaatatatatgacattttatttaatcacttccaagagccaaagctatggaaatacagtgttgtccatcttagtaaataaaagataatttcagaaacatgaacaggatagttctcccttaagcaacctcacaaacaagccgcttctgttaggtacatgtcctgcccttgcaaatgaagcttttaaaaaggtgaagaaaaattttacagtatatcctgttctgtacattaaattaaaaaaacaaaaatgtacatgtgatgttagtaggtgtgatatgcaacctggtatacagacatttgtgcaatttcatttcatcaaattctatctgctaatgttttatatttatatttttgtatttatttttaaaaaaataaaccagtttttacaact

SEQ ID NO: 13386 - DNA, 536 bp, Homo sapiens
gaggattgtttgacttaatcaatattagtggaagtactgtctatgttattagattgagtggcctgcattctcttcctgggaggaaatctttcaaaaattgaagttacaaacaatacgtagatgttgtcaagtagggatttgcttaatcagtaagtctttgtgaatgaatacgaatgatacagatttttaaaaaagtaataaccagttcaccctctttgcctaacaatctcggaaggaaaatatatcacatcaataatcaataaaaataagtaaaaggctttttgtgccttttcttaggtataataatttataaatgttttcttaactgactttcagtcacctttacaattaaactaaatattgtgcaaccgctttgtaaattaatatgaagaagatatatccctaatgaaataggaatgactattactgccatatttatttagttgaagaatgtctttgtgttaattcattcatatttttataaatgtatatttatatttttgtatttttatgaaataaactagtatttataaaac

SEQ ID NO: 13387 - DNA, 937 bp, Homo sapiens
aggagggcatgcaagtgtggagtatttacttgctcagtaactgtgactgttgtctattgagacctagcctagttttcctgcagacaatgaatgaagtgtgctcattgaaataaaatacagagtcaaatcgctattgttgttttaatgatctgtttttagctggatggtctttattacaaagtattagatttttcttctatttaacggaaaacttgactttggtgaatgtgcattacttccttttattttgctctttaaataataaaattcaagaagcatattctatgtggaatagatcctgtttttccatctgtgtcccagattgtgaccctagactttcaattgacaagtaaaaaattgactttactagacattttgactgtgctctagtaacatctatcctttttcaaatctctggatttttaagtagattgttcagctttcatccggtggctgttcatcaagttatcagctgcaaatattgaacttacctctctctaagcagtgagtgttttgtagaaggaatccgtttaacaattaattggctaatgggagaaggggaaagactgatattcaagtcatacagattctttgaatcattagaataggagagaaatcatgattctaagccaggccacactttaaaccaagtgctctcaccctggggttagtggaacctttaagaagttaatgaacagacttcaaggaagtcaaaaacctcccaatactatattcaattttctgtgtgtgtttgagatttgagagggcatggggagcaggaaggaggagggtttatagcttttatcagcctctctaagtgggccctgcagtaaaaggctaacatgacattcaaagacataacattttaaaaaaagttattccaaactaaacatcactggtttcttattaataaaggcaaaacttctttgtaaaacaa

SEQ ID NO: 13388 - DNA, 1494 bp, Homo sapiens
ctctgctcggggtgaaccattctcctttctctcaagtaaaccagtagtttttcttctgttgacttctggttttctgtaatttgtactttcccacactataattggcttctgttttacaaaatggtgggtggctttttcttttttgtacgtgtacaggattctgctggtacgagaggccttcctctttctgtttttaaaaaaagttttactgccatattggcattccattccctgttgccatcctcactgttacctgttttgggtttctggtctactttgactttcaaagtacctccagcctcctcatacgcacagcttttggatgacctcagcttgagtttctccatatgtgcatgtacatctagcattctgcctacagttcagacagaagtcacaaaaaggccttcaactcaccaaaggtaaatatctgtatctattaggacattttttacatagacttcagttgagatgtatacttagcaaaattatttttaaattgaaacagcacagtaaatacttaatataaaatgtcccttggattttgcttcccatgtaaatctattgtattattacacttgttataattttaactataaaggtccaattgtttcacagagccagtttgggatgggctgcattccatttatgctgtatatagtttgaattatatataaattaccccttcttctggccacccctgctcccatcttagtattttgcaagatctaatcagttgtacacctggtgcccctcgcttgcttcaatcatggttatttgatggcaaaatcgacctcttgtcgctgaaggagagagaaaagatgtgtgtctgattggtcctgggattttttgagctgtgccatttatggtactctttgcctatgcatccccttgttagattttttttaaattttatcttactgtttttataatttctattgggaagaggcttgtgaccagtaccaatcttgagtttctttttctgtccacaagtaaattaatatctgctctgaaatgtcatttatctactcacacattcttggggaaaaaaatcaaatgtcagtcctagcagatgttgcatgtaaattggtagcaagtaatgattacaacccagaggattaagaattttgtaacagaaagctctatgttttaattttttatatacaattaggataattagcattgtcagactataaacctttgctttttaaagtttatttttactatttctttatcactttattgtatcatcaccattggtttcataatgtaaatactatatgttgaacaaattaaatgtcaaaattttttattaccatagtccatgttaatagtggggctttcaggtgtttagagattttttttgttgttgttaacattcattgcaaaagtactagatggtgtataactctagagttgaattttaagggattccctaatatgtatactatctttttatctgaagtaataaataaacaatgatcttgaaagtgcctg

SEQ ID NO: 13389 - DNA, 1409 bp, Homo sapiens
aaagtgtctgtaaatcttcagtgttaaaaaaacagatgcccatttgttggctgtttttcattcataataatgtctacattgaaaaatttatcaagaatttaaaggatttcatggaagaaccaagtttttctatgatattaaaaaatgtacagtgttaggtattatttgaatggaaagacacccaaaaaaaaaaatgtgctccgactagggggaaaacagtagttccgattttttcccattatttttattttattttctggttgccctagcttccccccctatttttgtgtcttttattaactagtgcattgtcttattaaatcttcactgtatttaatgcaggatgtgtgcttcagttgctctgtgtattttgatattttaatttagaggttttgtttgctttttgacactagttgtaagttactttgttatagatggtatcctttaccccttcttaatattttacagcagtacgtttttttgtaacgtgagactgcagagtttgtttttctatatgtgaaggattacaacacaaaaagttatcctgccattcgagtgctcagaactgaatgtttctgcagatcttgtggcatttgtctctagtgtgatatataaaggtgtaattaagacagagttctgttaatctaatcaagtttgctgttagttgtgcattagcagtataaaagctaatatatactatatggtcttgcaacagttttaaagcctctgcataattgataataaaaatgcatgacattcttgtttttaatagacttttaaaatcataattttaggtttaacacgtagatctttgtacagttgactttttgacatagcaaggccaaaaataactttctgaatatttttttcttgtgtataagtggaaagggcatttttcacatataagtgggctaaccaatattttcaaaagaacttcatcattgtacaactaacaacagtaactagcccttaattatggtgacagttccttattggtgtgtgtgagattactctagcaactattacagtataacacagatgatcttctccacacaccccatcacccagataatttacagttctgttaacagtgaggttgataaagtattactgataaaaaattatctaaggaaaaaaacagaaaattatttggtgtggccatcttacctgcttatgtctcctacacaaagctaaatattctagcagtgatgtaatgaaaaattacatcttactgttgatatatgtatgctctggtacacagatgtcattttgttgtcacagcactacagtgaaatacacaaaaaatgaaattcatataatgacttaaatgtattatatgttagaattgacaacataaactacttttgctttgaaatgatgtatgcttcagtaaaatcatattcaaattt

SEQ ID NO: 13390 - DNA, 1279 bp, Homo sapiens
acctctgccttgggtaacatccagactcatctgaaggctggggaggatttggtagcaatgtgtagagcagagctggaaaataagggttcttgaaacagcaacagtcaaatgcccaaccaactgcaaccatgatctggtacaggcatgctcaccagcccagcccagcccagctgtcctgtcctccttattctcaactcctgctcacttagggagctgtagggcaagaagtgttactcccatttttctaattagaaaaaggcttggtgaggctgagaaaccagcccacaattacacaaagacaaaaaaagggggacccaggtcttctgtaaccacctcataggtctccctggtgccacctgcagcatttctagataccgacaataagggtctccctatccccaactttcagaggtacatagtggaatttcttggcattatttgctgagggtaggaaagtcctaggcaatggagtccagattttagtaagtcagaccccatgtgtgagaaggaaagctggaatcatgggtggtaatccccactttgctgccctgagcgggacctgtgccatttaaaccttggaacgcaactagtgaacaagcgcctatgcagtgcttataacagagttggtgtttccactctaaaattaccacctcttcttatcaaaatttgcaactttcttcctgtgaaaataggcttatagttccttaactggagcaatgatataaaagctacagagataactccaagtttaatccagctcagcatgaaactgcaaaaacactgaacatataaccatcagactataattctggccatgtttttcatcatttgatctggcagcagggcagaggtgcaccaggagtaaaaacctttcaaaaaagaggtgtggctttcctcatcccctggcaaacattgtcaccaaggtgggatgttgctgctaatgggagagtcatcataaaaaactgtccctacaaggagagtgttacatggtgttgggggaagaaaacctacgcttcaggctcagagaaacctggattcaaatcctgcctctctcacttggaagctgtgttacactggggatgttatttacttgtttattagttagcacttagaatgagttcatttttaggtgagataatatattcacaatgatacacaaaagtgcacactgtgtgctccctttaccatttactatctccctccagccccaacgtgttaccactcttactagttttttgttaatctttccggcatttttaaataaaaaccaagcaaatgt

SEQ ID NO: 13391 - DNA, 32 bp, Homo sapiens
gtcaataaagagacaatgaccctaacctcaga

SEQ ID NO: 13392 - DNA, 1683 bp, Homo sapiens
tgaacttcccaatcagatgagcatggatgattggccagaaatgaagaagaagtttgcagatgtatttgcagagaagacgaaggcagagtggtgtcaaatctttgacggcacagatgcctgtgtgactccggttctgacttttgaggaggttgttcatcatgatcacaacaaggaacggggctcgtttatcaccagtgaggagcaggacgtgagcccccgccctgcacctctgctgttaaacaccccagccatcccttctttcaaaagggatcctttcataggagaacacactgaggagatacttgaagaatttggattcagccgcgaagagatttatcagcttaactcagataaaatcattgaaagtaataaggtaaaagctagtctctaacttccaggcccacggctcaagtgaatttgaatactgcatttacagtgtagagtaacacataacattgtatgcatggaaacatggaggaacagtattacagtgtcctaccactctaatcaagaaaagaattacagactctgattctacagtgatgattgaattctaaaaatggttatcattagggcttttgatttataaaactttgggtacttatactaaattatggtagttattctgccttccagtttgcttgatatatttgttgatattaagattcttgacttatattttgaatgggttctagtgaaaaaggaatgatatattcttgaagacatcgatatacatttatttacactcttgattctacaatgtagaaaatgaggaaatgccacaaattgtatggtgataaaagtcacgtgaaacagagtgattggttgcatccaggccttttgtcttggtgttcatgatctccctctaagcacattccaaactttagcaacagttatcacactttgtaatttgcaaagaaaagtttcacctgtattgaatcagaatgccttcaactgaaaaaaacatatccaaaataatgaggaaatgtgttggctcactacgtagagtccagagggacagtcagttttagggttgcctgtatccagtaactcggggcctgtttccccgtgggtctctgggctgtcagctttcctttctccatgtgtttgatttctcctcaggctggtagcaagttctggatcttatacccaacacacagcaacatccagaaataaagatctcaggaccccccagcaagtcgttttgtgtctccttggactgagttaagttacaagcctttcttatacctgtctttgacaaagaagacgggattgtctttacataaaaccagcctgctcctggagcttccctggactcaacttcctaaaggcatgtgaggaaggggtagattccacaatctaatccgggtgccatcagagtagagggagtagagaatggatgttgggtaggccatcaataaggtccattctgcgcagtatctcaactgccgttcaacaatcgcaagaggaaggtggagcaggtttcttcatcttacagttgagaaaacagagactcagaagggcttcttagttcatgtttcccttagcgcctcagtgattttttcatggtggcttaggccaaaagaaatatctaaccattcaatttataaataattaggtccccaacgaattaaatattatgtcctaccaacttattagctgcttgaaaaatataatacacat

SEQ ID NO: 13393 - DNA, 2723 bp, Homo sapiens
atatatgactagaatagctccactttggggaagacttgtagctgagctgatttgttacgatctgaggaacattaaagttgagggttttacattgctgtattcaaaaaattattggttgcaatgttgttcacgctacaggtacaccaataatgttggacaattcaggggctcagaagaatcaaccacaaaatagtcttctcagatgaccttgactaatatactcagcatctttatcactctttccttggcacctaaaagataattctcctctgacgcaggttggaaatatttttttctatcacagaagtcatttgcaaagaattttgactactctgcttttaatttaataccagttttcaggaacccctgaagttttaagttcattattctttataacatttgagagaatcggatgtagtgatatgacagggctggggcaagaacaggggcactagctgccttattagctaatttagtgccctccgtgttcagcttagcctttgaccctttccttttgatccacaaaatacattaaaactctgaattcacatacaatgctattttaaagtcaatagattttagctataaagtgcttgaccagtaatgtggttgtaattttgtgtatgttcccccacatcgcccccaacttcggatgtggggtcaggaggttgaggttcactattaacaaatgtcataaatatctcatagaggtacagtgccaatagatattcaaatgttgcatgttgaccagagggattttatatctgaagaacatacactattaataaataccttagagaaagattttgacctggctttagataaaactgtggcaagaaaaatgtaatgagcaatatatggaaataaacacacctttgttaaagatactttctaaacttgtgtttaataaactttaatagtcatagaattgtaaatcactatggttaacagaaagtgaaaatattttcatgcagatgatgtgaacagccatgtgaataggtgacttgggcacacagcagggtcatatgacttcagaaaacttcgcttttcagttattccattgttataatgtcaaccctttaagacattgatgtttagagggctcacaaataaaatctgaatacctgtaaggaaagaggttttttatcacataccttaagtctttgtaatgttcatgcttaaattctaagttttcaccttagtgacacacaaggtttggttgtaggcaacaagtcccaggtgtgtgggaaattgattcacaacagagatgggaaaaggtgcagataatttccaatgccttcacaatttacccatgaccagaaatatacttggaagactgatttcacaagtgtcccaaaactgagatgctaaaaaggaaacagtaggtaggtgtcataggaaatttacatgtaccatctaataaacaaacttgcaaattctaaatcttttttttttttgagacagtttcacgctgctgcccaggctggagtgcagtggcatgatctcagctcaccgcagcctccgcctcctgggttcaagtgactctcctacctcagcctcctgagtagctgggactacaggcgcccaccaccaggaccagctaatttttaatgtttctaatagagatggggtttcaccatgttgaccaggccggtctggaactcctgacctcaggtgatctgcctgcctcggtcttccaaagtgctgggattacaggcgtgagcccccgcacccagccgcaaattctaaatcttaaaacaactctgcaaacgaagcacttgagtttctgcttgcttcagggatgtaatatggtgtagaactgtttcacataatgatcagccttggtaattttccagtgtagaaaacattatatttgacccttggacaacaaagagattatattgaaggaattttattgattgtatcatgaataaaagctgaagtcaaaattaaaatgtaaaaaaataattcagaggatggaatatgcaaatgtaaactccaaatgatgtggctggaattcataaacatttactttatgcaagatactgtgctattccaggcactcctatggcatttaaagtacaattcttaccttccctaatttttcaacctagtagaggacaataggctaaagggaataagtacatggataacaaaacataaagtagaatgtttttacagccatagaaggcaaagggctaggaattcacaggagagagaaacagtatctagctgagagcataagaaaagcttgtggaaaagataatatctgatggccagagacaatttcttgctttggtatgtttgaagtgttatatttaaatatatatatttttatttaaaaaactcactatagaaaatttataaaattccccaaaatatttagtataaaattaatcatcccatcaaatattaaataatattactattttaaagtgtttatttcagtcttttcctgcatgtatttatggcttttatttttaaatatagtaataaaataatttgaaattagctttttatatatttttgtatcttgctctaatgggttggactaaacatattaagaacactctcaaatgctactaaggacaatttgaaaacataattttaatgactgcataatttatttaactttcctgttttggaaaatattattttttttttattacaaataatatgtcatgagcattctctttttaaaaaaataaactatgtgtgcatat

SEQ ID NO: 13394 - DNA, 3502 bp, Homo sapiens
gtatgacaattcactgatatttatgtgtacatttatgatagatgaagttcttattctgagtacagtactctttgtcatttcatattggattttctatagagaagaagcacaatggggaagataggagcaaggtcatgtaccctaatagttactatgttttgtaaatccattttgtagagggcatgtaaataaatgttttcctgtagtcatagattattcaggactgtcctttagttctgtcttttgaactcatgggaataattgtgagtcagcgtaacatttcaagagtctaaaggtggccgggtgtggtggctttaatcccagcactttgggaagccgaggtgggcggatcacctgaggtcaggagttcgagaccagcctgaccaacgtggagaaaccccatctctactaaaaatacaaaaaattagccggacgtggtggcacatgcctgtaatgccagctactcgggaggctgaggcaggagaattgcttgaacccgggaggcggaggttgtggtgagctgagatgacgccattgcactccagcctaggcaataagagcaaaactctgcctcaaaaaaaaaaaaaaaaaaagtctaaaggcttaaagtttgatgcagctacctgaaatgatcttttatttatttattattagaaaaagcaaaggcatatgggcattgcttattagtttgaattctagagactagatcttaaagtagtggttctcaaagtgttgtgcccgcaccaacatcagaatggcctgcaaacttgtagcaaactctggggaggaggccagcattctgtattttaacaagcttccctcaggagattctgatgcctgctaaattttgggaaccactgttttaaaggaaactttttttttctttaatagcatttaattgtatgagatgattgcttttacatgtgatttccttgcaaatgttctgaagttgaggcatcaccaaacaagtctgaacaattctttatgtgatttatttttaaagtagaccttttgaagagatctatgaatgggatataaagcaattttcagtgttacaggttttcttcttcttctcaaaactgtttgctgtaagtaactgcaatcagtacttactactttccatttgcttatgagtttcttgacaaatcaaggtgtagaaaaccagttattaagtgattttgtactttcctggtagttgtcactaaaataatttttgtggcatataaatatatttaataaaatgcaaaaattatcttcctgtctagtagaaaaaattacatgagtaaagtgaagcttctgtctttgttactgtaccaggtgacaacagctgagtgtccctccatggacagtcactattggccttttgagtgagacagttctttaggataaaaacctgtcatcccattgcaggattcatttagcctttctggcccttacccactgatgctagtcattgtgaccaccccacctcccccaaataaaagtgtgccaaactattcattgttgagaaccattcaattgtattcaccaaaattggaggatatattggaatgccctaccttaatataggtcacatagcattagagaaaattggtttggagagtattacagcaaagtgtgctgcaaggaggctactccagcacaatggcaggcactgcttcccaggcatatggacaattctgggaggtggccagggtcagcacctgataactagtaagtgtctcaatctcagcatacaaaatttagcagtgactacaaaagaagttggaattttctaaaatgtttgtattcaagaaggaaacaaatgaatttactaaatgttgtcagagtattttttgtttagataaccaccaagaacagaacaaacctaaaagatacttgggaaaatatctaatcagtcaacattctaaggactgttaaatgtgaaatagcatagttattttttgtcttttgttactagtgtgaacaaagaacggcgcctaacatataatgggcatttagtaactctgttagatgaaagactctccaatttcagattttcttttagcatcttattagtcactacttaattctgatgatttagctctaaatttattttgatctcagtttttttatttttatttttggagacaagatcttgctctgttgcccaggctggagtacagttgtaggattacagttcactccagcctcaatctcctaggctcaagcaatcctcccatctcagcttcccaaatagctacgactacaggtgcatgcctccatgccctgctaatttttgtattttttgtagagatggggttttactatgttccctaggctaatcttgaactcctgagctcaagcaatccacccgcctcggcctcccaaagggctgggattacaggcgtgagctatcatgcctggcctaatgtattttttaaaagttgaatctaaaaagaatttaaaacaaatataaatcagctcagtaaggatggatatttttgtacatttaaaactattattttaggccgggagtggtggctcacacctgtaatcccagcattttgggaagccgaggcagggggatcatctgaggtcaggaagttcgagatcagcctggccaacatggtgaaacccctacctctactaaaaatacaaaaattagctgggtgtggtggtgggtgtctgtaatcccagctacttgagaggctgaggcaagagaatcacttgaaactggaaggcgggggttgcagtgagccgagattgcaccattgcactccagcctgggtgacagagcaagactccgtctcaaaaacaaaaaaaattaaaataaaaattattgttttagctgcatgtcttcagctatttagaattcaaagactaatgaattgtttctaagtcaccctaacatcaaggtacttattttataaagaatttcctccttatttgtgttctaattgacccaggaatttttactttaataaaagtttaactttatttcctatggaaaatcactagggggagtgctccctcaggcagagcaggcgacactttggtgccactacaaattgatgtgtagtatatagaagaatacagtcttatatttaaagacttttagttctgtctttttgaagtttatctctctttctagtaaaatggtgcttactgtgaatggataatcttttttttcatttttcatttgttgatttcccattcgatgatgtagtgcttccaccgagaattgatgaaatgcttcaaaataataaaagtatttgttaaattccactttaataaaaataaggcatgtaacacagtcattttaacaggaagccacagggtttctgtggtgttaccaaagtcctagtaaaaattaattaaaattgctaaaagggcagaatgtggcactctcaacagtggggtaggcagtccttcagaacatagagacttccttctttccttccctgtcttcacattgcttgtcccttatccccacctgaaataaaatctattgggtcctgag

SEQ ID NO: 13395 - DNA, 618 bp, Homo sapiens
cattgtcagaaataaataaaaccacaagtctcaagaatttgccacgtatgttcaagggtgaatttgaagaatttcagaaccactggtatccagagaaagcctgcagctctccacaggagctgtaaaagtcatggttgactgcctaccaaccatatttgttagcagagcccctcttatcttgagaactccattcttcagggaaaggatctccctagctcagagaataaatcctaattagtttatgttaggtatggtaatttgattcccctttgcagtgattggtttatgcatgaatatgtgatgtatttttgtccagtgaatcttgaagaaaaatcttttggtggaggtgccttcagggaaagttttcttcaccctcactcttcagttcaagaagagatgtcttcttgttgcgctgagaacaccatatgttcatgacgagattcctggcaccatgtcagccggcttgtagtcatgaggacaaccctttttggtgaggttggaagatggatggaagccaagtgcttagtgatgtcaaagaagcactcacttaagcattcctggagccaccctacctcagggcctcttgatatttgaggtaataaattcattgttctgtat

SEQ ID NO: 13396 - DNA, 963 bp, Homo sapiens
tagcttgactaatggaatgattggttaaaatgtgatttttcttcaggtaacactacagagtacgtgaaatgctcaagaatgtagtcagactgacactactaaagctcccagctcctttcatgctccatttttaaccacttgcctctttctccagcagctgattccagaacaaatcattatgtttcctaactgtgatttgtagatttactttttgctgttagttataaaactatgtgttcaatgaaataaaagcacactgcttagtattcttgagggacaatgccaataggtatatcctctggaaaaggctttcatgatttggcatgggacagacggaaatgaaattgtcaaaattgtttaccatagaaagatgacaaaagaaaattttccacataggaaaatgccatgaaaattgcttttgaaaaacaactgcataacctttacactcctcgtccattttattaggattacccaaatataaccatttaaagaaagaatgcattccagaacaaattgtttacataagttcctataccttactgacacattgctgatatgcaagtaagaaataatgcctccaattttttcttaaaatagtttagatatgttaagcatggattttccccctaaattctactctaaagcttctataaaatatagtttggaaataaaaatgttcttacacaaggggcaaatgaatttcatgtgaatccctttaggatgttttcctccttcatttcagcatgatagataatttattatacaccttagtctttccttagttaaaaaaaaattccctaaagactaacttgaaaagaaaaccacagcaggatgctaatggaattactgccttactgtacatacaaattctactttaatataaacccataagtttaactgtatttttgaagactatttttctatgacttaggtaaaataaaagactattttctattttcccag

SEQ ID NO: 13397 - DNA, 247 bp, Homo sapiens
gcacatgacctggggaccaggccctgggacagccatgtggctccaaatgactaaatgtcagctcaaaaaccagaatcgtatttgatttcacactcatcctaatgtttttttctgtgtcaaaatattgcattttctggggccaaaaaacaggcagaaataaaagacattgagtagccaactgtgagtttgccttgcctaagactgtttcctttgttctaaaataggacttaaataaaatgagctctgt

SEQ ID NO: 13398 - DNA, 1094 bp, Homo sapiens
ggctaggtgtagccttgggtgaggggagggcatccctggtcctttgaaggttctccccaccccagcacacgccacccctctgttctctcttcagctccacctgccactgatcctgcaacttgcttctttctattctctgcctctgtttagaaatcttcacgcaccactgaggcttcttgacttgccccttgtgacttgaaaccccagctcagatacaaattttcacctgccagccctgcctcctcctttctcccttttcctagacacaggactctgacaacttcatcctccttgtttagatgacttcccagtttccagtccccatttctccttctatcacttttcataaaaaaactcaggaaatatttgacatatcttccatttcaaattcttccattttatgcagatatcttgcccttcctataagctctcctcaaagctcaggaaacctggtctgctctcctgcatttagggaaggagaacccctgccaagacctttgctcactgcctgagaccccttccttagagagcacctcctttgctggtcagacatggagcctgcagttggtcacagatgatactgctttatttcagtttttacagttgtcttcttaagattcccgtcttataaatggagtacagggaacctcaagtagtgaagtggaaatccatgtgtaaggctttgtggcttcaggtaccagtggctaaggtagttttaaagactttgttgattttagaaaaagtccatcttccatccccgacatggcagttaatacccttctatatggtaaaaccttagagattaccttaatctgctaggaacagaagcaagaaaaaccatggcgtaaacacccccagagtttttgttcatttgtttcatctttcttgataaagcccgaaggtagcccattcagggctgttgtggttggttgctccatcatgtcatcaatagcccatatcttttcttttttatcttccttagtgtaacaccaaactacctctctgatagctggtgttcatgaaatattttaccttcaaatgattgtacctttttatttgctttagagttctgaaataaaatgaaattccactgt

SEQ ID NO: 13399 - DNA, 676 bp, Homo sapiens
ggccaggtgcagccttggcggggtctgtttggtgggcgatgtcaccatttctagggagcttcccactagttctggcagccccattctctagtccttctagttatctcctgttttcttgaagaacaggaaaaatggccaaaaatcatcctttccacttgctaattttgctacaaattcatccttactagctcctgcctgctagcagaattctttccagtcctcttgtcctcctttgtttgccatcagcaagggctatgctgtgattctgtctctgagtgacttggaccactgaccctcagatttccagccttaaaatccaccttccttctcatgcgcctctccgaatcacaccctgactcttccagcctccatgtccagacctagtcagcctctctcactcctgcccctactatctatcatggaataacatccaagaaagacaccttgcatattctttcagtttctgttttgttctcccacatattctcttcaatgctcaggaagcctgccctgtgcttgagagttcagggccggacacaggctcacaggtctccacattgggtccctgtctctggtgcccacagtgagctccttcttggctgagcaggcttggagactgtaggtttccagatttcctgaaaaataaaagtttacagcgttatctctccccaacctc

SEQ ID NO: 13400 - DNA, 734 bp, Homo sapiens
agtctgaaaaagtttgtgggaccactaaccaaggtcaacacatcagttcagtcttgatgaacatctgtgtaccctagaatttcctctatacacagtgaaaagtgtcaagataacaaaaaaggcactgagaattaattatatcttaggaataatagtttaatgtgcattgaatagagtatcacctttttcaacaagatttattacatatcatttcctaagcatctgccttagaaatacagttacagtggaaggactttaagaaagatcaacatatgttaagaacatgcagttcagtttgtttcagattaattttttttcaagagagttattttaaagattcaaggaagccataagtcatactaaataatattatatacagttttgttattgtgacttacatttttgttacttctaaaaagtatattcaacctgtatttcccaaagaaatgtaagtgaatggagacctcaaataataactgtattcataaaactcgtgtcttaaaacaaggcttacttactagacataactgaatgtaaaaagtgctttttcaaatctgtttgcaaactcgtgggggatttttgcatgtataagattaagattatacttcaagtgatgcgtgtctgtgtatttagcatgtgtactataatcaggtgatatagtattccttcagtctttgtagtaactggatttttttatgcttctggtattgctttataaaagattttcatttcag

SEQ ID NO: 13401 - DNA, 2552 bp, Homo sapiens
aggatttcctcatgacaaattttgattactggcgagaatatttttacttcagaaacagactaccagtcgtaaagtgacattttttggttattgttgagactgcttgcccgtgggctcagaagtgagatttgcattattcttctgttggattctgatagaaaaaaagacattcactgtataagaaaatggatggactgaaccaattagaattgataccagtgaaatttttatattgcttacaattggtaaccaagagtgctgatacctttttaaatttagaggggcaggcttaaataaaggactaaatatttaggatttgaaacttaactgtataagtgtgttttccttccctttcctcctaattgtgggattgtcagaactgaacacatatcatttgattagtgcatattttttatagtacctgaaaaccaagattttgaaaaaattttcaagacagagaattttgataaatcctgacattgacctaattgacataggtaaatatgtttgtatatgtgctaataattttctaatttcggaacacgatgatgttatgactattgatttaaaaatttcaaataataatttttgaaattatagatgaatgctttcatttgagtttcattctgtaattcagcagttctgggtgaaatacagatagcaaaacaaatcatgatgctgttacaaatgtattagttatccaataagtgttttaagtcaatttttttaaaatgatatgagtcttacaggtttcttccatctttaaaatgctcaaacatggattcagggactaaaaggatgaactgattagacattttctattaggagtttggtaaaatattgtaaaaatatcttcacctgtgttaggagtattatcagaaagaatggattctttaataaatatgtaaaacacagtagttttggaattgccttccttagtattgtggttttcacctagcttatattccaagatttacagaatagcttttaggataagatgttaggactttttttttttccccatgagaattcctttatttttggaggaaattattatctaattattgatctacttataagtaatcctagaatttttgccaaaagatcctgtcgttgcataatcaaacagttggtattctcgtgccgttgttcaaagtcatgtgtttctttcatttggtgctgaaaatttctgttcaatcattgacaaatatttattgaacacccactctgtgccatgtaaaactatgtcaggtgctggatatgttgatgaatgaaacagactctatccttatacaatttgagtcttgtgggctcagaagtaaattctgtgaaagctggacggatagtcgaattgagtgctcttagttttgccaatatttaacatgttgttcttatcaattttttaaaataaatgttaatgtacaaagttaatctaggttttgatgtatatccagagaatcaatttttcttaaagtatctgcgtagacattcatagcaaagaatttatgacatatcagatagaaatacattaaaatgtagtgttttcccagagattgatctggctttttttttttgatatacataagataccactttataaagaagctccatactatagaacctcccctaacaggcttaaaataccttctttttttttttttttttttttgagaacggagtcttgctttgtcacccaggctggactgcagtggcatgatctcggctctgcaacctccatctcccaggttcaagcgattctcctgcctcagcctcccaagtagctgggattacaggcaggcaccactatgcctggctaattttttgtatttttagtagatatggggattcaccatgttggtcaggctggtctcgaactcctgaccttgtgatctgcctgcctcggcctcccagtattgggattacaggcatgagccaccatgcccggccttaaaatgccttcttaaaggaaaaatgccaactccatccttaatctcaaggaaatctgattgtccaaatagatctgttaatatgtaacatattaataggtaacttgctgtgtaaaattataagccatattttaaaaggttttaaaaatacttattgtgctccatttgtgatataatttctaacatttctgctctgtgatgggggtttatttgtaagaataagaggcaaaggaatgttagcatagcaaaaatgtgtttgaatgagttaaccttttaatcgcaaccctatgtgaataaaattactccactgttacctcttctttttaacatttcttatttccctctcaaggggtcattatttgaaaactagttttcacaaaatgttatgtttcagaagtgtttccccactgctgtgtattattattctgtgccctgttgacttcattcactgttaacatttgacatagaatgattagttattaaatcagggtgaagtgcttacctggtcagtgtaggctcttcagataattttgacttaatatttttgatactccttgtgcatttacattcatggcccctgtacattaaatcatattacatgtttta

SEQ ID NO: 13402 - DNA, 651 bp, Homo sapiens
atactacctactataaacatgacatctacaaaaagaggggtcaccctactgaaaatactaaaccaccctaactaatgagaagattctattcattccttgaagagtttttatagaaaagtttaagaaatgtaatttgttgcaattaacatttttatgttttacattttacattttgattattgtgcagaaactgacagaatttaaaaaaatggacttcagaagttcaaaatttatcatttttgaagaagtttatttagaataggattttataactaatttggactcttcatcacattgatggatataatacttagaattataaattgctagatttgataaatacctaacaaaatgtttatttttttcagtcatacttgaccacaaaacaaatattttactaaatttccagagtcatttctctgaaaaatagtataatggcatgataacatttcactaaatcctatttatcttctgggaaatattttaatttagcttttggatttcctaatatgataagcttatatattcatggtatgaattcctttaaaaagagcatctgctcttggacttgtatctgttgcatcttgtcaatgtttgactcatggtcagcatccaatagttgttaaatgaataaataaaatataatacatt

SEQ ID NO: 13403 - DNA, 1374 bp, Homo sapiens
gacctggatatcattgggtttccatgcacaggccagcacctcagtaatgtggttctgaaagattaacaggtttaagggacagaagcaatgaaagaagcaatgtgaattttccatttgctttcatattattacctggattagccattaccagaggaaaaataaacatttctcagtaactttgcctttatggggaaagggttgactattgatgtattatatgtttttgtatttgatgcatcattaggcataatttttaaaatgataagtacctttcaagccaagtttgcataacctactttcaataaaaaccctctatcttgcctcctcctttattaccctctgagttttgagaaacaaccatatacagatgaatctaataggaaaaaaaaaaatcttttcattgagaagaaaatcagtctcacctgagaactcaattatgaaccctattttaaaacacctatgcagggtttagcctaggagtgaaaagaaaaaccaactaccttttaccaaccctgaatctctaaataagcaaagtttcatggaggccaggagatcttctgtcttctgccctgtagcctgaagccttggaggaagaaacaggaatggatgctttgggcaggaaagtaagggaatatgactccggcctctagaaggctcatcttaaatttgtaagaaccatggtacagagacctgattagtttttggtattgtgctccaataatgtcatagttttaagagataatttttatgagaattgactaagaaccagtatccttcaactacttcatcaatgtttggtataatataaaagcacactatcatctgaaaaagctattaaatacccctctttttccaaatatctacctgtgtgaagccaggttttacaacatgtattgcagcaagttgaatgcagaagcaggtatggtaattcagctgccttctatcaagctaaacattaaagagatttgtagaactataaaacaatgctactctccttaccaaattgttttagaaaatagctttataggctaacattattgttaattgtcatttaattgttttgtcatttaaaatattttaaattgttttctgttagtttcttttttgtatattctatgggtattttattgatacatgatagttgtacatttttatggggtgcatgtgatattttgatatgtgcatacaatgtgtagcaatcaaatcagggtaattgggatattcatcacctcaaacatttatcatttatttgtgttggaaacattcaaaccttttcttctagctatttatccattgttggatacttatatcaattctatatcttagctgttgtgaatagagctgcaataaatgtaggagtgcagatatctcttt

SEQ ID NO: 13404 - DNA, 61 bp, Homo sapiens
ttactgtgatatactttcatccgttttatgatctgtaaaataaaaactcagctgggtccag

SEQ ID NO: 13405 - DNA, 6631 bp, Homo sapiens
cagtgtcaccgtgtcacttcagtcagccatctcaataagctcttactgctagtgttgctacatcagcactgggcattcttggagggatcctgtgaagtattgttaggaggtgaacttcactacatgttaagttacactgaaagtgttcatgtgcttttaatgtagtctaaaagccaaagtatagtgactcagaatcctcaatccacaaaactcaagattgggagctctttgtgatcaagccaaagaattctcatgtactctaccttcaagaagcatttcaaggctaatacctacttgtacgtacatgtaaaacaaatcccgccgcaactgttttctgttctgttgtttgtggttttctcatgtgtatacttggtggaattgtaagtggatttgcaggccagggagaaaatgtccaagtaacaggtgaagtttatttgcctgacgtttactcctttctagatgaaaaccaagcacagattttaaaacttctaagattattctcctctatccacagcattcacaaaaattaatataatttttaatgtagtgacagcgatttagtgttttgtttgataaagtatgcttatttctgtgcctactgtataatggttatcaaacagttgtctcaggggtacaaactttgaaaacaagtgtgacactgaccagcccaaatcataatcatgttttcttgctgtgataggttttgcaagccttttcattattttttagcttttatgcttgcttccattatttcagttggttgccctaatatttaaaatttacacttctaagactagagacccacattttttaaaaatcattttattttgtgatacagtgacagctttatatgagcaaattcaatattattcataagcatgtaattccagtgacttactatgtgagatgactactaagcaatatctagcagcgttagctgtccatatagttctgattggatttcgttcctcctgaggagaccatgccgttgagcttggctacccaggcagtggtgatctttgacaccttctggtggatgttcctcccactcatgagtcttttcatcatgccacattatctgatccagtcctcacatttttaaatataaaactaaagagagaatgcttcttacaggaacagttacccaagggctgtttcttagtaactgtcataaactgatctgaatccatgggcatacctgtgttgcaggtgcagcaattgcttggtgagctgtgcagaattgattgccttcagcacagcatcctctgcccacccttgtttctcataagcgatgtctggagtgattgtggttcttggaaaagcagaaggaaaaactaaaaagtgtatcttgtattttccctgccctcaggttgcctatgtattttaccttttcatatttaaggcaaaagtacttgaaaattttaagtgtccgaataagatatgtcttttttgtttgttttttttggttgtttgtttgttttttatcatctgagattctgtaatgtatttgcaaataatggatcaattaattttttttgaagctcatattgtatctttttaaaaaccatgttgtggaaaaaagccagagtgacaagtgacaaaatctatttaggttctctgtgtatgaatcctgattttaactgctaggattcagctaaatttctgagctttatgatctgtggaaatttggaatgaaatgcaattcattttgtacatacatagtatattaaaactatataatagttcatagaaatgttcagtaatgaaaaatatatccaatcagagccatccctaaagagtgttctcttgtcttcctttgtatcctctttggctccttcccttagcttccaccccagacatcagacctggggctgccttctctccctgccaaagcttgctgttagcattgtctgcttgccctcaactcctgccttgttccctgttgaaatgtatcaatcccgtactttatctctccaggacaaggataagtgtggctacagtaaaagtttattgctctaaacggcgctaacctgagataatgagaaaaggccagaagagattgtttgatctctgtctgtcaatatatatgcatttcaactgtgaccatctggatccagggccctttctaacctatataacgactcatttgtttggttaatgatgaatatcactggggctcttaagtcctttcgttctatccaagacttcattgtttttttctgtatgaaaaaagtgcagaatatcactcacctttcccctacttttggatcccctacacgaggatcactagcttaatgagaagcagagtaacgctattaagtctgggcaagctccttataagttgctgtgtgcttaaaagaatgtgatttatgtctggggccaaagcagttttccttcttttccctcattgaattcaagacagctagacccttgtgtagatcccaggatattacctctactccccccaacctgtgtgtgtagggagagtaacaacacgggaagaggggagggaagttggaaggagattggtcacatgttcagttgtctgagatactggtaaatgtgcgctgtttgtcaatgaaggttgcatgcctgcatttacaaggtggtctcatactgattgtgctctgtccagttagattcgtggcttctcccttggaagctacaattaaggactagttagaagcagaggctagatgtgttctctccagcccttactaactgggaaaataattgagaaatccctcttttcctcagtgaaagcccagtcattggttagaaaaatctaattgtcaaactagcattatgttccatcatatctgtgggatagtaattcatgtaagacacatttttacctctcttacaagtcaattcacttacaagccagtttcaaatcaagcttcccttgcgaggaatggagatcattatggggcttattatgactacatttcttttatgagtgaccattttaaataattaatattttatttaatattaaattattaaagacttagctagacttttaacattagatgaaccttgtgaatcatatattgcatagattagcacatgtatgcaatctaggtcatcaatttgttgaatttatacagccctagatttgagattgtggccctgagtatctggatagttgagttgtgtgtttatgtgcttatatgatagaggtgctttgttcctgcagcttagaaacagaagcagccattcactgagaagcttaagagaggaagtatcaacctcattttccaaaccagcattactttcaccgctcgtggatctgaaagattacatttagaacatttagtactattacactctcagaaactgtggtaaaaagtcacattttcaaaacttcatgcatattgtattcttgttggaaataagtcctatagtttcttaattgtcttcatgccgtccatatttaacaaacattgcaagtcctttttatatttgggtaattatttgtaatttagtgaaggagactaggggatgttttcttccaaagggaatttaaaatcaattttatggtattttgaaagtaaaatactccttaacgtgtcaatatttttaaaatgttatctcgaagttttctattgctcaggtatataatctaataaaattttttgtttgctctaaggttatttttgctattctctattttgaattatgttaaaatttgtgtgcattttatgaaatgccttttttcttattttgaaagtgtaaaattgggcatctcagagtaaaatgtgggattattagctacaaagactaggcacatcgtgaaagctcagtaactaattttcttgactgagtcctatcccagagtgtcacagattcaacagaattttcctgaagggtgatacacaccaaaatctagcttgtgtggatctgagactattgactcaaagattcaaatctacttcggaagtgactccacggtttgagtgaaaactgaggaaggactcatgcctgtatatcactagatatcttatttctccataattttaagtgttcataatttcttcttctttgatgggtgtgcaactggggcatgtttgtaccagccagcatgtgttctgcccaacagtgtgtccgtgtgtgaggttaactgattcagaactcattctcttgataaactatttcttgaaagcatttattttaagtctttatttcctgctgaaatgaagtttcatgctgtcatgcccatcttatttattctagaagaaaattttcatagaagaaaatgatttatggccaaagttacagaacattcatcttttagacttagccttagaatatcattggaaattacttggcttgaatttggttcgtttttatctttatggattatgtaccagggctattaataatacttaaaccccttattttgctatggtggttagatttttttattccttttcaattagtgctattaattattacatggtcgtattcatgcttattacagatgaactatttttagtgccagtgtaaaggattaagaataacattcaattagttggctatttcaggctttattgtacatggtaatgtttcagggagtgtgatttggtctagaatatatccagatccttgtaattatgatattgggttatgacaggattctattatttttagctatgaatggtgcttatttttccctatattaggaatgttaatatttggattatcagagtccatgttataaacagaatttacctatgcaagacaaattctaactgtgcaacattttcatgagaattaaaagttgtgtgttaaggggaaaaccctctgaatgtttttatgtgtaagtgcctaaagaaccgtagaaacagtacatcaaaagctcttataaaagaaaaactgattgaacattagccagaaacaaaatatgatttacatttttttttttggttgctgggactgaataccctaaaaactaagagatgtgagtggggaaaatgtctaattgataagaaagttgatttatattatatttacatgcatcttctaagattgcctttacagtagccaatcagaactttaaaaaaaaaaaagctaacaacatagatcctatgtgttgcccttaagactaaaatactttgcacacgtgattgaatggctcacttaagttgttgaatttccttatacatttaaagtgtacttccgttaagaattattccattttaaatgggtaactttcagcttccgaactattttcctaaacattccagttgtgtattataaaagatcaaaatatctctaggtggtagtacaattttcatttataacgtggaaaagttaactgttaggtttaacattagtattagtgtttttgcaattgctcatagaaaagaacactgaataatggttttcatacaatttttgtaaaacattcttctcccagtttgattccaaatgcttttccccaaattgtctaatatatcataagctagtgtttccttgtatttaatttttccttccaacacaatatttaggaaaaatatgaataacattgtgagtagcgggagacaacacgaaaaagaaacctttcattgttgtggaggggtaggtgttatgtgattgatgcccttcctggcgtttgttttatcctgttattttctcaaaaaagagcacggctttttcttaaatacatttaaattcagaattgcttgcaaaagattggcctggatagatagacatcctagatttaagatagtaccatcttaaaagtatgttgaaaggtaaaataaatcatttcaaaatacttaactttcctaataaggatgttaggttttcttctctttcattagctggccataagtcaaggtccttataacactaggaaattacctttttttactttcaaaattgcattatagtgaattactgtttacaaaatacacatactgtgaacagatataagtttctgtcttttataaggtttgtagaatgaatgtttttttaaagtgagtattatatgttaaatattttaagttttttataaatactagtaactgtttactaatttttgtttggtcaaatgcttgtaaatgtagctgaaagaagatagggagaaactgcggatcccaaactgttccctttttcatttcttgaaatgttaccactacagacatttttttaaggtgaataaacagttgtgatgtgctgtacctaaaatcatgtttaatcgtataaggaaacatttcaatacacttatacaggaagaaaactatagatgaagtacatgtgtgtgattcagtctgattcacagaattctgagagtaatatggaataaaacaactccacttagatgataactgaagcatttcctgccttgtgaaaatttggattttaaattgctgttagaatgggaaatttggacactttatatcattgtataatttcagaatttagtttctgtatcttttggaaaacatgattatagcaaaaacatagaaaataatctattactaaaacaccataaatgtaaaactagtatgcttggctgttaactctaaagatgttacttatgtctgtttttaaaacatgcatgtatttaacaattttatcatagtattgtcatggaaaaaataaatatattttcttacatctt

SEQ ID NO: 13406 - DNA, 4381 bp, Homo sapiens
cctcatatttatgatggatatagatacatactatatatattcatatttgtggatttcctaaaagcctcagaaaatacgactgactaggcagcaaagacaggagtatcttctgtacactgttccgcagttactggtacatgaacagttggaactgctgactttcctaaccaaaacaacttccttctctcctttgttgagccttttgaggggttcatgattcattaccacagttttaagagtttcagttaccattgtatgcaagagccaagcactgaatacctacataggttttctattttctttcattttaaaagcataatgacagtggaacaataatgggatatgcagaagcacccttcacaagttatttctgaatgatttttagggtaaataatacagatgccttgtttgttaactaacttgtggaaagcaggaatcagtgtctctaaggctgcatcctattaccacaatggggtgtgctataactgctggtattagagagggaactttggccctttcacgtttttcttaatgtttgtaacactacttcagaggtttataacctcaaagcagaagaagagcctcaacaacccgggacttataagttatttttatgttactagacttgcataaagattcttgttttccaactcttcattttgttgcaatgtgttattacaggatatatgaaccaattaaggtttttcactacagttcttgaataaaatttaaaaatcattttttattttaattaaaaatatttcccatttatagaatgcatatatttgcaatggacttccactttcatcaactttccatctcatcgctttaaacaggaacttgaacaagcactgttagtttagacctaaaggataggaaagcattaaataatactttggatctcctgaggaaaagataagtttgcttgcaatttacacattccatggggaaagaagagccatatttccttaaaaaaaacattaataaagcttgttattgagaaaaattgtagtgaaaagccttaagtaccaaattttaaagcagcagtaacttaatttttatatcagtgtttttgttttgcacaaactaaatgcagtggtaggtgggtttatgagtatattaattgcctttatccatttgtgaagttaagttgatgagggcaaggtttttgtttgtttaatttgtatatgtctaaaggtatttggaactttttacaggaattaaacatatatgcaaatttgtatataaaaatagcatggccatcatttgaatgcttgtaaatgaaaggattatcttttttgagatctatatataaatagaaatagaaaatccagctggactgattaggattcttttttaattcatttgtgtataacatttttattacaattacacatcagttttgacacagtcatagcaacattaatattttcccatgatgcagatcctttttgtaatgggcttgttctttgagatctctgtaaagaaccctgtgaactagaaaacataactcacagagatacttttttaaaaaatttatttactggaactgaaagttccagttgggatgaagcatttcatctcacttcataacacctctttgactgcacttcagtgaattgttcttatgtgcactgtgtagcaacttacattataacaaagcagataagggctgtaagctgctgcttatgttgaaaagtggttcttcagattttctctcataaaatccagttgaagataaataatttttttatactttatcactgaacccaagtgtttatttaaatgtcaacagtacttctaagaacgttgcctgtcatcgtggtctttggtcttggataactaaactgcctttccagagaaccaaatgtcagagttactagaccaaatagtggttaaaacctccaaaggaagtaatgtaatcttattcataatgggattaacatattttagacattcattttaaacactacctcagttaatatagagtataaaaatctgtggtttaatccctcaaaagttaacagtaattttttttttgtcttacacacacacacaccccctcccccaccatcactatccctgtaccctcaccttggtcatctatcctgaaataaggcttagttagtattggcctgaatgttttgtgtttttttttttgttttttttttttactgttactttgaaaaatatgtatgtataccttatcatatctgcctatatcacttactttggggagatactcagagctttgtggttatcagtatactaaaaaaaaaaaaaagtctacgcttaaatttatagtgctatttggtttctccatgatttcactgacaggtctaatacattttctttgagtacttgtttgtaaaaagtagactttatggtgaaaaatacatgcagtgccaagtgattaacttaagtgtttaaaaatattaaattatagcagaagaggttaggaatgatatcagcagtaatagaaataattgagaaaatcatctataaataatagatattacagactatagaataccaaaataatgtcaatactgtagtttttaaagattttaggattaatcttagtccatataaatttgtactattggtaattattgaataattgggaggaatctgggcagttgtgctggttgtaaactatgaatttctaatcgtaaagtgaattgttatttctaattgaactttttttcaagaacagatttcagcctcacatactaagtaaatactgataaataaggaaattagaaatttagtattcataattaaatatgctctaaaatttcctatacttttatttcctgtttattcttaggtagattggaagggggaaacagtctgttctccctaattaaattttttctaataacgattagtagaatatggacattctatatgacagtgacattaaaagaggctctttggaagtatatacattattaacataatgtgtacaagtccttttgaaatgacaactttaatgggtttcagctcttttatctagagcttgagataattcaagctgagtttttcagggcatatcacaacggccaagtgttcagcagtgggatatcaatgcttatttacattttcctactgctatttatataaaatgttattccattcagaggatgccttttatccccacattaaagcacagatcattaagcaataaaaaccaaattgtctgtcattcaaattataactgcagttatttttgcatggtaagagtgaggtgctaattttgtgtgagatgaactttgtaaactactttgggaaatgttctttggaagtaaggttttttctcctttagtcttatgcttccacttttgtctcagattcacaatccattaaaacatggggaaaaaagaaaaggtaaaattgagagacttttgttagaggagctatttggaatgaaccaacatttcagattttccaaaatgtaagttaggaagtctccattgtctctgcattaacaaaatacactgttactatcttaatctcaagagtgtcattacagtgagaatctcatttaaaagcataccagtgaaattaatagcagtgcttatcaaagaacactgaaatctgtgagaatctttctaggagcattcttttcttcttttagttccaagttccagggtatttttcattcctagtaggtttatatgactcacagaatgtggacttttttcctgtttggagtatttttgtaatgtaagtatcggatagctgcaccacagcatgcataaattgcacattttgttttactttctttatagaatatttaatttcaaaaatataatttatgccaaaaaaagcatacctttcaattttgctacttggttgatttagcacaaaatgcaaagtcttggggcagagagggggagtgaaaaaaattttataggtaattgttacaaaaatacctgtcagaaaccctaaagctgcattgtaaaacaaatggtgtaaactagttttgaaaagtggtaaggaattgtgaaaaaaatctcagacttaatgctctctaaccacatgagtttcttcttttttatttagtaatacgctgctacatatttggaggttctggtgtttgtaggtcactgaacagacattgaaatctgatttatattgtataactgtaacatagaaagaaaaagtatttatattttttctgtaagaatatttcattgagttgtgtataatttaaataagatttgtccccaaatggttttgctcaccttgattttttttgttgtgattttcttgtttttgtataatgtgtatagtttatgtcaagggcattaaaagcctcctgaagcataatcttatcaaagggatacattgttaataaaatgtacttaaaattctt

SEQ ID NO: 13407 - DNA, 2187 bp, Homo sapiens
cactcaactttggtcattctgctgtgttcattaggtgccaatgtgaagtctggattttaattggcatgttattgggtatcaagaaaattaatgcacaaaaccacttattatcatttgttatgaaatcccaattatctttacaaagtgtttaaagtttgaacatagaaaataatctctctgcttaattgttaactcagaagactacattagtgagatgtaagaattattaaatattccatttccgctttggctacaattatgaagaagttgaaggtacttcttttagaccaccagtaaataatcctccttcaaaaaataaaaataaaagaaaaaggaaaatcattcaggaagaaatgacctgtctaaaaaaacctaaggaagaataataatataagaaaggaaatttaaaaacattccacaagaagaaaaattattgtttatacttctacttatggttatatcttatattctctattcaagtgacctgtcttttaaaaaggcagtgctgtcttacctcttgctagtgggttaaatgttttcaaaaattatagcagtagtagaagttttgtataaaatttgtccttatttgttaattgtatataaatgttaattatttgatacgaatgttatgcatttagtatgcacattgaagtctaaactgtagaagagtctaaaacaagttctctttttgcagattcacatactaatggtttaattctgtgctctgtttaaagtactattataactagagtagatctgaatgaggataaccctaaaatcatgaggaatggaagaatggaccttgaaactacctaggcttttatgcatggcacctctttataatgaagacactttttaaagtttttgtttttgtttcaattaccgctagatttttttttctctttttttaaaatccattttactggaaagttggccagcagagggagtagaaattattaaaattctagtgtttggattgggcccttctctaacagtacatactcattcccaaagcaatccaaaaacaaaatgtgaaccatttgggtttcaaatgttaagaacactaaatagcatgatttaaaaaatgaaaaatgctaacacccaagaaaagaagatattaagtgctttttaacaactcctagagtacaaaatgagtacatcataatgctggctcttctactaatgaaccatcgagtgatattgaataaattatttatcttctcagtttccttatctgtaaattacaatattagactaagtaagtttttccaactcttcactaccaattaccttaggcttttataatgctccgcctacttcagtcccatgtttcagaagcttttgtctattttttaaactcattgattaaataatgattaatgcattctccacattttaatattgcaaaggcccattggagtttctgaagtggctccacagaattgaaataatttcaaataactgtaaaggaactgaaaatcttcacagagatgaagtggggtttccattaggtgctttgaaatttgataacaaatcatcaacttccactggtcaatatatagattttgggtgtctgaggccccaagattagatgccactaatctccaaagattccctccaattatgaaatattttaatgtctacttttagagagcactagccagtatatgaccatgtgattaatttcttttcacactagataaaattacctggttcaaaagtggtttttgtttattaaatttggtaataaatatatataatacacagacaggatagtttttatgctgaagtttttggccagctttagtttgaggactccttgataagcttgctaaactttcagagtgccctgagacacttccagccatccctcctcctgccttcattggggcagacttgcattgcagtctgacagtaattttttttctgattgagaattatgtaaattcagtacaatgtcagtttttaaaagtcaaagttagatcaagagaatatttcagagttttggtttacacatcaagaaacagacacacatacctaggaaagatttacacaatagataatcatcttaatgtgaaagatatttgaagtattaattttaatatattaaatatgatttctgttatagtcttctgtatggaattttgtcacttaagatgagctgcaaataaataataccttcaatgg

SEQ ID NO: 13408 - DNA, 293 bp, Homo sapiens
agctgttggcttctctgagctccagtggaagaagaaaacactagtaccttcagatcctacccctgaagataatcttagctgccaagtaaatagcaacatgcttcatgaaaatcctaccaacctctgaagtctcttctctcttaggtctataatttttttttaaatttttcttccttaaactcctgtgatgtttccattttttgttccctaatgagaagtcaacagtgaaatacgccagaactgctttatcccacggaaaatgccaatctcttctaaaaaaaaacaaaattaaa

SEQ ID NO: 13409 - DNA, 1748 bp, Homo sapiens
gaacttggtctgcagaccatccagaggaataaaaaggttggccttagtagtcaaaaacaaagctgatagccagacacgttctgatttctgcccttgttccagctttgacgtattatctgttgccttatttctcattgcctcttctacttgtaaaatgcttttcactttctgtctaggttaaagctaaactgaatctatggctttaaataaattaagatcctaaactctctagcttaagtgtaaatgaagtacagtagtttccctactgaaccctgcctcttgtgtccctggaaccttctagaacacctgccttctaccctctggttgggagatgcagccaccacatcccttcatatcatactgttttgaataaattttcaaatccttattgttcagagttgtttgggggttctgtttcagagcataaaacctaaaggttatagtagaacaaggcaccttcttaaaagaaatcttgcttcagaccatcagttacagagaatttctaaagtaaaattgaagcaactacaacttctccttagacactttggaatctaaccacttaaggacctttttaaagagatagcttctcttctttctgaagatcaatttctcccaaggccaagattgtccttttctcccatttcttgctagctattgcaaatgagggaagaacattattcatctctcctccccttttttttctgattcttttttcagtcagttttgctcctgggttcaagtagtattaccaccctttcacaagcaacagactctcacagggcaaaaaaaaaaaaaaatctaatgattcacagacagatctggagcctctcttcattctcagtaattgctagtcccaagaactagaattgcaaatgggcacaacctatatccttcctgtggaagaggaggccactctcttgagctgaagttccagaagagcagttaatgttcaagagaaattgaactcaactcagcaacaaaggactctattttgaagagcaacatatcacaaagctaaatgtgattgtgccaaacacattaggtgcttatttggggtcatgctaggcctttatcaagtaactggaaaacttttcttgcagccacaatctcaatgtcgttagtaggaagataagaggggagaaaaagctgtagaacaaatgtttggggttaccattgaaaatctaatgtctgcaatatttttctcctcacaacttggaaacgttcccagttcattttcagtcctgttgtgagcacagttctgaagggtttattattgtcaaaataagttttgttttgttttgtttatgttgggtttttaatgttgtctcttgacccttaatgctcaggttcttgtgggagttaatcagccacatccaatgttaccttgagggggaagaagagggtgatgctcagaagctaaacaagacaggggccacatgaccctctattgattagccccaagtagaaagtcctgtggttttatgtttaatggtaatagttgatcatatatggcataattttctatcagcttcctactcagtcactataaacacagacttgaaatagtactttaaatgtccaaatacctaaatgtgctaaactggaggtaactatttctaggtagttgaatttttgaaagtcatgatcagccacacaactgttttgtacatacttattttctcatgcacttttctgtatgcaaataaagctataaatttactcatttcaataaactggagtggcagaat

SEQ ID NO: 13410 - DNA, 4568 bp, Homo sapiens
agcagtatgcataggattatttgaatctgtctttttgattgcctcttgaagttttgacatagagacatttactctggagatagataggagaacgcctggttgtaaaatatgtttttcagatgaggcatataaaaactaaaatggcaggattattgtatagtgtttggaatatgctttgataagttatgatttatatttctcaaggttaaaattctgagtaaaatggtctttgattaataaacttagtttaatctgaatatgtaaatgaatacattttaaagacaaaacttgaaaaatgtattcttgaatagtgaataatttgatcaatgttactgaaatgctgtctcaacttttgttttatgataaaggaagtgtgtgatttccctccctctgagaaatatactgcgcttaatatttgctgtctttttcttgcttcattagagtaagtctgtcagaaagcttgaatatttttgacattcattttgattcaaagttgtcatttggttatatgtggaatctttgaaagtttggctgaaaatgcacacaaatgtgtacattctgaacattttctgaagtttctcttaattctgatttgtgtttctgttttgactttgaagttgtaacaatgatagttgtctccttcagtatttggtaaaagtgtaaagtattgataaatatgagaatgatggttttattttttaattgttacagtaagtaatccttaccacaaatgagtcatttttaaaatatgcatttttaaatgaatggcttttacagataggttaatgacaattgtactgctatattatcccagtcaaaaccaatactttcttttctttattttacaaagctttaaaaaccctggaaacaacttacttcttgcttgtgtctttccatttgatgactgggaattacttttctagataactttttttgaaactactcagtgaaatgaaaaataattacaattttaaatagctaattatatctttctaaaaataaaaaagtagggctgttattagagtgccaatgaataaataacttaagcacaaaatacatagaaattggaatgtgatttatagtacaatctcatgagtatgaaaaggctatattaaaaaaaattttattgaaagtccacagtcatattcacaaaccaatactgtcattgctaatctgaactattatttttatactatatattgtagtacaataatatagaactgttgggttctgttacttctgacactcaggaagatactattggtgtattaattttatctttgttagagatgaaagtagcccactttatgttaaagatcttactactgttggagcttataagtaatgatctacattttttatgaagatggtttttaaaacttttgttttattggaatgcatatctcttttcagggttggagaaattagcacttgccttgaaaagaatattctttccttaagttatatcatcagaaaattagctctggttagagaggttagtttcagagtgctccaaaaaatatgttaattattttattttgtttaataaagaacattctcaaaacgtaaataggtatctagagaagtgagtactcaacatttggtatattgttttgagtaatggatgtttgttttttgtgtaatttgtgaataaatagtttttttctgcattttgaagattttcctattattttatgttgttagcttttgaaaaattagattgatctacttagtgtctttcttatatgaacttaatatatttaaagtaccttgcatggtgcctcacacatgaagtaatgccagctatttcagtaaatgctagctatttctatgaagaacttgagttagtttggagatatttaacctcaatttcctctgattttaaaaaaggagaactttttttgtaatcctttccttatctgaaagtaagaagtctctgattccagtattataggagagatagtgggatttttcttgacagggtctatagctcaagtcccaaagaggcaagactcaggatggaatgcatgtggccactaggccctgttataagaacctagtgtttcctctgtactggcatggtaggccaagttagtctctttcttacccagatataagacataaaatagtttagacataagacagaggagaaaaagaaacagtaagttatggagaaggaaggcagctcatttctgcaggcccctcaaaatgcttattttagctcatactcttctatgcgtgaagagaaaaatgcacccattattttacaaggatgtgaatactgatatacaaacatagactaagcttgttaattttaataacaaatctttatgaatctgaagagaattgatgttcatgataatgatatagatgtttaatatactttctgaaataacactgtttactgttcaagttatattgactataatttacattattcttgtttgagaattgtatggcatagacactcattagtcagagtgtctagacatccagaccatgcctgataacacaagaatcatatatcattctctagaaaacaggctgtttggttatagagtatttatcttaaatatattaacagacactacataaacattgaaaagccatgcaagttatagctcacaggagccagatctactgcaactggggcctacatacaaaattttatggcagtggtttcagtatgacaatcttttgaattgatgccgtatggtaaaactataaagattttttaaaagctctgtctcagctagaatttttaagattataactgaacagtatagcccttttagttgtttgaaaattacataatgattcaaaagcttgtttcactgcctttcccagcactaagaaaattaacaatcatttcttttaatttccttgaatcagagccattctaaagtgactctggaccagcaattctgagctatgatttcatgatacatgtattaatatctaaatgagttgtgagttgacataagaaccatagttccataataattatcttcaaatcaatggatatcttaaatgtgtttttttcttccttagagattattattaaactgatgtatttgataataaagaattttaggactgagaaagttaagtttttcttaccaataataagatattgaaatatataaattataaaacagaaataaaatgaaataaaggaggttatccctaaagtcatttaccttagtcacttgcaattaaatatggttacttcggaagaagaagtgtggccctaaagctactgtaacatgaatcatgccctaatgtgcactatatatgaactactttggtcagaaggcagcggcgggtaaggatggcttcctctcacagtgcttcttaggctatccatttaccaaggaattctaatctctttctctcacttcaccaggaaaggagggagtttaagatatagaactgggcatgctagcctcttttttcccttttgtggatttgtcataactgcagagaaccgatgttgtggtctcttgccagctacattgtgaaccttgcagtgaaagttctttgcctctgcaaagggagatttgtgcttgtgcagaactgcccatgccttagtaagcaggtctgtctaattctaagttcaatatctggtggctattgttggcataaacttaaagtacatcctctaacctagcctttttcagcagtaaacttaaaatattgaatctccatctgtctgtgtctcaagtggttcagaggtcaggagaggagagggacattattttatgactccctcaaactttaacaaagactagtgcagattatatttcgaagtaagcatgagatatattaaaaaccacatgtgggaattctttcctaattttagaggttttttttaaataatggaaattctattgaaattgagtagtgttaattacaaggcaacaggtaaacatttgttcaggatatttaaaaggtctgctgagttggaattgtgacagaccacattgttgactctagattgaattggaagggaagaatgtgaaatgaattaggatatcctctgttcacctctattaactttcttaaatgagtataacttagaaataataaaatgcaagtattttaacgttatagttgggagagttttgacaaatgtaaacacccacttcaccaccactaccatcctgatatagtgtgtgtccatcacccaaaaagttctctaaagcccttttgcagttggttcccctccacctgaacagccatccctagtcaactacttttctgctttctgtggctatacgttagatttgacttcagaattctagagtttgaaataaataggccatataatatgcactctttttgtgtctgactttttttttgcttaacatgatgcttttgaaacccatccatgttgagattcatccatgttatcatgtgtatcaataataagttcctttttattgctgaatagtattctagtatatagatataccacaatttgtttagctgttcacctattgatggacatttaggttgtttcaagttttgatctattatgaataaagctgctatatatataaatcaca

SEQ ID NO: 13411 - DNA, 3398 bp, Homo sapiens
acagaaaactttgcttatttcttttgcagcaataagcatgcataataagtcacagccaaatgcttccatttgtaatcaagttatacataattataaccgagggctggcgttttggaatgcaatttgcacagggattggaacatgatttatagttaaaagcctaatatgcagaaatgaattaagatcattttgttgttcattgtgcagtatgtatatagcataatatacacagtgaattataggtctcaggcttacttgatttttggctattttatatttagtgtacacagggctttgaaatattaatttacataaaggccttcatatattattacgtgttatatattacgtgttataaatttattcaataaatatttgcctagaattcccaagacctttataggtgattttgttttctgggctccttaacttcataaatagctagtatcttccagcagtagtaacagtctggataacttcttccatatccctccctctttgtttttttgagacagtgtcactttgtcacccaggctggagtgcaatggtgtggtctcggctcactgcaacctccacctcccgggttcaagtgattctcccgcctcagcttcctgagtagctggaactacaggcgtgtgccaccacacccggctaatttttcgtatttttagtgtagacggggtttcactatgttgcccaggctggtctcgaactcctgaccgcgtgatccaccacctcagcttcccaaagtggtgggattacaggcgtgagccaccgcacccggcctccatatcccccttttaaaattctgtagtgtatggtaagtcatatcagatatcagacctaatttaaatttcattttagctttacaagtccaaaaacacagaatttatatattcagatactctagcactaattttagtcttaaaatattcccacgatattctgtacacaaaatgttctttttgttacaagagctgagttgcatatactgtagataaatcatattatttttgccaatttcacaaattcctctggcccatcatgtcagtcattattgagtatatgcacacattgctacttatttgattatgtatcttttaaattgattcagtgcatagaaaactatctcttacaaactttaagtgctctgatatgacttcccccccaaattttattatgaacatttttaaaaacagaaaaattgaaaaactgtttggtaagcacatgtatatctaccatttagattcagcagttgttaatgttttgtcatttgttttctctatacctatatatgtatagatacagctagttatgcatatatatgcatatatgtgtttgtttgtgtatgtatatatgcttttttccccctgaaccatttggatgttacagacatacttatcaccgtgaaaatacttcaagtatctcctacagataatgacattctcctaaaaatccgtaataccattgtaaaagtaataattccccaatatcatctaatcaagccatatttaaatttctgaagttaactccaaatttctttatagctgattatttcaaactaggatccaattaaagtttacatatgacacttggttataactctttagttggatataacattattattattttgataaaatatggaacaaatcaattctattaataagtggtcacatttgttttgggcttaaattactttttaaagatactggattttcctaagatttctgatttacactgatatttttttttgtcattcttaattgcatcacacaatagatgtaaatgaagatgtagtcacctcagataaaattggtatcgtgtatgataatattgtatcatttatatttgccttatgttaactttaagaaattgatttttttgtattaatcattttcccattgcaacagagctatattttttctattttaagaatcatattttaggattatttttggcaaatacagtgagcacttatgtaaccagatgataatgaactcaaatgtcatgatagcttgcataaatggtgactctagtagatttgactcaagcacttctagaatcatgcactgaattcaaaagaaaaatcttgctgctttttgtccagggcttgttctattcaacttctaatttgaaagctgtacaaagtaatagaagttccatttaaatatgagttcaaaactgtatttactttttatgtggccctctctttaggggattctaattttacttagggtctctaagtgcagcataatgttcctgatgttaacagaagactgtatttttaaagttacaaatttgtatatggaattaagtaatggcgctatatacgctgttgtggggaggggggaagaaaaggaggaaccaattaaataggaccttttaaaaattgttaattttgtaaactttgcttctcttataagttattgtgattcattttagttactgtgttttattttgaaaatatttaaatattgcacttctataaatagtatgataaatgcacagacaattgcagtaaattcttttttaagctaggatatttgaaatgacaacctttggttaagtgtgtcaaggttgcaacagaattttcacaatttttttgttgtttgcaaattgttactaatattgaagaggtaagggaggcaatgcaaatgatttttaatctttttttattatcttttcagcagtttatattttttgtgactttatgcaaccatatttttactttgtcttgacaactgaaagatgtataaggttttttgccagaaatgtactgtatacatagttttaagtataacagattttactgatatgtaaaaattttgccattaaaataaatgatttctcactgagaggaacttttctaccaggttggggcatatgggagcttaatatatcatatctaatttaaaataatttcactgaaataaactccattgcttttacctaatttttttcttgagatgcttttgtagtttttcagagttttagatgattttatacaaaatcctctgcctagcactgctctttttgatgttgtagtgacaccatttacattgaattaatgcttggtagcctggggctagatgtggaactccatggatctgtgttctgactggcacctttggaatgaaagaaaagtgtgtgctgtccaaattttttccccttaattctttccctcatcttctcacccataatagaaattttatttccattgtgagttctgacaagaatgaaattccacatacaacataactgtaaattgttggtaggtagaagttaatatttgtggttcatgtatattttgaccagagtatatttaagtatataatttcagcttccttgatttagaaatatgatataataaagaaaaactccatttatcatctgtt

SEQ ID NO: 13412 - DNA, 1176 bp, Homo sapiens
gaatgtcaacgattagtcatgcaataaatgttctggttttaaaaaatacatatctggttttggtaaggtatttttaatcaattaggcttgtagtatcagtgaaatactgtaggtttagggactgggctagcttcatatcagatttacttgttaagtgactgttttggaatgtttacttttggactgggtttgtaacacggttaaaggcaatgagaaacaagcagaattccaggagtccttgaagcagagggcactggaagacaatatagcagattaaaatagcacagctcatgtggcataggtgggtattttagatgtttgagtaaatttgaaagagtatgatgtttaaattacctttagcaacatgttcatctgctatgctgtcatgactagggggatgattattagtcacatagagcttgggagtaccactggaaacgtatgggtaggagtttaggtggcttctgtttttcaaaagatgatcttatcctagtatctgtaatgctcacttggcacacctgacttgtgggctgtgtgtaaggtggctagctaagtgaaaaaagcctgctaggtgtgagtcaacttaagaatatgtaaataggtttgagaaaaagtagggcttgggtgcaagtaaagattgagcaggaaataaaggaaaatcaagtataatccctgagatttgtagactaaaggcaatgatgtgggactacttggtcgaatttttttagccctcaacttggtaattgggtgtttctgtgttaaagcactgaaacttgctgtcgtgccttcctagttttcgtggtttattgacagggttgggggttttttttgtttttttaaaatgaagggacaaagtcaactggactgctgagtgagagggcaggggcagttgaagggaacatgaattgctggaacagctacataaaatagtgatgtagccaagtcatgctatttaaattataattctccactgtgtttagaataacatctgaggttcttaacctggccttggaagggtatcacttttacttgtaacctggaatggctttataatgtgctagctaattgctactctcatcttgtattttaactcctaatttacccttcaggtctcagcttcagaacattcacttataaagaaaccctgctgattaaatctctcttgggcttcctccc

SEQ ID NO: 13413 - DNA, 32 bp, Homo sapiens
gccatcaagaaataaactgctggcttttccta

SEQ ID NO: 13414 - DNA, 591 bp, Homo sapiens
cacaattactgctaggcccagcacaatgaacagatttaccatcccgaagaaccaactcctacaaatgagaattcttgcacaaacagcagactggcatgctcaaagttactgacaaaaattattttctgttagtttgagatcattattctcccctgactctcctgtttgggcatgtcttattcagttccagctcatgacgccctgtagcatacccctaggtaccaacttccacagcagtctcgtaaattctcctgttcacattgtacaaaaataatgtgacttctgaggcccttatgtagcctgtgacattaagcattctcgcaattagaaataagaataaaacccataattttcttcaatgagttaataaacagaaatctccagaacctctgaaacacattcttgaagcccagctttcatatcttcattcaacaaataatttctgagtgtgtatacaggatgtcaagtactgaccaaagtcctgagaactcggcagataataaaacagacaaaagcctttgccttcatgaagcatacattcattcaggggtagacacacaaaaaatgaaataaacaggtaaaatatgtagc

SEQ ID NO: 13415 - DNA, 6670 bp, Homo sapiens
tagcactacttggagtttccatgaataagatggagaaagctcattgtattagggcatactatctgtaaacactctgatcttcctattccactgagtctctgaagggaatagggctggtagtgggtgggaaaaggggaaaaactgtttcttcagtgattacaatcatactcttcattactataaatatttcatttcccatttgatgagcaaaatctacttctagtgttaggaataaaaaaaaaagaccagtaactttgtttttcaaaattagtctttgtaacatagaattcatgagtgtttacttgattaggttctctatttccagcctatgactcctacgctgtctataccctgcaacctttctgctccctctcttgctcgctctttttaatcagatgctgtatgggaatcaaaacaattgaatgcccaacattttgtgtattacattgttgtcttaaaacttactagttttgtgggacttgttataatgctctatagtcatccacagttgggcaatcatagctaatttttggtcatagaaaatctgcatcaaatcagtttccatgcatcagtaatattgaaggtcataatcagtgatttttgttatatgaaaataatagtgtttcacagtatttctatttaaggcagctataaatataggagaaaaatgtttttggagagctgtgaatgccaatttcagagggaaaaatggttgaggggtgaaagagatgtatggcattttaatttggcaatctcttaaataatattgccctgcaagtacccagtaaatggtaaggtacaagtgtgttaaaattgaaaactctgaaaataactctttaaaaagccctcttaatgatgctcttgatgaaagaaaaagacagaaggaaggaaggaaggaaggaaggaaggaaggaaggaaggaaggaaggaaaggaagaaaggaagggagggaggaagggagggaagaagggagggaaggacagaaggaaggacgggaggaaggaaggaagggaggaaggaaggaaggaagagagggagggagggaggaagagagggagggagggaggaagagaggaaggaagaagaaaaagactgcaagctttcctgccaatttgggattttcaaatatttaattctaaattccagattttaaggaagatttttcaagaaactgcaagtttttgacttgaaggaaagaaagaggaaggctggtagaagcagttagagcaatgtgtttgaaattatgtccatgaaatcacagggatctctgaaatatctttaggaaacttgaaatttatgaggtctgaatggacttgtttaaaattggctctgactcctcacttctgagtttcatcctatccgagggatgagattaaggcagaggcaaaagtttcacacaaagtttctgcaacctaacgtttaatagtccgggtctacagggaagaacaatgacacagcttgagcgttacttcctccttcgtgtcattgtgatatttgacaactctaaaaaataaaaaaaaaaaacttagagcacaataatccttgcctatgtacttcacaggaatattgtgaggtgtttataaaattataaaatttgatgaaattcttacaattattaattattttattttcatgtttagaaataatcacaccccaatagtttcctaggataatacagtccatgcaaagtagggtcatagagaaataaaagcatgccctcagcttttaatgaacttaaatgtagcacatatggcttaatctcttagacttagataagggagttcaattcaaaaccatatatgtcaagaccacaaataatcaagagttgatttcaagattataaatactcatgatcagaaaatagtacttattagcaattaaagggaggaaaagaaattgtttatactgaagagaatgtttatgaggagtgtgtatgtacctgtggtataccaaatagcatacatgtacacacaaaaatgtgtgtatacatttgggttgtgtgtatacatcttgccatatacaatatacaaacatatgcccattcctgtgatagcatacaaattcaaacatacagaaacacacacagatatggacacagtacaattcttcttttcaaatgaagacattgataatattaaataatttaattttaagactgaaacccttaatattgtgtgaaaaagagtaataaaacctttgaaagtagagtagatgatcacatcaaagtatttttgtaaaagaattctagtgtaggacttaattatttttaaaatatatttcttctcttctttccattttcccttcccttgtagttttattatctttctgtcttttacacctgctctttatgtgaaaatgtatatgaatccttttaaaatgattaggattattgaaatgtatgtcccgtaaatttggtttttgggcagactttctctctaactggctattcattcatccttcaggaggatcttagccaagaatatttgcaatgacacatgaatttaattttataaatataatggaaaacagatttttcatcatatcatgaataaaatatagaggtaactatgttgtattttcttgaacctagatactttctcatagtgtttgcttagaattaactttgtcctatttgtcaactgggttctggaaaaaaacaaacatgatgaagcttttgaataattgtgcagttttttaactagggaaagctttgtactgctgctaatgatatgcacccagaaaccttgttagacaaaaggcagtttcaagccaatgctatggtttccatgtggacatacagtgcctatgtagcaggcacttagagtaaatggacttgccttaatttataaaggagggaagaggtagaagggaaccatgggtcctccagctagagggggagtttactaaaagggagtccttggaaaggggaatggagagaaggtgcctttgactgtcttctatccattagttctgccctggagcacactggggaagcaggctgcgggccttccaaaagtaaaaaatggtgatatgcaatcgaagcttatccttagcctatgcacatttgtctcagctgggcattgtcttttcagagagcttgtagcacaagggctacacatgggcgccaagatggtggtagatacaccttggtgcactttttgttttacttgtttcttaagactatttcacaagtcctgtgaggcaaaaaaacaaaacaaaacaaaacaaccaaacaaatacaatctaacttttacccaatctacagcaggaaatcaaaggagtgggtggaatgagagaaaatatgcaaagagatcatttttaagtttgatttcctgtctgtaattttcaaggactaatatagcaaatttttcttctgccattatcatttatgtctccctatttaccacacaataatgtaaatgcagagaatgaggaggcatcttttaaaagccttaggatattctatatgatgacctcaatattgactttcagccatactgggaaaacttacttttcatggagtgccacctaacagtgaatgtattagagtataaaatgtttgccatgtatacacctgtatgtgcacatacacacattacacacacacacagaatgcacatttcacacacatatacttattattcaagttgaaactgcactctaatcaatctgagtctattgctgtttcaactcttaaaatcaatatctcctacattagtagatataaacataattcaaatatttaaatatttaagaggagaaaagtaactagaaaaccaatgaaaagtgaggccatcagaaatagaaaatgcctggcacgaacagtctatctaaattctcaatttcacttcaaattagagaatccataatggactagaatataaattacaaacacatacacacatcttcacttaaagttgttttaagttctttgaagttctgacatgtttttagccagggttatttgttcaggttcttccttgttaggattccagactggaaagttggaagtctcaggaaatgcatgtttccatgagttttttagtttcacagttttacagatccaacgacacaatcttttaatctttggtcactcaaccaaacaggagttccgtaggcagagtgctcactttgaattgctaatagaaaataatgcacagtgtcctcaggatatgctaaacaaggtttttaagagcattttattttacagcactttagtcttttcagctagatttcagtgacactatggtgtaaatgctatatctgccataacttattggtggctcctgtgttacatacagttttaaataatgctctaaattgtttgttttcccaatgataatgataaagtgttctgtagaatttgtaaaacatgtcaattgaatctgttgaaaattgtgtaattgttatttcaattgtgatactattttgtaggtaatagttttaaacgtatatttgtatgagtcaaaagtatgtgcttgtatgtggtatgtgtgtgtaagtatataatatcttatcaaaaatcaaacttatcctaaagaaaaagggcacattgtgaccagccttaatttattaacacttttttgttgtttttgcaatttggatttaaaattgaaacagaaattaagtttttgttaaaaatggtgtcttttaattttgtgaggaatgggctttagaacctatctgagttcccacaagcaaactgtccaccttgtgaggtaccccattgcttttcgtaataatcaaacatcaattcatatattaacttcattttcatacagactaatttgttttcatcaacaatagaaccagtacacctttaaagttgaccttcccaacatggcacccatttttctttaatgataaattttccatgaaaaattgtttctccaaaccattactttttaaaattcaatcttcccaagtaagatgaactgccttggtgttaggagagcttttaaaggcccatccatactaggtggttccaacatggttctcttctcgagaaaacaagcatgcaacccacacacttttctggtctgccccacgtgtagaattagtctagcaatagaaaactcatgactgacaaggatctacacatgtggtcatgcttgaagcaaaaattctgtgaccttctttgggcttggatctgattacagaatattaattaactttcttatttcctttctttctccatccttagttattccttttcaatatttagagttgccaggtaaaatacaggatatccagtgaaatttaaatttcagataaacagtatttctttagcatatttctcatatatttaatcagacatactttcactttaaaaaaagtttatctgaaattcaaatgtaactgggtatgtcctatatattttttcctaaatctcacaattctatccacactgcctttctatctttttcagctgggctatctataaggggcgagatctacctccctccatacccttgtgttcagacaccttatgaatatctgcagtcataatgtccttcaagaaagaaaacattggtcagctctaggtcctgcaaatgctttttgaaggacgaactcaaatacagatgggataatcaagtaaatatcttcataggatcaatgccaccatgttcaacacttccctttgccagcctgttgtgaggtccaagtttccccattaatcccttatatagcatttcccagtaactgggacaaccaaaaacacaccgacatattagaaatgctcctgaaaagtggcaacaccgcctaactcagtaccaggacctcttttaaattcaatttcttttttctttcagagagataacaaacgaattcattatttcccccattcacatcttaccacaaattatttttatcaggttaaaactggtcatctacggaattgtagaaaggtgacataggaactgtcttcactgctggaagaataaaagagtctgaggtatagacactgccctggtgacaccttctcagaacattgttgggggacaggggaggcaggcgcaagtaggggatagaatctgaccctgacatgcagctatcacctggcagagagactcgtcaaagcaaattataacgaccagtactatttttttttggaattgaaaacccaagaagccctaaaataagaacagtgagatcaaaggctggtttctaaaacaatgcagaaaatagaaccatgttggaattcctaaattctagctttcaaatactactgtttccaacagtgaatccttgacagagactgaatgcagatggaattttgaaacattttcagtagctacctcctctcctgaaattcctataagtggcagaggaaaatccaaatcctttaatataacatgtccatctcatgactcctgcttacacacatttgtgttgatttgcttcatttctggaggatgggaatttgcagagctggtgacatttccttcattagacaccagaaattcaccagagagagacagatctgtgccttctctttttaggatctggttattgatactttaataaatgtggtgtaaagaaaatccatggctacagtctgtatagaaaatgtgaattttttaaataagattgtgttcttaatgtaaaaaataaaagtttatttgtattcagtgaaatgcctaataaagtcctggtaccaattatcttt

SEQ ID NO: 13416 - DNA, 1663 bp, Homo sapiens
aatatggatatttgtaccaggctgcgtgtttttcattttaaacacacaagatttaattgaaaggacatcaataatcataattgtgtatttaacaggtggttttttattagttttcttgtgtttcagactttatgcagccatataaactgttctctaggcatgctgtgacattttaataaaaagcaaaaggagcatttataattatctcatttgttaaggctgagaaggttgtttttataataggtaattatattgaatgcattttcactgaatatggtatgtatgctaaattatatgaacctttccccaagaagggccctagaaattgatgtggctttcctcttaaatattaattattagtcctgaaagaaagataacatatgtgatttttgtggttaggagagttgctgtcatgattgttttttcttcagcctcctctgacttttcttttggggcttcagattttatgattacatcttgtccccctagaacatcccccttcctcccatactgcttttaaacagatgcccaagaaggcaagcaggaatgcctcttgtgggggagggcagggagaaataactagttcaaaccaactatctatctatgctttgcaaagactaaggcgtattataggaagagggctagaaacctaactgattcttctcagttttctcattttaaaacagcccagtattcctttgtatcctcaagggtccttgagaatacttctgttattgagaccctgtgggctacttgtactgtacctcctctcaagccaagaagggctgtgggataatttaccatgaatccttagtagcaatgacagcagagttaaaaaataaaaggtgttttactttcaggctcttgttttggttcagaggagattttaaatattgaatgacacttctacagaacaacggtttttcttctgccaaggctacttcctttaacgaagtgcctttaattcagccttatccaactagggaaaataatgttggacaagtctaggatttgaagagtcagtgaacttttagtgtcagggaataaacatggtgggtagattaggtttgaaaaaaacttccttagaggtatttattctcaatacctgacaggggcccatgggaatgacttcagaagcatcccggataatagatgggtaaaaagtctaggcaccctgaagaacaggtgagacagctggcctctggacagaggtaggcatagtacagtacgatatatcattcctctggtcctaaatatacaaacttattcatgtttttaggtgatgatggtcattgaaactcacttcttttcaggtgtagctacaattgtgtaatgtacaatattagagaaaggacaggctttttatgagtaacacacaccatatataaaacagcctttctggctgaccacatggttaaatgcataccttcccagtactggggggaaaaaatgacccttcttagaatgtgcaagttccatgagagtaatatattgatatgattttgaaaagaattgttgatagttacatcttcaaacttatcattccagtatgcatctttaagataatgtgattctaagtagatgactttatattcttgattgaagagtgctatacatgttaagaaatgcattaaggaatacaataaatattctaaagtgatgt

SEQ ID NO: 13417 - DNA, 839 bp, Homo sapiens
atatttaaaataggacatactccccaatttagtctagacacaatttcatttccagcatttttataaactaccaaattagtgaaccaaaaatagaaattagatttgtgcaaacatggagaaatctactgaattggcttccagattttaaattttatgtcatagaaatattgactcaaaccatattttttatgatggagcaactgaaaggtgattgcagcttttggttaatatgtctttttttttctttttccagtgttctatttgctttaatgagaatagaaacgtaaactatgacctaggggtttctgttggataattagcagtttagaatggaggaagaacaacaaagacatgctttccatttttttctttacttatctctcaaaacaatattactttgtcttttcaatcttctacttttaactaataaaataagtggattttgtattttaagatccagaaatacttaacacgtgaatattttgctaaaaaagcatatataactattttaaatatccatttatcttttgtatatctaagactcatcctgatttttactatcacacatgaataaagcctttgtatctttctttctctaatgttgtatcatactcttctaaaacttgagtggctgtcttaaaagatataaggggaaagataatattgtctgtctctatattgcttagtaagtatttccatagtcaatgatggtttaataggtaaaccaaaccctataaacctgacctcctttatggttaatactattaagcaagaatgcagtacagaattggatacagtacggatttgtccaaataaattcaataaaaaccttaaagctg

SEQ ID NO: 13418 - DNA, 384 bp, Homo sapiens
atagcagcagaaggctttttggattctcctccttgaaaagattctcagttaccaaacgtctccacctagaaaataaaaatacattaagatgtgctttcattgctggttgtcagtttttaaattctctttttcccttatgtttctttcttgtttcgcgtcgcttattactttcagtttccttgtattttaaatatttgtatttatttcattaaatatttcattcgtatctgttttcactttgagaaatctattttacgattgtagaattcttagagtttttggcaaatttaaaatttgtttttttccattgtattttaaaatcttattcctactatttttctaattattgctttttaaatgtattgtttgtttacatttaatttt

SEQ ID NO: 13419 - DNA, 1740 bp, Homo sapiens
gatactctgtgaggtgcaagacttcagggtggggtgggcatggggtgggggtatgggaacagttggaggaatgggatatctggggataattttaaaggattacatgttatgtaaatttttatgtgactgacatggagcctggatgactatcgtgtacttgggaaagtctctttgctctatttgctgacatgcttcctgttgtggtctggccaatgccaaatgtactcgaatgatgttaagggctctgtaaaacttcatacctctttggccatttgtatgcatgatgtttggtttttaaacatggtataatgaattgtgtacttctgtcagaagaaagcagaggtactaatctccaattaaaaaattttttaacatgtaagaattttgtactttgaacaacaagattacagaaagtacctgtggtttttggaaaacatttctagcttggggaatgtgacaacattccccagtgtggtaaaattggggtaaaatgtggtaaaatgtgatacgcacaaaccctttgaaaatagcaaaacaaacatgccctttttctaaaattgataaatcctaaagaggaagaaaagagctgggacaataaaacactggctctggaatctggaatgttaagtccaggccagcagtgacaaaagttattgtaatgacctctgaacagagaaacactgccattgaagaggcttctggtatagaaaacatggtacattcaggagctgtgaatatagctctaggtgtgctcctgaatcagttcatggtagattatgctgaacaacagtgagatgttattggaggtgtggatgagggagtttgttgttgcagtccttctttgcaccttattttaaagaataaatgaaacatttttctggttacttttttaaaaatttaaaatggaagggaagaataggggcagggcattattaggctatttctgatgcttcagtgttataaattcaacatagaggctgacaacctaaattcatggtgtaacacagctcttttccttttccttttttttttttttttggtatctgttcaatgaaaataaggtatgacccaagtttttacctagtctgactagaagtattccacttcaaggtctgaagtaggacttttaccttaaaaaacaacaacaaacaaaactatcacacaggatagataagaagattggttaaacagttttgtgtagatctttttggtgctgaactatgacatgagccttatagattgtaaaatagggatagttggaactaatgtacagaactaaattttttaaactttatttgctgttaaattctgtgaagtttcagttatctaaaataaatatacacaaatatgaaatataatgtttcagattgcaaggtaatatgtaatagtagtgtttgtaagatactcttgtctaatattaactagtagtattttgatttgtacagtcataatttgttaaaatgacttcatttaacattcactgatgtagattaataatgtaagttctgatttaaagaatggtggcaaaatggtgcatgtaatacttttgcaagtgttggggagatcggtatgttttgaaaagagtaatttaacttttgggtgccaggaaatgggttttctcaaagtccattgccggcaatgggcaggcctgcaaatactggcacagagcattaatcatacaccttattaacggtgaggtgaataactttgaaataaagttttagagaaatgtttcagata

SEQ ID NO: 13420 - DNA, 361 bp, Homo sapiens
agagtctacagataaatctacagagacaattcctcaagtggacttggccatgattggttgtaagtttatcatctgaattctccttattgtagacaacagaacaaaacaaaatattggtttttaaaaaatgaacaattgtgcggtatgcaaatgtagccaataatatactcaactggaaaatgaaatgaaaagataatactggctgggtatggtggttcacaccttttatcccagcacttcgggaggctgaggcaggaggatcacttgagaccaggagtttgagaccagcctgggcaacatagcaagacctcatttctacaaacaaaaaaaaaattggcccggcatggtagtacttgcctat

SEQ ID NO: 13421 - DNA, 1970 bp, Homo sapiens
ggtacacggcagtcttagagaagcaaatggctcagatgatgataattaagagtagccaacattaaagttaatttttaaaaatacagttaggtgtttatattatttagttattataattctgcaatcctcttgctcaggaagtgtatacaacttttttaaaaattatacttgttattattctacttctctcttctatgacaactctagtgcaatattagagtttcatttattccacaatatatttttactgtttttttctatttatctggctttactagtagttcttttagattaacatccagttcattttctggaaatatacctggaatttagtccatttcctaatgaaaaacagctcaaattttagggtaactaatttgtaaagagttaacattatatttggatccaattttcctgagatattgaaatagtgaaatcaccaaataaatgatatgaatcatttaactatacaaatgtatagttaatgctaacatgtatttattttcatatatgttgatcctgagtgaaatttaatttgcagaatgctttatgagttatgattactggcaaaaccttcagagcacttgtgacacatcattataatatccagtagctaacattagatctagcttattatttcagaaattaatttaggaaataattattaaaacatgttggctacagtagcactttactgaagtagtattttttggtatctctagcctagaatctcgtgtgttagttttaactgttttgaaaataataagtaacattaacaaaatgttgatatttggatcataaccgtaacatttgaatttatgcaaaaaaaagaccagaaatgtcatttcaaatgtaaattcctgaatgtaccattaaaattattttagttgctatcagtttgtttatatactattttatatactattctaaaatattttactctgcctgatactgaaagacagcatatatttttttcaaaataaagttttaggaaatttgctttttcctttttctttcaggttgatcttctattaaaatgattcctctttattagagaaggaaaatttagttgctatacatcttatatttgcacagtttattaaagtcagtgccctaaaggtacctgcttttctttgtggcatatatggcatctgctgtcttcagattttcttacacttttgtgatttataatgttagtgattggtgccttattctctgaggaaagatggagggttcataaagcaatgccttatccacagcagattttcttgtatattaagttaaacagaattctgtaaattattatgaaggttcaagctctttaggggagttttttttcttgttgttaacaaattggttgcaatctattatattttgcaattgattagatattacagtctacttatttttcaagagtaattattgtataagtttggttggtataatggtaaatattatatagtgggggtaaatttgattagagttttttttttaagcactggcttcagaaatccatggaaataaagtctgtatcttgtgtaacaattcctgactaaattgcaaaaccttttctactttttctttcttcatattaaacaaataaatattattaaaaatatagggccttatttaagaatgctacatagtgaccggacgtggtggctcacgcctgtaatcccaacactttgggaggccgaggcaggcaggtcacttgaggtcaggagttcgagaccagcctggccaacatggtgaaaccccgtctctactaaaaatacaaaaattaactgggcgtgctggtgtgcacctgtagtttcagctattcgggaggctgaggcagacaatggcttgaacctgggaggcagaggttgtagtgagctgagatggggccactgcactgcagcctgtgtgacagagggagactgtcttaaaaaataaacataaaataaataaataagaatgctacataggca

SEQ ID NO: 13422 - DNA, 207 bp, Homo sapiens
aaaatggaattattacaacatattattaaagtttaaggatgttgtttcaagtgactggtataaaattactagtaagccaagatattgtacgtattaccccggcacaatgattgtgaaagaactgacatttaactttgaaggtatttttaacttgtacatttttaaaatatgtatttatatcttaataataaatatttcgaagttttg

SEQ ID NO: 13423 - DNA, 1108 bp, Homo sapiens
agttaaatttcagcatatcagttttataaagcagtttaggtatggtgatttagcagaacacaagagagcaagaaaatgtcacatctataccaaattaaggatgttgagttatgttactaatgtatgcaactttaattttgtttaacactatctgccaaaataaactttattccctataacttaaaatgtgtatatatatataatagtttattatgtacagttaattctactgttttggctgcaataaaatcgattttgaaataaatgaaatgttgaaaattttgctagttggttagatgcttatcctttaaattctacttttcttgaggggaaaaagtcttcttctggaaatacatattactgcaaaaatgtagcatccttttttaggtaggagtattatagctttcattttagtttgacatttagtgtcccaatgaattgaatttcaaatatgaatcataatcttgaaaatctttagcactaaagtcttggaatatatcaacaactgatttacatatgcagatgctatttgataccaagggctttttaaatgtcatgggggggaaaaacccaacttggtgaactcccagctaaacaaccaagacttcactgaagatttattccaattctagaattgttcttttttatttttattttttcaactgactaacttcattaccttaaaggctagaacattattctgctttatttatatggctttctcacttttattttgtagcatgggttgcatcgacttttttactagagaattttactagatatttgtcattcaagttttcatctgctttataattgatacaccttgagggtcacttttctaatacttttactataatgtggtaccacctcagccctaataaataatatttttacctaatgtcaaatctttttccagctaactaaaaactgtgtacaaaaggattgcttgtaaatatgcatgtaaatagttctgttaataacccactgttttacatttggtacatctgtgtctgctaatacagttagctttctcacttttctgcttgtttgttcagtctgaattaaaattagactttgaaaataaagcttaaatagttgtttcctctaa

SEQ ID NO: 13424 - DNA, 2670 bp, Homo sapiens
tccctgctgattgtcaaagcagaaagaaatactctcataaactgagactatactcagatcttattttattctatctcctgatagatccctctagcctactatgaagagatattttagacagctgtggcctacacgtgaaatgtaaaaatatatatacatatactataaaatatatatctaaattcccaagagagggtcaaaagacctgtttagcattcagtgttatatgtcttcctttctttaaatcattaaaggatttaaaatgtcgttgtaagattatttatttctaacctacttttacttaagtcctttgatatgtatatttctctattttatgaagagttcttggattcaatggaaacaaaactgattttaaaaaggcaactcaaatgaactagtaaatagcaccaatcaaaactttctttcattagctgtgtctctgcatctaaattgttaatcattaatggtggagaattaaataacaaatcccattttatagatctaaattgtatttcggtgctttcaatttcaaattaggttaaagaatgcactacttgcttggccaccgtaggagactagcattgccactgtttgttaagaatatcactaacctcaaacatgttcattgatctttcagaaagctgagggaaaattaatatttgtcttcatgtgttatcggacttttaccaagactcgatcaatgttagttgtaaataactttttcaacccaaataaaaatagctattctgtgttgtatgaaggtaaaagtcattgtttaagaatttagttttattgcttcacttcaaaacttagagttttaaattttacaaaacctgattgtgagaattattcaattgtaatgcaatggcttgaaacctacaatattattttaacctgcaatgttttatgcaaaattgtatgctcgaatctacaaattgcttgtattacaccaaaaatcgttacttttctttcttcttgccataatcaagcatctgaaaatagtccctgcatgcttctggggaaaaaaaaataggttcaaatcagtcattgtagagaaaggcttacagtatttctcgtttctagaaaagcataacaattcattaattgcctatcttataattcctataaggctgacttggatctctgacttaagtctagaagtgaggttttcacttttatttaatattattgctattattatttaaataattatttgtaaaccacagcttgatttggagttaagtgttgtctgtgtcttcactgtagctggtaatttactatggtattaatttaaagaaataaattcaatacagcatcacgtctgtttgggaacacacattttgctctatgtatattgtaactaaatggttagtaaactttaaggcatgtggtgactaacgtagcccttagataggaggtttgtcatttttaatgtgttgaaaatagtacagacatggtgacagaaagcaggggtaaagttgaacgtctatgagcattgtctgtctgttttcttaactctttacatgatctgtgagcacctgcttcttctcaaagaactcccttagtaatcatttgtgcctaatgcatcccacacatgtggagtatgactggaacacaattgaaagattcctaacaactggctgcggtaaataacccaagttaagagcatgacttaaagtggaggtcttcagtatctctggcactggcaatacatttaagaacatacagagatcacacattatgtgggacagggcctgcagatagacttgaggacagaaaacaaaaacaaaagcagaaactctaaagtggatccttgctgcctgttatgccttttgtggatataatacctataataccaaaatgagttgttatgtttaatttcaaacaaatcccaactggtgtggaagtaattaactgctagtcgatgtaatgtaatcatcaatatgctggtgacatatgatggcatgtcaggaatactgttgtaagaaagggattgttcagtctacctagaacctatgggaaagctgcaagaccatttacatatcagtacaaaactcctttattttattaaaatatgagaattaacttcaatttattaagattacgtattggtcctttaaattattaaaggtttacatttgataggattaatggatttggtagtgaaatatttttatatatataaatttttggttttttattttgagcactattgggaaacataagcaaaattgaaatgcatggtctttcagtgcaaccatacaatttttattcactttgtaatagaatggacaaaaaaactaaggtttatatattaaactaataaaaaggtacagggtaaattatatacatatatgtatgaatgtatatatacttagattaagaaaaaaaaatgactcacattcctgtaatataaaggtccattgctagttgaaaagtgacctcttttctctgtacatagtgaagcccgtatgtatggagttttaatctgtacagaaagaaatgtattattcattggtctttctgctgctggaaagataatagaatagctgattcttacaacaactgtatgatcagggatgagttagagtatttcttttgtctttgctcaaagccatacatatataaatatatataaagattattaataaattcaacaaaaaataaact

SEQ ID NO: 13425 - DNA, 630 bp, Homo sapiens
atacaaaacatcatgtcgagaatcattggaagatatacagagttcgtatttcagctttgtttatccttcctgttaagagcctctgagtttttagttttaaaaggatgaaaagcttatgcaacatgctcagcaggagcttcatcaacgatatatgtcagatctaaaggtatattttcattctgtaattatgttacataaaagcaatgtaaatcagaataaatatgttagaccagaataaaattaattatattctggtcttcaaaggacacacagaacagatatcagcagaatcacttaatacttcatagaacaaaaatcactcaaaacctgtttataaccaaagaattcatgaaaaagaaagcctttgccatttgtcttagaaagttattttttaaaaaaaaatcatacttactattagtatctatggaagtatatgtaacaatttttatgtaaaggtcatctttctgtgatagtgaaaaaatatgtctttactaagttgaaatgaatactttctgcctttgctaatgatagttattctacaatctccacaagaaaaatataccttttatccggaaatattggtttaaggcaaataaataaaactgtgcttgctctaaagctctgcactac

SEQ ID NO: 13426 - DNA, 601 bp, Homo sapiens
gaaatatacgaagagtcatcaacttggaaaggaaacaaagagtgcttttgggcatccaacagttaatcacttatgtttttagagcatgcaatcttaactttgttaaactattattattgatcacattttgatttttttctctccacatcaggatagtttactgaagcacaatctcttatactagtgggacaaaagggagaaaaaggaagcaagataaatgggtatgtaggatgaagggttatttaaaatggaactaaagatagaaggaggactgtaggaagaaatggaataatttaaatgtgaggaaagatatctgtggtagacatgtccttccatgactaatttctaattgtaactcaacacacattgaggtatgggccctcctcagtgactttaactagctcagaaacgtactcccccaccaaccccacctcaccgccccccatcccggttctgggagagcattgttattaaggatgcatgacaggaatgttggcagaactggaaagtattaaaaaagcattatcagacagtcttgatattatacattttcagaaatatattaaaaataataaactaaaacccatgatttcaaaagttt

SEQ ID NO: 13427 - DNA, 1777 bp, Homo sapiens
aatctggcaaagaaaacaggctcccaaaaggccttgaacctatcatgttagtttctcattttaattttattttggtatcaagactatattggcttcagtatctattttcctctggtcatttcagactctcatctctctattaaagtgaatattctgtagatcagatgaattatcatcggcattaacgtcaagtacacactactgagagagaatttattctctgtttaccactaattatcttccccgcatgtctcttccttctgttgttctaagcatctcttctatactctgtgctgaaacggatggaattcatggcttatggaaatcaaatcccttttgaaggactcagaaagactcacaagaccttgatcattttctctgggtttgggagtggagtattatgtgactgggactccacaaaatatttatattattttcaagacctattgggggttttgttttattttatctaatttttttttttttttggtatactgagcttatagactatgagagaaaagtgagcaccaaaaacttcattaatcaccttatcaggaaggaatatcctgccatagtaaaattggctctgaagagcttagaggcaagttacacaatgttttcttgattacatctgaagtctcttctcttttaagagcaaagacattgtttcagtttctgagagtggttagaggaaatttaggtacaatgcatgcatcacagactgtatttgattgattcgagtcttcaaatattgtttaatggaatgatgagcctgcataaagtgaagctgcaatgtaacataggtatctttttctaaaaacttcaagtgtttgattaaaatagagaaaataatttttaaaataatagataaaaattttaaaaacagccagaaaaagtataatttatactggttagggtttaagatggcatggatttgacaaagataacaaagacagaatcatctatatattcattcattacgtgttactgtagtttattggaatctgttaatgccttcctctagtagttaaaggtttatcagtatttctattataaacctctattttcaggggtttcaatgtgcccttaaaattgtgctggggctgcagcaaataaataatattgggactcatattcagtctttggaactagttttttttccatttaatttaaatgacaaaattgcatagggataaatgtacagttttactaaggtttagcacctttgatcttttctaaatcaggaaaaaaatctatgcatattgaggttcacagatgaaatattctttggcatactttgtagactttgaccacttaaaatactaagtggccaaatgataaaaaaaactgctccctgcacatgagtgtaaaaacatgtttgtaattttaagtaaaatggactgatacccaaataccacagactcacactatattacagaatgatgtaatacctggtaattctccagaagatagacttcagacccttaatgccatttaaatgtagtttttgtggtttaatcttatgagtagattgtaatgaaatcattacctttgaaacatcaaacacttctttaagctttttttttttaatgtcatgaatcaggaaggatacatagtgattcgtatacaattttgtctgcagcattcttgaatatttttaacactgtgtaatccctgagcagcacaaaacttttattccgatgaccagttacacaattcctgtttttattttgtcctgttgtgctcatcttctatgaaaaataaatgattattaggc

SEQ ID NO: 13428 - DNA, 1017 bp, Homo sapiens
tcccggctgtgatttctgagagaaggctctattttcgtgattgttcaacacacagccaacattttaggaactttctagattatagcataaggacatgtaatttttgaagaccaaatgtgatgcatggtggatccagaaaacaaaaagtaggatacttacaatccataacatccatatgactgaacacttgtatgtgtttgttaaatattcgaatgcatgtagatttgttaaatgtgtgtgtatagtaacactgaagaactaaaaatgcaatttaggtaatcttacgtggagacaggtcaaccaaagagggagctaggcaaagctgaagaccgcagtgagtcaaattagttctttgactttgatgtacattaatgttgggatatggaatgaagacttaagagcaggagaagatggggagggggtgggagtgggaaataaaatatttagcccttccttggtaggtagcttctctagaatttaattgtgcttttttttttttttttggctttgggaaaagtcaaaataaaacaaccagaaaacccctgaaggaagtaagatgtttgaagcttatggaaatttgagtaacaaacagctttgaactgagagcaatttcaaaaggctgctgatgtagttcccgggttacctgtatctgaaggacggttctggggcataggaaacacatacacttccataaatagctttaacgtatgccacctcagagataaatctaagaagtattttacccactggtggtttgtgtgtgtatgaaggtaaatatttatatatttttataaataaatgtgttagtgcaagtcatcttccctacccatatttatcatcctcttgaggaaagaaatctagtattatttgttgaaaatggttagaataaaactatgactctataaggttttcaaacatctgaggcatgataaatttattatccataattatagtaataataaccttaataagcataagaaaaacagagtcactctggatttcaaaaatgtcaaaaaa

SEQ ID NO: 13429 - DNA, 1223 bp, Homo sapiens
cacccagcccctctaggtttcagtttccttatttctgagtgaagatgatgatgttggctatgtcttctccatggggtttttatgagtatcaaacaagttgaaatactcttcttgatgtgaatgcctgttctcctgttcttcttttgcagattgctttacttgctctgcttcccagagatccgcttcttttcttctctgctttcttctttctgcccctcttcctccccctcctcttcttcctcccattcttacccctttctagagattcattttcactactttattcagaataacatctatagcaaagatttctacttctttcccgtatgacttttctccccagctccaaacctcatatttctgattgcctcaggatagttcccttttgagatactttcctgtctttagctcaatctcaacacattgaaaacacaactcattcacttgaaaaacacttactaaaatctcactatatgctaggcagtatgttaagcatgcatattgctctctctaaaaatcagttctgtaggaatccctttcccctcctgatggtctcatccttatcctggtctcccactcagggaacctcctgattattctgctctgtgcttcctcagttcaccctttgctctcttttcttttgcttcacctagtcacatcctgtgtgcctgacagccagtctgctgtaattgtcttagaactgatcctcttgactccacaccactgctaggttgaacatctaaaagtcctgtgctgatcctctcagtcccctgctcatcaactctcaaggacaacctattaccaaacacctttgacctcaacctctggagtcctcagcccaggacttgaagttaggagatctttttttgccttggctctgccataaatacaccctgtaaccttggatgtgttgcaacatctgcaaggataggaatttgatcactgctaaggttccttcaaacttgatcagttcgctgttctgtcttttgaatgttaattcacattcatctcctatattaagactttggctaagtcttgtgatttcttgccttattggagcttttcttctaatctgaattcttgcttctctctccttttcctttacacacccacacaagtcctaacctctccaggaagtgttttgaaatgatgttacctgggtttgagttcttggcattagcctgtatcatctatttggtattattatactattatagctgttt

SEQ ID NO: 13430 - DNA, 242 bp, Homo sapiens
aactgaaattcatggtcaactgctttaaaaattaagatgaagatacagtcatgaaattatctgaaaatgggtcatcacattaagtatttcattacttaaaatgttggtactagccattaacttaaaggtggtgggaaaaaagcacatactttaaacatgtataattttctagttcctttttaatgatgattattctgaatgtatttgccactacatttacaataaattctttggtattatgc

SEQ ID NO: 13431 - DNA, 222 bp, Homo sapiens
aacagatccttcgtttccttttagtccctggcccggctgctggacctctcccgtagcctcagaagagtgcagtactggtccacagagaaggcttcaggacctgcttggtcagctgcaggttgtaaatagtgtacgatactagcatctggtattttatttattttgcagcgagcacatgaggaagctgagtctttcaccaataaacagttgtggtttgtctaa

SEQ ID NO: 13432 - DNA, 349 bp, Homo sapiens
aaggcagcagggtgcccaggtgaagctggcctgttttctaaaggaaaatgattgccacaaggcaagaggatgcatctttcttcctggtgtacaagcctttaaagacttctgctgctgctatgcctcttggatgcacactttgtgtgtacatagttacctttaactcagtggttatctaatagctctaaactcattaaaaaaactccaagccttccaccaaaacagtgccccacctgtatacatttttattaaaaaaatgtaatgcttatgtataaacatgtatgtaatatgctttctatgaatgatgtttgatttaaatataatacatattaaaatgtatgggagaacc

SEQ ID NO: 13433 - DNA, 644 bp, Homo sapiens
aatacctcaactgtttttttcaagagctctcatgatattttgagccttgacaacagttctatataaattcacttgtaaatgctgctgttgtgtaattctaaatattttctaagataatttgaaagcaagggaaatagtggccccttaatgagtatttttttattggggtggggaaaggggcaaaaagaatgatcttagtgtctttacctttctcatattaactcacctctttattctgtggtcttttctgaatagaaatgtatgccctaggaagaaatcatgctgggttttgcttttagagataaaaggtggtggatttattttgcctgcagtaaagattctcagggtgtcagagcagcatattgtcaaatcctgcttctgttttatgtttcagtgtattcactttcattttcttacttactagaccatttctgcagtttgcccaaacctctactgtttgggacagtaagccaaatacctcatttttaaaaagaagttttcatggcatcagtgttaataaagtacatttttaactgagtcttaatctctatttgaagaaaaagtagagacaaaagtaatgtcaatgtaatccccaggatcatgaaatgtatacaaaataaataaagtaggagagtttgttgctg

SEQ ID NO: 13434 - DNA, 953 bp, Homo sapiens
cacaattttaattcaaaagatcaaatgtattcagatggcaatttcactgatgtaagtgttgtggaaatagaagcaaatgacaaaaagccttttccagaagatctgaaatcattggacctgttcaaaaaggaaaaaattaatactgaaggacacagcagtggtattggggggtcttcatgcatgtcatcttctaggccaagcatttctagcagtgatgaaaatgaatcttcacaaaacacttcgagcactgtccagtattctaccgtggtacacagtggctacagacaccaagttccgtcagtccaagtcttctcaagatccgagtctacccagcccttgttagattcagaggagcggccagaagatctacaattagtagatcatgtagatggcggtgatggtattttgcccaggcaacagtacttcaaacagaactgcagtcagcatgaatccagtccagatatttcacattttgaaaggtcaaagcaagtttcatcagtcaatgaggaagattttgttagacttaaacagcagatttcagatcatatttcacaatcctgtggatctgggcaaatgaaaatgtttcaggaagtttctgcagcagatgcttttggtccaggtactgagggacaagtagaaagatttgaaacagttggcatggaggctgcgactgatgaaggcatgcctaaaagttacttaccacagactgtacggcaaggcggctacatgcctcagtgaaggactagtagttcctgctacaacttcagcagtacctataaagtaaagctaaaatgattttatctgtgaattcagattttaaaaagtcttcactctctgaagatgatcatttgcccttaaggacaaaaatgaactgaagtttcacatgagctatttccattccagaatatctgggattctactttaagcactacataaactgactttatcctcag

SEQ ID NO: 13435 - DNA, 502 bp, Homo sapiens
ctgtgggccactcgctgcagaaatgtagatgaatatgtattttcaactctcaaaggacaagattactccagtttgtaagaacgaagaccaatttagtaagctgcattctataagccatcagttttataactcgaaattctttattccaaataaagatactccctaaataagcacttagaatatttgggtgtgcatattaagtctgtgaatttctgtgacttccacatgccaaaattaaaagacaaaatatgttatcagtaggaaaactgagctatgtttggtttgctttgtggcatgtgcactgtttttttgttattgttctttggttgtttttttgctgaatgattttatgttttgggaaaaaaagtacgctttgctgaataaaagcaaaaaacaaaacaaaaaaaaaaccacatcccagacaaacatgtcttcacatttattgtcattctaacttgaactaatgaaacctatttaaaaataaattcctatgatcagtcac

SEQ ID NO: 13436 - DNA, 3526 bp, Homo sapiens
cctgagtgaggatcccggaactgcgtgtgcagcaccagtaaacttgaggggagctatcaggtttgcatagtctttcactggaagtttgaacctttctcactatgacatcagtgatgtcagtatgtatagaactatatcttgatttatcaagagtattttcatttttcaatccataaatgtggaaatgaactatgatcagcagagttgggaactaagattgaactctgtggtgcagctttaagctctgcttctctcttcctcatctcccaatacctcttccccactcccttctttttctattcttttgtgttccccactgccctcactcccaattttaaaacctgtagacagaggccaccagctcaaaaccagcacagatgttctgaactgaatggtgtggcctgtttttgtgtaaattccttttgccgtaatggatgcagtggaataacaatgtttacaggtaccgatcccgatccctgctcaatgtagcatttttttggttttattttcttaataaaagcaggggtaggtttctttaaactgcacaaacatgcaaggattttttaaaaatggaaacttctctcatgttattcaactagagcacttcagtttacaaaacagcaagtccatctttatggaagccagcacaaggaactgtgtgcaaataatgaagacgcttgcttggatcctgtttcaaaattctagaccagggctaccttacacagaattggtcatgttactgccaggagatttctgtgtaacttcatttattggctacagttttggcatttgaagatgtggtactcagatggggttttgtccaccattgtcaagattgtaatcttaaaaatcataccagtcattgataatttagtttatcctgaggcagtcgacttgcagaggcacagtctacaaagcctaggatgttgccactcaatggtttacattttgggacatcttttaagttgtttgtagcactgcagttcaaagtgttaatatttagagggacttctagattttatacctaatgcagtagaaccttgaagtatatttaagcttttttgttaagcttgaacagttggcaagaataatgtgagttcctatctgaaatagaatggtacattaccacttttaagttttaaaaattgatagatgttcagatgtatctcaaactcagttttatttttattccaaatattgtgaatgagaagccattgtcctaaactttggccatttttgtgctataaacatgcatttttaagttataaggtgaatcaaacaatatgtaatacagtattaggatgtaatctttgcttttgtagtactgttaaaatagagaattatgttgtttgcaccgtcttaattaaaattcttgatttttactagttgctttgcaaaaaacaaatgtttggctgcattgctaatatttgtaagtataagttgcttcaaggttgtgctgatgagtagataggatgtagtgatcttagtagtgattgaaagggagggtatttattatacaaactgtgaactgcaatgacatccttagttttggatgatgtgtattcttgtttttctttgcagcattttaatgaagattgctttgaagtgtttacgcagtagcacattagtataaaatttagtttagcacagtggacaaaaagtagttaaattaataacttaaaatcagtctctaatttatacatctgaagtatagcattcctgtatgcacacagtaaataatgggtagcctgggctctgtgttactttcttgtatttttatccaagttgtcagcttcttattgctgtgttgttgtgctaaactttgaaccttatttcttttattaaaaatcagtacactttctataatttagtaagatactggccataatcttccattgttataaccttaattttcactctgggtttacagtggctggtctgtataaataatttacacaaagatgactgaatgctaataccagttgcacttaaatgaacatgcccattctcagtagctgatgcagtaatatattcagtttatctatgcattgctggggtcttgatataagatggaaacagtgtttcttatctaaagttttgattatcagcaagttgaatggacactttagttatttaaataaagatttttgaccaaaatccagaaaatggtatgagagaaaaataaattccagctagtttaatagatttttaaatgtcaatctgattttagcctcttagagagtgctaactagctggtaatgtttacttttaattccttgttaaaatgaggcaataatttgcaagatttttgtatataagtgtaaattcttcatatctttttagatctaattcaatattttctgactacttctgccatgtataataccatttttgtgcatgcttgatgtgacattcataaattgtaccactatgactttatccatgtaaaatagctatttattgaattttcttttaaaagctggatttactgggttttttttttctctcagtttaaacatcttaacagagaatttgttactgtttattaaaagaattgcatttggaagcaagaaaacaaccggatttgcaatcatgtgaagaaacaataatgcctttattatcaagtgttaagcacaattcttataacaaactgtgataaattctttttgtttttttttcctttgccccattattttcttatgaacaaaccaaaaattcatggtgagcagttgcagtgttggctgatatatcttttatgtacagggaatttgaaaaggacagtggattcatttagaagtgtaactggtgctgtgattatagcaatacatttgttagttgtacttcatctttttcatgctagctttttaaatgtttagttttcctcttgtcatggtcagctgctgaatttacttgaaggatgtagaatactgtttaaaaaatactaaaatttgtacaattagatcaaagaattgtgcaatcatttcctttttaatttttaaaatgttgaggctcataaatatttgagaacatcagatctaatagagcatagtgatactatttaatttaaccaaagtctctagtgaatatttcaactttgaatgtaaactaacaaataaacctgaccaccaaggagattgtttgcccagagtttcaaagcacattgtctacaaatggaaattgaaataatttataaaatattgacgttactatgttttttaaaaagttcctaattttttcactaaatggaggaaactattagttttattgttaaatatggtagatattaatattcctcttagatgaccagtgattccaattgtcccagtttgaaataagtaccctgtgagtatgagataaattagtgacaatcagaacaagtttcagtatcagatgttcaagaggaagttgctattgcattgattttaatatttgtacataaacactgatttttttgagcattattttgtatttgttgtactttaatacctggtgtacagttccagaaataaaaatctgggaatctttt

SEQ ID NO: 13437 - DNA, 1561 bp, Homo sapiens
atgggcttccatattagtgggcttacattttcccttttcctaggtcacagtgatggtactgcttttatccgctttcagtagaatcgaggtaaatacgtcactcttcctagtgtaaaccagcaaacccatctctccatccaagtaacctgggctcttacccagataaccacatccggttctccatcaagtgaaggtgaattctaataccatattcctttttctttgcctatactgttcaaagataggtaggccagcttaaatacatataagtgacaaggagtaaaatcacgagaaatgtcatttcagaatggataactataattatcaagctttaaaacttagttctcgctaaaatatttaacaagaacaggctgtataaacttgtttaaaaaaaaaaggtgcgtatgcatttagcagccgtgtcttactagttaagtatctttgttttgtttacttctttgtatggagataatgaattataaagttcaataatatccatatatacataagcaccagggaaataaaatatattgtgaaatatgctgatgtatctagctatctgaacagctaatgtgaatttctttactcccaaaagtcatcgttgtactaggtacatattttaattgtttcccttactaaataagcataatgagacagccaccattccattaatgtttataaatcatctaaattttcagctcatagtggagttctgctggtcaaattatattttaatatctttcttactgaaccttctcataccaaaactacagacaatgtctaattcttaagagagatagatattataatatcaaattaatgtcattatggtacaatttgacagaggtaattttatttctatttcttagtgtaatagcacatcttaaataatttctgtagaccaggattacagatacttctcttgtgcaaggatttcactgtgggaaaatatagctgcagcatctttattaattatacattttactaccagtatactaacacagttttatccttggaaagcttttagaataattctactttattatgtccagtaactagcaatacttatttatgcaaagtgtctctgagatactaacatctttgaaaatatcaatgtatgttcctataatgtctaaaatattttagttactccagtgatgatttattaaccaattttaagtaccagtatgtttattccaatctatgcagtgatttctgaatatttggatatcagcattatttgtatttttcagggtaatttctgaaaatttaaaatatttatttggattgcttattcaggcattataaggtactctggaggaaggaatcacttctctttttttcttagttgggaaacttgtacttatgttataaatctttaaaatggaatcagtaagaattttttgtttaaggtaatacttttcaaataatttgattattccttattggctttatctgacaacataatctttaaaatgcatgtaaccaaaattaatctccaaaaacactttattttatataacttgctttcagtacattaaaattgcttcatacttgtata

SEQ ID NO: 13438 - DNA, 598 bp, Homo sapiens
aagacttttcgaatggaccctatgggactcctcttttccactgtgagatctacagggaagccaaaagaatgatctagagtatgttgaagaagatggacatgtggtggtacgaaaacaattcccctgtggcctgctggactggttggaaccagaacaggctaaggcatacagttcttgactttggacaatccaagagtgaaccagaatgcagttttccttgagatacctgttttaaaaggtttttcagacaattttgcagaaaggtgcattgattcttaaattctctctgttgagagcatttcagccagaggactttggaactgtgaatatacttcctgaaggggagggagaagggaggaagctcccatgttgtttaaaggctgtaattggagcagcttttggctgcgtaactgtgaactatggccatatataattttttttcattaatttttgaagatacttgtggctggaaaagtgcattccttgttaataaactttttatttattacagcccaaagagcagtatttattatcaaaatgtctttttttttatgttgaccattttaaaccgttggcaataaagagtatgaaaacgcag

SEQ ID NO: 13439 - DNA, 3780 bp, Homo sapiens
cagtgcaaaaactttcatgccttttttttttttaagtagaaaaattgtttccaaagtgcatgtcacatgccacaaccacggtcacacctcactgtcatctgccaggacgtttgttgaacaaaactgaccttgactactcagtccagcgctcaggaatatcgtaaccagttttttcacctccatgtcatccgagcaaggtggacatcttcacgaacagcgtttttaacaagatttcagcttggtagagctgacaaagcagataaaatctactccaaattattttcaagagagtgtgactcatcaggcagcccaaaagtttattggacttggggtttctattcctttttatttgtttgcaatattttcagaagaaaggcattgcacagagtgaacttaatggacgaagcaacaaatatgtcaagaacaggacatagcacgaatctgttaccagtaggaggaggatgagccacagaaattgcataattttctaatttcaagtcttcctgatacatgactgaatagtgtggttcagtgagctgcactgacctctacattttgtatgatatgtaaaacagattttttgtagagcttacttttattattaaatgtattgaggtattatatttaaaaaaaactatgttcagaacttcatctgccactggttatttttttctaaggagtaacttgcaagttttcagtacaaatctgtgctacactggataaaaatctaatttatgaattttacttgcaccttatagttcatagcaattaactgatttgtagtgattcattgtttgttttatataccaatgacttccatattttaaaagagaaaaacaactttatgttgcaggaaaccctttttgtaagtctttattatttactttgcattttgtttcactctttccagataagcagagttgctcttcaccagtgtttttcttcatgtgcaaagtgactatttgttctataatacttttatgtgtgttatatcaaatgtgtcttaagcttcatgcaaactcagtcatcagttcgtgttgtctgaagcaagtgggagatatataaatacccagtagctaaaatggtcagtcttttttagatgttttcctacttagtatctcctaataacgttttgctgtgtcactagatgttcatttcacaagtgcatgtctttctaataatccacacatttcatgctctaataatccacacatttcatgctcatttttattgtttttacagccagttatagtaagaaaaaggtttttccccttgtgctgctttataatttagcgtgtgtctgaaccttatccatgtttgctagatgaggtcttgtcaaatatatcactaccattgtcaccggtgaaaagaaacaggtagttaagttagggttaacattcatttcaaccacgaggttgtatatcatgactagcttttactcttggtttacagagaaaagttaaacagccaactaggcagtttttaagaatattaacaatatattaacaaacaccaatacaactaatcctatttggttttaatgatttcaccatgggattaagaactatatcaggaacatccctgagaaacggttttaagtgtagcaactactcttccttaatggacagccacataacgtgtaggaagtcctttatcacttatcctcgatccataagcatatcttgcagaggggaactacttctttaaacacatggagggaaagaagatgatgccactggcaccagagggttagtactgtgatgcatcctaaaatatttattatattggtaaaaattctggttaaataaaaaattagagatcactcttggctgatttcagcaccaggaactgtattacagttttagagattaattcctagtgtttacctgattatagcagttggcatcatggggcatttaattctgactttatccccacgtcagccttaataaagtcttctttaccttctctatgaagactttaaagcccaaataatcatttttcacattgatattcaagaattgagatagatagaagccaaagtgggtatctgacaagtggaaaatcaaacgtttaagaagaattacaactctgaaaagcatttatatgtggaacttctcaaggagcctcctggggactggaaagtaagtcatcagccaggcaaatgactcatgctgaagagagtccccatttcagtcccctgagatctagctgatgcttagatcctttgaaataaaaattatgtctttataactctgatcttttacataaagcagaagaggaatcaactagttaattgcaaggtttctactctgtttcctctgtaaagatcagatggtaatctttcaaataagaaaaaaataaagacgtatgtttgaccaagtagtttcacaagaatatttgggaacttgtttcttttaattttatttgtccctgagtgaagtctagaaagaaaggtaaagagtctagagtttattcctctttccaaaacattctcattcctctcctccctacacttagtatttcccccacagagtgcctagaatcttaataatgaataaaataaaaagcagcaatatgtcattaacaaatccagacctgaaagggtaaagggtttataactgcactaataaagagaggctctttttttttcttccagtttgttggtttttaatggtaccgtgttgtaaagatacccactaatggacaatcaaattgcagaaaaggctcaatatccaagagacagggactaatgcactgtacaatctgcttatccttgcccttctctcttgccaaagtgtgcttcagaaatatatactgctttaaaaaagaataaaagaatatccttttacaagtggctttacatttcctaaaatgccataagaaaatgcaatatctgggtactgtatggggaaaaaaatgtccaagtttgtgtaaaaccagtgcatttcagcttgcaagttactgaacacaataatgctgttttaattttgttttatatcagttaaaattcacaataatgtagatagaacaaattacagacaaggaaagaaaaaacttgaatgaaatggattttacagaaagctttatgataatttttgaatgcattatttattttttgtgccatgcattttttttctcaccaaatgaccttacctgtaatacagtcttgtttgtctgtttacaaccatgtatttattgcaatgtacatactgtaatgttaattgtaaattatctgttcttattaaaacatcatcccatgatgggatggtgttgatatatttggaaactcttggtgagagaatgaatggtgtgtatacatactctgtacatttttcttttctcctgtaatatagtcttgtcaccttagagcttgtttatggaagattcaagaaaactataaaatacttaaagatatataaatttaaaaaaacatagctgcaggtctttggtcccagggctgtgccttaactttaaccaatattttcttctgttttgctgcatttgaaaggtaacagtggagctagggctgggcattttacatccaggcttttaattgattagaattctgccaataggtggattttacaaaaccacagacaacctctgaaagattctgagacccttttgagacagaagctcttaagtacttcttgccagggagcagcactgcatgtgtgatggttgtttgccatctgttgatcaggaactacttcagctacttgcatttgattatttcctttttttttttttttaactcggaaacacaactggggaaat

SEQ ID NO: 13440 - DNA, 840 bp, Homo sapiens
taatacttccacagcaacaggtgctagagaccactgttgttgttttgagtgaatggtggttaggagaaagactttggtggtggaagaaagaaaagcataaaacaaagactactgaaatatagataaagattgccttagtttttaaaaatgtttggccattagtatttttataaaactcaatgctagttttaaagtgtataaattggttaaaatttatgagtcaaatatatagtgataatgttaacatgtttgtaattgctacagaatttaagggtatttttatctctgtgctttctttttcatggtgtttattaaataattgtgtatatacatcctagctactgatatctttattatagccttaagacttaattttaagtcttaaaaatagcgtgtatacttgaataagaaagacactgggtactgttactgtgatgctattgacttagtagccaattatcatttctcctgtataaattccagtttttattgctgcacataaattttttaatgtcttatattgtgatagctatgtcttttattgcagatttattggatgttatgacagattttactaaagctagtgtttttataacatatatattagttgatgtttacctataagtggagtagattttcatctgcctgcaatggtataatttcagtcttagctaaaaatggaaagttgaactggataaattctttgggtacccttagacctctgattctaagtcaaatgcaaatgggttaaataaaatgagactacttcctttataaatatattttcatccttttgaaagtaagtgaaatgtaaataaacttattttttttaaaaatgcc

SEQ ID NO: 13441 - DNA, 2828 bp, Homo sapiens
agcccaacataagtctatgatcgaaactgatacattgtcttccttgacaatcaagagatatttacctatgcagtgcattttgtatatttttcaaaactaagagcttgtatttttatggtaagttattgggatgtctgatatttgagagcccgaagcttccagataacagtcttctgataattagagcctacagcagccagaatttgtttttgtttttgtttttgtttttttagctgcttttaaacctaatccaaaggttttgtttaaaacattttgttgcagtgaaaaaaagatatgaagcaatacagtactcttcaaagaagtccaataaagatgaaaaatatcattaggtattttgagcacagacggagatccatgtgataaaatagattccttctgctgggtctggaaagtctggaaaccacctgtaggccctggctttgtcatttattgactgtattcagaagatactatatttgctctagagttaactcccattttagcaagctagcacaggtgaaaattgagtgagtttttgataacttgtcatttaaaatcattaatgataattttcaatggatcttttcagtagccatcaccagttttgctgataagacttcctcacaacccatttgttgtacaaactgtttcaaagtagcaatcctttgggttagtacacttgataccaagtttcattcagttgattattttcaaaacaaggtgatttgttttaatgggttaatgaatactttgctattactgttttacaattaactttgtatatctctggaaagaggtgaatttgtcaatgaaaaaagtattgtgtagttcagtgggaaaaacctgttgtctgttatagtatcacatcactttcttacattgtcatggtttaaattattatcttggtgaaatatataggttagatacttaaatgttcatattattagcacactacaggtactacccttaaatcataaataatattacccattgtacacagtttccagatatgagttagagtggctgtgaagcaactagaggcaaattgtggcacagagaatatccaggggaaaattgattatgtaagcaagggctgttctactttgagagagagacagacagactacataatagtaatatattatataattaatgttatagatacactgaacaataaaacattttctggaattatgaattaattaacaacctggatttctgtttccagacctataaaccatgtaatgaaggactgaaattcgtttggcatacactttgtttctttaaaattgctagtttctttctgttatttttacattttcttgtcagagaatcaaaactattagtcagtagagttttgtccatgaaataatatttggacatttgtgaatttttccctattttttttcttcttttatttatactcaattttgaagcactgtttatgtttgtaggactttaaacaattagtacttaaagccccagttaattttgaacacacagagatacttattgtactctgtgtacagtaagtatttttatgtttacacttaccagattcataaggttatttgcctttaagtgatcttttgtgattttacttgattacagcatgagaaggtaaaggttgataaatgggagtaattacatatatatatataatttattatttttttttctgaagcagagttttactcttgttgcccaggctagagtgcaatggcacaatctcggttcactgcaacctctgcctcccaggttcaagtgattctcctgtctcagcctcccaagtagctgggattacaggtgcccgccaccatgctcagctaatttttgtatttttagtagagacagggttggccaggctggtctcgagctcctgacctcaggtgatcctcccacctcggcctcccaaagttctgggattacaggggtgagccactgtgcccggccataattttatatttttagaaaataaagaatgaaggacaaaagagcacagctaaatgaaactgctgctctaatttattccactggaaaggtctcaggactccttaactgttttccaggtttggctcttcatatctaacctgtgctaaaatgagaaggtatgctaggtgctgttagaaatcacaccatttccaaagaacccaagtagtatagagaccaaaatgaggcaaaaataaaagagatgaaacaggagagtttatttcttgcatactttccgaccttcatcatacaacctctcctaacctccctgtagtctttaaaatgtttaacttgcctataagctaacatgtaataaaacacatactcaattatatgaatagaagtggagagccagaatgctacaaaagaaatcacagctgctagaagtatcctccatagaaacatcaacatgattgtggatcaaaatgattttcactggatatggaatttgtatgggccatatttattaaaagagttctgtgtggtcacatagagttcctttgggatttcatcccacttttcaggacttaatttgtttgggtttgcttacctaacaagcaacaacaacaacaaaataaatagttccaaaatctagtttattacataaatctctatgaatccttgagggcctatatctatattataaataaatacaaatatagatttttaaatatctatgggactttgccatttacagccttaagtataaaattacgagattatattctttccattaccctttatttctgctaactttttaaagactggaacattctgtggatgttgtcaaagtttgagtttgtttttccctgtgtattataataaatttgtggtattgc

SEQ ID NO: 13442 - DNA, 784 bp, Homo sapiens
atatcatctttagtacctttttgtctctgctgaaactttttaaatgagactgtgtttttttcaactgtatggtctattcctgacagctaaattagccctaaatgtgggtaatatttttcctcatgttttaaaatgaggttaatatttgcataaaatcctaaaacagacttctgtatagtttatttagtcaaaatgtgttccttgatcccagatgttgtggcctgggaaagccctcattgctacagtacaagtaacacaagtcgttgtacctcagttgtgaccttcagcagattttatgaactataagatgcagtctcagaggatcagcaagtggaggccatcagtattgactttctcttacttgctgtactatcagcctgctcgtttccacctttaagaatgattttgccaagaatgattatatcaaaaatagtagttgaaatggtaacatcaaaattattttattctttcttcttcatgtattcacatttttcagtggtttcatttaattaaccatgctttatgttaaacattttggggctcaatgtctcctactatccaaaatgtgcatcacaggaggcttttaactttgtgaaaatcccatgtttgctttattttattttaatgtcagaaggcagtttgcgctaatgcttgaactctttttctgtgaaactcattaaggtatgaccaaatcctgcctcattaattcaagcagaaaatatcctggcagggaatctggcttaaacatgaaatgctgtaataaaatttctatgttattgtctcc

SEQ ID NO: 13443 - DNA, 221 bp, Homo sapiens
cagtgtattctttgtaagtgacatgactaatgtactttgtgctggttgttgagactcagcagggaaataaagatccttctgtgcattattcttataaaactgaaccattgaaaacacatttatatgaacaatgatcattggggaagctcaaacaatatgaaaaatagttctaactcaaaaccttgtgttatttctacattaaaaagactaatgcaactcac

SEQ ID NO: 13444 - DNA, 485 bp, Homo sapiens
gtatttggaaaacagaaattttcaaggtcaagaaaagaaatgaattttgtattttttgtatttgagaagataatgcttttgctttactgagacattatttacttgactatttttggttcaatactactactgttgtcaccatttatgattctgaattttaaagttggaaagttctaagtatcaaagtttttaatatataatgctggtccaatctattcataataatcttcaagttcaggagccgcagagacgcacaactttacacttatcatttctaacagtttattgtataaagatgttactcttctatttactgttatatactgtaaggccttctttaggcctttagctctgttcctccagtaataaaaaagttaaaatatgcttcactagtcacacattccccataccatttcgtgttattcacattccccgtaccatttcttgttattcacatgtacagtaaaacaattgtttcttaaatt

SEQ ID NO: 13445 - DNA, 6231 bp, Homo sapiens
ctgagactttggcttaagccgttaaatttaaaaatttgtttttaaaacgtgtttgcccttccttggaatttgctatatattatgctttgcaataaatcacagccttttccatatagacatttttcgtatttgggaccattatccctctggcaatatatttttaatgtgctgtaactgtaaagtattaaatcagtcttgttacttgatagccatgccccaagtatagctatttgtgtatactaaacacatcatttttggtatttgtgtctctgtgtgtttggctagtgttactacttcataagttcattgtaaaatggctttactgccatcaacatgggtcatctacctagcagttaatgagtattgctggatcaggtgtccaccttccaatgatgaagcaaggtaaggggtaatgttttgctcttgacacagagaaatttaatagctttatgtactaaaatataatatcttttaaagatagtgaaattcttcagttttttaaatctctagggattttttttcaatgttgtagaagatgcagctgcttaatggtcttgactaggactttttaaatgaatggtgtctgcaggtagatgatcatgaaaatatctctaacaaagttttactcttctatgaaatgcagaatttctagtacctgcctcctttgtttttgtaataattaaaatacttcttgtataaagagattagttcagcctgttagtaagtctgcagagatgatgctgagttggttgtgatttttagaatagactcctgggttgttttacaaatgtgccatattggcatgtcttacagtgatacctcaaacacagaaatttttatttaggaagatagctaaatctttattagaactgatttttattgtattcagtataaattttatgaagcttgtttctatgagtactgtggaaaattttataaatgtgagcatatatatttattttgtctgacataatttgtagttttaaagcaagtttcacactgaacttaacgttttcataaatgaccagtttgggatgtttctctcttttactttagtggcaaactcaagagtaaaaagtgtcaaaaaaagaattgagaattttattctgtactttttaaaatttaagagccagggagttgcatcatgaaagcctttgtataataatggaaattttatatgggtaagcattttcaaacacatattagtagatacgttttttaaatttctattttcacattgatcagtgttactttgcttaatacttaggtagcccttatgtccactaaagtaaatgcttatgttgtagaagcatcgaacatcaaccaatgtcatggcacagcaccaaagattgcaaatacctcactatggtgcgcttagaaattttcaaattgataacctatagatacggctgcaggtgaattcatgatagtgaaatcagctaagtatacttaacctcacaggctagaaaggtttactgattcttgtttcacctggcacccaatgtggataccctcagtaagactcagggagccttataactcctcttaacatatgcttacccatgcttaaattctagggaagctgtatccacagccctctgcattgcagccatgagagctctcacgctttcaacccttccataacctaatttagtcatttgggcctctcaaaaggaaatgcttttgtttaaataggtcagtcagttactgggagaaaaaatacagagccagtaggtttttagggatttgttttgcctttgctgctagttttttgaaaatattcttcgattatcaagattttaaaaatcggtttttaatataaagcttttttaaaaacgaggctggcacaagtgcagtggtgtttctttactcccactgcttgacttgactagccttgaaaaaataacagtaaaataaaatattaaaaaataattagaaaatgctacaaaggcaatgaccttattccattgagtaagatagttaaaaatgatagtaattgtagtgaaatagttaattacttgtaagttttattactgttaattgtagagattataaattggctcattaggtttctgaatggtgacacaataatgactgagaagagcaaaagtcagtcctcgttaactaatgtagtatgcaaattaaaatattttaatgatcagtaattttccccccagaaatgatgttggcatttctaagtaaatttcccataattttagcatagtttatgaaattgaataaaaatttattttcactgaagtaattttcttctaatatgatattattattgagattggatgcaaatctcatgaatatgttttagaagaaaattaatgaaattccctcccaggcagtatgtaccagaaggaaaactgaatttagcagtaaaacagtcctggtcattctaactacctgtatgatcttgaacaaagtcacttagtttccctgggccttggtgtctttcgtctataaaatattgtaccagattatctctgaaatcacttcaaggtttaatatatataattatcaatattttaaaattcaagcaatattcactttagaaattattataacattctataatagtaaaggttgaatttattaatataataaacacgttcaacttcttcaagcagataattgatatttggttcatattcttacaacctaatgcatgtcattttcaccaaatgcaggcagaatttatatttaggtttgcatctggaactagattatctggcactttatggccattatttttgggttgatggaccttctcaccacacaatttcccccttttttttttttgcatatcatatgttggttgatatttctcagaggtatccctatttcttcatacttaatatacatctccatttacatctttgactctctgaggtcaaaacaacaataaatgagaagtaaaacaactatatgtgtttgtatttacaactgtatctaaaattatataaccctagtttaccttcagagtaaactaggctgaagagttgttaataatgttgataaaaatgccattgaatcctttcttcaacaaatatttattgagtacctaacgtggcaaacgctgtgctaagtactggggatacagagataagtaagacacatttgcctccctgaaggacttcacagtgtagttggtaggagaaacaccagagcatacaccgttatataattagtgcagtaattgacatgaacatgagtttatagaaactcggggttacctaaagtagtctggataaattagaagaggctacctagagaaagtagtgactgaattgcaatttgattaaggataagaatgagggttatggcagttcctgacagagtgggtactgtgaacaaacaccagaggtagaacaagctgtgttatgtgtttgtcaagaattacaagcaatctggtgttgctggtgtatcataggcgaggcaggaagtggtaagaattgagactaccattttaagttcttaggaacaggaggaaggagtcgtgtgttccgtgtttgggagcttgaactgtaatgtgtaagcaatgagacaccattaaagagtttcaaggggggccgggcacagtggctcacgcctgtaatcccagcactttgggaggctgaggcgggcggatcacctgaggtcaggagttcaagaccagcctggccaacttggcgaaaccctgtctctactaaaaatagaaaaattagccggacgtggtgacaggcacctgtattcccagctactctggagtctggggcaggagaatcgctcaaacccaggaggtggaagttgcagtaagctgagatcacaccactgtactccagcctgggcgacagagcgagactctatctcaaaaaaaaaaaaagattttaaggaaggaaatgacttttattagggtttggttttatcaatttcataatccgattaatcccaccatttttaaaagatgaaattgctttcattagaaggctacataaaatataatttgattattttaggctctattattagactcacatttctttctacagtctcattattatttccaaaaattacacagtaacctaaatcatctaaaaacacataaagctactgtattctttattagatccatccccagagttatatgtacatgtacatactttgagatgtgttttgttcttaattgtattttaggttatttttgactgacttaaattctatcactattttaatatttgttaggtccgaataaaccatttagaatatttttcagtgtacaaaatgtgctgtaatttaataaggccccttgcttttaaaatttggcttaacctgtgaagcacaactgcttcagagttacagagaaacataccagttggtccactggatgagccctgtggttctacctcaggtaacctagtgataagctagctcagcagggagtgcttcaaggactccagctgatcctagtgctgagaccaaaacttcctggacattgggtgcccaagaacagtaggtttcttataccagtgtgacaataatcccagttgcgaaggccagtcttctgatctcagtatctcctcccaactcctctaaaaataggtagagtggcagagaattggggtgcctcttctatagcacaacccatgatgcatccagtcatgcctgaccccactatgcctttcccacaaattgggaggagttggggcagtgagcattttgctagctctgtctgtttcttgcttcttgtgccatttatagtccttggccatgagcaacaaaagtagaatggtgccagtgccttaactaaatttttctcaacctagattttcacctgagacaatatggtaatattattaaattactgtaaagatagcaaattttctgggatactttaaaatcaaagttgtatcaaagatcaagaagcacccataaaagctttataaactttcacaaaaaataagtgaaaattctttgtttttatggccgtgtaaaatgtcatttttataatggaaatgtcttaattttcaaacttaacatatactttaagcaattttagtatttaaacctttgcaaaattgtatttttgaatgtgaagttcaactttggcagtaggttgttgcaatagtgatctggcactatggtgccagtatagccacatagggttatttaaattaattaaataaatgaaaaattttattttttcagttgcattagccacatcttaagtgttcagtagccacatgtgactggtggctaccatattagtgcagatatagaaagaacatttccatcatcacagaaacttctcttaattctggtctagaagataaccttagtacttggtagaaattttgacaggctaatgacgaaaagtttgtaaccctgagctttgcatgcccaagaaaaataaggtattcttttttatatatcagaccagagaagctgtattcagcacattttgaaatgctagtttttggctatggccataccaccctaaatgtgccagatcttgtctgaaatgctagtttctgactacaaaaactacaggacatagtagatatgctcagtagagctgcttaaaataattccctttttttttctgttgaattctgttacaaaaccaggtctgtgttataatagaaaacacacttatgaataaaaatctttaaaaattataatttgcagaaattagttttatttctagatttctaggtggtattaatgtgatagcattaggtgggaccagagaactcatttgttttgtagctttcattatacagattatttaggaaatatatcagcaaaggattttttgttatgcttatctcttgaaacaaaatatttattgtacagattatacattgtgatttttttgttactgagtatattgtttgtgcccagaaaaatctaaaaagatgtgggttgacttctaagagatttaagaacaagtcacctctagtttttaagacagttcccttgatatttacctatccagtaccatctcataagaataactgcctgtaagtatcagaaagttgagaaatgctggtaatgtgacataaacttctcactgttcttcactgagataggactgcttatcttgttattgataaattatttaatttctcctgaataattagcataatctcatgtgatacagaaacatcttaattagcaaataaatttatacaaaggaaaaccaataaaaccttaatgtgcgtttaataaagtaactgaatgatc

SEQ ID NO: 13446 - DNA, 3099 bp, Homo sapiens
cccacagaaagccagagagagtgccttgtcatttcatcatggaaatgcatccatcaaagagagccacccagaggaagaggattgatgtccttgcaaatgcattaccctgtggaaaacgtaaccactggtcagccctagctgacaaaatttcaatattattttagcttctgtgaagtgggatttattgatccaaagtgctggacacggtattaggagggaatgccagattggagagatccaaacaacacagggagacttgcttactgtggagcgtttgtgttctttcgagtaaatccaatagcctgtttacctccttggaccattaagataatttttattatggacttagcaatgacactgaatccatttgtatttaaaactgtttaaaatgtagctgttatgacttggtcaactatggaagtgaagaaggttcagaattcttaagtcatagcttaaaaatatttactgtactttatctcactacaacagcaccacaatttaaattataaaacgggctttgaactataatttaaggagcaattataaatcaaaagtaatgaaagtttgtattatttttcttcattccacttaatttccttaggaataatcccctggttctgaacactgctgtgagccatatataaaactatattaaactgaacaataatgaggggcatagtttaaagcagtgcatcagttactgcagctgtgcaagtctataaactcagtgctgaaagactgtggccaacttgccattgtgcaagtaaagctgagatttccattaaaactttaagagaaaaacatttcaatttcatgcagaaaccagacctggggtatggtacagaccaaaggaccaggccctttgctgccaccacacaggatgccttagttcttatttgagtccctccaactcacttgtgtttacatcctccccagccacagcacggcttctgccctttggattgctgcacgtgtgttgagcttactgagatgataccatgcaaaagatagactggctcggtaaccaggcagacccttttgcagtttgttgacaattacgatgagttccagatgtcccttctttgatatggtagaagggcatttatttatatgagagcaaatgtgtgtgtgtgtttgcgggcgcttttaagtgtgtggatagatgagtgtgcttgcacataatgtgctatttctgtgagttttaaagtaggcaagggataataaccaaagaagaaaatttcatgaagactagacatcataaagcataattttaatagtcactcaaccaagtattttttattttttatggatactctgaatggcaattaaatgtgaaacccagtttcttgggcaagtcaaattctggaatcacatccacctaaattaaaatgactagctcgtattttccccatcttcaagtttcacatcctggtcatcaaaagactcgacagcaagacttagaatgaaaaagggtacttgtttatattaatattttttacttgaacacgtgtagcttgcagcaggttcttgatgaatgtgctttgtgtccaaaatgcctccccattgtacacaggtgtacaccatgcatgcaccaacacctaaaactcaaaactaaatggctattttgtaaggttaatactttcagttaaacagcatgtttgacttgattccatcatggtgctcttaaattacatgtcagtgcatcacatatatcatgatctaatgcagatgactaggctttttccaaaaggaagacagaccctcagacaccaaaagccaatctaaacaactcccaggtttgctgtggacaatcagcatggaatgttttctgcactctcagtcatgaccatctgtatcttgttacctgctttctctctcaacaccacagttctcaaccctgagccttccagagagagctattgatgatacaagaggaatcaccagggcccggatctaagatgcccttagaagaccagcccaagtgccgtcttagccattcagtgaagggcaaacagcccatgggtagtatggcccgagcactgaattcccttgcgccttttcaaagaacagttaacttggtgctaatgtgccctggtgaaataaataaaagatgggcagtttctgtggcattttaggcataggtttgcaatccagatctgattttctccaacataaatatcagctcatgttcttatttcaaaaagatttcttattaccgactaaaagctattttttacctcacctggaaactaccattgtgagggccatcccccaggcactgcacagcaccttggctgatgctggaagaggagggcagtcagtgtcacttctgggatgtgccccagcactgagaacaaaatgcaggcatcccccggggcagcatcagagtgcctttctagagggagccacgcacagaatgtaacaggatgaaacagtttcaagtaagccttgaattgaaacctgagtaggttaaaacaattctatttcatagcacatcacaatactgctgctactctgtagccacccccatggctacatgatgccctattcctaaataataacaatagcattgtcagtggaggctgggccaccatggcagaccttccaaaagtagtgagctacatagactacttagggaaccccagggaaactggtaccctacacctgggagcagtatctgccactgggataaagtcctactaaaaaaggaacggtaaatgtaccctaatgattaaaccccgtgagatacatatgatttccaaatagtccatttcattaggaacttttttgtttgaatgaatgtcacataggtatcctcagtaacacagaacgaaattacctttgtattattgtgattagttgttgcttattattttatactcagtaataatgtggtacactgttaatttttttgcttttgtaaattatattctaatttattgccatgtttcctaacacttgtcctacattcattctcctgcttgtaatgaaaatgaaaaaatcattgtaacacttgatggagtgaaattccacgccaggcacagaatttttttgacatagataatttagtaaaataaaaattcagcttataataatgat

SEQ ID NO: 13447 - DNA, 708 bp, Homo sapiens
aaggatgttttcttttttcacacagtaaaaattcttatcattcaaggatattggaaccacaggactatttggataaaaaacattatttgcaaattaatgcgcataggccatcttacttttattgcaaaatggcatgtgctgccatctattattcatttttaaatggtcatttcttattcagtgagtgctttagtgttttaaactatatggataagaatgcaggtagataatattctaggcataaaacatttaatgtaccttacctcatgcaatattctttggattctttgttgatttatgatattgctaatataatattttcttaaaatatataacaatatcttttatgcattttgagttccagctggtgcttctttatatttagaaattataatgggaaggtcatttaatttacagatggttttaaaattgaggtaatatctgaggtggcataatttaaaaatatttagcaaatttgtttcatatatactgtcttatttctagatttgtttaaaattggaatatgaaaaactaatggataaagctagcataaaattgatattttagtttgtattattaatatatcatgttaccttatatattaatctactcttgattctgctaattattaccaacaaaattgtattcatgacattttattaatcctctgtgaattttctgtaaataaaattatttctgaaaatctct

SEQ ID NO: 13448 - DNA, 2087 bp, Homo sapiens
ttttaaaggcagcagttgtttgaagttttgtggttaaaagtaactttgcacatagtatgttttaagaaattatacatctcaaaagatggtaatttaggatgcatatatatatatatatatataaaggaatcttggattgggaattcagtactttgctttaaaaaaattttgtggcagaattaaatttctaattgagcagattagattgaattaaatagaaacttattgaatatacattcttttaaaaagtatatttgttatttaagtttttcagataatatgtgaccaatatactgggaaagaggtagtcacagagaaagggtaagtgaaggtttattctttcagtgaaaaaagaatagccaattgagtgcctaatgagacctctgtgtgaagcaagtgaagtatagctgcttcttttaacctgccttttcactgaatgttggcagcatttagtagtagaaatgacagttgcttaatgaaatagaatccaaactacatatttggataataggattactttatgtttatgttcagagttaacagaacacctttaatgctaagaactataaggtacagaaaattaatactttatatagtgttttattaactttctcctacagcattttgtataaaacacaatgagggagtgaaatgttacccaattaggcttgtcaggttagtaataaactgaacagtaataaaactgtggaagtaattggatctgaatttatgaaagacccatttccaggactgaacctaggtcagagctctaaattggtccttctatttttcaacaaatttaaagtaatatttctttctaatataatattgcatcctttgtgggaatgactataggtaaaatgtagtaagtaacgcagaaccagggttggctttatttaaaagctagtgacctaaatagaaagcgaacttcaagagaagttgtaagtacagtggcaaatgcttattacttacttcaaactgtttcccaaaataagtgcatttattttgacaataaaacttaaggctgttcatgagaaggccttgaaaagttactctagaggaaaaatgtctaaagaaaaaaaaaattcaaaaagtttacattaattattcagtgttgtgagtaaataaaaatgtgtgctctttactgtttttcatttttaaagaatattattatggaagcacgatttatttaaataggtacattgagacttttttttttttaatgttctgatacattaggatgaagttaaatcttaaatcttattagttgaattgttgtaaggacagtgatgtctggtaacaagatgtgactttttggtagcactgttgtggttcattcttttcaaatctatttttgtttaaaaacaatacaagttttagaaaacaaagcattaaaaaaaaagcctatcagtattatgggcaatatgtaaataaataaatgtaatatttcatcctttatttttcaggtaaaaggtcatgctgttacaggtgtagtttgtgtgcataaataatacttccgaattaaattatttaatatttgactgatttcaataactgtgaaaaataaaaaaggtgttgtattgcttgtgagaacttgaactgtttactagttaattgaagaaaaagtgtaacactaaggtgaacttgcttcccttttcactaattttgctaaactttgtaatgcacattcttagcatataactgaacacagttgaaaaattgtgcctgattataatgtatgtataatggtaggtgtttgtgtgtgattcatttttaaagaaatatttttctcaagctcctattactatttgtggttgtattatttcactaatcattagttaagactgtgctagtcttccctgggaaactaagaagagagcttttttatatacagtatattagaattttcctagtagctgaatttctgtattaggtctaaatattactgtatgttatataaagcaggtatgtcaagtgtatagccgtagtctataattcaggaatgctttataaccatcagaagccattatttgcactacatatatgataagtatagacagcaataaaatgttaagatcatttttaag

SEQ ID NO: 13449 - DNA, 4318 bp, Homo sapiens
tttaaccaggggctcaagcccaagatacaaatggtttatggctatgaatgaagtatttgttgtagatagtaccccctccctccttcaaaaaaccaaacaccatatctgatgtgtgaaaataatggaggaaaacctcttgtgtatattcttaaagaataaatctgtttagacaataggtttatcacaaacaaactcaaaacataacatgactccttttgaaatgatcactagccatgttacgtgccaatatagcactgggataaggttccattttcaaacttctatcatatttgtatattagacttaatagcaaagcatatttattgaactctagtagggctatttgttggtaagctctttagctccaatttcccttaagcaaagttttttgagaagggaaatgacccaaaggaaaggtttcctatgctggttgagaagaagtgtacttgccactgagcagtatgtcaggaaagaaggaatattatctaggtttagctttgataagtgctattagtaatgaatatataacatgggaaccaatgttatctttaatgttgcttgttctggtgaacagagaatcttaagagctgttagaaagtagcacttgatgcaagggatgttttgaaaagaaaaaattggtaatgcgaatgtatagaaagtaaaggtaggatgctcaggttttctgcatagttcttaactaatcttgtctgcagtttggtattgataatattagcatggccacttatgctaaatacacaataagatacatttagaaatccttaatgtactggttaggtcagtggtacaactgtttgacttaattatcacaatttccccaatggtaaccttaccttggaaactatcaaatataaatatactttaactaagccagtgacctggtcctaagttaaggattttctaaatggtatttaattgtgtgcccataaacactgattttttttaaaaagaaaacttagtaattatttgatggataacaaaaagcatctatcactaacattgcttgttcatgtaatcttctgtgataatttggcttggcatgccagtcttataattaacataatttaaatttgatgcaatttaaatataacaggagacttaaaatattttattataaattagatgccatattagttagtggagaaaaggggcattaggtattaattgcatgggtctaactacattgatgatgagagtttaattccaactagagtatattttttgtttattaataatgaaattggtgctgacatgtaatgacttcacaagttttacgagggaaaactgaaaaaggaagtaatataaattttgtggggtttttttgagatggagtcttactcttttgccaggctagagtggtgttgcaatgtcagctcactgcaacctccacctcctggattcaagtgattctcgagccttaagctcccaagtagctgggattacgggcgcccaccaccacgcccagctaattttttttttttttttcttgagatggagtctctctctgtcgccaggctggagtgcagtggcgcaatcgcggctcactgcaacctctgcctcccgggttcaagtgattctcctgcctcagcctcctgagtagctgggattacaggcacgtgtcaccatgcccagctaatttttgtatttttagtagagacggggtttcaccatgtttgccaggattgtctcaatctcttgacctcgtgatccgcctgccttggcctcccaaatgctgggattacaggcgtgagccaccgtgcctggccgctaatttttgtttttaatggagagagttccaccgtatcggccaggctggtctcgaactcctgacctcaagtgatctgcccatcttggcccctcaaagtgctgggattagaggtgtgagccactgtgcctggccaggaagtaatatacaattaaatgagtaataatgcagatgattaggccttatagaacccttatcaaaagactaattggccgggcgctgtggctcatgcctgtaatcccagcactttgggaggccaaggcaggggggatcacctgaggtcaggagtttgagaccagcctggccaacatggtgaaacccacctctactgaaaatacaaaaattagcctggcttggtggcgggcacccgtagtcccagctacttgggaggctgaagcatgagaattgctcgaacctgagaggcagaggttgcagtgagccaagattgcgccactgcactccagcctgggtgacagagcaagactccatttcaaaaaaaaaaaaaaaaagaaaaagagactaagagactaattattttgtatcttgaagtttaaaatccaacttttctctttctcctttgtgacattagaacagtagttctataacttcattgtaagaatcacctggataattcattaaagatgcagattcagggccacgtgttcaattctgatacagtaggtcctgtaataaggcctaggaatggccatttttaaacagtacactaggtggttttgatacagatccaaggactctaatttagaggaacactaggttagaggtttctcagacctgcaaacacctaagcacctgggccaaacaaagctacaacgaagatctgtatgaagatatatagttctgcagaatttaaaaagagcacaatttaagtcttcggccctcagaagttaaattcatattccatctaagccaactttgattttcattaagttagaatgaactcctagtattccagtattacacagaacgaagtactactactaacacatagaagtcattactgtgatataaaaagcaaaatagatccttaattaaaaattagtcactcatattcagtgttgaataagaagttaaagtttctagcataactatcttgagtgcattaaaaatgcttttagagcaataagataagcttctagctgactgcctagaaaaacagaagatacaaattcagtgtcagaaatgaaagggaatacactacagacactatagttattaaaaggctaactagaaaacaccatgaccaactcaaggattgtatatttaacaacttagatgaaacagattccctataggatacaaactagaaagctcactgtagaaacagataacctaaacagaaccatatttattaaggaaattgagtttgtggttaagttaaaaaccttccagtaaagaaaactacaggcccagataacttccgtgatgaattttaccaaacacttaagggagaaataatatcaattctaaacaatctcttccaggaaacagaagaggaggaaatacttcccaactcattttatttgaccagtattacccagacaaagatactataagaaaaaaaactttaaaacaatgtcttcatgtgctaacatctgtagttaaattagccattctttttacatgaaataatgggaattggtatatttcttccatttcatttttctatttctttgctaatataccacctgtaacaaattcaatctagatgctatctgtccacttgcctacatttccattctattcaagccatttttgctcttcaagtaccttgatcactttggaatcatagcattgcaagctatttcaaaaaaagttgcgtggttggattgtgctagctacttttaaatttataaaaaatgccccatatattttcttgcttgtctgggaaatatagttgctatctaactagaaaaataagagggcattattaaagtaactctttaagcatcgtactaaatgtttgacttccattaaccatatttcttgtagtagctgtagctattatgatactgtgtaaaacagaacaggttctatatatgcaaatgacattttcatttaatgtaccaaattgtgtatctaacttttataatataggttaaacagatcctttctaagatggcattatttaatctttacttaaaactatgaaaaatatgtgtaagttattgtttataaacagaagagactataattaaaatatagagcagattccaagtgaccatcattttactttttagatttaaaacagaatgaaacagaagatttagtcataagaagatgcttgaaaaacaatccaagtatccaatgcagtggctataaaatattatttcatcatttaatcttaatcattttgaaacaaagacagacttcaattttacactgcttgcactttattttgtacagacatttcattaattattactcaattttgaggtgcaaaccttctgaatatagctttcattttggaccaaacaatttgttatggcaataaataatgatgcattgaaaaaccaa

SEQ ID NO: 13450 - DNA, 569 bp, Homo sapiens
tgctgaaggtttccagagaaagcaaataagtgtgcttagcaaaattgctctaagtgaaagaactgtcatctgctggtgaccagaccagacttttcagattgcttcctggaactgggcagggactcactgtgcttttctgagcttcttactcctgtgagtcccagagctaaagaaccttctaggcaagtacaccgaatgactcagtccagagggtcagatgctgctgtgagaggcacagagccctttccgcatgtggaagagtgggaggaagcagagggagggactgggcagggactgccggccccggagtctcccacagggaggccattccccttctactcaccgacatccctcccagcaccacacaccccgcccctgaaaggagatcatcagcccccacaatttgtcagagctgaagccagcccactacccacccccactacagcattgtgcttgggtctgggttctcagtaatgtagccatttgagaaacttacttggggacaaagtctcaatccttattttaaatgaaaaaagaaaagaaaagcataataaatttaaaagaaaagg

SEQ ID NO: 13451 - DNA, 2036 bp, Homo sapiens
agacaagccagttgaaattggaactgagagttgtttatatcgagatactttgaaaaatgattttgtaaattttgctgcatcttgagaagttgtatgtttcctaggtatttctaaattttaggaggtcacttaaatcaaatattttctacattttctttttcttcttttgagatggagtcttgctctgtcacccaggttggagtgcagtggtgtgatctcggttcactgcaacctccgcctcccggttcaagcaattctcctgcctcagcctcccgagtaactcggattacaggcatgtgccaccacgcccagctaatttttgtatttttagtagagacggggttttaccatgttagccaggctgatcttgaactcctgacctcaagtgatccgcctgccttggcctccgaaagtgctgggattacaggcgtgagccaccacacccagcctattttctacattttctacaagaaattagtattctgtgttgacattttatttataaattacattactgtatttataaattacattacaggctgggcatggtggctcatgcttataaatcccagcactttgggaggccaaggtgggtgggtcacctgaggctggagttcaagaccagtctgaccaacatggagaaaccccatctctactaaaaatacaaaaaattagctaggcctagtggcgcatgcctgtaatcccagctacttgggaggctgaggtaggagaatcgcttgaacctgggaggcgggggttgtggtaagccgagactgtgtcattgcactccagcctgggcgacaagagcgaaactctgtctcaaaaaaaaaaaaaaacacattacagtgtttgccaacatcctaaaacaaaaaataatgatttttgggaaaaacaaaaaattatttaactattttgattgactatagggatcttagcttggctaaatcaacaatatagcaatgtatcttaatgctctaaaaagtaacaatacctaggactgactgaatgttaatttctggaattcatttatcttgttttatttgccttgttcagtatttttcatttaccatatgaagtttagaaataacaatttccttaagttaacttcaataagacagttttgatggtgggaccttggcagaagtatattgagtcagtgccggctgcgttcatggcttcttgtcagggtagtaacattttgcaaccaaatctgcacagatttgtagccaagtctacaaagtgcttaacagctcttttcattgcatcctgtgagatggttgtgatgatccaggaaatggggtctcaggaatctgaagaagctgcctgagccaaggtgatttctaggagtttttttgtttgtggtatgtgaattggggtgtgtgggggtggggtgtgtgtgtagacagggtcccactgtgttgctcaggctggtgccaaactcctggcctcaagggatcctcctgcctcagcctctcaaagtgctgggattacaggcataaaccacaactcaataaaaaagtttttaaaaatttacaaagctcatatttgatccagctaggattttaccctgtacatttgtatttcttgtaggctggcgcacagatatcttaaatggctactaattgctgctgtgtatgaaaacaaatggctatcaaggccgggtgcagtggcttacagatctggtctgaatctcaagtccagaccagtccagagttcaagaccagcctgggcaacatggtgaaaccccatctatacaaaaactcggcaaggcatggtggcatgcacctgttgtcccagctactcaggggctgaggcaggaggatggcatgagcccaggagcttgaggctgcagtgagctgtgattgtgccactgcactccagcctgagtgacagagtgagacccccatctccaaaagaaaaggctatcaatacaaaagtttatctaaattactgtacagctatacaatggaatactctacaaaatggagagatccataagataaagcaaatgaataaagcaaaatgcatgtgttgac

SEQ ID NO: 13452 - DNA, 333 bp, Homo sapiens
cttataaggctagctacttaataatcactcttgttgatatctctgccgacatcatagaaattgttcaagtgtcagtaacactttattaaaatcatgttgcagaaccagcaggtggatagtatataggtttatgcctgtgtttctttttctccatgagaaagctaaacatgaaatataatgaatatagtattattaaggattgagacaaaaactgtgattttaatacttaaattgctaaagaataaataaatctgacaaaatgggtggatatcttttaagtttattacagaaaaaaatgcagatgatctcttaaaataaaactaaagataaagc

SEQ ID NO: 13453 - DNA, 199 bp, Homo sapiens
tctagccttgctgaatgtaacatgtatacttggtcttgaattcattgtactgatattaaacatgcatgctggatgttttcaagttgtgttttagaaaactaataataatgagtaaacacagttaccatacttttcaattgaaatgaaggtttttcatcagccttaaaagtgtaagaaaaataaagttgtcattcattcg

SEQ ID NO: 13454 - DNA, 1621 bp, Homo sapiens
aagattcagctaaaaactgctgaatcaataatttgtcttggggcatattgaggatgtaaaaaaagttgttgattaatgctaaaaaccaaattatccaaaattattttattaaatattgcatacaaaagaaaatgtgtaaggcttgctaaaaaacaaaacaaaacaaaacacagtcctgcatactcaccaccaagctcaagaaataaatcatcaccaatacctttgaggtccctgagtaatccaccccagctaaaggcaaacccttcaatcaagtttatacagcaaaccctccattgtccatggtcaacagggaaggggttggggacaggtctgccaatctatctaaaagccacaatatggaagaagtattcaatttatataataaatggctaacttaacggttgaatcactttcatacatggatgaaacgggtttaacacaggatccacatgaatcttctgtgggccaagagatgttccttaatccttgtagaacctgttttctatattgaactagctttggtacagtagagttaacttactttccatttatccactgccaatataaagaggaaacaggggttagggaaaaatgacttcattccagaggcttctcagagttcaacatatgctataatttagaattttcttatgaatccactctacttgggtagaaaatattttatctctagtgattgcatattatttccatatcatagtatttcatagtattatatttgatatgagtgtctatatcaatgtcagtgtccagaatttcgttcctaccagttaagtagttttctgaacggccagaagaccattcgaaattcatgatactactataagttggtaaacaaccatacttttatcctcatttttattctcactaagaaaaaagtcaactcccctccccttgcccaagtatgaaatatagggacagtatgtatggtgtggtctcatttgtttagaaaaccacttatgactgggtgcggtggctcacacctgtaatcccagcactttgggaggctgaggcgggcgaatcatttgaggtgaggaattcgagaccagcctggccagcatggtgaaaccccatctctactaaaaatacaaaaattagccaggtgtggtggcacatgcctgtagtcccagccactagggcggctgagacgcaagacttgcttgaacccgggaggcagaggttgcagtgagccaagatggcgccactgcattccagcctgggcaacagagcaagaccctgtctgtctcaaaacaaaaaacaaaaccacttatattgctagctacattaagaatttctgaatatgttactgagcttgcttgtggtaaccatttataatatcagaaagtatatgtacaccaaaacatgttgaacatccatgttgtacaactgaaatataaataattttgtcaattatacctaaataaaactggaaaaaaatttctggaagtttatatctaaaaatgttaatagtgcgtacctctaggaagtgggcctggaagccattcttacttttcagtctctcccattctgtactgttttttgttttactttcgtgcctgcattatttttctatttaaaacaaaaataaatctagtttagcact

SEQ ID NO: 13455 - DNA, 1380 bp, Homo sapiens
tagggtcccccagggccccacctgtctcacaagaacttcactcaaccccgtgccaggactcagcagtggcctggacaacagcctcagcttcctctacccatcttcttttcttaaagcaggctatgtgccctacatggcaaggcaccatgactgcccatcgagatgccaagaagggctatggaactatgcaggtggctagtggtcagactgaagtcaccagctgaataccttaaggaggactcttgaggctcataatggagttcctggggcacagggattagttatgagcattaaagttcctaagacccagtgacagtactgggagaaaccaaggctgaagagtcaggttgaagcacaggcttttgttttttgttgtttttgttttttgagacagagtctcattctgtcacccaggctggagtgcagtggcgcaatcttggctcactgcaacctccgactcccaggttcaagcaattctcctgcctcggcctcctttagtaggtgggattacaggtgcataccaccacacctttctaatttttgcatttttagtagagatggggtttcaccatgttggtcaggctggtctcaacctcctgacctcaagtgatctgcccgcctcagcctcccaaagtgctgggatgataggcgtgagccaccacacccggccaagcacaggcttttgaatggtctccctctccccagcccaggtacatgaggccaaggtgaactgtgcatcctgagaccttgtgtccctgagtctcctttctgagtgcaagctgcactgtgagctggctgtgggatactcacacattcccacattctcctttctgccacatctcgcccttctggacctgcactgggagaaattcaggacaggagtgaactcaaggccatgaactcactggatttccatttttaggcacccatagggatgtttttaggatgtaagtttctgaggagaaagctagctctagcatgaagcttttttggattggcttctccatcgtgttggggtaacattttttttccaattttttttttcccaaaacatcgtctcagctcatttatcaagtaggtaaaatgagccttttgtgtacacacagaggcacatgtgcatgcacacacaacttgtgaacacacatttctgttaaagaagttagaaaatgagagatgggttggggcttgaagtgcatcagaggtatgaatgttgtaaaactgtcaggagatgtaaaattcctttctgaagtgtctcttctgtgaaagggttcagagcagattttgcttactatgtagtgttgcccttaagtacagtggtgtaattttattcaagattgtgctcttctatcaaaagcctctggaaataaatgttccgggatc

SEQ ID NO: 13456 - DNA, 349 bp, Homo sapiens
gtggacagttttaaaattacatttggaaaatgagaaggaggcagttcaaatatagctttctgcatgaactgtcattttctggagactggcgaatagtaccaatctctacaaatggcttagactaaatgagcagggatgtaggtaatggaaagccttctcaggtcattcacggggcccttgatacccttcacacatgtgcagggtcttcatcagtggcgttttatgcattgccagtataataaactgtgagtattcttccagatatctaattgtaagctgatgctgaggtgcttttagaaattctactttcctttgattcatatgcaatacatggtaaatttctaattgc

SEQ ID NO: 13457 - DNA, 705 bp, Homo sapiens
taacgctatgttagcgcgctcgaggaagaaggtaggaatcccggctccttttctcgtcttggtggttcggtgttttgttcgctcctccaggcgcggcccctctcgacctcgcgcgcccattttcgccgctgcgaattctcggacaaaactgtcaacagcccgggcgcgccttttggctctgcgggtccctctatttatgcaaagccgacctatgctacagccccccaacccccgacctggggtagggaggaagagggtgccggggaagggagtccgccctgtccaggcactagaggctcccttgacgtttggcagatgaaaaacaactaagcctttttgaggtgtagagattctcaggtccaggcgttaaaaaataatggtcaaaagaataatacaaaaatagtaaaggtcttgaagaatgccagcgaagcaattcttttttatttgaggacacttgtctggtgtactttttcatgaaaaggaaaaatggttaacatgtttacacaagaaaaaaagtcaaaattatcatttatttcaacctgtgttttgtatcataacagacgtgtggatttttttgtacttactgcgtattctttacaaggagtattgtaaattttactggcaattattattgtactattctaaatgtaagatttttacactttttcagaaataaaaatgcttaattttcaaagaaaattcacc

SEQ ID NO: 13458 - DNA, 459 bp, Homo sapiens
acacagtcatcagaaaatgtctgcccttttgtttacttcttggtccttataaatgatagttttgtttacttataaatttttacctcagttgcaatatttactggtttttagtaggttttaataaatatttctctgagtaattcactggtttataataaatgtaatactctttttataactatgttttactgtatatttaaaattataaattaatgttttcgtggcatgtaaatttttatggtacagatagttatcatcagtctttgtatcaagtgctgtaatttgacattttcagaaattattctaccctagtcatcttcactcgtgtattaagtcattcactttatatagggtttgctataaatccctagaaaaaaattgttcttattgttgaataaaaaagtgcacagtgtgattgtttacaaaatgatattataaataaataaaatacttcttctg

SEQ ID NO: 13459 - DNA, 2583 bp, Homo sapiens
ctcactccatcactcgatgagataatatgagatttctacttcggagaggccaagtctaatgaagagaaaaaaaggaaaagaagttgcaagactcgaataaaatctgctgcaccttgtaaatgctctaactggacatgaaggaaaggggcgagggaggggggtgggatttttggtgcaagtagcacatggtttaaatatgaatgaacaaacctgtgatctagtccttgtcttgtaattgtggattaatgtcaatgttaatcagcccctcaaagggagagaaaagctggaccttttcccttgctgtaccatattcagcatttgatttccatgggccccaccatttatgtgtagaatttgaaatggttgtcacctctctctgaggacagagcttgaagcctccacaccagctgctgctggagattcaaagcccaactgtgggtccgagagggaagctggctgggctggctgaagaatgaagaccactggactctccgttaatctctaaggggtctgctccccaggaacgtttctgaacaatggggactttgttggtagccatttggtagatgttcttttctatttataagtgactttaaactttcccttggctgttaagaagtttgttatagatttagctatttattgttcgatgcctgcatgctgaaacaatgcctacagctgtcttcacatgtatggacgtgtgtgaatggttgtacgttttgcacattttgtggctgttgagatgtgctttgctgcacaaacatgaaaatttttgagttacaatttggagcataactggagggtgggttggggaggggtggatttttaaaatgtcaagacagggaaggatgacaaaatggaaatttaaatgacatcctagaggtagagaaaccgtggagatcgcttttctcagactcaccaacttttaatgggatttcatggggtttggttgtgctgatagggtaaggggaggctgctttctgcccttctccccactcccatctgatttacttaattcagtctcagctgctgaaatttggaaaggaccaaattgctttacagtttttttctttgtgtagtatcttgaaatcctggaaaattctatggaatagttctgtatatagggcacaagtaaaggcattgtccaaagtttatttatttatttattaccctaagaatgctttgccataaccacatttaatgggaaaaacggcagtatcacagatgtaaattaactcaccagatttactgggcctgaactcattctcttcttgctatatgatttagcaagttctagaaggtctccaagacaataattacattggcacaatgtatacttcagtgctcacccgtaggcaaatctctttttaaaaaactctttggtgcacaagtaacacatttggccacaaaacaccaaagaattgtaggcagtggcccctattgagaagttttccggtagagttggaaatcagttgtgaatacattctttgctagttggagtgcttgtttactaagcatgtgccgtcgtaggtattagtgctagtctcagataggtgcttcccctgaggtgcaggggaagaccaaagtttgcaactcgaactgctttcgtccatgtttctcacattgctgtattttagaaaataggggttaagactgataacaaccttttacattgtgactgtgtttgcattgtctaatgacagataaatccttaacatttctctccaccttagtactttagactaattgtgtttgtccgtccatgccatgaatgagtgggctgtagttgggcctaaataaatgagctgttggaagaaaagaatcacagtactttccagcagtcagtccctggttcctagatgtgttctaagcaatgcaaatgtctaattgtcccccagtgggcatagtcagtgtcgtttatattgtagcagttacagctctgtagtttatgatgcaaatctgccaagagagatgtatgtgtcactgcatggcttctgaaagcaggatgaattttctgcagctgtttcaaagttggggtctgttcttgaatcctctattaattactgtgtgtgagccagagggagctgtggtaagggttgggcccccagcctgtagggaactttctggactcccactctttgaatcgatataggcatttggtctcactacttgaccattctcaccctgtgaaacgtcccacactttgaagcaaatacaattcacagcacagtacacacaaaaaccttggcataagacagagaaggttcttcttattttgtgggctggttgctgtagaaacacataacaaagggcagccctccacttctggtataattgtgtagccccttttctttgggcttgacacctgtcttgaataagagtgattagagctgcataatgtccctctcttggctattgaccatgtggttcacgtacaaaactctgtataagttgaaggaaaatgttcatgttcatatgtacttgtttgctatgactacattttgaggttttgtaaaactgttatttttttttttttcacaatgtgaaactgaaggtcaataaattattagagattttctcttc

SEQ ID NO: 13460 - DNA, 448 bp, Homo sapiens
atgttttagtttttggagagaaattcaggagcacctagctacttcattttcagtaagaacaatttttattgctttatttattggacgaataaagtactgtttcagtacattcagagaactagataaaagatataacttaagctttgatagtggcactggagccacccgttttaatttatataatgagaaatgtgctttgatgtttaaagccactgtacctgaatcatgctgttcatctatgaagttattactataagtagccttcagaagagtggtatcacaaagttgtgtttcttttgtgtccttaagcttgtctcacaagaaagatgccaggcctctaaatgtaataagatagagggtcaaaggttcaatcaataaaaatattttattcaaaaaacagtctaatatcttattttacatgatttcaaaataaagttgattgtagtac

SEQ ID NO: 13461 - DNA, 95 bp, Homo sapiens
tgcgctgataatttatataaaatagttgcaatataccctcaagagatttcttatgtgattgaggtaaattttatctgaatatattggtaaacatt

SEQ ID NO: 13462 - DNA, 1211 bp, Homo sapiens
tagtaaaatcaggatggaaataagagggtgcctgataaatggagtcagtgtggaattgaataccatactatgcccaatactgtttaaactcagtcctcccatattttaaaaggtgtccaaaattccatacacaagggaaagtgatctagcctttgatgttattagcctgcagttggctaggtttttttaatatttgtttttgcttgtaatctcactgagccaaatcagagatcttaaacattcagtcagtcatcaaacattattgagcacctaactatatgacaggcacttttttagagactgcggcttatcctcatcatagcaacctcggtatctttaagttctccacataacagtcaggattctactgaagaagcttttgaagtttgtggtaatcgtctgatcatataaaccacccatttcagagtagtgtttaagtactgtgaccaacactccacttgtctcttaactcagctttcaagacatttcttaaccatcagagcagaggaggaaagactcactacctcagaaaaatctcaaagaatagtccaatttcctgcttgccaaagcataatctgccttttggtgcattacttggtcaattcagggttgaggagactgttggggggcatttataatgtatgaaagttaaggaagggggtgaggatgtgggttgggacaggtagtacctaaagaggagcgaagggatttatacaacatttttatcatgttacaaaacagtatcatgaatggcctcctttttagttcaactgtttctttaaaatgcatttactgattaaaaataagaactgaccaatagctccaagtgtcacacaccagaacattaagcctaagtcctcaattcataagttatcattctagataagtttctttacaatggaatactttctgtggaatcattataattctgttgtatggaactatcaagctaagagtcactaaactttcttcaaaaggttgtgtgaaatatgacagctttctaaattaatttgtatagtcatttaaaattttttcttctctggcaactgtccaactggaatccagatttaaagtgataaaagctctaagtttcttgcagtctttttctcagcttagttccagagagaaaaaagctaattttcctaaggacacagcaagaatattcattaaggatattttctaaaacccacacttgagaaaaccacccaatg

SEQ ID NO: 13463 - DNA, 106 bp, Homo sapiens
tattaacaggtactagaagatatgttttatctttttttaactttatttgactaatatgactgtcaatactaaaatttagttgttgaaagtatttactatgtttttt

SEQ ID NO: 13464 - DNA, 236 bp, Homo sapiens
agtgaatatgtccatagtggggtcttttaatccctctggtcttaccaagggttagaagtcttttggttttaacttttccatattgttagaacatcatggagacatcatgttcatctgttcaaaattacaagaggctttttcaagctctaccatgctttgtaactatatgtagaaattattttaatgttattttttatttaagcaattaagtaaaacttttttaaattaaaaaagaa

SEQ ID NO: 13465 - DNA, 2099 bp, Homo sapiens
tgaaatgatcttagagaacaaggacagccatcacagagaacgtctgttttcaagaacaacataagcatagtgcaaggagctccatttccgagctcctaagaaatatgcttcaaaggtcaaacattacaaaagcattagtagtttgtttgtttgtttttgagactgagtctcactttatcacccagactggcgtgcagtggcactatcttggctcattgcaacctctgcctcccaggtcagcctcccaagtagctgggattacaccaccatgcccagctactaaaaatacttgtatttttagtagagacggggtttcaccatgttgaccaggctggtcttgaactcctgacctcaagtgatcttccggcctcagcctcccaaagtgctggattacaggcgtgagccactgagccagccagcattagtaatttttaaaaacactttatcagtattttaaaaatgttaatgcaggagaaaagatatcacaactctatggaaaatgacatttccatttgccttattgctacttcaagctctttaaatcaccatcttccctatttctgtgagtggtattgccatccttgacatttgacatcattttttattctttggtctcttttgactctcatgctggtggctgcctcatcaactgattctatctttgtagggtccctcaccagggtcttttatctagtttcacctttgccttcttttttcctttttttaatagagacagtgtctcgcttcgtcacctggctgaagtgcagtagcctgatcatagctcacttcagcctccaactcctgggctcaagcaatcctgctgtctcagcctcccaagtaactaagactacaggcatgcaccaccatacccaactaattttattttttattttttgcagagatggagtctcactgttgcccaggctggtcttgaactcctggtctcgagtgatcttcctatctcagcctcccaaagtgctgggactacaggcatgagccactacgtccaggccacctctaccttctaaccattctctccactgccagcctaccctccaccacttcacaagtcctgccagattaatcttccttagatatcagttaggatacatcactaaaacatttccactaactccactgtttctataataaatcataaatctttagcctggcattcaaggctaacttgctaatcacacttcccattaaaccttgcttatgatataggcaccaaccaaacctcttgctctgctatatctccactctgcctcagactgaaaagctagtcctaacgtctttgccttaattctgttcattttttcaagtccttgaaggaccattcttccctgattctcaggctagaagtgtcacttttcttatctgtacttccaaagcactttcgtatatttttattatggcatttatatatagttcatttatatttaaattttaattccatgaacaatcaagtaccaagtataatggagaaggtgctcatcctctgccttccttgagcttctgggtgatgccaggcccaagtctttgtggcacccagctccatgctttgaatactatgtggctgaatgaatttttaaaatctcaaagcagttaaacagcaggaaagcccattaacttcgtactgaaaaagcaacatactgtgatgatacgggatgacatcatttcaggttgggcatacaaaaaagtaaggaagctaaactaagactatactcaccaggccatttagaagttttaaataatgcctccactattttttttcttagacatagcttttaatggggaaatggaattttgttattaatacccattatattcctgtaagtaaatgactatttttcccttaactcagtgattagacaggaaggaagacattagtgattagacaggagggaagatattagtgattagacagcagggaagatattagtggtaaagagtgaatgatagtagtgaatataaatggggctgaggaaactttaagcataaaagattcctgagatgactttacaagtctgtacgaatctgccttgactgtatatttcatactgcccaacaaaacaataaaaaacaattttaaatgc

SEQ ID NO: 13466 - DNA, 467 bp, Homo sapiens
gggtgtggccacttccccaccccaggacagcgcttctccgtccaatgccaatgccttcagaccccgctgggaccgaagccgtaaccgaagccaggcccgcagccgctactcactcggaagctccagctaactgtaggatcttccacaccctaaggcttcagcttgagaagcacttcgaagccagagcagaaccaaaactcacttccatggggtcaccgggggtgcctgggcggcctttcgtgggcatgcacgcaaggaattggggtggcacacgggacacccgagagctccaggagccccgtgaacccagaccacccagtgccatggccacttagggctgggaacccgaacctggtgactttgaaaggatagagcttcattccataccaaagacttatcacaccatgtgcctatacacccagcagcccaaggtggagggtgcgtggaaatgagaaagctttttaccc

SEQ ID NO: 13467 - DNA, 890 bp, Homo sapiens
tttaaggaattaaaaatacacatgcatgaaccttgaacatcaaatatcgggtactactctgaaaaccattaatatattgatcacttaaattggtaattttttttgtcagtccataaaattctacatgtttaaattttttgtggacctaccaaccaggaacatgttgcttctcaggtcctagtatatcctccaaagaatataccacaagtttttccatttgactttgagctgctgttgaagtggtgagtgctgtgttttgagcttattttgaacctagatccttgtgaaaggtacaaatagaggtaatagttaagttatggcatttattagaagttttattatttggcttcctttagaattattgtgaagtttaaaaatagcctttctcctgcaaattttcctagtctttagtaactgttagtgttctatatagcacaaacttgaatctctcagccaaaaaagggaacatatatactgtttaagtatggcaagttttctttggtaccaatttgtttagataattttaaaaatgttttttagttctagctactaaaacctgtatgaactcaaatggataggcatcttgtgagggtgtgtttttcccagtgtgaattggcttgaagagccatgggctaaatgggtactagaacaacaactgcccctcatgtacgccaaggatgagctctagatcatttgagaggcacagtgtttccggagtcagggactgcagctgagcgcaactgccccatctgaccactgactcaaatacgaactgcttgagacagacttcttttatgtagttctttgcagtgtccattgagacactataaccagccttgtaacaatatgttttctccttttggtgctaaaaaatgaaaatattagaaagt

SEQ ID NO: 13468 - DNA, 1551 bp, Homo sapiens
tgcagccgcgccccggcccgctccgcccccagcaccgccccgggggccgccccgaggcccttccggcgcgcacccggaccccggcgccctgccccgtcccgccccggccttcgccccgtctcgtttcgtcctcgcctctctcctccactcgctcgggctcaccccaagccccagcccgcgaggcctcccctccgcctgatttcgatcgcccgcggtcccccgtctcccggccgcccctcttcccttcccacccagctgcgccctcggctcggtctccagcgcctcagcccacccttcccgccaccctggcctccctgcttgcgctggccgtgctcgcgccctcctcctggccttctgacgggcggcgttcccacccacaccttcgacgcgacgcctacgacccccctcgcccgccgcctcccctccggtcccctctttccccacacttcgcgaccctcctcccgcgcccggcaaaaagtatccttcccgccattttacgtaccagggagtcgactcaggatctgaaatcagacaccaatggactggtttgtgggcagaaacacacacactcgcactctcgctcacgctcagacgctacacacgcgcgcgcacagacacggtgcacctaggtcacacacggacgtgttcaagggacagcacaatgttagggatttttgtcttaaaggaggacaagcattgctaccaaccgcctcatctgagggcccaactgatatgatttgatttatccttgtactctccaagctcctgtctttctttcctctcccaccacgctacccttgcccagtccacccagtcacatccgtgcagccctctcttggcttgcaagataacgcttttatttttattttatcttattttcattttcttaagcacaactgtgtgagagtgtagaagggaaggcttctcaggaggaacgtgacagtggattgggtggctggagtagactaaagcagtcatgtgacgaggaagaggtgatctgacccattttgataagtctttataaggaagaataaaataaacgtgtaagcaaaattttcttttgtaaaagcaaaagccacatctcttttctggatccttcaggactggggtttgtttgcttccttttctgtttctgtcttctcgctgctctgtgcccttggttgttttgtggtggtcctgtcgtccctcgtgcccctcggccacctgctggcagccgatgggggcactcggacatctacaaccctgcaactttgtacagagaaacacaatcagctctttctgcatgtgctggtcaaatccaaacccagagaacagaagcgctttctaagaatgaacaaatatgtgaaataggatgttttgtgtagataaagcattcttgttacatactggtcaatttgtgatatgttttaacttaatgtctgtgtttatttatggaattcggttttcttaataaatgtttgagctaatataaagcatattatttgacttttccggacaagtttatatcaagttaaatgtaaatggataaaataaaatcattttcagtatgtg

SEQ ID NO: 13469 - DNA, 248 bp, Homo sapiens
aacttttctcgtatggggtggtttttgcattaaatcctggggtccattttacaatccattatttttgaccactgctatgtgttcaagtagtatgagaatgtgattgtttttatctggttacatatatatttctttgtctaatttaatatgtcaaataaatgagttcatctaataaaattgtttattttatactttacaaaatttttaaattaaccttttatcattaaaccacatagactttatgacag

SEQ ID NO: 13470 - DNA, 575 bp, Homo sapiens
cctgcttacatctggactttagaatctggcacacaacaaaagtgcctggcatccactactgctgcctttcatttataataatagcccttccatctggcagtgggggtagaatacactcttgacattcttgtctcctgctttagaatgctagtgtgtatctatcatgtatgcaatactttccccctttttgctttgctaaccaaagagcatatattttactgtcagttgtctcaactcttgaatccatgtggcgttttctctgtcctgctgcttcttttggcctcctcgttttccttctctttttcgacaatggtagacatgaatgagatatttaaagttcattggaaatcttcttccctacagcagtaagcaaaaattagcaaagagatagtctaaatggcctctcagcttggtatgtgaaaatgagatcacatactttttaaatccaaatacaaaagcatagtctctgcaagattttgttctttgaatttcttgatattgtaattgattattgataactgtcatcatgaaattatctctcaataataagataaataaactagcatatgaatcat

SEQ ID NO: 13471 - DNA, 3680 bp, Homo sapiens
tttggaagagacaatgccattttctcccttgagtaatcttgtgaaacagtccacagtttcatcatttgagtcaagtggagaactaacctttacctaccaaagccacgttccacggcccgaggcttaaacaggaccaatgagaggccacatccagctacgcaaagttactggacatgcggtctgcagtgcacattataaggaatggaacatgaaaatagtatataatcctagacctggagttgccaagttctgtcagactccatctcccccaggttcaatgaaggataataatctaaatcattagggcagcagtttctctggtaacggaagagaccgtccgccagatctgcaggctgtttctgctccaacactgcttgcttgtgagcatctctgcctcagaatggggttttgggttggagttcttgttttcctctgttctttcaagttgtctccaacgaacagaaaactataaacttactggggacaggatgtgtgctaaagggcacagcaagacactgtcttttgcttagctgaccaaaggggtcagcagggatggcgtggagtcatgctgtggaacttattctaggctgaatcctagggtaaggtggatcaactgaactgtcactccagagattttagaaatttgagtaaagaaacaataaggacctatacaatcatatgagaacaaaaatatgaaatcttgctagtgaagacgtattttttcttcttcccagcagccaggctagcaccagttctggcccagtctcctcttcttctggagatcacatgtttttcttctaaggttaggattgtgctttgactgcgaaaggaaacctcactgtttcctccttccagggactgaggtctccaagctagctgtggcttatgcagatgttcactgggaggacctgccagaatctcggcacttggggggagacctttactcccagtttggtgaccatgctgtagtcagctctatttccaatcccgacagtagcagaatggcattctacaacaaaaagaagctagttatgggagttaagtttttgtagttactggtgttgatcctgaaagcagactgagataacattaaattgctgcaactgaagaactgcagccaagaccttaattccaggaaagcacagaggacaaagttaattcaaaaagaggcgctagatcaaggtcacagcactgcctacacctgtttacaaaaagaatcaaataccactatgaataaggattcaggggtttttaatctactttccataaattaccaatatcactgattcaggaagatagtatctcagaatgaccagagcagcacagaaacaagctactctgacattatgggagcttcaaaattgtatcatgatacagaaacactccttagcactttaagaaagtgagatggaactgccagatttctggaaggagaaaaagtgtaggtatttgggttcattaatctgctcacttgaggactttgttttgaaaaagtaccttctgtggacaaggtattgtgctaccagctatacaaccctgacttcagagtttgcaaccttgccctgagtgaatcatgttaaagctgtctgagtctaaagcaccgtatcttggtgcagaacagataattatacagagatggaatgggacaaccgcagttttactacattctggtgtttggcctatatgagaaaccatcttctcacagattaagggctaagggcaaaaggggtgggaggtgtggaactagccttaatgagtttcccattcctgaaccaaaattcaaagtgagtgagatgtaaatcctgtgattttggtgaagaaaaaaacgggtatcttcatagcagcctaggaaaccttaaccatatctctaacaccacacagaaagaggctggaggagccactggacaaagcttctgtctctgtgtgtacatttataatgttctaaccaagtctcaaaccttgatgaaaaacacaaaatttttccataaacttatcagaagactcacttttctttctttcttggatagagaaaccattttctgacactaggtttacaatctcagtgtccttacaagttaagtcctaagctcacaggatcctccgagcatgtccatcacctgctctttggctaaggtggcagtgtacctctagatcaacctgggaacagtcacaagggagtgtgacttcttggccataataaactcactcgatagtgtttatgttattaatctgaatgcaacagaagacaaaagcacaggcatgcacacacacagaaccccaaaccactaaaaactacctaaacactgacttagtaaatagtaaaaaggtaatgttgggacttttaaaccttgaatccattagccaggcttgggatgaaaggaccatctaaaatcatgctagtctaaaccatgctcttccacacagctgtttaaaaaccactgggtatgaggaatatgctagaaagaaatgttaaaaatagattgttggctcacacttatttttctaataaataggaccattattactaccaggaaagtcttatttattttgcctgaaattggcttaaagaaagtctcatgacgggatgggatgggctgcgcttctcaatgaactctgaggcagaaatatttgccttggattctgtggattctttaaacctgtgtgctaataattcaaacaatgttgcattaattgtataagggtttttgtatagttttcaaacatctgtggtgtaatgatctttgttaaacatatattctgtaaagtgccatagtctttttttatgtgtagcatatttaaaaatatatatgtatattatacatacacaagtttgtgtgaaagatgtgcaataacaaaggtgtatgtatgttttgttgttttgttttggaaactggacaggagtcaaaacagggatgtttgtttctgttttggcaaggagagttccacatttttgccttcatggcttattcagtaacccataattttaatgctacacaaatcttatgtgaagaaaagactggtatgaaatcattttttcctgggtctaaaataatcgctagtgttatgtcaaagttaagcccgcacgccaggcccagttaatgctagtctttcatgtgaaatgtgaagctgccatgttgccttttctcttagtaggataactagtagctggtacataatcactgaggagctatttcttaacatgcttttatagaccatgctaatgctagaccagtatttaagggctaatctcacacctccttagctgtaagagtctggcttagaacagacctctctgtgcaataacttgtggccactggaaatccctgggccggcatttgtattggggttgcaatgactcccaagggccaaaagagttaaaggcacgactgggatttcttctgagactgtggtgaaactccttccaaggctgagggggtcagtaggtgctctggagggactcggcaccacttgatattcaacagccacttgagccaaatataaaattgtatttacagctgatggactcaatttgagccttcaaacttgtagttatcctattatattgtaaactaatacattgtctagcattgatttggttcctgtgcatatgtattttcactatgtgctcccctccccagatcttaattaaaccagattttgcaattcattcttattctttc

SEQ ID NO: 13472 - DNA, 3181 bp, Homo sapiens
gatttcagggaggctagaaaacctttcaattggaagttggacctcaggccttttctcacgactcttgtctcatttgttatcccaacctgggttcacttggcccttctcttgctcttaaaccacaccgaggtgtctaatttcaacccctaatgcatttaagaagctgataaaatctgcaacactcctgctgttggctggagcatgtgtctagaggtgggggtggctgggtttatccccctttcctaagccttgggacagctgggaacttaacttgaaataggaagttctcactgaatcctggaggctggaacagctggctcttttagactcacaagtcagacgttcgattcccctctgccaatagccagttttattggagtgaatcacatttcttacgcaaatgaagggagcagacagtgattaatggttctgttggccaaggcttctccctgtcggtgaaggatcatgttcaggcactccaagtgaaccacccctcttggttcaccccttactcacttatctcatcacagagcataaggcccattttgttgttcaggtcaacagcaaaatgcctgcaccatgactgtggcttttaaaataaagaaatgtgtttttatcgtaatttatttccccccagccattgctcactctgtctagacttcctgccacttccaattcttctgtggcttttcctgcctttccttttgacctcagtagtcctatccctgggaaggccactttgcttctctacctgagcacccctgatttctggaacgctgctgagccctgccttacttttgcccctagggctgaagctagaggcctccccgtaataggcggtggagttgctctgtgaggatgttcatggtagacactaagagggctgggtgggagatgcttggctctgtggcatctgttcagcgaggcttttcctatattgcatggagttagtcattgtgattgtagctttatttcataatatattaagacttgcactgctatttactagcagtgagaagaaacctcaggaaaggatatgaaaaagcaagtggccagtgtctgggatactgggccttggtaaagcagaggagggcacacccacagtcctcttattctctgttttactgcttgttttgaggttctggggtctggcaaagaggatgcagtttgacacctgcagccctttctcaatcccactaatgtcttactaatgtggaacagtccatattagctccagagagtgtcaaacccagagaaatgtgtgcaaaaatgatactcttttctgcattagccccaccattgtgttcaccaatgcttggaacactgcctgaaggcactcattttttaatttttattttatttttaattttttatatctttatgagacgatctcactctgtcaccaggttggagtacagtggtacaatcacaactcaccgtagcctcaaactcctgggctcaagtgattctcccacctcaggcacccaaatagctggaactacaggcatataccgccacacccagctaattttattttttgaaaagacaaggttccctatgttgcccagctggtcttaaactcctgggctccagcaattatcccagcttgggctccaaaagtgctgggattacaggcatgagtcaccatgcctggcctcattttttaaaacaaatgaataaatggacaaatgagtaaatgagaaagtctcacaccatgaaagatgctagtccaatgagctgaatacagaggtaatataaatgtcttccagctgttgcttttctgttctcaagctgcccctcctggggtaggagcataatctacatcactgggcagtcacaggacactctatagcaaggttgtagcgtcctctccagtggggggagaaaaggaactgtgcctaccaaaggtactctcttgtcagcaatttccatttctatactttatgggacactagaaactaaaagcaacaaataatctgatataagtccttgtatagtcatccttcaattcagtagcaatattttctggtcactactaacctgtattgtattaaaatgagactattggaaggaaatggtgctaaaactaataacatctcttaccaacctttacccaactcctgggttggcaaacagctgaccaaactgccatcacctcccacttggaagtgtatggccgacagcatgaaatagctgagcccagatgttccttctgcatcctccgaatcccagggctgggtgtaggtagccgttggaggccatcgctacagggcacctatctgttatcgctgctgtcctcccaacagctgtctccagttctagttccttggttttcaggcacagtgggggatgttctgcacccagtggacttcaaaagagttttgaagacttaattttttgtaaaacaagtacttgagattttggtttatccataatagaatgtatttcattagattctctgattctatataagaatgtgaaaagattgatatattgttgttagaaataatgttatttctttccaattttttttttttttttttttgagatggagtctcgctctgtcacccaggctggagtgcagtggtgtgatctcggctcactgcagcctctaactcccaggttcaagctattctcctgcctcagcctcccaagtagctggattacaggcatacaccaccacgcctggctatgttttgtatttttcgtagagatagggtttcaccatgttggccaggctggtctcaaactcctgacctcaagtgatccacccacttcagcttcccaaagcactgggattacaggtgtgagccactgtgcccggcaaatttttttacctttacagaaggttttgcttatttaattgtgagctcatttttctttgttacttttgtccccccagatttgggggacaaaataaaattaatcttttaaaatgtgtcagccatatgtatggggcttccatttggggtgaggagaaagttctggaactagatagtggtcatggttatacaacatcataaatgcaattactgccactgaattgtatgttttaaagtggttaaaatgttaagttttatgttttattacaatttttaaatgtgtcaaccaactttatagtacataaattatatctcagtaaagctgttaaataaataaatatagtaaaaattttagaact

SEQ ID NO: 13473 - DNA, 369 bp, Homo sapiens
ctaccaccaactttctactgaagatgataacccagggcataagaaatgacttcagacccaaggttctgaaagggcccctcaaggcctcgggtggctcctgcagaagtggcagaagaggcgggaactaggaacctggcatcataggaaaagtgccttctccaagaaagaaggggccccaggaggctgtcttacttagatcaaccataaactaccacagatgggtcatttcttatattatttcaaaatatctttgaagatgagaattcatttgtgtccttcatagaccaaagttctttgtgttaccttttcccaaaagtaaattcctttccctttattcattccttgtggaaataaaatgcaagcccttta

SEQ ID NO: 13474 - DNA, 475 bp, Homo sapiens
aaaaagaccttcagcagtcaactgaattagagttgctaatgactgtccttgaaattattataactggctcccaggggaatagaggaaaccaggaattcatttcaaaatcatcaaagtctaaatttagaatcttaatgaaacctttctgttaagtgttttctaagcaagacagaataatagataaatgatttacattgttcttttaaatgaagaaatttgaaatgaatgtttttttatttaccccacattacccaatcagtaaaacatttaggtgtttgctaatatacacaatcattactataacctaattaagggacattttataattttagtaacaaatgcattcggttcttgacagctgaaaacaaattaataaattatcttttacataaaaacatgtacaatattgtttatggatttacttctttgagaaatctttccttagatgaataaatgaaagttttaatttttcatg

SEQ ID NO: 13475 - DNA, 2045 bp, Homo sapiens
ggaaagtgaaatttcagtgccaattaattaaaagatacactgtctctcttcataggactgtttaggctctgcatcaagattgcacaaaaaaaaaaaaaaaaaaattgaatatcactcctccaggaggaggatcttttgaaattggaattgtatatttcactgtaaattttagaatccagcttgtagctagttggggaaaaaagatgaaaaacttgaactacaaattacctccatgtatattattggccatagttaactagaaagttataaatagacacttaatgcaatcttttttcctgatattagccaatgggagaattaacaatgtctaggtcacatcccctttttgtgttcaacacagtgaagattatctgctttttaaattaatttatttacgatatctagagctgtgttttgtgcaaaaacttagtgatgaaagcctgtcttttgttgtaatctgaataatttctcaggatatttttgcactgctgagaagcagtgccattaccaattaattcttgccaggagtgagagagagctgtatctttaattgaaatatactataactgggtgtatagagttcttcccttttttgtgctggaagatatttcactctggtgactactctggtacactctggtgttctctaatcttgtctgttgtatagtttacttttccatattgattccatgtatttatgagaagatattgtctcccattttattacacattttaaagccaactaacgaaggcagctgagtccctcagaaatttttctttttaagtttctaataaatttgacacacagtactgaaatacagcagcccgtcattgacaggctggtctagcaatgttaagtatatttacagaatatgcagttacatttatttatatattttgcaagaaatcttttctgaatgatcaatgcatttcaatttacgaataataatggttattggggaactgtttattatagataattttaaggtgtatagctattttaaagggggtccatttacatcaaacagctgatcagaggactctatctaaattgtgatcgtggcagatagagatggagtcatgtactctatctggctctacacatcaatcacatcttgattcaaacctcacaaggcaatattctgaattgttaactaggtatttcaaaacaggaattaaattcaataggctcttctcagtgaacaggttttaatgttgttttgatgtaattttaaaagacttttagcaaacatgcatttctttatatgatatatttcttttacgaagctattttaaaagtaagccaagtgctgtctagtctgcttataaagtaggaattgcatcagagtacatatattcttgctgtacaatgcctgtgatgttgaggagggttcttttttaaagtgtatgcttgagtaactgactctatggagtctataaatgcactgacttcttgtttgtaccccaaaatgatcgaattgttaagtacaaaattaagctaattaaccaatttgtaaccattttttcactcataaacagctactcaatactagacaattttgttttttatgtatgtgtatgtacgtaaatacatacatattaatttacattagagtgaaaaataaatggtttgtttctgaagttagtttcttaagtgagttttcaggtgtctctgaaaaatttataacaatcatgtattatatgtgctgtaacatcatgtacgttacctccatctattttaggatattttcctcacctatatattatagggagaataatttagatacacatgctcagagctgagatatttctctgataaatcaggtaacaaaatgtatttgattgatggaattttgaagtaaatgtgtttttatccatcagtttctgagtaacaaagagcaccaagttttaatttaaataggagatttaacactagggatcagggagtttagtatgaagagttaaaaaaatttaaaaaacagtgtaagctgttgaaatggcaagtgaattattttaatgatgtaataaaatatttttaaattttg

SEQ ID NO: 13476 - DNA, 6968 bp, Homo sapiens
gagtagtcatggtttgtggccaaagtcaaacgattgttgcagtaatctcttacaccaagtgtgtgaaggcaaaaagaagataccataataggtattaaggaagactctaaaccaaaaggaactttctatgccatctatttttactattattattaggaagcttgtattctagcttggcactgcatttttaataacaaagagaatgctaaatgaacttggttgggggggcggggaagaaaaacacatcgtactgtatacaaagaactgccttaatcatggcagatttttgcctttggttcacatgttgctgaccaaaggctacaattctgttctgaatgtgcactcctaatttatttgatttaatttattcaatttattaacttagttttcttagaccaggctgaatacctaatatgtggctttttggctgaggctttttacttctgtttagaaatttgatgcctattttaggaaccagaaaaagataaattgcttcagtagaagagaccatatttaactttaaaaagtgaggaggaatgtgctttttaattatgctctcataagtctaatcttttgggggtttagtagcacatagataaatattaaaggtggttacatataataacatctgataatactcatttcagtataacattggtctttgctgatgtgttcgatataggttaggaagagttcttttagtttacttgggcaaatgtggcagttttagacctatgtctttgtagtacatcttcagttgtctttcttgtattaattccagaagaagtgaatgtactggttatcgttactatgctaggctgtaaaattcttactgaaattgcccacttgttagacactactcaggaggagcccatggccagggtagtagaaatactgtgcatctggtccaagttttctatgcttggctcatattctttcataagatgcatattctttcataagatgcatatcatgtagtcaaaagctttctgacaaccaattatttttcatatgtttcacttatagtcgaagaatacaaaggaacaatcagaaatagcagcttttaatgaatattttctatttattggttgctgaactgttaagggatttgctgtgtggtaattttacttataatagaaacttgcttattttagtggttgaggtgcttctgttgtcctaaaactacttctgaggtttttaaaatgtagaaccatgtttttgattagtgtcttaaaagattactgtggtgctcagcaaatcttatcaagtcgtgcaggaacccatatgttaagaaaatgagctttgtagtcaaaagactcatctaatttgagctgagtggagctcagctgtgtttgacccacatcctcccaatttgttctgtatttaggtagttatttatacaagagtctttaagtcattctaaatattttttcttgaaagttttaactaagtgagaaataaggtagtcttcaaaatcttggtcatctgtttggatgagggaaagtacctcatgagttgcacattacttctacaacagggtgtgtgtgtgtgtgtttgtgtgtgtcagtcatcttcaaaggcagattattagattccagcaatctgaaatctattattccagcagtctgaaacctaaatatgttatattggaaatcatgactgtgagactttattgtcctctaggatggatgtatattggagaagggtggttagcacattcatcagacatctgcttatgctgtggtcaaggccagtcatttttaatttatatcagatttatatcagaccctccaaaaagtatttgaaatatattacagttataacgtacaagtacattacatgtatattacaagtatattacatgtaaaacaggacaatttaaaaattttaaattttaaagaattaaaaattttaaaaatttaaattaaaaaaattaaaaatttatagaaccatatcaacactgacagattctaaaattaagtagtaaatttaactccaagtttctccatgggcaaagtcaaaagataatgctaggttatgtcaatttttcttttcaacaaaactgctaatgtctattaggaagaaaaatgtgtttaaagttttacaggaacgtggagctcatgttcttctgatatgtagactttgataaagaagcatactgtaatgttttatgaactgaaattttaatcaaaagaggtcattttagaataacaagtattattcttttttagtagagggaatgactgtcaatatgatttatttgtttttgtgtcatccctactttgaactgctgttagccttacattctcactatagtccataatgcttccagatcaccttttctaagatgcaacatgtgagtttagtgagagtttatatgttgggttacttagttgagctatttatgtataagtaaatgagatgacaggaagctgtaactgagcacaaagtactttagggagcagccacacatacaggaagctcttagaaaagaacttttttttttttttgagacagagtttcactcttgttgcccaggctggagtgcagtagcgcagtctcggctcactgcaacctctacctcctgggttcaagcaagtctcctgtctcagcctcccaagtagctgggattacaggcatgtgccaccatgcccagctaattttgttttttttttagtcgagacggggtttcaccatgttgctcaggctggtcttgaactcctgacctcaagtgattcacctgcctcggcctcccaaagtgctgggattacaggcgtgagccactgcgcccggccaaaaagaacattttgtcaatctgaacagagcacagaacattttttcagactgaacagactgttggaccagcctgtcatgatatgttttagataaagtttgagtgagttcattgggataaatggtccacaatcttaaacagaatactgtgagccaatgccttttggaagtaatggtggaggataatatgattaaagggaacatgcttgtgtttatttttgttggtagtatatgattagaaaaactagataattcccataagatgaagatcttccatgaacaaactaccatcaatcatccatcagattgattttttttttttttttaagtaacactaaagaagctgtaaagaacattgaaggtggtcattccttcaaaactgtgttttgaccacacaaggtgggcattaacaaaccaaatttcaacttaagtttgtttgtattatattgggggtgctgcgagactggagattttataaaagcaagcatttttatttccatttataatttctattcaatattgctagatatattaacatgaaggaatggggaagcttatttcaatcaaagctaaaattttcagaagtctgtaaaaatggaaaaacaccattgaaagaggcagaaacaggtaagggggatagtatcttagaaaacctgttggttaaggcagctgcatgtgataaaagtggtacttgaacttggtagtgtttccttagaacctcctccaaaaatatgcatttaccaggcttgttacaattttttgacagtttttcatcaactgtcaaaaacttcaacccttttaaaacctagatataaatgcttacatgtaaagaaaggaagctaagcagtgggtacctgggatctctctgaactatttttataacttcttgtgagtcttaagtatttcaaaataaaagtggttttaaagtaaattcatagattaaatgtatcattatctatatataaaccatgatttaaaactttaattttctaaacatagtattcaacttagttgaataaatatatgatagaagttaaatagaatttttatttcattcttaagaaaaactcatgtttgtaacaaatgatatctaaagatctattttgccttaccagaaaagaaaaaaaaaaccctaaaaccaaaaactccttttccctaggaagtcaaaaatgctgtgatttaaaatatctaattatatttttttctttctatggtagtggggtttacttctgaggataaaatattttgaaaaagctctgtcccttgacatggtagttctcccgtgccttgtacttgttctctctccatatgcacagtgtgacaagatgctcacctttaatgaagaaggtgtagcttttcgttttaagctgtaattgtctttgtcttgatttggctatttttataactgaaatcctgagcaacagagataatttgggtggtaatgatcatcttttgtatatgttcttgatgttaagaaatattttttgctgccattcagctttgtggaatttatgtttacttttcaatattttcatatttcttaaccagattttaaagaaatttgttgttagttacgtgaaatcaaaggtcaggtcagtaagcccattatcctcaaacttgaagtttcgttggatgttcaaaatgctaatttttgcagagatataaggataaattagttttagtttgtgttcttaagggtttgcaaaataatttggctcccaaactcttgttggggtgtagtgtttgctaggagcccaggatacctgccctggacttaaattgtgattgaagtggagaggtactctaggaatttaaaaagacacaaaattatttttttccagactagtgtgccatggatttctgataagaattaacattcttgaacaaaggtatcagaaagggtaactcgagttgaaggtttgtgaatagaaggggaaatgtgatagaagattattcagaacaaaataagtagacaaaataacaaaagacaggaaaataagtctctttgtatccttattaatcatttgaaattatgctataatattttttaaaactcacctgtttggttctgggtgaagcagttcctgaaggagtgttttgtcagaatatattgttaggagaatagagggttctgtggccaagtaagtttgggaaatagtgggttagacaaagttgagttactgttggcctttcagacctttgatacgctaatgtgcattttaaatctccaagaagcacctctattttatacatcatttccctaatttattttaatatggatttcttgtttttgttttcttgagacggagtcttggtcttgtcacccaggctggagtgcagtggcacgatctcggctcactacaacctccgcctcccaggttcaagcgattctcctgcctcagcctcccaatttactgggattacaggcacctgccaccacgcccagctaatttttgtatttttagtagagatggggtttcaccatgttgaccaggctgattttgaactcctgacctcaggtgattctgcccgcctcaccctcccacagtgctggaattataggtatgagccactgtccccggccagatttttttaaaagtaggtatcttgtgggatttatgttctgagagatacacctaaggaaatgctgccctacagtgtttttgctagttcatactcattacaaaggtttcttgttgttgggtgcccctctagccagtggtagtaaaatgggaagagacaggtcaagactcccttggaccatggcattgagagagggatggctgtcggcatagatatgttggttatttaggcatttgtgagggaggcccctggctcttccagcctgtttccttaggatcccagttggccgggaacagctgtacaagggtctgctgaactggtggtttcagcagactacccagttcctaagcatccatgagacagagggaaccaacttgtatttccagaacaattttccaaaccttttctggctgtactttaaaagtgccaaaaaggcaatgggtgtttatgacactaaagtcacatacaagctagtatgatacatacatcatagaaagcttatagttgctcagtgacaaagcaaaggaagtttaatattttccagttttgttcattaccgaagacagtctacggttcatagttttcactaaattctaagcagattctatatcctaaaacatttaaacctcactaggcctgcaattttgagagggttagctaaatatgtttggtatcacttcagagtctaaaaccagattactaatcgtgtgtaaggaggcattttgtgtgtctttgcaatgtatacaattggattatttggaacaccattttgaatgtgtatttgagagaaagctcgcctgtgggttttgagttgtggtgtaatggtgaacatgtagccacgtgaaaggccgttggatctttgttctgattcttcagtcgtcttcttgcaaattcagagaaatgtcttttaatcatttcgtttacatatcccagatccttggaaatcatgaaaaataacttgccagagtttgcatcagccctcagtaagtcatgaaccatagagaaggtcatggggccatttattctttggaccactggctacttctgaagttctggcttccttctctctaggaggagtcgtgtattcaagcttttaagttaaatgcataaaaatgagttttacttctcttctgacttgatttttaattttatgaaatgggaaataatgtttttccatttttctgttcattttgaagtgggaatttgaggtgtttgtaatgtcatgttactgttctgaaagattgacagtaaagaagacaagaaatatatgtatgtagtatgcatattagttttgtcccaccaagcctatctttgaatggcaaacattttaaaaacatctgttctagttgcacaactactctagcttctttataaagtaaacaatcttaaagtaagcaatgttggccataatttcaatattctagccttgccgagtgtgaatatattttactcagagactatgtacaaatacactaaagtggtgatggtgatcaatattgtaaagaatttattctgataaatgagaaactggatataatgtcaaaatagctattttctcaataaaaatctcaaatctcctgactgcttatgaa

SEQ ID NO: 13477 - DNA, 52 bp, Homo sapiens
ctgagaaacctgaacggactccatttggctccttcatttgcaagacatcaag

SEQ ID NO: 13478 - DNA, 2861 bp, Homo sapiens
tatgaaggtgttttctagtttaagttgttccccctccctctgaaaaaagtatgtatttttacattagaaaaggttttttgttgactttagatctataattatttctaagcaactagtttttattccccactactcttgtctctatcagataccatttatgagacattcttgctataactaagtgcttctccaagaccccaactgagtccccagcacctgctacagtgagctgccattccacacccatcacatgtggcactcttgccagtccttgacattgtcgggcttttcacatgttggtaatatttattaaagatgaagatccacatacccttcaactgagcagtttcactagtggaaataccaaaagcttcctacgtgtatatccagaggtttgtagataaatgttgccaccttgtttgtaacagtgaaaaattgaaaacaacctggaagtccagtgatgggaaaatgagtatgtttctgtcttagattggggaacccaaagcagattgcaagactgaaatttcagtgaaagcagtgtatttgctaggtcataccagaaatcatcaattgaggtacggagaaactgaactgagaaggtaagaaaagcaatttaaagtcagcgagcaggttctcattgataacaagctccatactgctgagatacagggaaatggaggggggaaagctggagtattgatcccgcccccctccttggttgtcagctccctgtcctgtgtgtgggcggaacatagtccagctgctctatagcaagtctcaggtgtttgcagtaagaagctgctggcatgcacgggaacagtgaatgccaaacacttaaagcaattcgatgtttaagtatgtaagttcttttttttttagacagcgtttcgctcttgttgcccaggctagcatgcaatggtgtgacctcggcttactgcaacctccgccttcccagattcaagcgattctcctgcctcaggctcccaagtagctaggaccaggtgcgcgccaccacgcccggctaatttttgtattttgtatttttagtagagatggggtttcaccatgttggtcaggctagtctcgaactcgtgaccgcaagcgattcacccacctcagcctcccaaagtgctgggattaccggcttgagccaccacacccggcacatcttcattctttttatgtagtaaaaagtataaggccacacatggtttatttgaagtattttataatttaaaaaaatacagaagcaggaaaaccaattataagttcaagtgagggatgatggttgcttgaaccaaagggttgcatgtagtaagaaattgtgatttaagatatattttaaagttataagtagcaggatattctgatggagtttgactttggttttgggcccagggagtttcagatgcctttgagaaatgaatgaagtagagagaaaataaaagaaaaaccagccaggcacagtggctcacacctgtaatcccagcgctttgggaggctaaggcaggcagatcacttgagaccagcttgggcaacatggcaaagccccatctctacaaaaaacacaaaaattagctgggcattgtggcgcacacctgtattcccatctagtcaggaagctgagatggaagaattaattgagcccacgagttcaaggctgcagtgagtcgtgattgtgccactgcactccagccggggtgacagaagagaccttgtctcgaaaaggaatctgaaaacaatggaaccatgccttcataattctagaaagttattttcaactgataaatctatattcacccaaataatcaagggtgaaggtaaaataatacatttttagacaagcaaagactcaggggttacctccatgtgccctttttagggaagctgttggagaaaatactccagcaaaatgaaggagtacacaaaccagagaatgacatgaatccagcaaataggatccaacacaggcaatattccagctatggagctagctttaaaaaggaacagtaaaaatattaatcggttagctgggtggaatggcccatgcctgtagtcccagctactcaggaggctcagcagcaggacgacttgagcccaagagttccagaccagcctggccaccttagtgagatcccttctcttaaaaataataacttattgccagatttggggcatttggaaagaagttcattgaagataaagcaaaagtaaaaaaaaaaaaaaaaaaaacaaggggaaagggttggttaggcaatcattctagggcagaaagaagtacaggataggaagagcataatacactgtttttctcaacaaggagcagtatgtacacagtcataatgatgtgactgcttagcccctaaatatggtaactactctgggacaatatgggaggaaaagtgaagattgtgatggtgtaagagctaaatcctcatctgtcatatccagaaatcactatataatatataataatgaaatgactaagttatgtgaggaaaaaaacagaagacattgctaaaagagttaaaagtcattgctctggagaattaggagggatggggcaggggactgttaggatgcattataaactgaaaagcctttttaaaattttatgtattaatatatgcattcacttgaaaaactaaaaaaaaacaataatttggaaaaacccatgaaggtaactaacggaaggaaaaactaagagaatgaaaagtatttgcctctggaaagaacaactggcaggactgttgttttcattgtaagacttttggagccatttaattgtacttaaccattttcatctatttctttaataagaacaattccatcttaataaagagttacacttgttaataagt

SEQ ID NO: 13479 - DNA, 1719 bp, Homo sapiens
gagatgggtataaaacacatcttcttcaaatgtttatatcagagaaacaaagaactagagaagaaatcttaaatgttcattcttttaaatctcgtgattggttagtccataatggctagatggattaaaatgtaatgtgatttgtactaggcgtcatgagcataaaaaataatacatagtttctgttaagggaattctctcaaacaaaaggaaagcgatttttctcaatgcttctaatatttaacaatctccatgtagtccaaatttgtcattaaaaaaaaatcaaagaaagaaggccacgtatgttggggtaatttttaaaaattttcagattggctaaatattttattaggaaacagttttcaagtcaataatttttttaacatttcatgttaataaatgagattgaaattttttatgatctctaaaccataaaagaaaacaccgacagctgtaaaatgttctaagataaaaaaactcgagctacaaagaaagaatgaactaattctttacaaatgttgactgaagatagataaaactctaattaaaaatttaaaaggttaaacactgtattagaatgggcaactaaaatattcgtggtgtcagtttaattagtgtcaaactggcaagtcagagttttacaacctactagtaatctatgccgggtcttgttgtttgtgcactgtgttttgctttgctttgttttggtttttaaacagacttacctgtaaagttatcttacggaattattctttctccatatcttttaaggaattattctttctccatatcatcttttaattcctgttattagttttggaagcttatccataagtttccaaagacaagatgatataaaagttaaaaagcattcctctttacttatatcaaattattcttgtctttcaaaaagaaccaaaaaaaaaaaattcatcatggataaaaactaagcgcttgccttcttttaaaaagaaaaactgatgattagattaggttagctaaaattaatagaggcagtagaaacttaatcacaaaatgtactaaatatttggcaatattaaacaatgcctttttatttctgatatgtagttattagacatttatatattaaggataacttccttagtgtgacattccaatcatttagtattttaggacctgtgaataacttccaacaaaattaatgaataccatattagtattataaaatattataaagtaataattatatcatctatataacttcaaagtatgatgtttatacaaagaatccttatttcagtctagcagcttaacaacaaaggataaatcagactatacaaaacctaagtgtattaatttgatgattgtcacgtacaactttctttgccttccaagtagaggtgatcctaacaattggcatgatgcttttcttggtaatttgatataagcaagttgtaatgtacatagtaattatttaattactgtggcttttattttaaaaagtaattagaggtttttccatttcatgtcttgaacaacattaatattaattacactagaaatattttttgattcagaacttagaattgtacctgatatttataggtatttaaatgctttctgcaagttaaatatcgagaaaagtacttgacttcaagttgtaaggatacaatttggaagggtatgtaaatagattagttcataaacaaaatggtatcaataaagattttaaatatc

SEQ ID NO: 13480 - DNA, 130 bp, Homo sapiens
aggtcaactttcaattactggtaatttaatttcccacttttaattccaagcacccttagccctgacatctgtcaagctttggggccacaaaataatttaatataaccctaagcaaaatgcagtgacggag

SEQ ID NO: 13481 - DNA, 650 bp, Homo sapiens
tccattaccaagtctcctcatgaaaaccacagtgagtcagcccttcacagaactactacggaagaaaattattcatcacagtgtacagttaaacaaaggaatctcagtcacaccaaaccaacctttttatttcctgctctctcccctcttttgtgaagaaagcgggtccaaatgtgattcaaacaactgtacggagtggcatattagaattgccctaaactgaactgcaaataattatgtgtgtatgtatatgtgtgggaaagagaatgtactgtatatgtgtatgttatacagacatatacacatacatacattgacccacaggacattgtaaaatattatcacatgacatcttaagtagaaataagtagggacttttattccatcctttttttcacgtttacattttaattattacaagttgctcctgccccctccctgaactattttgtgctgtgtatatcactgctttatataagttattttttaaggtgaactcagatgttatggttttgtaaatgtctgcaatcatggataggaataaaatcgcttatttgagagctttcattaaattgcgtctgatgcaagttatcctgtgaatcacaaagtgtactgtctcaaaaaatagaagaaaatgtgtcttcgtcttt

SEQ ID NO: 13482 - DNA, 2787 bp, Homo sapiens
atattaatggtgaaaacactgtagtaataaattttcatatgccaaaaaatgtttgtatcttactgtcccctgttctcaccacgaagatcatgttcattaccaccaccacccccccttattttttttatcctaaaccagcaaacgcaggacctgtaccaattttaggagacaataagacagggttgtttcaggattctctagagttaataacatttgtaacctggcacagtttccctcatcctgtggaataagaaaatgggatagatctggaataaatgtgcagtattgtagtattactttaagaactttaagggaacttcaaaaactcactgaaattctagtgagatactttcttttttattcttggtattttccatatcgggtgcaacacttcagttaccaaatttcattgcacatagattatcttaggtacccttggaaatgcacattcttgtatccatcttacaggggcccaagatgataaatagtaaactcaaaattgctccccactctgtttattatttaaaggtgtcaggatctgtgttgtaatgtgtctacattaatgtgtttaggagaatacaggcattggatcatttagttgatggaagtatatgccaggcaagggagataaggtatacgacaagactgatgttttcagtatcttctcatgaggttgtcagagaccttcatgtcttcaaagactagtcagcaaatgaagtggtttagtgtagagacaagattggttgtgttttgataatttaagctaggtattgagtacatgtggattttgctgtccacaaatacttgtttcagagttttcatggatacagtggcatggttgaaatgaagctgtgagccttctgctttaaatctgatgtaagaaactcctgttaacaaatagtaagtatgggttaattagccctttgatcaaagcctagctttacattgtttaggatctttggaaaacaattggtttggttgcccactttccgtaggatcaagagcagaacctttcacatggcacagaagaacccaggttgcgcttcatacctgcatattccagccttagcctgccatttctctccttggcactttgtgctccagcaacactggtctcagttggtcatcctcaaacttgggttccatatccagcctcaggacctctgttcctgttactatggttccttgcatgtcgcctgctcttactaaagagctcgtgtgttttccagcacacttcggtttatctcttgatgatgatgctagtctctccctccgcaagggcggaaaggctgcctgttggtttgtaccagtgtttcctaacgtgtagctgcagtcagtatttggctaagctgttcccaggggctcaacagatgctttcggatgagccttaactgacccaatcctttgtgatgcgggagagattgctaggcctcgctcacctggccagaaccagggaaagaggccgcggttgcagcgcgattccaggccctgggcgtcaggcgcggggtgggcagctctccccgggcggtggggcccttgtgaccgcgaggcggggcgcaccaggaagggagtgggacagcgcgggcgcccagggatgtggcctggttacctgccttctctgatacgtcaagacaccttcaacaatggcttgcagctgtaccctgttggctgcacccaggacgcccttttcactgctaagcagtcctacctgaggcccaggggctgccagattgacccataaataatctccggcgcctcagatccagaagctgctgagcctgatcttagtgccttctcctttctctgtgtggccccccagcccctttccccactgccttgtgtccaaggccctttccttcatgtatccatggaggagagacaaaaatacacatcaataaaataagatagggaatccataaatagacattcagaagtatggccaacggatttatcttaaaaccaatggaggaagaagagtttcaataaatgttgtggacttccatttgtcaaagaccaaaacaaaggaaccccaaccttacatgtaatacaaacttaactcaaaatggatcatatatctaaatgtaaaatggaaagctataaaactgaaaacagactatctttacaacctaggcgtaggtatagtttttagacattacaccaaaagcacatgccgtaaaagaaaaaatagataaattggtggatttcattaaaattaaaaaactttttctctctgaaaaatcctgttaagctgggcgctgtggttcatgcctgtaatcccagcactttgggaggctgagttgggaagaaattaatagcttgaggccaggagttcaagatcatcctgggcagcaaagtcatacactcttgagggaagagagagaccttctcatattgttttatattgttttatactcagtacctgttttaagaaaaaaacaaggaagtgaaatcaaagacaggcagcccggcaccaggcctgaaaccagccctgggcctgcctggcctaaacctagtagttaaaaatcaacttacgacttagaacctgatgttatccgtagattccaagcattgtataaaaaaattgtgaaactccctgttgtgttctgtaccagtgcatgaaacccctgtcacatatcccctagattgctcaatcaatcacgaccctttcatgtgaaatctttagtgttgtgagcccttaaaagggacagaaattgtgcacttgaggagctcagattttaaggctgtagcttgccgatgctcccagctgaataaagcccttccttctac

SEQ ID NO: 13483 - DNA, 917 bp, Homo sapiens
ctggggaaaatgccagaatgtagttgccatcagatttgattgtgaacaaggactgactgcagaaaataatggaaaggatgtttaactcttttatctccgaacattgaatgagataaatttccagatgctgttctctattttaatgttattggaccaatgttctgtataaacaattaagatgtaaccatttaatagtctgtaacaatcaacctcagtactgtcactacaatattacattctgcaaatgttattctgttgtatcagatacaaaattttagtgaggtatctctaaggcacatagtagaaaacaaaattggttaattactcaagttcctttcactgtgatttggaaatgatttaatctttatagaatgagaaccttttttggactagcttttttattaaaatggctcaatttgtgttgataaggattgcattaatatttaatagtgcttgcttttcctctgggcacaccattttgatcattaaccagagtacctctactcttagcaaactctagtttatgacaagtatttaaaatatttaaaacaagcttatgcagttcttaaggacgaaggtaaatgagatgtaacttaaaaatagtattgggaaaatgttgatagttaacattagtggatttagactagccaaatgacatagtaggctctgaaacatcttgtcaagtatatgtattttgtgcatgaatttttgctggaaagctgtctttctctgaaaaacacaacgttcttagaatgaaaagaacaattataaaataattatcctatatgtgtttttcattctttttagtgtcatggcttcaaaaatgaaacatttattttaattgccgtaaaggaactgtatttttgttttgttttttaacacagcactttaaatccagtttgtgttttgtcaacttg

SEQ ID NO: 13484 - DNA, 570 bp, Homo sapiens
atgtgcccttagagcgcatcagttttaaagtcattaagaacatgtgaaaggtgttttttttttccaatatgaactcatgcaagttaccaaaactgtgataacccttttttacttactgtaaagagtcattttcataaagatcaattcattgatttgttttttgtaaagctatcattcaatatatattataaattaatataaatttaagggaagctctatgtaaggagacttagagccaaactgtttaagctgtatcatcccaacaaagtatcctttcatgaacggggcatgcaatagcttaagaattgctaggattaaattaaggaaagtaaagctactcagagcagcaggttccacaagcacaaactttacacatttgtacaattttgaaatgcactacaataaacaaattagagcaacacatttgaaatacaggcttctttacataaactgagaggttatacaaaactcagtttcacaagggaacaatctatacctttctaaaagttaatatttcaagtctctaataggcagaatattttactctttaaaatcctgcctttctgacca

SEQ ID NO: 13485 - DNA, 1112 bp, Homo sapiens
ggggaggctacatttcacaaccctcttccctatttccctaaaagtatctccatggaatgaactgtgcaaaatctgtaggaaactgaatggtttttttttttttttcatgaaaaagtgctcaaattatggtaggcaactaacggtgtttttaagggggtctaagcctgccttttcaatgatttaatttgattttattttatccgtcaaatctcttaagtaacaacacattaagtgtgaattacttttctctcattgtttcctgaattattcgcattggtagaaatatattagggaaagaaagtagccttctttttatagcaagagtaaaaaagtctcaaagtcatcaaataagagcaagagttgatagagcttttacaatcaatactcacctaattctgataaaaggaatactgcaatgttagcaataagtttttttcttctgtaatgactctacgttatcctgtttccctgtgcctaccaaacactgtcaatgtttattacaaaattttaaagaagaatatgtaacatgcagtactgatattataattctcattttactttcattatttctaataagagattatgtgacttctttttcttttagttctattctacattcttaatattgtatattacctgaataattcaatttttttctaattgaatttcctattagttgactaaaagaagtgtcatgtttactcatatatgtagaacatgactgcctatcagtagattgatctgtatttaatattcgttaattaaatctgcagttttatttttgaaggaagccataactatttaatttccaaataattgcttcataaagaatcccatactctcagtttgcacaaaagaacaaaaaatatatatgtctctttaaatttaaatcttcatttagatggtaattacatatccttatatttactttaaaaaatcggcttatttgtttattttataaaaaatttagcaaagaaatattaatatagtgctgcatagtttggccaagcatactcatcatttctttgttcagctccacatttcctgtgaaactaacatcttattgagatttgaaactggtggtagtttcccaggaaggcacaggtggagtt

SEQ ID NO: 13486 - DNA, 180 bp, Homo sapiens
ccatttgaagttgatttctcaatgctaactaatcaagagaagtaggaagcatatcaaacgtttaactttatttaaaaagtataatgtgaaaacataaaatatattaaaacttttctattgttttctttccctttcacagtaactttatgtaaaataaaccatcttcaaaagagctagaat

SEQ ID NO: 13487 - DNA, 1004 bp, Homo sapiens
atctcagttaacaaaaaagcatatccaaatcaccctttaaattaaaatatctgtgcccttaaagggctgatgaaaaccagaagaaagcaaatacaatgggaaaaaaaaaacatatcagaatgtcttgtattaaatgtttcctctgtattctcagggtgaattaatgtagtaatatttaaaattacaaaatagattgttaactgttacactgtggcattggaattttaactctttgtatttactggtatgagagggctatctacaagggtaatatttctgattaccctggtttacagaaacctccagcagtctttgaaacatctcacatgactctagttattgattgcttttaatggttttatggtactgttgatagtcatagtggctgcctatagaacaatcttcaaactgagccatgctttaggggagggaaaggggctaaagtctcttctgttggtaatttattagttactcttgaaacaataaaatccaacagaaaggaagagatagctactgtatattacagtaaagaaagctgcatagttattttaaatttaatggagatgaatatggttaaaatatataactactgctgcttgagaatagcaagagtattgttttaaaacatattccacccaacttgagagttcttttaaaatgattggccatatgaacatttgtaatcttgccattaggtttggacctgccatattttgttttattctgtgatcctaactagttccttttaataggctaaaatatttatcaatactgatcagactttaaagaaattactttgtaaacctgctgactacctgtatgtattgtatatatattatatattaaatatataatatattgagattataaaagatgaaaatattgaatccttataatattttaagttgcagaatgtatgttaaaaagtgacttgaatgagatgtatttgtatctagaaattttatttctttttggaatgagattaaaatacattttgaaagttc

SEQ ID NO: 13488 - DNA, 2255 bp, Homo sapiens
tcagattattacttactagtttttttttttttcttgcagtgtgtgtgtgtgctataccttaatggggaaggggggtcgatatgcattatatgtgccgtgtgtggaaaaaaaaaaagtcaggtactctgttttgtaaaagtacttttaaattgcctcagtgatacagtataaagataaacagaaatgctgagataagcttagcacttgagttgtacaacagaacacttgtacaaaatagattttaaggctaacttcttttcactgttgtgctcctttgcaaaatgtatgttacaatagatagtgtcatgttgcaggttcaacgttatttacatgtaaatagacaaaaggaaacatttgccaaaagcggcagatctttactgaaagagagagcagctgttatgcaacatatagaaaaatgtatagatgcttggacagacccggtaatgggtggccattggtaaatgttaggaacacaccaggtcacctgacatcccaagaatgctcacaaacctgcaggcatatcattggcgtatggcactcattaaaaaggatcagagaccattaaaagaggaccatacctattaaaaaaaaatgtggagttggagggctaacatatttaattaaataaataaataaatctgggtctgcatctcttattaaataaaaatataaaaatatgtacattacattttgcttattttcatataaaaggtaagacagagtttgcaaagcatttgtggctttttgtagtttacttaagccaaaatgtgtttttttccccttgatagcttcgctaatattttaaacagtcctgtaaaaaaccaaaaaggactttttgtatagaaagcactaccctaagccatgaagaactccatgctttgctaaccaagataactgttttctctttgtagaagttttgtttttgaaatgtgtatttctaattatataaaatattaagaatcttttaaaaaaatctgtgaaattaacatgcttgtgtatagctttctaatatatataatattatggtaatagcagaagttttgttatcttaatagcgggaggggggtatatttgtgcagttgcacatttgagtaactattttctttctgttttcttttactctgcttacattttataagtttaaggtcagctgtcaaaaggataacctgtggggttagaacatatcacattgcaacaccctaaattgtttttaatacattagcaatctattgggtcaactgacatccattgtatatactagtttctttcatgctatttttattttgttttttgcatttttatcaaatgcagggcccctttctgatctcaccatttcaccatgcatcttggaattcagtaagtgcatatcctaacttgcccatattctaaatcatctggttggttttcagcctagaatttgatacgctttttagaaatatgcccagaatagaaaagctatgttggggcacatgtcctgcaaatatggccctagaaacaagtgatatggaatttacttggtgaataagttataaattcccacagaagaaaaatgtgaaagactgggtgctagacaagaaggaagcaggtaaagggatagttgctttgtcatccgtttttaattattttaactgacccttgacaatcttgtcagcaatataggactgttgaacaatcccggtgtgtcaggacccccaaatgtcacttctgcataaagcatgtatgtcatctattttttcttcaataaagagatttaatagccatttcaagaaatcccataaagaacctctctatgtccctttttttaatttaaaaaaaatgactcttgtctaatattcgtctataagggattaattttcagaccctttaataagtgagtgccataagaaagtcaatatatattgtttaaaagatatttcagtctaggaaagattttccttctcttggaatgtgaagatctgtcgattcatctccaatcatatgcattgacatacacagcaaagaagatataggcagtaatatcaacactgctatatcatgtgtaggacatttcttatccattttttctcttttacttgcatagttgctatgtgtttctcattgtaaaaggctgccgctgggtggcagaagccaagagaccttattaactaggctatatttttcttaacttgatctgaaatccacaattagaccacaatgcacctttggttgtatccataaaggatgctagcctgccttgtactaatgttttatatatt

SEQ ID NO: 13489 - DNA, 350 bp, Homo sapiens
agaattacaaggataaacactaagaatgttgcagttaccatcttatattctatttttgtgcctggagccatgtgaaaaaaaccaacttagttcttttatcctaaaggaccaaaaataagcatcttatatatctgtattttactactgttaagtttctttgtatgaactgtgttgttagtactcagatagtttagctttgtatttataatagagcttttatataaagttttaaaaattgaatgtgtgatatgtgttctttgaaggttttttaatttaacatttatagtcactttttagtgcacacattttccagactttcgttaataaaatatttattttattagaatttt

SEQ ID NO: 13490 - DNA, 2962 bp, Homo sapiens
tatctatactgataatatattttgattaattatatacattaattcattctgtgctatttaactgattaatagtgagcatttcatgaagtgcttttataccactattatatatcagagaaagattgagaatgaataagccaaaaagaaaattgttagtttaaattgttttctttcttccaagaaagaagccacttaaataagcttatactttgccaaagctgtcatcttgtaatatatgctctagaaatgacataaaggtttatggggaagcaaagagagattttgtggcaagagaactgcccttgcctctgtttttcttgttttattcccttgatgacctagggaaaaaaaggcatgtagagtattatgtttatactttaaacttgatatttttagtgtattatttaaagataaaggttcttgggtttaaaatacattagaacttaatgcagacatataaagtaacattgagaatgacaactaaaacattccattgttatggtcctgaattttttatgcttcatttcatgtatttattctttgtataattatagcatacatgttatgtaatataacttatgaaaagtacagtgaattttgctttattgcaaagctttaaatataaatttcagagtgcttcagtaaaaagctactatatattgttgtttgttattgtgtaggtaatattttcaattatgaaagtgaaatgcaaatgtctgttatctaactacaaattgtcagatttcttaaaaggacactgtcaggcaaatttgaaaatatacacattgagaataattttttattattatatcctattttaatattaacagctattatgaacaaaatttttcctgttaaatagcgacttcagtattgtgttatgttttacagcgttaaaacaactatgaagatctgcagctattcttttacttaacatgcatatgtactacagagggatttttaaattaattgcaaaatgtgcattagctattgacttagagtgaattgccttttgtatcctgattcacaacacctattcctgttcagtattctttgtcttgaatagagaagtctatgttcgtaaagtcatataaaaggttataccactatttagtaaaaagttttagtttggtgctgttaataataatttgctaaaaggccttttagaatatttcataaagggttttaaacagttttttcccactgcctttttattattgacatatctaaaaccaaactgaaatcgctttggaaatcagattttttaatgttaggaagatccagcaattttggtttctgaaaaattacaaaacttttctaccctacagatgcccaggttctttagttttttattcattcaactcacacacacataaacatatacatacacaaacacaatcccacatgcaaacacacacagccacatatatacatgtgtagcacagcgctaaacactgtggaggctaaaaaaagtcaaagacaacattataactaaaagtcgaaagcacacaaaatataaataatagtgtatgcaagttaatgtacattatacatgcgtgtaagggacataaatggaggggtgtgaactttggttaggcaaagtttactggaggaggggtttttgagtcaaatttggaaggatgaacttgttagatagtcagagttggaaacaaaacaatccaagaatagggatataagcattgctagtctagaatagtctattccttgtgaaaatataaatttaattttcaggaatccagtatattccaaacatcacatatttagcatgagaaaaattgatttgtgattgtgtatatgagtcattgttaatgggagacaagctgaactgccacatgccaccaaatgaacctttacttcaatcaaaaaggagggtatgattggttcaattatattaacagaatatcatgggcatttctctatgatggtcattcaaggtagtaggtctctttcaactgagtgcaacattgagaataatgatttggttcagggcaactacaaataatcacttactaagccttaaataaagccattatttttatatcaatagcacaaaggaaaaccaaaagtccttaaccactgaccatttttatcatattttaggcctttttttaaaaaatcagggtatagtaggcactaagttttattaggaaatatttaaacctgctgaaggatttatttataaaaagtgcaatttttcaaaacacattattattttttaatttcccaattttttcagtttttcaaattgtaccacaacatagaactgtgatattttgctattacttcaatgtgaataaataaggtaaagtatatcatttattgagtgcccatgctgtacatttaaaatatgcattatttaatttaatcttactcccagcaccaaaaggtaattgaccagcctcaacacaattttggacaaagctagtaactgaacacaggtctgtctgccccacacttctctttctcttgtaactgcacaatagcagaaaattggcaagatgtatttttactttccaagatgccgtgtgtgccaagaataaatgaaatgatgttaaagcataataataacatatctttaaaaagcttttcaaaatatattttcaccctgacagtgacccttgtaacttaaatgatttttggaaatattagtatgtaagtataattcaaagttgtcaaaatgtaagacatttagaagtaatttttattatttatattgttaatacttaatcactggaaattcattttccttactcgatgttttctttcaactgagaagcctaaaacaaacaaaaaccttgtgtgttatcctgatatagttgactaaatgtatttgttcttatatggatagtaatatgaatgtgacatgcaccaattgtcctattataattttcagataagtgtaactaagcacttgtgtaataaatattagtcattttatttc

SEQ ID NO: 13491 - DNA, 2675 bp, Homo sapiens
aggaacacttggttgaatcaagttgatgtgggttccgaactgtatctcttccggctgaggacagagaagtatcttggagacacgtttcagaggaagtggaattacttttgcccagaaaaatggcgaatacatgaaacaaccagtgatcatgctttagaagcctacagcaacattctgagactgctccaacatgcttgaagatctaagcttttctcttttaaaactggcacatactcagagcagtcttcttagcctatggtcgtacgtgtcaagacatcacgttgtaaagagggatgatttccttcttttgatttgaaaatttgcacatgctcaatgcttacattgtgcggttcgacgtcactacagcttctttttttttttttttttttttctatttttgccagactcttgatactcttaaaacttgtttgtggtcagcacaacaaggaacaaaacaaagctttgaaaaaactttaacatgaaaaaacgcactgacatttttttttatttaatatagcctggactttacctgcgtatgcacatgctcagaattgtctactaggctgactatgtatcacctcttcagcttggatccaattgtggatttatttacaaacatcaaatgccttcaagccaatcctttttgctgtatgttttgcagcctactgtagtagatacgcaacagataatgtgggaaaaaaagagataagaggaggaagctaataagagactgtcaagattgtataccttcttggtttcttttaagaatttgttgcctttctactattacagcaaagcagcattttgttactgactgcctaaaatcacttaatctcaggtgaacgcatcacttgccaaactgttggaatgctatttgtgttttgttgcactgtttttttcgtttgtttgtttgtttatttggttggctttttggagagggaaatttggaaacgggacatacacaaaagttacacacccacattccctttttatcatgacatacaagaagaaactagcagagctaagaatggagtgaagaaaggcagtatggcaggcaccagcaaagagttgagggctgttgctcttaaaaattattttttttattattattttgaaagtatggaagttttccattcactggggaaaggagggaaaagtgcatttatttttatacagagttacttaattacctccaaaacacatatgttggaaatcgcttttgctggtgcaaagtatattaatgagcaggaatacatacattgaggttatgaatagagagctcaatttgtacctttgctgtcttgctcaagcttggtatggcatgaaaactcgactttattccaaaagtaacttcaaaatttaaaatactagaacgtttgctgcgataaatcttttggatttttgtgtttttctaatgagaatactgtttttcattacctaaagaacaatttgctaaacatgagaaatcactcactttgattatgtatagattacataggaagaacaatcacatcagtaagttatagtttatattaaaggtaattttctgttggctcataacaaatataccagcattcatgatagcatttcagcattttccaaggtaccaagtgtacttattttgttgttgttgttgttgttgtattttagaaggaattcagctctgatgtttttaaagaaaaccagcatctctgatgttgcaacatacgtgtaaaatgggtgttacatctatcctgccatttaaccccacagttaataaagtggctgaaaataatagtagctctggcttggtgcttgacctggttaaatactgtcttaaagctcatacaaaacaaataggcttttccataagtggcctttaagaaaacatggaagacaattcatgtttgacaaatgctgacagggtgaagaaagcccagtgtaaaaatgaatcgcgttttaagtgattcggttaaagagtttgggctcccgtagcaaactaatactagataataaggaaatgggggtgaaatatttttttattgttgaatcattttgtgaatgtccccctcaaaaaaagctaatggaatatttggcataaagggcatttggtggttttatttttgtttgagggggattgtcagaaaatcccttttctctcttacgtctaactgactagggaacaattgttgatatgcatagcattggaatacttgtcattatatactcttacaaataacacatgaagcaagaatgaccaatattctgataattggcactggatcacaaaatgtgataaaactttaaatgtataaaactttatcaaataaagttttattttcccctttaaaatgtatttctttagaggcattacttttttaaaaatattggtcaattcctgacataagatgtgaggttcacagttgtattccagtattcaagatagattcctgatttttcaattaggaaaagtaaaatccaaaatgttagcaaaacaaagtgcaatattaaatgtttgctttatagattatattctatggctgtttgtaatttctctttttttccttttttatttggtgctgaatatgtccttgtaggctctgttttaagaaaacaatatgtgggaaatgatttaatttttcctattgctcttccttgtggaaaataaagtgttttgtttttttctgttttgtata

SEQ ID NO: 13492 - DNA, 2918 bp, Homo sapiens
gaggagcgagcgcgacgggggaggccgccctggcgcacccacccgcacgcctcctcactgcttgtgtcgagcggactcccagcccctcattagattgttttcttcccagagcccagggtcgtgatatatacatctaaatagcgttttgcattatttctagatgagtgcaactgtcaaagcaatatgggttcactggtcgtgcttcctgcgggctgagcgcgggctgagcgctgccagtcagcgctcacattaaggctgacagcgccctgcctggctcggccggcgaagctctaattgccctgaaggagaccgcgcgggcgctgcgggtccggcggcgtcggcgcggtcctagcgcccgccgtagcggagccgctgctgcttccccctccttaatcatgtccatctttccccgctctcaactggagcaaacttctattccagacttcagatttccattttcactaggtttttccctgagggcatcttattacccacctctttttttttttttttaaggaagttccacacacactccaaagccgatttcaaattcagaacctgaatgccatgatgtaccatgtagtttggggaatgcaaattgttctctccctgttttcatttcgggaccagaaaaaaaaacaactctgcataaaaatctataaagtactgaatccgcattactgctgaaaatccttttgccagctaattgtgagagtttacacaagtctctgatttcagaagagactgttaaaaccaaaacaatgatgggcagctcttttaagtgtaggtgtgaaggtcccattttcaatggaatttccaactgttatcactgggattgactttactttttaaacacataatgtgtactgtgtggcattgtaatttagatataacacacttaagttttgctttttaaatctctctgtggagaaaggttgttgttaatcctttccagaatgatctattctgagctttcctggagttaggcccttctagggagagaatttttttattgtcatcaggaaacgaaacctttgtgctctgcagcctttttcttctgaaaggctaagtggggctaaaattatccttttagttttctgctttaacaagaagagaaggacttggtgtgaaagaatttcttctctcagtccaatggtataatttttagcactccgcttcctctgtagggtttagccctacagtttgaacaattattttaatccagctaagatgtggccaacactgtgaaatacaggagatgttaaggttttgctgacttttagattaaaatcttaaaatttcacattatattttaattacttgaaaagtttaattacctagtaaagattgtttctaatagatgagaacataaatttaatagttttcatccttttttaaagtgtgtgcaacaattaatatgcctgccttatttgaggacatgataaaatgtacccaaaatgacttcgaactgtctaatgcctcagaaaagtaacttaaaatcaaccacttcgtgcttaaatgtttttatattatgaaccgatttcaacaagttttaaagctgttaatatctcattgctgtgtttgacatacaagtacattcattggttctatagtcttaatgatgacaaattaaagatgttttttcagtgctcaggtatgcatatattttcgtgttacttaagcaaaatcaactatataggaggaaaaatcaaaatggcattttattcagctaccagatggcttaaaatgagtaaaccccaacaacatcaagcacatttgtctgtgatattgaccctttttatccaatcattactattttagaagtagtggtgaactgtgtaaaataatggtatcttcagcagtgttccggaatcttagttgagggacaaacattccttccagtgagagattcaagaattgatgtgaattgaatatatttttcaaggtattataaattgtgttgtgttttcagtataagaaaatgttgacaggaaacaattttatagcatttataaaaaaccaacacttgtgcaatgctaaattggcgaagcttctgcacctgaattagagcacaataaatatgctgtttataaaccaaatcactgctattccttctctgaaatcatctctcctctttttaaacctttacttatagctagaataaatcactatttaattgcctctaatactttaaaactactggatggttaggcctggtttaactatttatggagagctatttgcaaacttaagttgtgtaaatgtaatttctacttgtgaatctgagctgtagcagcccagagggagctaggcaaactattccagaccaccaactgataagtgatcagattctttgtaatgtaggattttttaacctgttgattatgggtttgttgatataaatgtaataatgttcacctcgattttcctggagtaacaaccagcgttggtagtagcccacctgcatgaggacggccagtgttaacaatatttttgttctgatcttcttccccatttttgtttcctcaaacaggtttttaggagagtggagatttaaagtcaggatgtggcctttttattttaattatatacttaattcttagaacaagtagaatgggaaaggagtgactgataaatctaagattcaaaatagtcccgtcgaaacttaaaggccagattattgctttggagctttctataggtactagccatcccgtcgttaaatgttttcatggatatttgaaaagaagaccatgtacctttaataactgttcttttctcgagtttctgcctcgtgctttgacctggattgcattattattgtttatgcgaagtaaaaaaaaaaaaggaaagcacaagcttttcctgtatattatatttccatttccattttaaaataaaaacaattttcccaacaa

SEQ ID NO: 13493 - DNA, 268 bp, Homo sapiens
ggctgaggggcttgcccttcacggcacggttggagaggggagaagaagggaaaacccaggaaatgtccctagggttcatttgagggcttttagtattaatttctcattcactgtctaaagaagttaaggatacatagtagggaatgggggtgggaattgttcaagaaaaacctgggagagaagatgaagtttattgcagttttgtgttttccctttgtttttccctagcattggtttaaaggtacattacagtatatagatggtttcg

SEQ ID NO: 13494 - DNA, 784 bp, Homo sapiens
tgacatttaaaatttttgtttggtttaacttaagtcttttaatatgtttaattttctaagatgttttctatttggttaaatctcactgcaaacatgaaaattagaaaatgaatgtaatgaaattttgcagtatacatttctcatgcatttttttctataattgtagttataaaagtattttctttcttattaaattgttaaagatattggaaatataagccaaaaatactttaaataagagtttaatttctcttgattgcatatgacaaacagtatttgtgaaactgtgtgtatacacacatatatataaatgagtatatatgcttatacacatataagctcctttatctgtttattaaatatacgcatatatataagcacatatactcagttatatatatgtacatttagttatatacataacagaaaagtatgatttttaatccattgtatcttccaaagctaaagcattattaggtaaaaagaatttttgaaaatttgttgaaatttgcagtaaaattggatatttaaaagttgtaatattttagtcagtcaattctaataatgagcaactatgaaatactataattataaaattctgtattgtagttgattaggaaggtataacattttactatagctatttttaaagtttctctactattttttctataaggatgtatacaaataaaagatgatttgaaaatttctattttattcataagataaaggaaaaaaggaaagaagttattgtgatataataaacttttcttattgtggttgt

SEQ ID NO: 13495 - DNA, 187 bp, Homo sapiens
cattggattattttatagtaaggaagcaaagaaaaagctgtaagaatgaagcaatgaatcaagacttctacccaaagcaacatttttttaaactatatttattccttttctaaaggaatctagagaagttgaagtttttaagttaggaatgcaattttctgttaactccaaacctgattttaatctg

SEQ ID NO: 13496 - DNA, 307 bp, Homo sapiens
atacaggtatcactgaacagaacttaagagttatctatttaatggcacatttcatctgacaaaactcagagtctagtttacatattctgaattgctctgctttcttaaaaaaaagagaagggggctactattaaaatgtcattttctagtatttacatgatagagtaaataaaatgaatattgatgtggaatatatgtactgactacatacttttaatgaacaagaaaatccatcctctggtaggttagactttacactgtggtttataatataagcatatttataatacattaatgtttttattaa

SEQ ID NO: 13497 - DNA, 987 bp, Homo sapiens
aacaggccccatgctgacgtccctcctcaagagctggatggcattgcaaatgatgacagcacttctggtggatgaatttgggggcacaaacagcttttttcctcttttggctcagtatttaaaagtggaccaacttgctcttaatcacagggccaagaaggttgacgggccatcttggttttcttctggatgtgctctttggttttcagaagactgtgacaagttctggcccaggattcgctcactgaccctcaattgtcctctttggcatgcgtttcttactgttctccatgtgtcggcatgtctctacctctaagccagtgtttttcaactatgtttatccagactccttctccacaatgatgaatccacagttggttatctgctactgcccattagctaaaatcattttgctgcttgactttatggagtttgtattatgaaatcagtgggtattttgaatgtgttctttctaactacatgcatctctccactcaactccaccccatcccatcccaccttgaaaatcactgctctgaaccagtgttctccaccttgtcctccacagatctcataggaaatgttcaacaattctgtgaaaggtcacaggacccaattggagaaatcatatgaaaagcatagttggtcttggtgtcatatggatcagaggcacaagtgcagaggctgtggtcatgcggaacactctgttatttaagatggctatccagataatcctgaacactgtgtatttattttatttagactaccagcaaagattaaagcatgaaatgtaaaacatctgataaaacttacagccccctacaccaagagtgtatctgtgaaagagctcctacactttgaaaacttaagaatcccttatcatgaagtttgcctgttctagaattgtaagattgttaatttccttcaatctctagtgacaacacttaatttcttttctaataaaaaaaacctatagatgattcagtg

SEQ ID NO: 13498 - DNA, 3773 bp, Homo sapiens
aactctgcttggaccagaagatgtgaataaacttaagcttatttatttaaaattccaaatgagttgctctagattctaaaaaggtgaaactttggctgttgaaagtttcagtattagtaaacttgagttactttttcttttccattttactttgcttccctgcatttcgaagctgctctttctggtcctccccaccaccccacccccaagacttgtgtttgttaatagaaataatttttttaggtattggggatccattgtctatatttcaaatcagttttttttcctcaaaaacttgtgtttgttattagaaatgattttttagatattggggatccagtgtccacacttaaaagttgtatgtgtttaaaaaacaacaacagtaatgtgcaaggtgaaatgcttttggataaacgtaagcctattttctgacgtttcttaatgcaaactctttgccttaaatggtagaatatttagaaatttgcacaaaattaaaaaaataaacattgtcttggagggttaaaaaatagaaaggtgtatgtgtatagattcacatacacatatgtatatacaggctgacttgatctagaacattaaatccgccctgcaagttaaccccccattgcaatggttgccttaaggtgtttgctagttgtgtacatagtgtggttaatcattagctacactgcttcccacttgattagagcaatgggaagcatactgtggcctaccagcatctggaagtgtgtgctcgatctgtatgtgtgcagaggtggtgtggatgtgagcgtgcatgaaggaaaaaaagctgctactcctagtaggccaaacgctcaggttaaacaactgacgagtgttactgtagggtgtttttttgtttttttgttttttttcttctatcaaattgctacttttgttgtggaagacaaaagcatttccatttcaacgagtttgtcagctttattaatgttgggcaaaaattgatatgtcatgaaaatgaaacagatctatagttttgggacaaaattataaaatgaaatgtgtaggtaacctatttatatactgctataaagtattttttgaagagagatatgcaaagaagctattacctacataagaggtatatttaaagattttttttttcatcctggtgccaggaatataaaaaagagtggatatatttaaccataacatactgtgattcatcaaacagcacaaactttcatttcatggagtttatctgttgacattgatttaaactgtcacttgttttatcatgtgggaacataagttatgtggtcaaaaatataaggattttgaattaatgttgattcaagttgtattgtcttattgtattgtcttttcaaagtgctgccagttgaaaagggaagcattatgtttacaaatctgttttgaaatgtttgccaaaattttggtagtgtctttaataaagatgtttgtctccagcatccagaaaaataaatgaataactttgttgtgtatcactgtaaaccagaaaaatgttggttatctagaaaacttgagagagcatgtagattaacttttctctttggagttctaaaacattaactggaaagattagataatatactaaatgtatacagaagtatacagactatacaaagactgaaacaagtcccttttgcactacaactctataacattaccgcagaaattttggttctatgtagcatggacctcctaaggaattctgtttcttttagcattgagatccctggtgctctttttttacctcagaattggtacaatcattattaaacgttaatttatttcaaactttttaattgaaaaaaggaaagggaaacttaattggggataaattcaggcatcatattattatgatagagtctcctgagtggttcgtctataggtaatgaactcattggtgttatttcttggacatcttggccttttaatcaaagactgtgtgctgctatttgctatgagcaaggtttctcaaaagcaaaaggtgcttggaccatttggatcacctgagttagaatctctaggtatagggcccaagtatctgcattttcacaggtttcttgtaggtgactttctgcaagctaaagtatgagaaccattggcttggatgtagttctaaacttttaggtctgtaaatcttgaaatcttgaactgaaggtcaactattggcttttttttttttttaatgtccatcatgtcagcaggtgcaaatcacttttcccctttgcatgatctgaggcacctcctcagttgtttcactgccaactcttgtttcagaacctgtttacaaacaagccttccagttggtgaatggttagccattggagctcctaccctgtacatcagcacatcttctggtttacaagttgggtaacaatgaaagctggagatgctaaatggaaatccagcattgcatacccttagacctgatcacataccagtaaaagccttaatttagatgttagttgtatgtgttggacagatccttgcaaaagtgtgtctgtctattagttgtaaatttgaaaattataaatctctgaatctgctactatccaagtttcatcccttttgaagatgaggcatgagcctattaaaatatttataatcatttttcgtcccctactgcaagacttttagattcttacaaatgattactacaggaatagtggccacttaatgtcagttactccggtggaagaatttatctagttttttttcttttcttttttggaaggatggtgtgaaaaatagcaagattagagaatgagttgtatagttttttctatcacatttcatctaaaatgatttgaaggacttttgaagatttttaccaacatccttaaatcaactccaggttggatgaacaactgatttaaaacaaactaagagaacattaactagatgtgggctttttaaaatatataggtattgcatttcctaccttgttatttattccactttgaatactttagagggcttaactttcaactctttaaggtagtaatggatagttttatacttgttctcacaaaattgttatggtcagtttatatcattgctccatgcattgattataaaaattcagtattaattttttctgatcttataagctttataggagttttcttttctcttataaagtgtttcaccttatgtaaaacaaatgcctgcttgcatattggaagatgttgaaattagttttagacaaaagtggtccatcaattcagacactctgcttggatgccttacccttttcattagtgcattctttgcttctgaaacttggcagaaactcgttagccagtccactgcctttctgacaatgtgtggagtcacgtatgcttggtatatgcctttactacttttaaagttctacagtttattacttgcccaagtgttactaaatccttttcttatgtgtactggatggagaaaaaattatagccagcactttgagaggaaagttttcagaaacaatattaactggcactactaactgaaggccacaggagatgctatcaatgttatttgtaatctgaagattgaacaaggctgtgaggctcatttcaaactattttgaggtgttaaaatatatatatgctgtttctcagctgttccactcaaaccgtgttaggactctcaaaggtaaaatgtcacaggggcttttcagttgttacagagctcagcagctgtggttgcccctgttctacaccaatttcagttcaataaaaatgttaactttgcaa

SEQ ID NO: 13499 - DNA, 2586 bp, Homo sapiens
aataagtgtgtggtcccaagttggaaatattcatgcttcttccttaccctgcgattttgcctgtgtctgaagtggttgttttgtcatgaattcttatgcttataatatcctttgtggcaccttttctttttctccctaaactgtacatgtgaaggggatgagctcaagcaggaagttcaacttccagaattgatcataggtatttcaaaacacatctttcctgtctgcacaagtgaagtgttttgttctttctggagtcacagttgacaaaaagctcttacactacattagaacactgcattagagcccatttcaattctcaaaagaaaaggcaaaacctgggatatcaattaatttgaaaacataatctgcaaagaatgagaaggagtcagaaactgtttctgtagcttgttccctgtcttgtccatgtggttcttcaaattttgatgccaagaaagtatttggtaggcctaatgaaggagttcactgtaagactcattccctagatctttctattccaaagtgccactcattcctgtagtcaaaatctggtcatgttggtcaaaagctggattatttagatctagaaacagatcttgaaatctgaatgctctggtttgagcaattttcgaacattctttgcctggtgcactgtgtctgtggtgccagaggcgtccgtggatccagaggtggttatgactcgtgctgcatgcctggtctttcctctgtttctccttctgaaagttttctatacctgtctcctttctcagccacaaaataaatgttgggagaaatgatatataccactttcccagaaaaaaaaaaacttacacttgggacttggcaaattcctagtcacaatttttttcagcagtaacaggaaaccacttatcacatggagacctaatgtaataatagaaaaatactcataatagggagaaaccaagagaagttttgtttttgtttttttccaactgtgttcattagaacagcgtgttctaagtatttgaaactgaatgtttattccttgatactaaaagttcttctccaatcctatcactgatagtgtccaaattctcaccaaattgctcctaagcttcaaatcagaagcagaaactggcaggccatggaccttaattgtccctcaggtagattttgtttggtatgcagaatgtttttaaaatatgagtggttattgaaaatatgatgtttcacataaaacctcattctcggacccatctttgctcatggcaacagttagctggagctgagtagcagctgcctgattagatgactctcagtccccatggcaccctgctccatgttacctagagcaggcacttgattccttgctgggcagtatccaataggcatttgattttgcccactcctacactaagcgaatgtgtacaaagtgtaaatgcattaggaaaaacaaactacccgcatcttctgttaggcaggatctgtacaataataattatgagtttgcttatgtaatctcacctcacctggatgatcactaatactaattcatttattactaaccttctggcttccttctctcaatatgcttacaaagtctccagtcacctacaatgctggctttctcccactgagtttgctgtttgcaatttttccatgaagtttgaacttcataaggtaattcatggcattgaactggttcatgaaaagaacactagagtctgtcatttgctttggcttgaagtatggttggtaacacaaattttcacctgctcttctaccatttgaatttgtgtagagggtgtttgcagagcaatgcccgtaatgcttagagaatgttctcctaaaagacttgcggaatcactctgtccttggaagtttcatatattgtttgatatgaagtgttagatagaatttccaatattggagcatatcaaaaagtattaaaactaaaaaggaccagagaattcttagattggcccggaaaggccaataaagagttagaatgaaaactcattacttttccattcccaatctagtgctagatgtataaatctttcttttgattcttcctaacaaaatattttctgggttaaaaccccagccaactcattgggttgtagccaaaggttcactctcaagaagctttaatatttaaataaaatcatattgaatgtttccaacctggagtataatattcagatataaaacagttttgtcagtctttcttagtgcctgtgtggatttttgtgaaaatgtcaaagagaaaacttatatactatttcccttgaaattttaaactatattttctttacaggtatttataatataccaatgcttttatcaaacagaattttaaagagcataataaattatattaaagaaccaaaagttttcctgagaataagaaagtttcacccaataaaatatttttgaaaggcatgttcctctgtcaatgaaaaaaagtacatgtatgtgttgtgatattaaaagtgacatttgtctaatagcctaatacaacatgtagctgagtttaacatgtgtggtcttggtattcttaagggaacttccacattatacatttgatgtattgaccagaat

SEQ ID NO: 13500 - DNA, 2389 bp, Homo sapiens
aaatccatcagaatctcagactacagcactaaatatgctttgatgctacatcaaacggaatggaagcatagctgacttcgctaaagttacttcatctccatctagcaaatgaggcactgttctcaaccaaaggagatggggatctggtttagggcaatccctttataatttgatgtgctgtggtctccttggtaatgtataatttggtattgcacaggtgattagtcaaggaagtctggaaaagctttggtcccacagccttgcctcacagcatgtaaataattaaaacaatattgatgctgaggttcttctactgctagtatgaaagtgacaaatttttactggtgtgaattgggaagaaaacaatgctattccatgacgtttgtaaaatgtttgtaaaagctcaaacatgacgattccataaaataaacttgaggttaaataatgggtagtaaattatagaatgtataagaaaaaatataaaggagaaaatcaattatcaggaaagctaaagaacttttcaaatctagtaatttgaatatagacacaatgcactttattgcactttcaattcttataaagcaacaataatattaaggtccttgactatgtgtacaatgttttcacatatatagtttcatttaatcatttcaaagttaatctctgccatctcgctaaatcatcagtctcggctcttctgaaatagaaggtgcctgatcttcctaataattctgcctattttcatttgctttaaacaggcgccctattttctttctagttgtggctgcgcaaaaacatttatctcccaaataagatgtgctgcttaccgaggtatcacggggtggggctccagcttgggtcgttgaagctggggtttgggaaaccacttcagagatggcagcagcaagtttagcatcttcaaatttcttttattgaaaaaaattttattagtaacatgttgtatataaaattatgagcacaatgccatcacttaactataactcttaaagatagcttaatgactgtttattctcttgaccaaatagactcataataacatataattttaaaagaaatttaaattctttcttctctattgtattattttatacaatttgctatttctatttccttctcatattgattattctaaatactatgcaataatataacttagagttccacggtttgtttacacatttcctgttgtacatttaggttattcaaagttttcagctcttttaaaattgctctgaataagttctagtgagtgagttatggtgctggctatattttgctaaactgccctctcaaatgttgctaggaattcatactgcgaaaagcaatgaataagcatgcctgttttcccatggccttgcttgccagaatttgacttttattatgataatcagtgtaaaatgatatactactattgcttgtatattgtggtatacggtgtcaggtttcagggttttttttcaacgttaaatattctagaaactttctgaaataatttctgtttaaaaatattgaatatttgcttcatttcaaatactcccttttgacaaaaaaacttaggtataactgttgatgaaaaaccagaaaaaagtccagaactctttggtgactccaactatggatagcttattttgaaaaaggagaattgcaaattttaccaaaagatggagaaaagcacattaaaaagataccaacattcagaaattcatttcagcatgttattattggaaattatttaaactaatttagataactataagatacttattgtccatttataccctgtaaagccgttttagaatgtaatattttaggtaatccaaaatgtactaaattaaattcatttttagttatgagaaatctttgcttatatgacaaatgaaaagaataacaagttgtcaaatgaaaagaatgacattgaaacatttgtattgtctcttcttaaactatcttattgacttattatttaagccttttaatactaagtatgaaacaacctatggtctggaaatttgtatcgcaaagctatatgtgcatatgttatttaattcatctaatgctacacaaaagcataaaataatgatttttcactctctttaaaaatactaaatcatttatgtccatttctcaattttttcattgatctatgctttgagtttgctttctcaacattattgtattttccacttattattactgtataacatatgctagtgtttagttggattaatcttacctaaaagtactgaaaaatgctttttagtactttttcatattttatacatttattttccgaatgtatcattgaataattttattgagttataaaagtatcttattgctatttaataaaaaattaacacataaaatg

SEQ ID NO: 13501 - DNA, 2877 bp, Homo sapiens
caaggccaagccccgggtaccctcagtgatggcagaggccagattaacattaggaatctcagtgcagaggtcctcagaggctccagcatctctagtactacctgaaggctctcctaaccctctccacacattccatttacagagtatgagagtcgtaggacccttacaagacccaacaagccactcgatgcatttttctatcacattctcaatagttccagctcaggatgaaaggatagacacaaaattgtttgaaaaacattttccaggcctggctccaacctaaagcctgactgtcacgtgccttgcttgattttatatatattgtttcaagaatagtccaatatagcattccccaaatgaacagcagccagaattaggtgaagtagcatgatagcagtgtttaaaaatacttaggattaaataaataatatggattgttttaaaaaatatccaaggatcagagtctctttctaagctttgtaagctaagcaatagtttatgtcctactagatacactgcaaactacagtggggattttatctggacatcccaccatcaaagatcttgaaatagtaatagtatgaaaatactagataaaattaatgtttaaaatgtttttgtaacaataatttttaaaacccacactcttccatatatggggataaatatcacctagaaaagtagcctcactcttattcctcaagaattaatatccaatgtttatgagtcttgcaatcaattttgttcatttttaatttgcaaatcgataacctgaactaatttgttcttattttttgccactgcaaacatatatctacagagagaaaaattaatggcattttaaaggttaaaacattttgaaaaattattagcatgtaacaaagaatgcttgcatttgattagtttcaccagcatttgagagaaggaccctttagctctgtttgttgttcaagaacataagcaaccagtagctcaaatgtagtatcattattaagtttaagtcactggaatcttctttaaaggaaggataagacattgccatctctatttaactcatccatatgggtcaatcaactgattagaaaatcaaaaaacaataaaaactttttttttttttttttttttagtagagacgggatttcatcatgttgcccaggctggtcttgaactcctgggctcaagccatctgcctgcctccacctcccaaaatgctgagattacaggtgtgagccaccatgcctggcctaaactaatttttagatagttcctggtcactcaaatttaagaatgtcagcaatgtcaattttaaatgctcataggtctttccatatctgtaacatgaaaatgattattctgcattttattcagtagtccaaattaaagaaaatgtttttctcaatttaaaataatttctttttcttttgtttatgcaagtgcatacatgcttcactgaaagcaaaaccattataattacattaaagtttataaaatatgatattttaacctcatatctaataagtatgtacaaaggtaaccatcactccttaaatccacatgaaaactactgtaactgatcatgtattttggaattagacttgataataaaagattatcatgtatcacatatctcacaccaggggaacaattagctacataattgtcataccttaatatcttttaaaggtaacagtaattttcaacacattttattttaaaatattattttaacaaaagttacattcctctccacaatgaggctaaatgtcacccacgaaagaactttattcccttatattcctgaaaagaaatcagaattaacatttttatgttgaataaattttaaaatttaggaaatgttctatttaaagttaatttctttcataaagccattactctttacattgtcatttccaaaaagccacaatttcccatgctggatgtgatgaaagttaggcacacctttactgcattagcagcctttgacaatgacttcctcaaactgacaccatcttaattagatgcagggacagggatcagatgggacaatatcaaatttactttgtgccctacaagttaaaaactgcacccattctgtaaattgaatatagaggttctcccttggccactgtcagcttttcttgactggccaaaactgcccattcttcctggaatggtatgaaagcttcagcaaaataaataaaagtcagaatctttgctggtccctttaatgctgatttgatagtaaatcaatttcagctgagacataagggctgtcagtctatcatataaacatctttaactatagcctagagaaaagagggttgaagagcaaagcagattttttttttccttttctatatcttgttctgaacaacacactgtgataaaggggactagagtggaagattccctatttaaacacatgaagctctgggtcctagccttttttggttataagccctttgagaatctgataaaagctgtggatcatctcctaggaaaatagaacaaaacatacatattcacattacacagttccagagtatgtggaccccccaaagtccagagattgccctaggggatctttagattcttgtttagaactgttgattttgaacacaacatacactgtcaaactttacatcagggatccaacataactcagacatagcccaggtagcctgtttctaacacaactgtcataatcctgaaatccaaaattgcactgtgtttgacatgagatagtttaagttccacaaaatccaaatttaccatattattgtttttaaaaaagcagtttagagcaaactgtcactaaacttggataaatgggtcagaaagtacagatttaataaagtcgtacctctaatgttc

SEQ ID NO: 13502 - DNA, 124 bp, Homo sapiens
tatatttaggatcttggatatgtttaatatattttttaaagttactgtaattcctttttgagccctcatttgtcttttttgagccaaggctatcatatattaataaataaaccctctttcatct

SEQ ID NO: 13503 - DNA, 1175 bp, Homo sapiens
caaaaactgatacttcgtctttctggacttttcttttagccatatatcataaaccaacacagtaattgccttacatgacttgaaagatataaacagatcttctatcagtagcagtattgttacttctttccaggatgcaaggtctattatcccaacagaagagaaaatatttttatatttaaggattatgctgcactgtactacaaaattgtagtacttttttttgttttcttttttaaagaaatggaaaatgtttactattacagggacctcaacactgccctcccatacaggctggataaaactgtttttaagtcagtgattttagactgacctccatttaaattatgtttatatatgaactttactctgacctgtgatcatgtttcaggaaggaatgaaagagagttctttcttaataaagaaaaacactcaaggactttgttcatttccaaagctacttgtttacattgtacactgcgaccaccttgccgcttttcatcacaagcttgaatatttaaattctgtacttatatctgtaaaatagccaggaatttcctgtttgtgatctattatgcctttttacaaaaaaaatggctgtaaattattgtaaatattaaaggaactttccttacttccttccctttctcaggctttttttgactgttcctttccctaccaactcaggccttcttattaaaaaaaaaaaaatcagtgtaataacactttttaatgatttgtcttgatggaatcattgtttagaatgtaaaaatggggaaaggggccacttaattccattagtcctctttttatactgaatattttattagatacatgttattcccttttttttccttttttagtcaatattgtgtttgtagttttaaaaaatggcgagatatgtaaaatctaaactgcatgctctggaaacacttttttcagatgcatctggtttaaaagggtaggtgtataaacacttttcagaatccaaaacggccaaaagttattgtaaatccgtttgttttcccgttttatgtgggcaataatgtcaaatgtgctatgcagccaggttaacattttagataaacttgattgacttttaatataaactgttacaatgcacactgattgtatataaaaacgttatatatgacaaattaaatttaagaaaaagg

SEQ ID NO: 13504 - DNA, 4647 bp, Homo sapiens
agcacattttgaaacaaacaatatgcacttcttttctgaagatgcttccgaagatttgaaaataggatccaaaacacggctgggtttcagcatccaccaatgaactgaaaggtgaataaaggacgttcatgagaaatcgactaccagctgatgaaatacctgcaaagtgctctaaaaattaaatattttgactttaagggtcctagtaagtgccacttccactaagaatacagtttgaatgtataatcagtagtgtttacaagatccaacagtgcactcatcattagttaacaaagcaaatatgttcatcactgtcaggctgcccacagcaacaccaagcatattagaagaggaaccccaggaacgcaactcagaccttgggaaattaaaccatccttgtcagcagaagccaagatggaagcagtttgagcaatgaaatccgtaagattaaacaactcaagtaaatgcttcagtcaggactctgagtctgatcatgaattttatgttttaatttatgttttttttttgtcttctggaatctcttttggtttggatattgggatgcttagaaatcctttctgagatgcatatgagtgaggaaataaactttaagtaattatttttaaagttcttatactttttaaaagctatcacacaaagacttttttttttttttttgtctcgctctgttgcccaggctggagtacagtggcgcgatctcagctcactgcaagctccgcctcccaagttcactccattctcctgcctcagcctccggagtagctgggactgcaggcgcctgccaccacgcctggctaattttttgtatttttagtggagacggattttcaccgtgttagccaggatggtctcaatctcctgacctcgtgatccacccgccttggcctcccaaagtgctgggattacaggcgtgagccaccgtgcctggccgacatttttaaaaaagttttattttgcacggctctaaacctccatgttattttccagtggtgtagaaggtaccagctaaagtgaaccactatgtaatattaggccattctaaaggaaagatgttccatgtcatcagagatggtaaaataggccgggaaaaaaaaatctttggtaccaaagattacacttgtgtttctacacagcaaaccatttttctttcatgaaaataatatattattaacatgaatatattattttgctattaatgtgaaagttgtctctaaatattttttaattttcaaactcatactttattttcatttgaaatgtttttcacaccttttgcattacataataattttgtggaagcattttgccctttagaataaatattagattgatatagctgaaatgtgacttccagttctttgatattccccttgttattcaaatagaaatatggaaatgctttatatattactgttaaatttcttagtgcagaaataacattattaatagagtattgttttcaaaacagagatgattaatttcaagaggtttaacagtgaaattgtgtcaatattttgcatttaaaatgaatttaattgaccgatattttctgtagttaaatttagtcacaatatcacatatgttcttcaagaaacacatgaaattattaataaagtaattaaaaaatttttaatgtataacagaattgaccaataggccagttttctggtaacttatgatagtagattgtttctttagaaactgggcagaagctctgcattctcacttgtactttgatttcttatttcttgggcaggcaatttgaggaaagaagaaatggcatggggaatatatatgttttgtttcttagggaaaacagtctgagaaatgaataaaaagcatgaagtacgtgtgtgtgtgtgtgtgttaccatggaaaaggatattcacagtagtacagttctcaatatttttaattagatgtcatatttttttaatatagtaaaaccttgggatatagaatattacatcttttgagaatgtatgtgtctctaagtaagtaaaatctaatgcgtataggagactgatagctaaaaatgaatggaacattaatgtacttttataattaaacctcttatctatcagaaattgtaagagaatagatacatgttttgaatgtaaagttgaaaagtctggtttacttaataaattgaaagtgatttataaaatctaaatttggactacttgcaaatgataagctattctagtagcctttagtttaaatccaacagaaatctagaagtcacaagcaaatatcttaaaggtaaaatccatctgggcactcatttaaagtatatcttaaaaaagcagcagcaaggtaccttgccatttttagcatattttcttcctttttcttttttcttttttttttttttttgagatggagtctcactctgtcacacaggctggaatgcagtgatgccatctcagctcactgcaacctccacctcctgggttcaagtgattctcgtgcctcagcctcccaagtagctggggttacaggcgcccaccaccacactcggctaattttgtgtttttagtagagacaaagtttcaccatgttggccaggctggtcttgaacttcctgacctcaggttatccacccacctcagcctcccaaagtgctgggattacaggtgtgagccaccgcagccggaccatttttagtatattttcagtaaatacatttaaacaatgttaaggccacagcacacatatctcagccattcattgttctgtgcattgatgtttatctcatagatgcattgagtagtgcctttttagctttttcacattactttgtcaccatatcctttgtgttctctaaatacattgcccacttccaaaaatgttcagcatgaaaaaaagggcttcagtgtcgattgagattgcttttgttcatctcagggatttcaatagtcaagaatgaattcagttaaaggtatttagggttcaaagaagacaaactgtacaagcccatttcattccttgttgtatacctttccatctgccctcccattttaactatctactgtggcctttttatggaaacagagcaagatcaatgaaggctaatggcaagaataagaaaaagagttgagatttaaccaatagcggagcataaaggatcatgacaaaatcaaattataaaagcatacttgaaataggtggagctttttcttttgaaaatatatattcacaattttaatattttaatttattttttactatttaaccctgtacttggcaatgctcaggcagctgattgtgaaatattcttgtcctttacagaacatggttgttattgtgctgttgacatgaatagaccatggaaacattttcatcattattattcagcctgtgctgtagttaatgttaagttgctgaaataaaaagtgagcaagtaatagattttcttggcaaatctaatgattcagcccacaggactgttgaaactactgcggaagtttttctatctgaaagaaggtgctgggcattcaaatgtgttcatgtattgtatatcatatgaattgtatatcaattactaatgggaatttctacatatatgcttacaaaagcaatttatttaagtaatgctaggggtagtgtacataccaattagttattcagctactatacagaaaaaggatgaacaaattaatttatttctaattgagccagttagacataatgcatataacgtgatatttggttcatgaaagagttgttttcatgtggttattgtagggagtatatataattgtggaaggggtatgggaagagttgtgtatagttagttgttatctctacaagtttgaaagttttcccatcaaacattatcaatataccaatgttttaaaaattgagtgagggttattatttgtatttgatgaaagaaaatccaaataaagcccacctagaaatagatattttattatatatgtgctatagatatacctatatagtacaaatagacatgtgtgatgcatatatacaatgttatatatgtgtatatgtctgtatacacactgagtctgtaatatgtatacactaaatttgtgttatgctaacatcttcagggtctgcactgtgaactcccctggagataagtaagtccactttagaataaagaagttcttttgagacttcagttactaacgtgctttaagaggtatctactttataactgaattctatgtcgttcatacgtagagttacagtaagggtctagtatgtccaaatcttaataataaagaagaaaagtaaaggcttcaagctagcaatgtattcgaattacagttttcagattgtggctccaggccttgtgtttctcatttaagtagcaccttttaataaaaaccgtttctttgtgtaggcaaaagcacaagtgtttcaaatgtaaatagcaggaaaaaaaaagagtttacagagatagcattgctgcacagaataattgctactgagtatttcttatagaatttgtggaactgaaagatgaggtttattctgtcaagttcaagttcattctgttcaacactgttttcttattgtttgtgtatagcaaccgggtattattgttttatcatttgtaaaattgtaaaataaattaatccctttttttcactg

SEQ ID NO: 13505 - DNA, 1028 bp, Homo sapiens
gctttcttctgctttttgagattgtaagtttttcaaagatattttacttgggggtggaaaactgttagaaaattttaaagtattactaaaacctcaaacaaatatttgtctatgatatccttttctgtgcaacatttaaattacatttaccctggaatagaatattataattattgcgtagttgaaagaaaaagtgatcctgtcatagcaacaagattcacacagctttttttggtgaggtgaggggggaggcaaatggcaattttattaaatttaatattccacacaaacttttttcttagtatctcttcttcatactcattagttttgtgtgattttatttgttgtataaagattatgaatattactatggaatgatgtaatagatttatgttaatgttactttttattaataattatctaggagatagtaagaacatagtttagcaagtttatatttgatatcctgagccatatttctttaatttctctttatatgtggtatttgtgtatgttagtatatttgaattttatgtttttttaacataattaagcgtgcatgtttgtttttcattaacggttaaaagatatttgatgaattgtgtgtttgattaacctattaactgaaaaaaactcaacagtagaaatggaattataatcacatcataaatataagcagtttttaatgatcaatttttatatctgtacagtttttttggattgttttagttccttagaaaaattagctaaatgacagaaacatggatattgaaatatgaaatagtacaatataaagatagatagaaaagtatgctgagttgacatgttgaaaaacacagtctcttgaagatatactggaatacattatttttgaatattttgaatattttttgaatatttttaaataaagtcttaaaagcataaataggtaactacttttaaaaaaaaagtcatgagaaatcacactcaagcattatcaagtgaagaaaattcataatagcaaataaaactgcaaacattttacctta

SEQ ID NO: 13506 - DNA, 2870 bp, Homo sapiens
aatgggaaaagagaagactgttttacacctggaaaatttacctcgatttttaagaacacacattgccatggcaggattatctatccaatatggacaatcatatttacaaaattgatgtttttataatcaaatgtatttttttacttatgtagtttttgttttatgcaagaaacagacctgtgccttcaaagcccacgtaaagcctcaaaacacagcacacacacacacgagcacacacacacacacacacacgaacacacacacacacacacacacgcacacatacacacttatttcctattcccattgtctaggtatgaaatcctcaagcaataacaagaaaaaaggcccacaattagaaaaatttacatttaaaaaaaatgttgtttctatccccattacaacttgtttaattttaattttcattgtcaatattttgagcttagaacatttatggtataaaaatttaaactaatcaaagttgtgtgatgatttccgggaattattattgaaagcctatgaatttaaaaccaggtttaccatgtaatttgtttttaaatttatgtatactagcctggcctttctccaagcaaattattgaactattagaatatgttagttatcatccttgtgtcttagtatatagtgaatacagaaacatcagcattgtatacacatattttcactttaactcaagaattccaggaggtaatttgttgatattacaatttttaacacatttatgattctgtgataatattattcaattgcatatatttcagaggaaagtaccagtcagtaaagaaaaatgccaactaaacatgaaactattgatcaatacttatatacctttaatttttcctatttgaaaagccaaccacttaacacattactcatagcacctaagacagtgccttgcatagtgtagtcatctattattattgtttaattagaatattaaaccctaccctttaactcagcagtccccaaccttttttgcatcagggaccatttttgtggaagacaatttttccatgggggaagaaggtatggttttgagatgaaactgctccacctcagaccatcaggcattagttagattctcataaggagagtgcaacctagatcccttgcatgtgcagttcccaatggagtgtgcactcctatgagaatctaatgccactactgatctaacaagaggtggagctcaggcagtaatgctcactcacctgcctctcagctcaccaactgtgtggcccgattcctaacaggccacacacagcccagggctggggacccctgctttaactgatgcattgatttgataaagtattttacaagcctgataatgttataaccctgtttattcaggtcagatttatgccaactttgctgagaatatggagggtatagatgagtgaacatcaacaaacataacttctaccatggttaagaattttacttaggaaaagtattgaagttcaaatccagatagtattacatttgaaattgttataagggttattaatttaataaaattcatcatcaggtttcccctataagctttctcctaggttaattttccacaagcattgttttatatacactgtaatcaggataacacaagcttagtgttagatcttgtaggaaaccaagattagaaacattagaaatttgcagaatttaagaaattatgttttgtggtaatctatggccaacgatgttagaacctagcgcaattgtaaagtgaaattcaaggagaaggaatgaggagttagggaagcagcatacttgaatattagagaaggagaggagctgtgggtcaggaatcagagagacctgctaaaaccagacagatataaacaccaaagacggaagccaaataggtagccaaaaatccagatatttgagaagcaggaaatttatagcaaccaaagaaatagggcaagagaggcaggtgaacacacatgatacctcaattgacaatcttcctcccaccaagccagacacgttgtaaatgctgcttcctattggagcccagaaaaaaggaaaaggaaagtttaggctttctttgtcctttgtgtggaagcagggaattggattgaagactttcatagttgtaacataaaggcaaatcctgaggaactcactgatggagatgtgaaatggcagtaaggaagaaaacagaataactgaacaaatatattagtctagggccacttaatttagaggaagaaaaaaaatcaacccatccatagaaatagtttgataaacaggtcactaaatcattggcgtttataaagattcttagctatcaagggctgcattgtattttatatactcagttttataaggtgatactttttaaataagcgctttaatgaaaatggttagactgaaaataattttggtccttaaaaggagtcaggagcttttatatataaggtacatattttaaaagaatacctcctttataacagggttttacagacactaccataatttataatcattattttttacttttgggttcacctagatcatatgagttgatgtgatacttctagaacaaaattattcatagtgcgttttttgtaatttatgattgttaagtaagcttgacttataaattgacattgtaattgtgtacataattggatatatgtgttaaaatttaacatttagatttacttaattgtagaaaatacaaatgtaaaacttacacatggaaagaactgtatgcagttgactttactatgtaaattggagggaaacaaagttttagatccattttctttcaaaattttctttattgtaaagtatgcaaaatatatattcataccatttattaaatcagaatgtttatacaa

SEQ ID NO: 13507 - DNA, 174 bp, Homo sapiens
gattgcagatcatttgaggatcagagtgtgaaaacgagtttctcttttacagattctccaagatttgtttctgtgcccaactttcagaagaggaaaatcacacattatgtttacataagtagcaaaaatatatttatggtgatctgcattttcataataaagtgtcctattgtg

SEQ ID NO: 13508 - DNA, 1897 bp, Homo sapiens
taaataccaaaatttatttaaattgtttgtttagaatataaattcttaatgatatcttattcattaaaaacgttgtatagaagaagtatcttgacacattcttaatgactatattctgaaggtttattttatagttcttatctaaaattatgccacatttgaatatcagtatacgtacatatgaaggcaaaggaagcatgtaatatatagaattcactttttcttctaaaaagagaacaggcaaagcacccctacttcttgggaaataaattccagcccaaatctctcaaacctttgtatggttttggcaccgtttctaagttttaaattttctgaaattctctaccatttaaacagtaagtttgaactaccttgaatggaattgataaatactgaatcaactgtaacaatgaatgaaatgaagcttctttctgtttcattagaacttctaaaaacaagattgtatgaaaaaatatagggttatttaataggctttcacagaatattggtaatttcaaattatctaattggttagatagggtcaggattagggtctgaaactatgtattggttgggaaacaatttgtttattttcatactatatattaaagataaaaccatcgaccaggcatggtggcccacacctgtaatcccagcgctttgggaagccaaggcaggatgatcacttgaccccaggagttcgagaccagcctgggcaacacagggagaccctatctctacagaaaaatgtttaaaaattagccaggtgtggtggcacatgcctgcggtcccagctactcaggaggctgaagtaggagcattgcttgaccccaggaggtcgaggctgcagtgagccgcgctcatgccacagctctccagcctgggcgacagggcaagacctgtctcaacaacaacaacaaaagtatccgttaagaattttttctgcaatcataaaatcataaaataaccagtatcaaagattttaaactgtaatttctatgatattcataaatataaaataaatattgttcaataaatatttattctaaagcactatgaaaagaactgtgggaaaagtaaaagatgagtcaaacgtgtacctcattcttataaaggacttactgtctggtaggtaataaactatgtaagccatgtacagcacaagttaaggcatgctaaattgcagaagacaggtgtagataatgtacttagggaggcaaaaagagagaagttgtttttacataggaaatttgtgtttatccttatggaagaaggatcatttaagcttgaccttgaagaatgtataggatttggtaaatggatacaaaagaattaggggagaagtaatacacagaaatggaaaagtattgtaatgattcataaaaaggcagggcttcttgttgtctacactgcctcgggtataaagtgaagaagcaagataatgagggataaagctgaaaaggtaagtaggaaaccttatggagagctttgaatactattaaggattgatatgtgcccctcccaaaatttgtgttgaagtcttaacccccaccacctcaaaatgtgaccttatttggaaatgaggttgttgcaagtgtaattagttgagatcatatttcaatagggtgggctctaatacagtattactggtgttctgataaaaggggaaaatttgaacacagactcaaggagaatgccatgtgaagataaaggcagagtttaagattatgtttctatatgccaagaaatgacagagattgccagaaaactaccagaagttaggggagaggcattgaatacatttttcctcattcctcagaagaccaaccctgtcaataccttatctcagacttttgcctccagaactgtgagacaataaaattctattgtttcagcc

SEQ ID NO: 13509 - DNA, 2005 bp, Homo sapiens
atctaagaactaagctttgagtattatttaataatttctaataacactcattcctcaagtgatattagagattattcagtactcttgagagtgtcacaacacaaaatacgatgttgggttttcgaaatattttcaaagtgttctgtcttaatcacaaattcatatttttacacatttttacaatattgcctcagattatgttaaatttgggtcagtcttctctgaactttttctctcttggtttcttttcttccttcacagttttatctcacaaaaccatttttctaataagagacatcatgttggaaagatgttctagaaatgtgcataaatttcagtgcctcttgtaagcattaaactgatgatgaagaaagttcctgatttgagaaatgaatcaaagtaattttaatgaatttttagcttgtattagcttgagttagctggcattgattttttagtccttttgttacctttaagttgtcaatatatggtttttgttcatctccccattgtagtcccacttgctctttcctgggggttccattgttctagcagtggaggtgttatagtgtcgccactcgtctaatttgaccagtgttaagaattttctaatttaataatttaatagtgatctcaataccacaccctcatggaaggagaaaagcatactattatatctgggacctctcttttagacctaaaattaattaacatatctacttatatgttacttatacctaaagctgttattaagacaaaccaagattctctgcttttgcactgaaattaaacttgaaaggaattctcctcaaaggtcggatattaaataagtcccaggcagatttacatatttaatttaaaacattggctttatttcattttgtgatgagtgatgtatctgtgttaacaaaaaattgtataatcattaccaatactatttattatgctcaaatatatcttggctttgaccttatttcaacacattctaagaagccttgacaaagtaagtatattttagagctgaatcagtaagattctagagaaagcaaaacatagtagttcacaattttgcaacatagaaagtcacattttgaaaggctattttgaaattgatttaatagctattatagtttatgaatatcaaaatttgtataatttgcatctttactaatgtatgctagagctacaagagaccttaaggataatatatgaaattagctttccttattttatagataaggaaaaagaaattgtgaaaggtgaatttacctaattagtgaaagttacataactaattacaacagtctgtactatataatgcagaggacgattctccctgtaaaaggaactagaagctattactaaaaatatatatagacaaaattaaaagaaggaatgataagaataaatttaatttaccaaatattgttaattaaaattttagatacttaacatttatttaacttaaataaaagataactgtcagataaaactttattttactaatgagcagtgattttcttaggaattgatgaaggcttattggtatcaagaatttaaaccaaattaaaactgacagaggacatttagatacataataaaattcgagctacataagtatatggaaaataatgtaccttgattattatgaaatagagcatcttgaaattcagttttactctaaatgtacttttaatacttgcagattctaagattacattgtaaaattccaggttttcataatgttaaaataggaaagtagaatataaagtatcaacaagtgtagttatacattttgttttggatatttaatccttacttgggaaaaaatcagcatctaggtaaattattattttaataacaactcttaaattgccaacctctgagaggtgaaaagctatgtaaatagaaggaatggccagttcaaaagaatagtagatgtgatagtgccgtgaatgtattctactggaaatgaatgtaataatacattaaatttttaaaatct

SEQ ID NO: 13510 - DNA, 605 bp, Homo sapiens
cacagtctcctcccatcacttgtcacagaaaacatcagggtcttggaacaccagagatccacctaactgctcatcctaagaagggacttgttattgggttttggcagatgtcagatttttgttttctttctttcagcctgaattctaagcaacaacttcaggttgggggcctaaacttgttcctgcctccctcaccccaccccgccccacccccagccctggcccttggcttctctcacccctcccaaattaaatggactccagatgaaaatgccaaattgtcatagtgacaccagtggttcgtcagctcctgtgcattctcctctaagaactcacctccgttagcgcactgtgtcagcgggctatggacaaggaagaatagtggcagatgcagccagcgctggctagggctgggagggttttgctctcctatgcaatatttatgccttctcattcagaactgtaagatgatcgcgcagggcatcatgtcaccatgtcaggtccggaggggaggtattaagaatagatacgatattacaccatttcctataggagtatgtaaatgaacaggcttctaaaaggttgagacactggttttttttttt

SEQ ID NO: 13511 - DNA, 1972 bp, Homo sapiens
cgctcctgcctcgcctagtccactgggatcattcagcagagcagaggagaattgtacatttggggagctgatctctcggaagggttttaactgtcacctgtctgtgtgtgttcaagtatgtgtatttgtgtcttgtttgcatactgcataccaaaagtgcagttgtcatttgttcccaagtgagctggctttttttcttagaaattaaagattatgaaagccacaaactttttagtttttaacttcaaaggcttctttctctttaaaaaaaaattatttttaatatagagtcaaaaaattggatgtattattttgagcttctaattgctgccacttggagatgtccaagtaagaaggccttctttttacatgggatgaattgtgcacttctactgatgatgactacagcagaagtgatgttatacgtacaggcacttacactctctcacatattcacacgtgtgcacatctacaccagggctctgatctactctagatcgtttcctgacagagaagccttcttccaggccactaaggtagcatgttatccactgtggcactgcctaactccgtgtatcctcgggtggccaacttgctatctggtgggtgacttggggactagaaagaataaagccttttctaaatttgttatatagaggcaacagtctgaactctcctggccagctcacgaaagttaattatacattattctacaaatgcattctgttgagcactaaatattttagttggttttatgttaacattgtgttagcttttatttcctggatagtaactggtcaggatatattttaatgatatttgaaactaatcttagcattgaagccaccaatgtaattaatggtgtgcagttattttaaaaactacagatcatttcattattttcttaattttggtaattattaaagtctatttctgagatacgagagggtagtcacattaatagaagattcatgagtgagatataagtagacaatctttctactgttgttgctctttttgctttgctttgggttcttgaacaggttttttggatatatgcatgttgtcattttggactagttctcatgctactgcaaagatctattgctagctaatatatgagttaagaaagaaaattagaaaatctgttcattgaaattctgtttacacttgtcagaaataagcatttctttgtttaattaaggattgccagcttcagttaagacaagacctatcagtaaatgaatatatgttttgatttaacacatctttacaattaattcataatagggactcaggctcaaataactgttcctgtgtctagatttataatgaggacatcagggagcctttttaagctaaagagtgattatctttcacagtagaactagaaacaaaaccctaacttgtgaagttgctatttatttttccctgagtgaatataactgttatttggtctttaacagatatactgaggtttgagtttcactttctttaagtctcacattgctaacatgacattagctgtaagaaacaagatagctttacatttgaatgccatttactgatttctaatgattctctttttttgtaaacaactgtttcctttgattatgtcaacatgtttctgatgtggcatttttgttttaatcccaatcggttaggaaaatctagtcagtaagcgccatgagtattcttcccataactaaatgggtttctaatttaatttgaagggaataaaatttgtgtaagaaaaaagctgtttaacattaataaactatatttcttcttacacattgaactgtatcattttcatatccacttccccaccactgaaatatcttatttcacaatattttaactgatttttaatccaaaactaatttataagacagtatgtatagtaatagtagcttgagtgaatatgcaaaagtttaatttttatatatgtcatactatattttaaatagtt

SEQ ID NO: 13512 - DNA, 2513 bp, Homo sapiens
accttgacagttgaaatgagatcagtgtatcaaagtaaatctgcaaattccttctaaatttcatgtgcaaataattatatataaatatatttaaaaatgctatatatagtatatgccatagtttagaaagaatattaacctttctaaactaaatttaggtttgcagaaagtattaaacatttttaagctgaatgttgagacagtgcatccattttctttagttgaatatgtttgtattaattgtaaagccaagcttatcagttgactctctccagaataaataatcatctgtgtggcatacgttattggctttgtctgtaatactgccactaagtgattataattaagctgtcctgtttgcatcaaatgtaaagactgtgttcacaaccgtagtaaaatttggtttcattggaaatgaaacaaattctaaagtatgctttttcactagtccctttgattttgctatatcataacctcttggttcatatgctgagaaatttttcagaaagtccatttttgtttaaaattagaacttttcagaatgccaaatgaaggctaaaattttggccagaacattacaaaagttttaaatcgtagacgtaactccccctgaaataaagttaggtagtaaaatccttaatgaaaccagtggatgtgcttaacgtaaggttagtaaagcatacaaagaatctagtgtgctcagggcttggtacaatgagctgaattagatggccttatgaaactctttctaacctcttacccaacctgtttctccttggttaaaattatacttgaaggcccagaacactcatggcacatttgtttaatattgcttatagttagtttaaggtaattttgcttctacagtattttggaaggtctgaaaacttgcacagggtcatctttgtaattatataaccccaaactaagatgcacaatgtctccttcaggtgatcacacacagtggacgagtatgtgcaaacatggacataatagttcacttacaaatgtgatttgatgttaacactagagaatgatgactgtagaacatttgagcaagtaaaatagtaaagcacatagtgagtgtatgtccgtctaactggtacattgataatttagtttgggcacataaaaggaatatttatatggcttcccaaatgcagagttacatcttattcgtgtatttctctgagtatttatatcccgtctccttttttcattcttaaaaataaatgaattttcactgttggcacatatgaggcttaaatataaggaacataacacttgcattctaatttttgcatatattgtaaatgtgtctggtatttacagcaaaatactgtgtatccttttatgggtaaaacaaaagtgaacattgcatgcatgtaatgtgatgaatttgtaatttaggagttctttggggcttctgtgacttgggaaatgcttacattcaggccttaatgttgcattagctagcatgttttccctctgatgtatatagtcactgttgtataaactaatctttgcttgttttctactctgtgatctttccatatcatatttcattaatgatcagttagtgtcaaggagtcaaaacagattaaaattaatttcatgtgtatatggtggaaatttgtggctagtgtgatttttgtttgtttccttttaagtactgttgatcagttgtgacacttactggttaaacttacgttgctaaagatttctctataataagccacacattatatttagactatattaagggaccttggttttcttctagatagcagctgtcccaaagaaaatatttcttctttgtctgttaagatttagctattatctgccagttgttaagaggttttggttccaaactcaaccagcaatgttgagagctgaacttaagatagctgttgtactttttgctttccatctgttactgtccttcattcttggctccctactatctataaacagctgctgtgaagaagaaaagttgaataagagttggcttaaattttaaaaaagaaaaagaaaattgaggttttaggattttcatggtaacaagctctggtataagctaaggctggcaagttcagatactaaaatattatttgatcatatcttggatccttttgaaaaagttaagactatatgaaggtaaattagaaataagtatgaatattaataaaatagcatttatcttatttctctattttatgttgtgacttaacctaattttatttttttaacattttcttatttcttataatatgaatgctgatatttaaaggtagatctatgtggtattctttgtgtttcttaattgtttaactcttaagattatttgtgatctggatttatgtatttgttagatacatacgaattgttaaaatggaatgcaagtttttcaaaagcccaggtctaaatgtaatggttggtttattgttctataaccccagcccatcattttctgtgtaaatcataaacaataaacagaatatactcggtggtca

SEQ ID NO: 13513 - DNA, 1562 bp, Homo sapiens
gaggcaaaatacattcaaacttgtagtactacagatcaactctctcagctacatggcctgtaaaaatcattgattccacttttctgcatagccggtagaaaaatttgaaatgtttttggttcactagtacaatgtttggttttattcctaaagtaaatagctatctaagagagggcattttcacttttttttttttaaattttgagacaggctctcactctgttgcccatgctggagggcagtggtatgatcacagctcactgcagctttgatctgaccgctcaaggggttattctacctcagcctcctgaatagctgggaatacaggtgcacgccactatgcatggctaatttttgtttaattttttgtagagatgtggtcacactgtgttgcccaggctggtcttgaactcctggcctcaagtcattccccaccttagcctcccaaagtgttgggattataagcgtgagccaccatgcctggccccaatttaaaatgtggaattcagttggtgtccaagacttatcttgagactcttaaaagcatcagtctgtaactagaacaaatacagtcttagatttacccaagtgcctagatatcattttataatgattagaattgagtattgtgggtcccctaattctgtgggtgccttaagtgagaatttctaaatgattttcacattctaaatgactttgggttttgaactctccatctagtttacttctaaaatgggaacttgaggcaattcaggtatccaggcaaatctttgtatatatttttttgtgtacatgcacacatctcgaaatccatttccgtgtttaatgttagttgtttatgtgttagtattcctgtgtctactgttttgttgttgttaatatgggtaaagtgagccctgaaatacatgctaaacaagacatgaaatgcagaaaggtacatagtgtttcaagtgcatggtagtttgatctgtgttttactttattgtgttttcttgagtgtaaagaaagaataaatcaaagttcttcatacccattttgacaaagtggaacagtggagctgttttttgcttttgtttttatttattttttgccactggtgatgatagatttcaaaaaacaaaaggtggcagcagcacaatgttcatggtgaattatctcatagtatctagattgatcaagatctgacagaaggaatgcacaaaggattctatattcttaatgatttattaattaccaggatccttttctaaattgaatgtacttttgaattactaggtttcttctttttttttgttctgcaatagtgaaagaaaactcagtagtttagtttcagtttctcatggaaattggtaaatgttagttttgacttcatctattttttatttgtttttattagcgtagagtaggaagtctcatattctactgttctatctaggatggtgaaattccaaaggtgcctaacttgagtaagggatttgtgacaagatagtacacattactataagggctattatttcctgaactggatgtccctaaaagcaaataaactgcccactatctct

SEQ ID NO: 13514 - DNA, 1625 bp, Homo sapiens
tcgtaacacctccatttgtattacatatggtgtatgggtattgatgaggtcatggtatcatatatgggatttttttctgtgtaaatcatcaagtataagaagaaactatgggactctgagccttgctttagagaatttacagtggacaaataggtgtcatcaaaccagtttttaatcattctgactcaagtgaaaacgctcagaatttcacactgtgaatccacgtttacaacccttacaggtgggccttcaggcctggttcgctacaacaatgtcttccacaactcaaactcccaccgcgctcacacaaccggtccactcctgccttttcactcacacagctcccgactgcttcttgcagaggctgagagtcccccccccaccttttttttcatttagatgtaacaaacctagtagtttatgttcatcaattgtctgtatatctctatattttatccatgtactcttttgatgtatagaagtagtttgaaactcattgtttccttgtggtaagtgaccgagatgctgccacaggacctgagacactgatgaatggtgctattttggactttcaacatgctccttggcgaggtagctctgatggagttattttttatttccatgttctaagaaggtgttggtactctgtttccctgaatgttgttctctagactggattgacttgttttccttgtgtcttcagtgtggctttcttcctcagtgttgtaggttgagcgaatgctaccagagtgtgagagaccattgtctcgttggctggcgctcacggacatgcagtcacggtagcgggagcaatcacaaaactgtaatttacttaccaaatctcttcctttccgtagcctcgcctgcctgacttagagaaagaaaagcaataattttacaggcattttgaggtgtctctttgggttctttctgtttgaaaggatatttgtcgaaaaaaagagcaaaaccgttttaaataaactccccctggaaaaaaacccaaaacactggcatctgagtgggaatatgaaaatgacaccttttccaaatattaaattggaaaacaaggtctacaaaatcatgatacttttttaaaaggcagagcattcttttttcggcaattttgataagcaaggtgtagatttacatttttgtccttgctcccaacgaaatggataaacaaaaataaattaccatctactcatggaatgttgttgtgttagccagtctgaaagcccaccttaatttttatataactgtctttagctcttcttttgacagggcaggccttgttctgaactgtttcgcttctgactgttaaacaccgatgacgcatgcactgcacttcttcgttttcttcttgctcccccattggcctgagtttcttgtgcattactcctctccctccttcgttagaataggtatatcagctgtgtaaatagagcaagaaaacagtattctgcatctgtggcatttatgtagagttgcagttgtgtactgctgaaaatgcaggcttttgtaacagtgtgatctttactgatgcactcatgacaagtacccaatgtattttagctattttagtagtatttgttcaataaatacgcaagctgtaaggtaactgtctg

SEQ ID NO: 13515 - DNA, 2372 bp, Homo sapiens
tcctgatgaagggtcaagggtaggggtgggaaggttgtgtgcgccactggtacttttgaaactgtgaaataggtatcttaattcaaatctcagacctgcaagtatttcttcagcatgagaaaatacattatcttttgcttctttttttttttttttttgagatgttatcactctgtcgcccaggctggagtgcagcggcaccgtgtcagctcaccgcagcctccacttactgggttaagcgattctcctgtctcaggctcccgagcagctgggattacaggcgtgcaccacaacacccggctaattctttttgtatttttagtagagacagggctttgccatgttggaggctggtctcgaactcctgacctcaagtgatccgcctgcctcagcctcccaaagtgctgggattataggccatggtttaactacagcacagttgtgctgaaggacctttttgttttaactggaagaataagtattttgtaaaaattcacttgataccacattttcatttctggaacaggatagcaatcattcatttctatcttgtgtctgtgtccaccacaaccaagaccagatgcatctgatgaacattctggaattctgaactgcagctagcctgctgtgcaatagtacaagtgggaggacgtcttcccagggctgggctggttctcaactagtgcccagatgcaaaaggactgaggcatcactttcagactgcatatatttttattcatataaagttctttataatactttattttgtggtgttaagttccaccagttatttacaaatgatgtaaaaagctttaagtgttgttaatttctaaagtgttcttgcgttttcagaagtgtaagtggatctcagttgatctgtcaccccaaacctcaaatgatccatccaccctgcttggccatctaattcacctgctctccccagtgactattttgtacctttcctctccatagatgactttgcaatctacagggaaaatacttatgcaggacatcttatatctcccccttaccacgtacagttctctccacagctgccagcagccctaacctttttgtctctccacctgtgctttggatgctcttctcccagccttttcaggatctttgtctgtcctcctatattaatgtattcaattattctctcagctagatccttgctacttggttttaaatttaagactaagattaaacaaaactatctttcacaaccacaaaccccctcccgccaagcaactaagattttcctctcattctcagccagttttcttgcaagcagtatctttagtcattgccctcaattcatctaatccctatcttaagctatctctaacatggatctttccctctactccactaatatcaatcactgtgttacttaatcccagggagaatttttaggacattcttttgcttctttaatataatcctattttgctcctaccactgaccatcctttctggcttatcatgctttaccttgccattaattagtggagtttctcaaacttcagaccctaggccctcttcctctaccaccagcagatctcatttatacccatggccttaaggtttatttctgtagtttagactactgagtaatgtgctactgcaaaaagaccatttgggtttctcaaaggtaatttaaaaattcagctgtttaaatgctgctccccagctgaatctagggtcattatgctcatcagtgtgcaagctggacacctagcagttatggacacctccactattaccacgtctagttggctctgtcatccaactataaacgatcttatttcactaattttactagtccaagctggtctcttgtctagacaacaataagcaacctagttcaactaccttttcttgcaaatctgattttccaccatggatttatcttgctttaataaagccagagggagcctgaagtggtctggcttctttacctacctcttcagcctcattttgtaacactctcacctcccataatagccatcttacaagcctcagtaaggactcagttctaaaacagggcactgaagagggaaagcagccaaaactgtctcaaaagtaagtggactaacggtatcttttttctagcccaagcctctgtatatgtcattcccccagttttgccttgtgaaaaatatgacacatacctttagtctcaactctttctcaggtttccctaagaaaatcctatcacggaactcatctcatagtgaagttttacatttgtgatgacattccctccacttatctatgtttccaaagggaagaactgtgttgtgctcatcatcgtgttctcagctcctagtacagtgctttcaataaattttttgaatacctctatac

SEQ ID NO: 13516 - DNA, 2402 bp, Homo sapiens
accagactggatggaaacttcctgccctctctgtaccttcctactggagcttgatgttatattagggactgtggtataattattttaataatgttgccttggaaacatttttgagatattaaagattggaatgtgttgtaagtttctttgcttacttttactgtctatatatatagggagcactttaaacttaatgcagtgggcagtgtccacgtttttggaaaatgtattttgcctctgggtaggaaaagatgtatgttgctatcctgcaggaaatataaacttaaaataaaattatataccccacaggctgtgtactttactgggctctccctgcacgcattttctctgtagttacatttaggataatctttatggttctacttcctgtaatgtacaattttatataattctgaaatgtttttaatgtatttgtgcacatgtacatatggaaatgttactgtctgactacaacatgcatcatgctcatggggagggagcaggggaaggttgtatgtgtcatttataacttctgtacagtaagaccacctgccaaaagctggaggaaccattgtgctggtgtggtctactaaataatactttaggaaatacgtgattaatatgcaagtgaacaaagtgagaaatgaaatcgaatggagattggcctggttgtttccgtagtatatggcatatgaataccaggatagctttataaagcagttagttagttagttactcactctagtgataaatcgggaaatttacacacacacacacacacacacacacacacacacacacacagagtaacctgtaactctcaattccctgaaaaactagtaatactgtcttatctgctataaactttacatatttgtctattgtcaagatgctacaatggaaaccatttctggttttatcttcaaagcggagaaacatgttgatttagtcttctttcccaatcttcttttttaaaccagtttaaggaacttctgaagatttgtccacctctgattacatgtatgttcttgtttgtatcattagcaacaacatgctaatgacgacacctagctctaagagcaattctgggagaatgaaaggaagtataaagtaacccataatctgcttggcaatagttaagtcaatctatcttcagtttttctctggcctttaaggtcaaacacaagaggcttccctagtttacaagtcagagtcacttgtagtccatttaaatgccctcatccgtattctttgtgttgataagctgcacatgactacatagtaagtacagaacagtaaagttaaaacggatgtctccattgatctgccaaatcgttatagagagcaatttgtctggactagaaaatctgagttttacaccatactgttaagagtccttttgaattaaactcgactaaaacaagtgtataactaaactaacaagattaaatatccagccagtacagtattttttaaggcaaataaagatgattagctcaccttgagataacaatcaggtaagatcataacaatgtctcatgatgtaaaaaatattaaagatatcaatactaagtgacagtatcactctaatataatatggatcagagcatttattttggggaggaaaacagtggtgattaccggcattttattaaacttaaaactttgtagaaagcaaacaaaattgttcttgggagaaaatcaacttttagattaaaaaaattttaagtatctaggagtatttaaatccttttcccataaataaaagtacagttttcttggtggcagaatgaaaatcagcaacttctagcatatagactatataatcagattgacagcatatagaatatattatcagacaagatgaggaggtacaaaagttactattgctcataatgacttacaggctaaaattagttttaaaatactatattaaattctgaatgcaatttttttttgttcccttgagaccaaaatttaagttaactgttgctggcagtctaagtgtaaatgttaacagcaggagaagttaagaattgagcagttctgttgcatgatttcccaaatgaaatactgccttggctagagtttgaaaaactaattgagcctgtgcctggctagaaaacaagcgtttatttgaatgtgaatagtgtttcaaaggtatgtagttacagaattcctaccaaacagcttaaattcttcaagaaagaattcctgcagcagttattcccttacctgaaggcttcaatcatttggatcaacaactgctactctcgggaagactcctctactcacagctgaagaaaatgagcacacccttcacactgttatcacctatcctgaagatgtgatacactgaatggaaataaatagatgtaaataaaattgagttctcatttaac

SEQ ID NO: 13517 - DNA, 5203 bp, Homo sapiens
tcagcactcacgcaccggagttctgcccatgggaagtaaactgcagcaggccactggggacagaagggcccatgtacttgttgggaggaggaggaaagggaaggctggcaggtaggtcggcacttggacaatggagtgccccaactcaacccttggggcgactggccatggtgacattgtggactgtatccagaggtgcccgctcttccctcctgggcccacaacagcgtgtaaacacatgttctgtgcctgctcagcagagcctcgtttctgctttcagcactcactctccccctcctcttctggtctggcggctgtgcatcagtgggatcccagacatttgtttctgtaagattttccattgtatcctctttttggtagatgctgggctcatcttctagaatctcgtttctcctctttcctcctgcttcatgggaaaacagacctgtgtgtgcctccagcatttaaaaggactgctgatttgtttactacagcaaggctttggtttccaagtcccgggtctcaactttaagatagaggcggccataagaggtgatctctgggagttataggtcatgggaagagcgtagacaggtgttacttacagtcccagatacactaaagttacaaacagaccaccaccaggactgtgcctgaacaattttgtattgagagaataaaaacttccttcaatcttcattttggaggcagggctgggaagggagcgctctcttgattctgggatttctccctctcagtggagccttattaatatccaagacttagagctgggaatctttttgatacctgtagtggaactaaaattctgtcaggggtttcttcaagagctgagaaacattattagcacttcccgccccagggcactacataattgctgttctgctgaatcaaatctcttccacatgggtgcatttgtagctctggacctgtctctacctaaggacaagacactgaggagatactgaacattttgcaaaacttatcacgcctacttaagagtgctgtgtaacccccagttcaagacttagctcctgttgtcatgacggggacagagtgagggaatggtagttaaggcttcttttttgcccccagatacatggtgatggttagcatatggtgcttaaaaggttaaatttcaagcaaaatgcttacagggctaggcagtaccaaagtaactgaattatttcaggaaggtcttcaatcttaaaacaaattcattattctttttcagttttacctcttctctctcagttctacactgatacacttgaaggaccatttactgtttttttctgtagcaccagagaatccatccaaagttccctatgaaaaatgtgttccattgccatagctgactacaaattaaagttgaggaggtttctgcatagagtctttatgtccataagctacgggtaggtctattttcagagcatgatacaaattccacagccttctgttcgctggaggatactccagccaccagttcggagggcagacagctgtatcctaaaagcaaccactgagaggccagcagtgaggctgcccatctccaaaacgaaacaacagatcaactggtatcagtctagaaggaccagctttggggtgctttgatcactatgaaaatgttcactggtttctgtcaatcatttggtcaaagttagttcctgtgattttttttttttttttttgagatggagttttgctcgtcaccaggctgaagtgcagtggcgtgatcttggctcactgcaacctctgcctcctgagtagctggaattacaggtgcccgccaccatacccagctagtttttttgtatttttagtagagacagggtttcaccatgttggccaggctggtctcgaactcctgaccactgatccacccacctcggcctcccaaagtgctgggattacaggcatgagccaatgtgcctggccattcctgtgattttttagaatttttcacttttcatataaagttgcattttatcatgaggaaaatgttttggctgaaaaacatatgccccaaaaaaaaaaaaatcagttttcactatttttccagcttgcctagggaaacgtcctcccctgagcaaagtgggatgtgcatggctcttttttgtgattaagcaggcatcaaatgggcagttttcattttcactgacacagaaacatgtggctgaagcaggaataaaatcctgcctactgacttctgtctccattcttgctccaggtaaaatcagagaacctccccttctctgagaattcccccaggcagaggcggctccagctcctgttaagggccccagttttactcatgctacctgaccttagttttagtactttcaaatgtgatttgggtaaaaactattttgcaggcaaaagtgttaattttttataaatatgtataataaaaaagctataaaagtttttccttttcttgtatttttcaaatactccccaagacacaatccttgaaggtgaactaggtggcacttgattatgctaattgtgggagctactgaactaaactatactgattaaattaaatgcttgcaggttcctgggtaattttcctttgtgaataacctggcgctacctgaatttttctctaacaaacatctccaatgagggtaaacaatgatcttgattctaatttatatgaggttaaaaaccttcagatttcgtattttgaattgttctccctagtttcctcagtggttacccccttttagtcagtaaccatctctgttcagaattcagtctttggcttttgaagaaatgggcacagagccaaaggacccatttcacagttcccttggaatatatttcccattgttggactgaggcaaacaaaaccaactgtgcaaatcacaagcaaaagagacttctgtccgtagttgcgagtgccatcagtgtgagcttaccagctacaaaaatctgtcatggactggggaacagtatgattccttattgaaactttcatcctcatcggctggcttgtcagcgttctgaagttaatatccatgctgcctgaaacaaatgttatgtttaactagcacttaacttttaaaattgcttaattctcctttcagatgcatgcactaagtcttctctgagcctgcagcaatattttagagggacctcttctaagtcagagccttgacattctactccaaaaggaagtccaaattagagcccataggctttttcttaaaagctgttaaggagtagtaaagaaagttaccactctaaggaaaacatgaaactatctgaaagtcttctggttcctaactggatacagattagattattttaaatgagaaaaaagtgcaccgtagttacccgatcaagattggactgcctgtgtccctggcatgaattaaagaacctccatagttgcttgttcccttctgaaggtgtttcctatggcccacgagaattataaagcaatcactttttaagtctatcagtcaaccttaatagctctcaagagtttcgattatcaagctttaaagtgataacatatcaagatgactattaaaaaataaacatctctgaaagtgtcctttcctccataaggctttaaacaatttgcaaattcttaattgggagtatgtcccaatcattctattaaactatttacagctctacctacttctagattcagcaaacagagctactagttagagtattttgagagccaaaatagtaagagacttctgtaatggttgagatttctgcactgaccttaattagggtaccgccatagggctaccaaagtttttagtgagggctggggaggtggagcataagtaacattttttttctgcagaaggtgatggctttgtagaacactataaaatttttcaggaaaacatacagcaaattttcttatccagtgggaacagcctatttgacaaggaatgatatacaagtttgattcacctttgagcactcttatagagtttacagaagaggcgtaactggttacaaaacaaaagttacgccttcactatccagttcttaaagtttatccacatcctacaaatcttatgttcatgtaggtcaggttaaagtaagctccaaacttgtggccttcagaagcatctcctgtttaacacacctgaaattactctaacttaatacatttgtattctctaagaaataatgctgactgctgtcaccacagcatcactgatctctcagtggctgttaaaatataaacaagtggaaaaaaagtatacaagttgatagcagctgttcatgtattcttgttttgctaatacctgtgtagagaaagacagtttcacatgcagatcaccatacatttttgcttaaaggttacactgggtaaactgtttgtttatcacattacatctgggtgagattttgcatgtgaccaagaggaagaaatcattcagtcccggaaatagcaactgctatgtaaaaccacatccttgactagtacttcatctttccacagtcatccatctgctaatcaggtgaaatatcagctcagcagaacaaagcaagttatacacaaatttcccccacattcacactgatgccgtacttagtaattctggttctaccattcccttttgcactttttgcaagtcaaattcatgtggaaaaatgttctgtttgtagaactcatagtattcacttatagtgctcatgtcaggaatggcaagtgagtaagagcccctgataatctgcttttgttagaacgtaatgcaaagataataaaacatgtccacttcttttctagttctaatcagtttttagacatcaagatttatttactttgcatgagatttgtttcctattatttgaatatgtgctatacacttgaattagaaaaacctgcttgaatgtattgtcagttattaaagcacatgtgactaagtttgcatttgtcagtattgttctactgtttgtactgaaagtctcattttaaaattgctacttaacactgtactataccttgtaattttttagattctccacttgtattctttaaatgtttccagatgcctttagttttagctgctgtaaaatagctactttgcgttatttgatatagaattgttttttaaaaactccatttatttatacagagacatttataatattttacaaacattcttatattctgaataaatatttctaattccacagtgta

SEQ ID NO: 13518 - DNA, 758 bp, Homo sapiens
gcttcttgcggcccagggaatgagatggagctcacggcttaaagcccaagctctgaagaagtcaagggtggagccagagaaggaaggcagtcccagatgagcctctattttcatcagcttcttctctctccccttgaacttggtaacccacatggttctcccgtggcccctaggtggatgaggccaaagtcaaatccaaggctgagacagtcgtgcgactcctactcccccagagcgtgacccggagcaggtgctggacacagagcctgtctcagcagagggtccccactggccgcaacggctcagtgacagcaagagcaggaagagcagcaggaaggcaccgctgtccaccttgggcaccatttatcctcctttcatcgtccccggggcagttgcgtgaccctgctgggaggccagaccgggccagactgagggtcaggggaccaggctgggttgggggttgggtggggctggacggggacgaggcgcggagaggcggcgggaaagagcttcggctgggccacgggctcgcgggcactctcggcggcagcctcgggggctccgactccagctctgggcaagatccataaacttttaaagaagcctcaaaacatacttttaaagcattaagctttaaagtgctagaaatcttgtgccccatatgtgcttctttcagtattatcctagatcctcaggagtagcatggcaactggagaaaatgggaggaaagacaagaagaaatagaagctgatttaaca

SEQ ID NO: 13519 - DNA, 1733 bp, Homo sapiens
ttgaaacatctgatgtgactcaggataaaaactgtaaacaaagcaatgccttagcgttaaccttcgtaactaattacatatcgctgagtgttctgtcaccccacttgtgtttgagtatgattcttcttgaaatacagaaaatctaaacagccttgtgtcttcatgtcgttgttctgcctttcacaaatgatgaaagtgaagatgttctttccaagttaatactgaagtggttaactttgcaactggactgtcttttactttatgtacaggatatctaatttatttctgtcagctggtgttgctgacactttccttatggtgggggggatacaaaagtatttattatgattctcttctgtttgacttttcatttttatatcatgtttatgtcctaagagaagatattttttaaatgccttatggataggaattagtactaagcaatgtgtcttgcatttgttttcaataggaaaacaaagttctagataggttaaaagaaaaacaccataaaagtggtagtatatttaagtggaaaattatgtattttaaagtgtgtaactattaaaaatatattgcctggaaaaggaatactactgttttgttttgttaagaccacaaactgtattgctaaggacattttaagagtctgcttagccataacactcatttaacagcatgggtagtaagcatggtttcttgcagaaaacacaaagttctcagctaacacattaaacttctcactttatatactttttttcagagaaatttatctttagtttttcttattctgtgaaaatatttgttcttatgtcaaagaattatttttcagatatattggtaaagatggactgatattaaaagtcatatttattcttttacccccttactgtgttttgtgattttcatttttggcccaattattacatatcaggttttcctgatttatatttacatgtttgaaaagttcattatatattttagtagcgttacatatattataaatttttgtaacatttaaatgttcacttatgtggcattttctgtttctcattggtaataagcatttctaatataagcaagtaaaaatacaaatttaattacttagaaatgataactaagatcacaatgactgtgtaccctttaaaatatcttttaatttgaggaattacattctatctaaattgtgtgtctgtttttgaaaggtgttgctttcaagtaggtggtttttatttaaagtacttatttttttgaggttaaaatattcagaaactacttttatgcattgtagcagtaatcatttatggaatgcttttgacatgttttaacagggtaaccaaaacttttaggcctgttttttttggttgtccttgttgttatatttttaatggaaatctgttactcaggctggtagcattaaattagctttttaccctcaactcaagtagcaaatatcatggagaacttcagtgtttagcaggctgttaatttcccatctatgaatagcactttatgatgtaggctaaactaagcaaataatgcagcgttatgtggatcattatgcaataaagctgctaaagtcacatttgtggttgatactcaagccttgtacaagcacatatgatgtagacatttttaaatgtgaagctttaacaggaataggatagctgtttcaaaccttgtgcaattgtaaataaattgtttagctgtgtttctttcatttttaataaaaaatt

SEQ ID NO: 13520 - DNA, 210 bp, Homo sapiens
gacaattcctctctctgttttgtgggggttggagggggagagttggtctggagtaggctcctaaccatttcaacgtaagcttatttcctaccactctcctcaggctcaaatcctgccccgccccgcagccccagcactagcccatttaagacccctgttttgtgtgtgattatacaggatttgaacactgaatattaaccatggaatagc

SEQ ID NO: 13521 - DNA, 522 bp, Homo sapiens
ctgattttagattgggagggtggggggatttgtagcataactgtagctcaagtttaaaagccatgtataaccaagtgtgctctttttttaaaaggtagagtcttacaatcaaatctcctgctgatttcactttgggatatggtcttgagccagtaatctttatactgggtttcaagaaaatctttgttgaagtttgaaccacaactttgtcgtggttcttaaatgtttatactgtatttctaagaagttgtttgaggcaaattaactgtatgtgtgtaggttatctttttaaaaactcttcagtgcaaattgtatcttattataaaatggacacaaattttcaagtttacacttcatatagcattgataatcttcaggtgaacacttagtgatcatttaaaaagctcactgctgatcgtagaaaatttgctttaattaattaagtatctgggattattctttgaaaacagatgaccataattttttttaaagaagagtgacttattttgtcttattcttaag

SEQ ID NO: 13522 - DNA, 688 bp, Homo sapiens
gataatcaaattgctactcagttgataagaatgttaacatactaagttataccagggagagagtgactaaccacattctttaaatatcaatagcttagtcagattgattattgtgctatattgtgaattgagaggtattaagtttcatgaggctttgtcattagtattcctgcttctaccaagaaggtatttaatatatgtgttggcctattattgatgtaaaagttatttaaataagttaatgttagaaacattattcaatttaaatactgaaaacatttcaaagagattttgtttttgttatagcatagcaaagtaaattggaacaatcatacaatgacattttttaaaccaaaattttgtaacttttataacttggagttaagttagcttgagtaacaaaaaggtaaagtggtttttgtttagagttacgaaatgttagtactttttctatgtttaacaaattggcagtttgtcagttatgacatttttgtgtaataaatattttgtatttgtttgaagcatgctttgttttatatagagaatatttattttaaaaatatgtctctcatataccctattaattgtattattgatataatctttttggtttccttcagcaattccaaattttccttcagcctttctggatttcacagatttataaaatctttgtgtctttcacatc

SEQ ID NO: 13523 - DNA, 3397 bp, Homo sapiens
taacttgactgtattttagcactgttaaagcacgaattggtaacagttgtttcataaatgagcactgttgtgataacaccagcattcatttagcttgattgatatcattgtgctctcattggctaaagcattataagcatcaaatttacaacattggtttcccaatatttaatataaatataccatataatatattgtttgtgaattattgagaaatgtaacattcaaatttctaaaattgtctgccaaaggcttattcattctggttttgtttgctgttgggtgtttggggcagagttaaccatttctccatggtgtctttatactttactggtttgtgaattttatacaattgaaagtctttttttcttgcttctttcttctcttctcaagtttcccccctgtttctactttattgtttgtcctaaccatttctactacagttttttccttatggacccatactaggttgtacaaaccttaaggactcgttaccatttgcagttaccataagtgctttatcttctctatgcacaggcttaaacttgactgttgtatgttagcatattttctatgcagcagttggtcaacttcaactcaaaacactgttttcttatgtttgttacaaacttaattttttgaaagtactctgtagcatgacaatttttagagctgcaggttagctattatagctcaagcttttttgtttgtttttttcttcactttcttcacatctgaggtttctttctctaatccactgaaattattgtgtgctaaatttgggaaacagatctattctaactcattaacccagttgaaatttaggtctgtcatcttaatatatcatgcagtaaaaggaagaatctttttaaagtgacccacctttcatgctgctccagcattgtcctgcttgtgctgatggtgtgattaggtgtagagaatttgcttaaatttaacttcaaagttcatcacacagcttaatgagtcacattgaaatactcagtaattgaactgcaaatcacttttagttacaaaaagagctaaagcatgtcagtggcatgatgcttgccaagccagatctaggcatctaggataattaaggtattttagtatgcaatttactgccataatatcaaaggtcagtaacagtgttctttctttcttcaagcttatgtatacctttaaagataacttgcatgaattactttgattactttggtctcaattatttgtcaccccagttaaacatgaaaggttgcagtgcttcctgttcccttactggaagttagctttttcttttctctttcttcctttctttctctcactctttctttctctttctctttctctctctctctctctctcactcactcactcacagatttgctaatgccacagaaagggctcttttaacttaagataagtgaaaagtactaaaaaagattcaggtaattatcattcagcactttattgtaattcagaataaaatttatgatggcatatttgccctgcaaatgtcttaatgaagttgttctcaataaaaagctccttattgatttgagaaaaactcagtttacctgtgagttcaatgagctggatcactcacttggatttttgtgttgacattttattctgagggttgatgttacactatttaaggagtcatcaatgcaaacagtcacattaggtatgtcatcatctttagtcagtaaaaaccttgtaatgaggagtagtaaataaacaagagaacattagactttttggttaaataattgagatttaatttttaaaagatattcttactcatttgctaggttgtaaatttgatttcaccattaagaaaaggtaaattggatataaatgaacgatctccaactttttgatgaagaggttttactatctctcactgtgggaaaatttgatgaaatatttgaactgtcacatatattaagaatactttatgatttagaccaatattctagaaatatcaaatgtcagtatcttgaaatcatctgcctctaactttgtggtataagaattatatatgaataagctattatttttataaaggaaaactttgccattatagtaaattacattagttgatctcgataatttgaggataacagatgacaattgaatttttaattgatttagtatttcctcctcctctttgggggctgggtgggagggcttacatgctcttatagtgaggcacatctcactgttttgcagcagaatttgaattgtgcaactcctgtgtaaagtaaggatttctttaaatagcatttttgcaccagtaaaaatagataacttagaactcagtcttgataactgaaatgacttatttcacttagaatacatttctcccttctctgccatctccacaaatgccattgggaggttttgaaaaaccagttaatttaatagctcaaaattgtccctgattttattttcttttagggaaaattgtttcataaatgtgacactgataaagcctttgtcagaaagtattctcacaattatgagatggattataataaaatacttaaatttgtgttattttttgaaccacagatgagtaaatttaataatgaaccaattacactcttgagtctaactaaactgtacactgtagcacggtgttattgactggagttaatgtgtaagttattaacatttctatgaaaatgcccttttggggcctcctgaattttagatgttccactgttttgatcatttctataaaagaaatggtcattttacttagatgccagtctactttataaagacaaatggattatagacttaaaaatagtcatttttcttattcataaatctgacaggcataaacccaaatcaaagataatttggtgcccattatgaatttgaagttaagtgatagctcacttgtaaagtgactaccttaatgtgtatagagaccccagtctactattatttgggaaaattgtttaggttatatgggaaaagtagctctttaaaaatcatattgcccaacagaaaccttaggctgaatttacaggtatgataatttttgtaattaattttcttagaattgtgcaggctggatgagataatgacatactcttttacactgtaacagcagcattattgcctagaactttaaccattttagagttagatactaaggaaacaaactaattggtcatcatcattttctttttttctttttcttttttttttttttgcccttatgtgtcactaaacaactagtttctctcccttttgtcagttcccattgtgtattttttcaaaagaagtactgtattcggatgccagctaataaattgtcacacaatggaaaatcatatgccacaacattcattgtaaggtttaataaaattaaatttgcacc

SEQ ID NO: 13524 - DNA, 2703 bp, Homo sapiens
ctacgttttgagaattgatgcaccattgccactgtaatattgctgtcctctaattaattttaggtactgaagaacttaatattggcaacatttttaaatccttactcatacacttgttgggagggatgtacaatgcatattcccaaactgtggaaaggacacctttttttatttgtaaaggtggaaaaactttggaactcattttgggctattcatgttaaatattcaacaccaatgatctactctgttcgcagttgtttatatctactcttcgcacactaaactttggtattttgattccttttaaccatttaagactacttttcttataggtagttgatattttaaaaactttagatttaatgtctacatgtgttagggaggaagaaaattgccttttaattgttaataagaaaaccaaatgtgatgaactgtagcccaagccctattctgcactgttcagttttatggaggaaaaataaatctaccataggaatgttagttaatattgatatatcatggtaaaattgatttctcactagcttagaaaatgtcagacttttgtttttggggtttataatttaaaccagctatgctattttttcataaaggcatttgtagtacacagaaaacagtagtttcagtagtgtaaaagagtttatacaggccttaaatatcagactttgtaacaggtagaaatattacagaataatttaagacactacaatgggggcaaatgaaataggaaaatttttagtgagttacacgtactcattacattttcagtgcttttacaaggaaaaaaggtgatatgtttaattttaaaattttaattggctagctcttgcccttatatgactttaatgtctgtgagtcattcccagcttaaattaacaattgttagtattagtctcacacataagtgccatacattttatcctcatggatgtgatgcactgaaaagttagttgctctccttttttcttttttttgtcgtgcatattttatttctgtagtttctggttagctaccctaaagtgatttaaaaatttagaatgctttgtgtttcctatttggtaatcttcattgacttttctttagttaatgagtattaaatagtgcatattctgtagactatagggtttacattgtgttgcatcttataacttgtatagattgagctgattgaaataagattttgttccaagtattatctgatagaatacaagatgattcaaaattatatagatatttaaagcttttctgctgttttttttttttttaattgcaactgcttttctgccgtgcctctcttccctacccaaaagtgatgagttctgaacaagacaagactgtcatattgtagagactttggtatgtgataccatagaatactgattggatagccatcctagtcacttaccaatactgactagaagttaactcttaattctaagctatcttaaaatgcatatatatacttcttgcatggaagagcaaaacaaattcaagttgtcatgcctgataatttcagatgccaccgtatagcaaagggtgaacatgttttcaaccctttaactttttacggtgtttgaagaccagctactccttaatatttatcaatggattaagaagtttaagattttgcagatttatcaatttgggtttttgtactgaagttgtcttgcggctttgcaagtgtccctttatatttaaatttgaaagttgtaagcactgatgttaatgtgattgatcagcatgggcatatgtaaaatgtccttttctggttgcctctctatgctattgtgttcagatacttacaccataattaaacagtaagttatagacttgctgagtttggcatagatagtgcactcatttaatctgtgcctctcaaaacttcagaatattagcatattaccacaaataatttttggtgaaactattgagatattaaaatttttgaaatcactactgttacctgttatagaaaatagtgttggcttagtctagtctctgtgtaactggttacattttgatggttgtctatactcaactggatatgtgtatgtaaattagaaaatacatacctatccagacataaatgctaagtaacatttttttcttcctccaactacataatttgtagctcatcatttttccttaatcctttcctaacttgttgcagcagtttgaatttcccagatatttatgtttgaacataatggctcagaatacatatttgaacatcatagttgtatatatttttaaagtagaataaataatggaaagcaacttgatatacaagtttatactaaaatttcaactgtgtgaagatacattttaaggcattactttgctaataatctacacattcttttttctattaaataaacaaatggtttgtggttcacagctttcatccaagcttggtgataatcaattttgaaaatacagtggactgaaaagcaaatttattctttcgaagatttcatttaaatctctgtactatgcatttttgtttcagtttgtaaatgtgtaacatttatagttaaataggacaaagcaggccctatgactattgttttcaaaaaattaatatataaataattcagaggggtttttcatttacttttgaaaagaaatttctttaacaggattgcacctatcaatttcttgtagaataaaaaaaaatctttcaac

SEQ ID NO: 13525 - DNA, 1898 bp, Homo sapiens
gatgaaacatataacatgtggctggctcttgttttgtaaaccaaatgattaatcttcacttgagaaagcagtttctaggaaatgtttaaataaaagagagtcttcaccttaaagaaacctatggagcacaagaaagataaatttctgcaggacagcctataaaattgtggtactttttgatgtttcagtaaacttgacattgtcagagtttcaaggacttttctttcacaattttcctagttcatggatatgaaaaaggaattctcaatccatattccttgtattgaaccttgaacaaaaacttgtatgacagacatttttaaaaatgtgacaacacttttattctctgaattttgatctcaaaggacacagaaaaaaaatggccccaggagatctgatcacacttcctcctgaggcacctctcatggatgttgcaataagcattcgggtactatcacccagaaatatgaattgccagaatagaacatttagcatgttaagcgttgatgcatataaaatcagaaatagatgtgagaatggtggaactttttaaaagaacccagtcaaatgtattttctgctgaaatctgcatatttggaggcatttcccaccaccgattcacagcccatttgatagtgtggtagttagggacttcgtggagtggtgttcagacgtcccctggggcttaaatctcttcatattagtcatcatttgtaactatggctttatttgcagagcttctaaaaggcgtataactgtgtgagtggccagatattcactttttaaatcaaaaacctctcttatggaagctttaaaagtttccgtcacacacaattctcttctcaggaagtatttctcatttaggtcttcaaagtagcctgactgtgtgcatgtgtgtgtgtgataggttatttataaagactttggatagaaggagatgtattttattacctcctattctagagccccatgctcctaacaagccagagaggccccaaacaggattgtttctttcctccacagcccttctgcccatctgagattgagggagcatcgtccacttgagatcagggatggggtggagaatgggtcatgtcatgtaatgagaaaagccctcttcgggatcatgagacttggttctagtccaatttctgccactgaggatgaatgtaactgtgggcaaactatttaccctcctttatctgtgaaatgaaagggttgaattgatggatctctaaaggcttttgtcctctatgaggatgtgaaaaactagggaccacaaaagggaacaagcaaaaaagtttggattcgataaagtgatatgtaatagttgcagaaggctttatatatgcttataatgaaaagatattttttgtatattgacagcataatttatttttaatgctgtcattacacttaaagtcacaggaaaaaaatatacatgcttactcaggctttcttaaaaataaatttttatagagatccttgagtaaagacattttgcttaatttcttttttcttattccccacttgtatatcccctaccagtaccgggatctgcacacatctttttgcagttacctcttcatagccatgaaccaaaacgttctatgaggagcatgcaagtaagtcaagcctcctattctgttagtacttattagaggaggagatggttttcattgcatagtgacattttcttagccttaacgttctgatagtagcttactactcacttctctttttcagttttcataataagtattcatttttttgccataatgcttcctgtaaagccaattttatatactaataaaacatgaactgcccactcttcatgcctgccaaacttggggcaattgatgctaaatggtatttttaaaataaatgtttttattctt

SEQ ID NO: 13526 - DNA, 698 bp, Homo sapiens
ggggcaccaaaccctctgaggttttactttaaggttcgctgtatgtttgccttggacaaaaaggctacctaccacgtgctatccagtaatatacttaaataagccaatacttagatctactgtaaggcagatgctaattataaggcattaagtaagcaaatagtgccctcagctactgcagaagaaaagtcccactgaggaaaagaaagtcttgtgatttttaaaggcaagttttcaagtgctctcatagttctatcctctaattccattaaatccatactaggagcgtcagtgagggttttcatagcttttggaaatactttggtctctgaactgtaattagcaagaagtaaaaacagaaacgtcaaacgtcaaatgtttgctttgttacctggaggactaaatgtagatgtctttagtatactttgtatgttcttaatattggaagataattttgtgaatctgtagattttattttttcagtcttaccttacaaatttcttttctatgaataatagaggaacttacggcactctgccatttgttaatgaaaggaagtgcagaggatttagaaaagtacatgatccccagaccacaacaaaccaaaacataaactcatgtctgtgtcccatggtcatagtcaaagattttgtactgctaaaattaccaaataatttaaataaagtggatttgaacac

SEQ ID NO: 13527 - DNA, 1683 bp, Homo sapiens
accacaaagaaaatcaacttgctactacatgaaatggattttcacggaagagacagctctgaaaagttttgatgcttgtggcaagagacttaacagatgtgatctatttagtatgtgtctactctatgtttatgcataagaaaacatccatagcatgaatggactcagaaaaatgtgatttgtattaatgcaccagtcatcataaaagatggtcatgatagtacacccattgctcctacttgttactattattgctgcagatctgcctccaaggttgaaaaggagactaagactgtataaacatcttcattgtcagttctcaaaatgactgaaattgttttcatggtaaaagttaatatactaaagggttcctttttttttaatgtttacatttatctctatgtttacctttttagtcacattgacctgctggctgaatacctcaaatagtccagtagagggcagtccaccaggcagaaaaggttaggcgttttggtttcacatctttgctggggaataataggggaaatggctgtttttgctaatttttagctaatatctagccaggagagcaagcacataggacagactgaaagactgtaattttacacaatacacatggcttaattattttattgggatacagaaaaatataaattctggacaaataagtcatatacctgttttcagtcctaacatttaaggattcttgagtcccaatcacataactgtggtgttactctgtcatttatatggtgtcaaaagcacttgatgagtaaacccagtagcatctttttgagtgtttcataatgcattttccaacttgaaaacaataattgaaaaatagccttattgtatattttatgccatgactaaaagtgccatttttactgatgctattagactgataatttcttgaagtgaaatttaacctttttttctctttagtattatgtttataatgccatatttttagaaagcattccagatcaggcatggtggcttacacctgtaatcccagcactttggaaggctgaggtgtggggattgcgtgaagccacaagtttgagaccagcctggttagcaaggcaagatccccaactctacaaaaaaataaaaattaaaaaaaaattattaggctgcagaggcaagaggatcccctgagcccagaagttcaagggtatagtgagtcgtgattgtaccactgcattcctgctgagcaacagagtgagaccccatctcaaaaaagaaaaaaaaaggcattctagtaaatcgaatgtaatgtgaatggaatttcaaaacaggatctaagatggtatgtagtagaattcaaagtaatatcattttaaagttaaatgagtatggaaaaggtctgttctctagttttgtccagttcagtttactgaaggaatatatttaattatattcatatatttaacaaataaaaatatgttgaattttcgtattgtttgccactgagggttcagatgatagacctcaaaaaatcgaaaatactggttgaaatttgtagcatccatttagttattctttttgacctaaataacttaatagtttattaaatctaaggttagctaaatatgtagctaaccttatttgttttctttcctaacaactctgaagaatacataggactttgcacttttttttttttttttttttttt

SEQ ID NO: 13528 - DNA, 3058 bp, Homo sapiens
tcccagggggagggggtcaggtgtcgaaccagcaggcaaggcgaggtgcccgctcagctcagcaaggttctcaactgcctcgagtacccaccagaccaagaaggcctgcggcagagccgaggacgctgggtcctcctctctgggacacaggggtactcacgaaaactgggccgcgtggtttggtgaaggtttgcaacggcggggactcaccttcattctcttccttcactttcccccacaccctacaacaggtcggacccacaaaagacttcagttatcatcacaaacatgagccaaaagcacatacctaccccatcccccacccccacacacacacacacacacacatgcacacaacacatacacacacacgcacagaggtgaacagaaactgaaacattttgtccacaacttcacgggacgtggccagactgggtttgcgttccaacctgcaaaacacaaatacattttttaaaatcaagaaaatttaaaaagacaaaaaaaaaagaattcattgataattctaactcagactttaacaatggcagaagtttactatgcgcaaatactgtgaaatgcccgccagtgttacagctttctgttgcagcagataaatgccatgttgggcaactatgtcatagatttctgctcctcctctcttttaatgaaataacgtgaccgttaacgcaagtaactctttatttattgttcaccctttttttccttaaggaaaggactcttccaaatatcatcctatgaacagctcttcagaaagcccattgaaagttaaactatttaacgtgaaatccattaactggaataattgagtttctttatttttacaataaattcactgagtaaataagttggagctggaattctgagctttgtgtttggactgtctggtctgtagctaaaggaaaaagttaggaggggaatatttatttaaatctatcagttcattgcctggtcaggtctctggcctataaacatgcaaaaaaactaattcatgttaaagtccttccagatcctaatttctaaagcaatcaggagagaaagcttttagaatggcacatcatatctcattgatgccaacatggttttgtccatggttctgactttctgtgaaggcaccagcttgcaatatgccatcccatttcaccttgcatgtgagacagcaaacaaaatccacaaatggtgtgaactaatatgctggctgctaccttgcataaattaatgatttgatcacacgggttcttcgtggggttacatctgtgaatagcctgttttccacatgtaaatttgtgccttacaccttgagttgtgtacacttgtaaactctttatgatcaactgttcccccttttgaaataagtgcagatatttatttaaccctcccttccccaccctctgccccacttccagccctctgaaagattggagtcaagcagatggaagaatgcagtggtgatagttgtcatgcgacagcctgagaacgctgggcagcaccacaccctccaattcacactgccttctagttgtgccaactggaaccaccctttggctgtgctgcgaagcatggaccccagtgttgttgtgggtgtgtcaaatcccctttcatcctcaagagctccctgcttcccttagattatttcaatacggtgatatccttatttgctagcagaaaagggactaacgtcccattcctcttttctgctgcgtccactggctagagagcaggcggtgcgcggttgggcagacacctgggaggagtctccaagccatgtgcacagcacacacgtgcagtgcacacaaagaaatgacatggaaatagatgcaggcaggctggtccctgctgtgattaacgagtaactccaagtacaaggccgaccacaatggatgctgcaaaaacgttgactggggcaaaggattttttattttattttttattttgttaattatgtttttaggggatgggaggtggtgtgtgtttttctcctcttggttttcatttgctcaagcacacaaaagggacttttgtttactctatcatgaacaaaggaactgtccacatactgtaaaccatgagcagtgttgttgttgtttttttaaacagtatatttggtggtctctttgtctgcttttatttccagttcgatcttctgggtttagttttgtctttaaaaagaattcaaaaaaagactgacaatgacagttttgagttggatagtgaaaaagtggagcctccataatcagtgtggttgccttcagacctgagtacttagctgagggtgggtgagagccctttgttccaaaagtccattagttttgctgttgtttaggagtaggtggttgttgttgtttttactttttttttttttggcttttgtaatggaatccatgttcacatcctgtgaactctgtctcctgaaaccctgaagtatttcctagaacctgaaatattgttttcttccttgaattttctctagaaatgcagaaattaggaaggtgatgggtctgtatccccctgcccccttctttcccatgcttgactcccgagagtactggcagtgcagcacccatcattgacgtaagcggctgtcttgtccagtgtttgtaggcatcactgcctcagctgttaaggagacctgtgtcaaaacttacatccacattcctacacccccacaacccatcacttctggtgttaaccctaaaatacccacatgtattgagctggtcttctgcatttaagtatttctccccagtttttttccccactgtgtgtggggggagggtccataaacccgagtgtgcctttgctttccacccttgctagacactggtagatgcaacaaactcagatttatatttgttgtaaagttgtaaaaatattgtgatgtcaccaattttccttccatctccacatcccctaacatctgattcacgacttaatgtatgttgtaagaaaagaaaaaagaaaagaaaaaaagggaaaaaagaaaagcaaggaaaaggctctttattacttaaaagtaataaaacctgactgttctatatta

SEQ ID NO: 13529 - DNA, 1376 bp, Homo sapiens
tacagttattcttttggtgctagcttaactgtcttcatctaacaataccaaattaagttttcatatagttaaggtctgtaggtttttgacttgctaaagaaggagaattgcatactaatcttacccagaagaaggaagtaaaccaaatattcataaatacaaataaacagaaattcactggctcactgaaaagcaggatttcctactgtacttgtttttaaaaatgtgcctctaatacatgttttcaaacccaaatttaaaatatgatttgttgttgtgataggttagaagttcttacttgtaaaatagaagaaaattgttgtagtggattggaacggtgttgtgtccattaatgtttataaataattaggtgtagaccaataatataagattcctacatcagtttgcagtcctgactttacagtttgaaataagtagcaaaagaaaattatgataatcaagtaatttattattttgtaaaatagtataaaggaataaggaaattttaagtattgtttaggggccaaatttgaactcagctaatatgatttaagcgctctattaattgccctgatttttaaagaggtgcatgtaattttgaaatagcacacattttcatttgtaatcactctggataaatttgtatttttcagtgttcattgaacaggcttattgactctggtaaacttattttattgatgttttcatatggaaaataataagtggaatatgatacaattgttattttcagaacatatttctttagggctatttaatataacctttttaacgagcaaaaactttccatttgagagaaaaaattcttcctgctctgtgggaaaatatttgctgagattttgtatagaataagagacatgtatgtaacatatatgtatattcagcacaagtctactgcaattatgtacacattttggcaggaagaggggattttgtttagtctttgtttatgagttctagagtttcctgtatctagtgttaagttgtaaggaaaaactaaacatgccatttaaaggtaaacttggtaactatttatagagcatacaccaatgattatttctcacagttttcatgatcatttgtttattatttacttggattagactcattaaaaggtataatgctggtcacaattagaatgctaatatttggggaaactatgcagaaaatattttaaaatattaaaagagtgctggcttctattgttgatttatttttggatttaaaaacaaattagggctgggcccattagctcacacctgtaatcccagcactttgggaggctgagatgtgagaattgcttgagcccaggagtttgagaccagcctgggcaatatggtgagactccatctccatac

SEQ ID NO: 13530 - DNA, 418 bp, Homo sapiens
aaggcaaagcaaaactcccaatggataaatcagtgcctggtgttctgaagtgggaaaaaatagactaacttcagtaggatttatgtattttgaaaaagagaacagaaaacaacaaaagaatttttgtttggactgttttcaataacaaagcacataactggattttgaacgcttaagtcatcattacttgggaaatttttaatgtttattatttacatcactttgtgaattaacacagtgtttcaattctgtaattacatatttgactctttcaaagaaatccaaatttctcatgttccttttgaaattgtagtgcaaaatggtcagtattatctaaatgaatgagccaaaatgactttgaactgaaacttttctaaagtgctggaactttagtgaaacataataataatgggtttat

SEQ ID NO: 13531 - DNA, 490 bp, Homo sapiens
cacaactggcagaaaacaaggatatgctttggcaggggtgtgtgtgtgtgtgtgtgtgtgtgtgtgttgtgttgtctttcaattatttgcttttttttttttactttctttttgtattctatcccagatcacaggaaagttataaaaatcaaaccgtcaccctttagtttgcttgaactttagtaaaccacctgcttagggactttgaacttaaatatatccccttcctcaagtggtgctattttaaaactaaaaaaaactttgaattggctatttttttaatgcaatattttttttctgaattcattatgatccccatattgggtaatgctgaacatttatctgaaacagatgaggatattattattttgtatccaaacagaaattcagataaagggaaatttgactagtgtaatctgagatatgtcatagggatttctttctgacaaaagggtgctttgctgttctttatattaaatacttttagatc

SEQ ID NO: 13532 - DNA, 1633 bp, Homo sapiens
taacatttggaaaagctttatagagactctaagtctaaattttaatttctttgtaaaaacctcaaaagtgaggaaaatggatgttttaaaatggtattttcaattttttataagcaaaattttgtatgttattgtatagtatttatttgatcttatttactttatgctacctctcccacactggttttatttgtaatttgcatttatatactcattttaaatgacttttcagtgtttttcatagtttataatctgatggctaactaactttcaaaacagcttttaactaagtttgttgtaggagaaatgactgcggtaatttccagttctataatgtttcatgttgagccaaaagagtatatcttgcactttaaaaacgctgcgtcctattccatttgaatgtaaattcttaaaagttgagaccaattgtaaccagtttaactcattttagatgacctttttttcttataatatttgcaagtgacaagtttgaaaacaaagcaagatcagtgcagagaagccacatgacatgttgggtgacagattggtcatttatttaaataaagttaatacagattaaatttgtttcaagagctattgaattttcaaattttcagtgtatttataacttttaagaacatgaagtattagcttaatatagttttctctgttggtttcttcctcaagtttgcattgttttcttttgttaaaattagagatttctttttattttccagttatagtaatactagctgtcagcttaaaccctctgtaatagaacatggaaacagacacataaagacattagctgaaaaaatagagtgaaaatcaactattttttactcccgctaatttcaatcaatcgttttcaaaagcgcacgagattcactcattggatttatgcagtgccctgtctgtataaaaactcttaagagttcctttatatcatattcttcagagccaacatttgtcctcaaagcaacgtttcccacctccttttactgagtactgaaaaagttttagcaaagtcacagattaggttgaatttcaaaatatatgtactttaaaaagttctgatttccaaatataataaagttaaaattaagtatatactttaggaagttaccaataacttccatcaaagcagagtaggatatatggtaacattaattttcggtcatttcaaatgaggtatatttcttattagggaaattaaagtccctatatttattatatattttttccttattaacagagtattaatctagtaaaaaataacccagcagtaaataataaagaaattactgaatgagaggataatgaatctgaatcatagcaggaatttgcaatattaattatggttagctatttttctctcattgatttttgtgccacttgaatggaacagaagcaagccttatgttttggaaggtctgcggtaaaatgctgtgactgtttactttcaattgcattgtgtgttgcctgtgactgctttcaaacgctagagggggcctctgatttaaagaaataaaaaggacttttctaaaatggatgtgtagtttattttgccttttgtaaagctcttttggctattgtaacttaacaaataaaatcataattgtgtgcatctctg

SEQ ID NO: 13533 - DNA, 983 bp, Homo sapiens
caagattggacatgtacattgtcatgtgactggatcacatggggaagcgctttatacagacatcagttccatggtgttaatttgaaatgccttaatggcaggcaaaaaccagtcatttcatttttgtaaattacagattttatcacagagtaacaaatgttgctgtaattaaacttctgttttatatatatatacgtatacatatctgtatatatacatatatatatatataaatataaatatattctttactttttgtatcagtaaccaggctcgcacacacagggtctgctgccacgtcgcaaaccactcagtaaaggaaattaaaaatgtatttgtcatgttaaaaagtgttagccacaaaaggctacttactttcttttccttttcctttaaaattgtaaataaataatgttatgtatcagtgtgcctgaaccttgcatatccttcacatatttcccataagcccctcagaaaggctaactgtgatgatgacactttggtacaatttagatgtctatttggtggctcctgttaaagacgcaccagtgtaaaatgttcctgtagtcactgtttgtacttgtgtattgtggaaaaagtacttttggaaggcatggggttgccagtaccacaaaaactgtgttgtatataatgtaaagattaaaatggggaaataatgagcatctgtgaataatgaggtgtcattttttgataatcttgaatggcaaataacccaatagcctgcgtaccagagacatctgtgattgttctattacttgaatagttctacagtctttttttttttttaatgtttacaattatccagttttagaagagagagactttaacgccattgcctggttacttgttttatgctgtaatctagtttattttatgtaaaatgtatattgaatgctttccttttttatacctgccttaaataatttggcaatcagaattaaaaagtttttttttttttaaat

SEQ ID NO: 13534 - DNA, 208 bp, Homo sapiens
aggtgttttagatgaacatcccttaatttgaggtgttccagcagctgtttttggagaagacaaagaaaattaaagttttccctgaataaatgcattattatgactgtgacagtgactaatccccctatgaccccaaagccctgattaaatcaagagattccttttttaaaaatcaaaataaaattgttacaacatagccatagttact

SEQ ID NO: 13535 - DNA, 770 bp, Homo sapiens
tgtttgtatggttggttggttgtttgattcattgtttggggtttggaagtgtctgcactggggtcatgcactgagcgacccccaagcccttccttaagcctgtgggtctaagaacatccagagcatattagcacatcactccaagcaacaacctccgccagaagaaagcaaatgctgttttacttcaaatgatggatgctgcaatcatatgatatttgctaagctgccaaacatgtttatttagcagatactgtatggaattttctgaacacctctttaacgtatgaggaaggttgtcctgctacggatgcaattcaattcttccttttttattactatttcaaacacacacacatatatatatatattaaacttagatgataatcaaaatcaaaaagtcaacgtaaaaactggtttcttggtttggttgggtcttatttgagttagtttgtttctcagtttctcgtatggattctttggggtactttggtagcctgagtggtctttttcatctctttcgcgtccattactcaaggagacagcataacagatgcagaacaagtcatatttgaagaatgttttgtactaaacttcatttaattattcagtttttaaagggaaaaagggcgtgagctcacacagtgagctgtttatttaaatatcattaaggagaaaaaaaaatatggtgagaagctcgctcctttcaacttgtttggtactgacagctgatagaagctattttctaataataaacatccagtgtgtgaaag

SEQ ID NO: 13536 - DNA, 1545 bp, Homo sapiens
cccttcacagacttgggcccaggctcaaatcctagcacagccagtctgcagaagcatttgaaaagtcaaggactaattttaaagaggaaaaataataataactcttgtttctttcctccctgtcttagactttgaatgttgaccctcacagggagggataatttagactctggtatggccaaagatttgagcacaaaggcaaccgtggttactgtattttttatataacttcattttaaaatatattaaaagaaacctaaatgttcaagatatcagcatatggcactaaatgcacaaaaataatgtgagctttttttttttttcctgttagcagtctgtaacactttgggtattttgctatagttgctaattaaaaaaatatagatgtttatttatttttaatgcagtaatatatggagaaatgaacaaactatgtaaacaaaaagggaaactcacttgtttttctttagatttataaatttgagctattttttttagaggtgctttttaaaaatccaatagatacaagagatgtttcctttggttttctgccagtcatccagctgatacacacctgatgattttaaagaaagccacacagagctgaatgggcagtgtaatcaataatttaaaaaacatgaatgtcattagatcctttataacgtagatcgaagccaaagcagctcatttgtgacaacatttcatatcaccagacacaccaggcaacagaagttgaagcacaaccactgtagcaaaataccttgactgcttgtgagaccattagcattgcaggccaaaccgtactgtatttccttctcataacctcaaggaaccatatgtgctacccacaacacctcattcttacccagggtgcgctgcgtcctcatggtactgtaggcagctgaagaaccgccgttcccttgaaagggaacacctggcattctgtggtgtttcgtgctgtcttaaataatggtgcatttattatgttcaagttatttcaggattgccatatgtgcaaacaaatcatgcaatgcagccaaggaatatatgttgttgttgttgttttaaacccattttttttttagaattttcattaatactgtagttatacaccatatgcctcattttatcatagcctattgtgtatgaaagatgtttgtacaatgaattgatgtttagtttgctttagtcatttaaaaagatattgtaccaggatgtgctattaagagcacgtatccattattcttctcaacccaagaacctgtttcctggaccagtgaccaaacctcatatgtgaaatggccaaagcacatgcaggctcctggttgttcctctcaaacctgtgctgaccaaagattagtaaccagttatacccagtattttgaggttttattgtttttttaataactaaaaagaaaaaaggaacagtgtaaatttgtaatcaagagtttgtgaggaaaaacttatggtttttggttttgtttgtttttgtaggtctgtgtatcaaatatgacacttttcttgcaataaagcttattttggggt

SEQ ID NO: 13537 - DNA, 156 bp, Homo sapiens
gcacgttttggggataattttctcttctttaggcaatgattaagttaggcaatttccagtatgttaagtaacacacttatttttgcctgtgtatggagagattcaagaaataattttaaaaccgcatacataataaaagacattgttgcatggctt

SEQ ID NO: 13538 - DNA, 1355 bp, Homo sapiens
cctttggatgacctatttgaaaaccactgaaagtcgtggaggaatgggcaagaaccacctcatgattctgcaggccattgctaacgaacagctcattgctacaaccagtccagaggttttattccctctactccgagcaatgaaatagacctgagttatgcttcctttcatttaatttctgcagataaatagtttcctgagcaatggatgctatgcctggataccagtctccactttgcacgccggaactgccttgggaccacagttacagaaaaaatgtaaactcagagtgatccttgtgtatattgctatagatttttctttaacaagctattttaaagataatggcattattatttccaagccatagcttgggctgaaggacaaattgaaattgtctgccaataccaaggatattcttgtatatttgaaaaataacttattatttgaattgttgtggttttgtttgtatttgagagctcttgttagctgatattcatgtttgaggtcataaaattgtctctggtctgaccaaacagaagtcatctttacagaggtgatatgcttgatctacacagagatgtgacttgatctgtagcaccaatgcaatgtaggtctcagtttgagagaaataggaagccctttgcagttgaggtgttaggaacctgctggtcatggtgtggaaggccaaatgaagctgccacagggtttcttgtcagtcctttgggaaatgggagggagtagtttggggaggagggtgggaaccctaatttccacagaatgaaattttgatgttaaatgacatgtatacaaattcttccttaagtgaaagttatgctgcatcgaattgtaactgaaagtatagatccaacaaatagagactgggttctagagagttctggtctatagaaacccaaaactaaaatctctcataactcaagtatggaatactttttttaaagaaattcttatcatgggtgttgtaataatgaagacgaatttgactttatgcagtgttctgcagcatgcctcccccacatctcatagcaccaggttgtgtctgacctgacataccctgcagctctcagctggctgcagtaacattttgtgggagaaagaggagctggagttacagaaatgattgtctcttggttctcagtttttagcccttgagaggacatacttttccagcctcatgggtatggcactcttaattaaaatttcagtgactgtttactggatgaggcagatttttcacatttttgcaaattaaatatattttatatatattaagtttaattttttcagtttttttaatgtaaaagcaagtgaaattttaataaacttctgtaatt

SEQ ID NO: 13539 - DNA, 2971 bp, Homo sapiens
tatacctaaaaattgttagaaattggtgggaaaataggtagaaaccaaggaagcagacacaacatgcatttatggagattctttttcccttttagacttccatctgaatgagtcagtcaccagggtattctgcatagcattgtatattctgtgtatgtcagatggctttttctttttgactggacttttgggtggtggtagatttttaaacaaatgaaattaaagcaacaataattttgaagcatttgaaaaagccaaagtgtacggtagaaatttctacaaaatgaatattatcaagagtttcatgtgatcactgcagtgttgtcacagctcataaatagcaacagtgtctcatgatttaatggctcagaaatagttattcattagtttttaatttttaatttctaaggtacagagatctataaaaccttgattatttgttagttttgcaattcaaaacagctaatgtctggttatttctcaaagtaagtattttaaacagcctgttaattataagaaactcagaataatgagtgtaaatgtgttatgttatccacccaagtgtacatatgtacctatttttttttaaaaagcagaaatagaaatacaagactggtaaacatgcctttaaaaatatatatattttcaactagtattgtctataatgctgaaatattacttattggtgatttttctgtttcacacactctaaaatataagtaaagccaaccttttttttaaggctgagattcccaaaatgagaatactactttataccatttgtttataagtatgaactgttcttataaatattaatatttacatattcactaatttaacataaatgaaaattaggattaaaaattgcaccaaagcatcggcaaaaacaatactatattctttaaaagtgctcaggtagccaaggcccttgcttttggtatcaaccctcatgaacccataggagctgaatatttgtttcactgcttaataatcctcaatttacactattcataactcttaaaattattctctttttttctaagagtccctcccttccaaaagtgtatttttttcaaagattttcacttctcaattgttgcctttgtacatactatagagtgttgcttgtaagaaaggctaatatggaaccaaactcttgtaagtaatgtaaatagaaaggtgggtggataaagttttcaatactttctactacctcagtttacttgagtactacattatagtttattctttgcttatctggtctaagagacttttaatgctagtagtaaagttggtttctgctttcattgactattttcatcataatttcatcattgattaaaaaaagaaaaccacttgtttattcagttattaaatatatttactatataacacatccattcttgctgtttaaattttcaatagttaatggaaagttgtctttgaccttgaatttacagcattgggtcacattttgccttgctgtgtatgtattcaagagacttccaactagacaaagaaaaaattgttgttttaatggaatgtaaacctgaaattggtgtgtctgcaatctgtttggcccatgaccttttacctagtcccagttattacctgagtctcccatggatgacttgctgccaaggagtgtttgtggatatattttctttggcttaattttcttattctgtgcattaacaaaattatccagttgtctgattttggaattctatgagtcaatctttttggcagaattcagaatattaaaaagttcatacatttgcgggccattgtacctttttttttttttttttttttttgacggagtttcactcttgttacccaggctggagtgcaatggtgcgatctcagctcactgcaacctccgcctcccagttcaagtgattctcctgcctcagcccccaagtagctgggattacaagtgtgcgccaccacacccagctaattttttatttttagtagagatgagatttcaccatgtgttggtcaggctggtcttgaactcctgaactcaagtgatccacctgcctcgacctcccaaagtactgggattacaggcgtgagccactgtgcccagccttgtacttttttttttttttattgtagctctgtatagcacttggataatgtctgggtgtctccttaaccatcaaactgttctttatttaaaatgtttaattaccgtttagaaattctagtcctcaataagtgggtggctcatgctattgttgttcctaaagctaagctttgctgggaaggaaatgacctatagtttcttaaagaatcattaatccttataggattcctgagttactgttttgttcctccccactgcttcccattcctgagttttgtaattcctaatccttctataatttctattaccttcaccatagtcattctttccttacgcaaagcccaaggaatgagctgctgctactttaaagtgtggtcattatgatgaatgtgaaaagagttttggcttgttctaaataatttttacaagttatggtacagacagttgttacatatcaaaaaaaacctgtttattgaaacaggaaataaaaaagggatcttttacattatagaattaaaactaattttttcttgtatataaactaattggtttgattttaaatatttctggcttttattaatatgtcttaattttgagtttgaaaatgttaagtgcaataaaaacatactagtacagattttgttttgttccaattggcatactctggggatgatcacttaaaaaaacagattttacataatgcctacttctggtagatgtcttatgagattgttctgctttttctaagttacttagatgttggatatgtacatagctgtttcttgttctgtatacatttctcaaatgtacacttgtattataataacctcccagttctaggggatatttgtgcaataaatacacatgtcaacttga

SEQ ID NO: 13540 - DNA, 775 bp, Homo sapiens
agttcaaggaaagttcttctcagtgtaatgaactgtctagcaatattatagttattcttgaaagtaatgagtcaaaatgacacagctgaaaatgaataagcatctgattttatgactgagccttttcctgtcccaagaggtctttaacaatattttctctatcatcaatgagtatattttatttttattataaaaatgatattgtggtggactgctaaaaatatcacaaatggcaatgtaaaaatcaagacattttctcaagaactgtgtaccactaaaagtaatatattgtcaatgttcacagaactattaaacataaaggaaaaacataagtgatatattctacttaattatttgtgaatcagtaaccagatgcagcaaatatctaggcaatgtggactacctcattcagtaactgattgtcaaaatcacaattaaatcagacttcaaaaattaaagctaggtgtatagaatcatgctaaaagaaaacatgataactcatagtctacgtaacttcagagtctttaaacatgacaatccacattgtcatatgtgaaaattttctctctgatttttactttcattcatgaaaaatgaaaattcagaaattctttttttcctttttgttttgagacagggtctgctctgtcacctaggctggagtgcagtggcttaatcatggctcattgcagtctccatctcctgggctcgagtgatcctcctgtctcacctcccaagtagctgagactacagtacaggcacatgccaccacacc

SEQ ID NO: 13541 - DNA, 397 bp, Homo sapiens
catccttttctgtccttccccttcctggtccttcagcccatgtcaacgtgacagacacctttgtatgttcctttgtatgttcctatcaggctgatttttggagaaatgaatgtttgtctggagcagagggagaccatactagggcgactcctgtgtgactgaagtcccagcccttccattcagcctgtgccatccctggccccaaggctaggatcaaagtggctgcagcagagttagctgtctagcgcctagcaaggtgcctttgtacctcaggtgttttaggtgtgagatgtttcagtgaaccaaagttctgataccttgtttacatgtttgtttttatggcatttctatctattgtggctttaccaaaaaataaaatgtccctaccagaagcctt

SEQ ID NO: 13542 - DNA, 858 bp, Homo sapiens
cagggcccctgggcccctcttattcctctaggcaagcaggacctggcatcatggtggatatggtgcagagaagctggacttctgtgggcccctcaacagccaagtgtgaccccactgccaagtggggatggggcctccctccttgggtcattgacctctcagggcctggcaggccagtgtctgggtttttcttgtggtgtaaagctggccctgcctcctgggaagatgaggttctgagaccagtgtatcaggtcagggacttggacaggagtcagtgtctggctttttcctctgagcccagctgcctggagagggtctcgctgtcactggctggctcctaggggaacagaccagtgaccccagaaaagcataacaccaatcccagggctggctctgcactaagagaaaattgcactaaatgaatctcgttcccaaagaactacccccttttcagctgagccctggggactgttccaaagccagtgaaatgtgaaggaaagtggggtccttcggggcgatgctccctcagcctcagaggagctctaccctgctccctgctttggctgaggggcttgggaaaaaaacttggcactttttcgtgtggatcttgccacatttctgatcagaggtgtacactaacatttcccccgagctcttggcctttgcatttatttatacagtgccttgctcggcgcccaccaccccctcaagccccagcagccctcaacaggcccagggagggaagtgtgagcgccttggtatgacttaaaattggaaatgtcatctaaccattaagtcatgtgtgaacacataaggacgtgtgtaaatatgtacatttgtctttttataaaaagtaaa

SEQ ID NO: 13543 - DNA, 367 bp, Homo sapiens
gactaaactggtttgttgcagccaaagattttggaggagaaggacattttactgcagtgagaatgagggccaagaaagagtcaggccttaattttcagtataatttaacttcagagggaaagtaaatatttcaggcatactgacactttgccagaaagcataaaattcttaaaatatatttcagatatcagaatcattgaagtattttcctccaggcaaaattgatatacttttttcttatttaacttaacattctgtaaaatgtctgttaacttaatagtatttatgaaatggttaagaatttggtaaattagtatttatttaatgttatgttgtgttctaataaaacaaaaatagacaactgttc

SEQ ID NO: 13544 - DNA, 4001 bp, Homo sapiens
atgttacagacttaaagtcacaataaaaattagtgatattctcatgcctggacaaaatctttaattaaaacagtgaagacttctctataatttcaattaatggaagttgtagatcaatgaataagactggaaataataatttgcttaagaacttttagtctacatatattaatataacattaaaattgtacaactggtgattgttcaaattgttgtactactactcttcaattgtactgtgcagggaagttgggggaacagttcatactatagagagttacagtttagatgtatgtgtaaatcgattagctatttatccaactactgtatatttaggtaactagaatttcaaaatagaaaaaaaaaaactgtgtcctgttttgcacatagaaagaagcagatcagattgtcctatgttgcgctgttatatatgaatgtttggactgtacatctaaagaatgattccgtcctaacacccacccagcctgtttgaacacattctaattgtctaacatttgttgcattttaagtatgagatgactgatcttatgaatgttttgtagaaaatgttataatttaacagtctttgcgagtatacatgttttttaacaagttgaaaatgtttcatctgaacctttcctaacttttttttgccagtttgagttcaaatcaaatacaccttaagttctggtttcatgttctcttgaaacattgaattgtacgtaaatataaaggatctactgttgcggaaaattaagaagctaaatactgctcagttatctttgcctgcgtgtatatttttaaaaattcactctgaagtgttatggatgcttttctttgagttctaaattttggtgggaattactttatgtctcccagttaagaagagtctccattttccagaaaatacagctaagcaagaaaaatatcttttaaatactttgcctttaaaacacttttttattttgtttttctattttaaaaataaaatattattttctgaatttcttctattgggtaatccagttagaccatattcctctacaaataaaaactatgttgatttcatagtaaagtaagttgtaatagagataattatttttttctgttgttagctgcttatgaaacttttattgtatttttttaaagttatgctactcctggccgggcatggtggctcacgcctgtaatcccagcactttgggaggccgaggcacgtggatcacttgatgtcaggagttcgagaccagcctggctaacatggtgaaaccctgtctccagtacaaatacaataattagctgggtgtggtggcgcacacctgtaatcccagctacttgggaggctgaggcaggagaatcacttgaacctgggaggcggaggttgcagtgagctgagatggcatcactgcactccagcctgggtgacagggtgacactccacctcaaaaaataaaaataaaataaaaataaagttatgctactcctaaaccacttaatatatgttttgtggttttcaaaattatgtaatcagccctgaaacacattggttgaaaatattttgagactttataagttagtatttattaaattaatattattttaataagttttgttaaatcctagtttaaatgacaaagctgtgtatagagtaggggtgagtgaaggtggagtactcttgaggtggcgataaaaatgtacccataaatttaaagtccattctgtaattggaatactgaatgtcctgtgtgtggtgaacattttctaggtgattagaattgcatttcactggctgcatttgtttgtggtatgtaagatagctagaaatttattacttaactctgtggggcattgtttagatactgtgaagagttgaggtaaatatgtgtcttgtaaaagctttgtgtgatcagaatattttggtaattataaaatgtttttgatgatacacatttaactctgttagtaattactctaaagaaatcttaattttaccagtttaaaaaaaacgcttctttttaaaagttcatgtttctaacctttaacaattcagttaataggaaaggagtaacttttaaatcaagctttaaaacatggaaatttaagccagtatgttagatattttttctatcccaccctaccatgataataaaaataaatctataaaaagtcaaaataaaaagccgatctataaaaagtcaattgagaagttctaaaagcaggctactatagcaggggtgtttgttttttgtttggagacggagtctggctctattacctaggctggagtgcagtgggacaatctcggctcactgtaacctctgtctcttcagcctcctgagttgctggaactacagctgtatgccatcatgctcggctaatttttgtatttttttgtagagatggggttttgccatgttgcccgggcctgtcttgaactcctagagcttaagtgatccacccgcctcaggctcccgaagtgctgggattacaggcatgattataggcctgagccaccacaccccgcctactatagcagttttttaaaaaaagcattatgttaaaactgattataccagatggacattaaatatccatctcagaaataccaaaatttgatacataagcctggcctgaatatcttttttttttttttgagacggagtcttactctgtcgcccaggctggagtgcagtggcgcgatctcggctcactgcaacctctgcctcctgggttcaagggattctcctgcctcagcctcttgagtagctgggattacaggtttgcgccaccacacccagctaatttttgtattttttttttagtagagaccgggtttcaccatgttggccaggctggtctcacctgactttgtgatccgcccgcctcagcctcccaaagtgctgggattacaggtgtgagccaccacgcctggcctcaagcctggtctgaatatctatatgcaaatatgggacactgacttcagagctattcatttagctccagtcatagcaattctgtagtttcctcacatttactgtgtctttgtccacaaatgaaatatgttgtaaggtcagtgttaatttcgtgagacgatatagatgaacacacttgctcattttttgaaataaatatgcagatttaaaatgagtggcacatatatataaataggttattgaatgggtattctcttttccctttaatttaaaaagtgatatttatttattaaaaggagcattggtagaattattggtttatagtatcttctttaataatccttacaattacatatactaataggatgttaaaattatcatcgtgtttcctatttgtgtttagattcttataaagcatgagatgagtaatcaagggaagggtcgcatctccatgtttgccccatgaatagaatccatttgacaagccatttcatttcctttctggagaaagggagttgttttttttttctttttacagcaaaaatttaaggttttattgggggagggggtggtgctacttcctctgtaacatgtttttaaaactatgattatggtttttggttgttttttgttttgtttgtttccttttagtctgtttttaatatccttccccttaactcttaaggaaagtcttctttcctacagggctgtgaattaaggaatgggtagcgtttacatttaagtacaccaatgtctgcccaatttcctaatgtatacatttgttttattttaaattattttttgttcttaaaaatactagaagaaaacatagatgtttctagtgcctttgaacttatactgtagtctgactaatttaatgaataacttcagtagcattactataatactgtatgctggccaaaattacaaattacagtttgttgcatcagtttcaaaagccatgctttcattgtattttatgtataaattgtatttgttcaagttgtatatattggtattgtatgtatacatgcagcatggttaaataagaataaaaatcttttacct

SEQ ID NO: 13545 - DNA, 476 bp, Homo sapiens
ttataggtggagagggtggggtgcaccgcccctatctctcacccacgtaagtggggtgatgctgatttagtctctgcttttcccttgagggattggggaggacccagtccaggcctttctaagatactcctccagccgggcgcggtggctcacgcctgtaatcccagcactttgggaggccgaggcgggcggatcacaaggtcaggagatcgagaccatcctggctaacacggtgaaaccccgtctctactaaaaatataaaaaattagccgggcgtggtggcgggtgcctgtattgccagctactcggaaggctgaggcaggagaatggcgtgaacctgggaggtggagcttgcagtgagcggacatcgcgccactgcactccagcctgggcgacagagcaagactccgtctcaaaaaaaaaaaaaaaaaaaaaaaaaaaaaagatacttctccaaagtgttctcatgtggcctc

SEQ ID NO: 13546 - DNA, 403 bp, Homo sapiens
caaatggtcctcttaaaaccttgagcctatttggcaaagtaactactgtgtgcctatgtgtgccttcaagagaaagcttcatatattaagtctctaaatgtagcatatgttatataaagaggagcctgtgtaggttagtaccttctatggcatctatcaggataaagggataacatcaattgttgctacagagcctttttttatttccaaatttaaatgaaatataattattgtggagaactttacatttttttccttgagtgattttttttcttttcataggagtcttattcttgatagggaaaaaaccttaattagcatcaatcctggatggacttgcagctataaataggcaattcagattgctgtagtcttaatagaagaataaatttctgtcaatggc

SEQ ID NO: 13547 - DNA, 5679 bp, Homo sapiens
actgaacacattctcgttgcctctgattttctccacaacactgtgtcacatcacgaaggaaaactgccataacataccacctagtcgacactaagaatgaggaatagttttctcctcgttggttcatgtgttgttgtttttgataatccaaagcgatcatgtcagttggccctttaatatttccaatgtgaaagattatttaaatgcttttaaatctgcagcacattgataagatggtttccgtgagctatgataagattgaaattccagttgcaattcataactaatgaattgaaattttatttattttaatttttttaagttcccagattggggctagtttaagacttagttatttctgcctataaatttactctgttgaatatttagcataaatttaatgtagacatttttatttatataccttgggagctttattacctaatatctttttgtggtagctgttctaagagtaagaattggttcgtctaaaataaggacatattctttctacacctgctacctgacctgatatttgaaatcttaactccaattttattattgtggaatttacagttagtattaaggatattcttctacacatgaaaaaatcacttaaatatgagaaaatggcattctacatgtatgtactatgaaatgtgtctgatttggtatgcattatttcaaaaactgtgaatgtgtgttaataacactacagcaatcacacagtgactatagcttgcatttaatgcattacaaaagagggaggacaaactttctagaagaagcatttcatgttgaagggtttcataaaaggacaatcctgaacgttacggattttattaaaaccatatgttattttttgttgctaatcatttgacacttaatcgaaacagaataagttactgtggaaaaaaggatgatccaactcctgaggattgccgcctgtgtgtctttaattgattatctttgatagttagagttatttttcagatttttccccctcatactggattgtgatgctctgatatgagcatgcaatgactgatacagaaataggctggagcttcggtgtgtgcttttgctatacagcttacagttctaatgcctgatgtagagatgatgaatttctcctttttaaacctatcttctgtttactccttttgcattatgaaggccctcttcaatgatgtatgtttctgatggaatcagaaaatttcacactagaaaagtgtacctaacttgattcagtgtgagctcttgggacagggagtggagccaggggtagagcttaaagaagctggctctgtaagagttgtatatcaaagtaccttttgctacaaggtgcatatagaagtctaagataagaaatgtaccctctatactttatttttcatgcccctatcatgtttggtgtgccttaaatcttacctttaaatgaagactctatggattgtttacaaatgaagttttacactaggaccagatcgtccatacatgattggtcttctacaataataatgttcaattctttcattttaaatctttctttagggtcatataaagattagttctttcagaaaagctattgctttggtacatgacttagtctaaccagttgggtaatgctgctttgaaaaatagtttgtccctctccccattccaaaaatgaatccattcagtcagaaaaaaagattatcctactatttgtagatgattgctaaggcttgaaataggaaaggggaaagaagggatagaaaagtttcaagtccagtagtgcagtgaatcctttgtgtttgagacttttttacacttatttctgaagttagtgaactttcattgtccctgtggcctcatatttatagagcttcttaactgttttgtacctcagattgtttttagatgtcattgaagattgagatgtacaaattatgttgaatttaacctgtttctcttggagaaattgcctctgatatctttctaacttaatcttagtgtgttctaggaacagttttccataagaggacaacttctcaatgatcatgatagttatttagtaagaaataatggttgttaatcaaatacatgttatgtcttgtccttctctgatttttctgacttggattccttaatttgcagtgatgtcttagaaatggaaaaagtatcctctgggctttcagactttcagcaacaacagccagtgggatacctctgagttcttgtgttctagtctcttgtatgtcctgaaaggcagcaggagcatttttggggtcacactgatattttgttaaagcagagtttcctgcatggtttatggtgctgctctaatattttctctttaaaactgtgtcaatttttggagaatgaatttttcaaccttttcattgtggaggatttttcccacaaggtagtaatgggcaatggatcaaaatcctatcataaatgattgaattttcaatgtcatagtgtgtggaaatactactccctttcctccatgtctatcttcttagatgttctgtctttgtcatcatctgctccagcacatactttggactcctttacaggtgaccttcccccctccctcctcaataggtgtcctcagtgttttctaagcatttaaaactgaatttgacaagtggctaaaaacttagtctgagacttgtacttagtatatggttaattatagaaacaacaactattttaaacagttactctgttgactgctctttatgactacacttgtatgccaggaggcagcagcctatacaccattagactctttacaagcaaccaacgaaccaattgcagtggttgcagttgtcacagtagtcttgcctgggccagactgggctgggctgtgggaagcattccccttcaggggagtttccacagctcagcccaggctccagtctggctagagagcatccagcccattccttgcctcagtgccacctttttctgggcaagtagccaagaagtgactttatatgcagtgagtacttcagataaacttacagctacagctgccgaagagtggagaaggttgaccaccatttatttaattctctagtgtaaaaacaattgagagcagtgtgcgtgagcccacagacacctgtgtttctgggagctctggcagtggcggattcataggcacttgggctgcactttgaatgacacacttggctttattagattcactagtttttaaaaaattgttgttcgtttcttttcattaaaggtttaatcagacagatcagacagcataattttgtatttaatgacagaaacgttggtacatttcttcatgaatgagcttgcattctgaagcaagagcctacaaaaggcacttgttataaatgaaagttctggctctagaggccagtactctggagtttcagagcagccagtgattgttccagtcagtgatgcctagttatatagaggaggagtacactgtgcactcttctaggtgtaagggtatgcaactttggatcttaaaattctgtacacatacacactttatatatatgtatgtatgtatgaaaacatgaaattagtttgtcaaatatgtgtgtgtttagtattttagcttagtgcaactatttccacattatttattaaattgatctaagacactttcttgttgacaccttgaatattaatgttcaagggtgcaatgtgtattcctttagattgttaaagcttaattactatgatttgtagtaaattaacttttaaaatgtatttgagcccttctgtagtgtcgtagggctcttacagggtgggaaagattttaattttccagttgctaattgaacagtatggcctcattatatattttgatttataggagtttgtgtctgggtcccaggaacatctactggggatgactgttaggcagcttgtgatgatgttttttaaaaaacctaagtaacttggggagacagagcatttcaaacccatatagacacctatcatacctgtatatcccctaatacatggaacataaatttcatttcagctttatgcattaatgtattgaagaggcaggctttttttccagtaataatactgtacatctaaggttgctattcagtaaaactaatagaagagataattattgaataccttggaatatgtagtgagaagaggccaaatttttcatgtttgtgagcatgtctttcagatactcgctaatggagaaattcactttagacctctagaccccaaaaccaagttagcaagtgacaaaaagtaaattattaatagtctgtaaagtggatgctggtcttacaaagctcctattcacatgaaccctatggttaattagaaagaacttgctgtctccagaaaagggaatggaaataataactatgtatcttcttttcatgtaatttggtcacagaataaggtattcaagttaagtctaatccaagtcttagagatctttaagtatcctaaaatagcagcctaagtagtcatcatgtaaagaagttgactttcaggaatgtcagcattgacctctccttgccactgttactcagctaaacataacttgccattcttaaaaataaaaaagctcccacccagaaactctagtgatactcagttttgacctcttactgcttccatgtgggacttcttttcagcttttaaccattggaattttctacctgctatgttcctctctggaaaatatcaatttggaaatgctgcctttcaaatcaatgccatgatcatccatattgttgagtttgttgttggtgttccagaagtgtccccattttacaactttatgcacacacctggcaaatcattaacatgagcattcaacagtactgggatgggtggggtgggggtagggggctcaccaacagaactggccagttgacattgcctgaaaaggcaccacctttaagggccagttgtggggttggtaagcacagttatgaaaatttctatctagcctccgttttgaatggttttaagaaattttgtatatggaggatggaaatgcttatatatttattgaaaatccttttatttgaaattaaaattatttggtatataattgtttgatatttggggagggttttggaggggagataatgtcactgataaattaaaagcctgttgattttgcagaaaggtactgttagtgactgataaggatgcctttgttttgtacatgaaccaaatctttgttttacatttcttttatccaaaatatttaggcatctgacattttcaaccagaatttcaattatatactgtgatttttatttgttgcaatacattacaatttcagaggtactttggggctcaaaagctaggatttctaagtcagtatgtgcatttcacacgataaagctgttaatggtgagcaaagtattatatactaactagatttttccacatctgtatagtatattatatgtattttgtggtattgagagtatagaaagtttagagtgtcaaacatgcgtttaatgtgtatttttaaacaaatttatggcaattaaaatatttggagacaagggtatcacatttcaatttgtaaagatctttttaactctactgtgtcattaagatgctttgtacaatgccaaaccatagttggagaaactaagtttaataaatatcaaatagattttctgtattaaagttactgaacactgt

SEQ ID NO: 13548 - DNA, 1598 bp, Homo sapiens
agttgctccattcatattggactgatggactgaaaacattgatgtgattcttgaaagggaatttagaatatgttaaggccaagtaggttaactggtgaacatttctagaattcaaaagtttctaaatgttttacattgtaagagcatagagaatattaataatggcttatagagagagacttttatttgaagggtgaatcttgttttttttatctttaaaatatatctctagaacttaaagctgaaatctgcaaatctgtttgtgtgatgaaactatcttttctctctgtgaaataaatgccatactttgttatatatgttagtggtatgtatcagacatattttcaggatggtgcgtcaggatatctggcagtggatttctaatgcttttggctgtatgttatgtaagatttaatatgttgttactgtaagcttaggagttttcctactattaataaatgtgctctatttttacatttatgttcagaaagttatctgactttttgtcctaagtggtatgttcaaggagcctattaatatatttatagtttttgaatgctgtaagtttcaaattgctgtgttacgtcattcattttcttctggttccttaagtttttcaagttatccttttctgaggaaaattattctagaggaacctaaaaagggacaaaaaaattgaaacttcttaggagtctaatcttggtgccttctgttaaaagtcagtgtatcagaaaagaaagcagccatgtaagaggctaacttaaatagaagtgctagaaatatctttgtgtattaacatgcaataaaaggtaccattcaaagcagggggaaaggtaggaagaagaggtaatttttactgaaaattagggcaatgttggtcgccttttattaaaagctttttttaagctttcataaagattgctttttgctatttttgaaaatatggtattatagtttgtatggtaactggtcatatatgacagtctactgcatatatatgaatgactaggattaatctggtgtgtttacataggatatacatagttgaaatctagcatgaaaggttaaaaaggagatactgcacaatatttcttaaaagtaaaatgctgttattgtgatgagtctttggtttaacatcacagtattctgtgatgtctttttaactttttggaaagaggtatcatttgtagaaaaaatttgatttgggttaaatataggtttttaaaactataaatgttgtcttttttatatttttatgaaaaagcagtagaaaattacttttgaagaaaacaggctatttaaatattgaaatatatgtatgttgtgagtttaaggagcctgtaattgtcagttttacaaaaccatctgtgttcaatggttgtaaataaattctcaaaacatcatttcaaaggctgcctacagaatattatcacttgacagatagagttaataaattaccaatcaggcacattttataatgtttgtctctgtaaaggtaatattagcagttaaagaacacggatgagaaaagaatgtgttacataggttgcatcacttgcagttaaataaaactcacaatttgtgctcacaagcttaaa

SEQ ID NO: 13549 - DNA, 2635 bp, Homo sapiens
agggcccagagcagagccctgggccaaggaacaccccctagtcctgacactgcagcctcaagcaggtacgctgtacatttttacagacaaaagcaaaaacctgtactcgctttgtggttcaacactggtctccttgcaagtttcctagtataaggtatgcgctgctaccaagattggggttttttcgttaggaagtatgatttatgccttgagctacgatgagaacatatgctgctgtgtaaagggatcatttctgtgccaagctgcacaccgagtgacctggggacatcatggaaccaagggatcctgctctccaagcagacacctctgtcagttgccttcacatagtcattgtcccttactgccagacccagccagactttgccctgacggagtggcccggaagcagaggctgaccaggagcaggggcctccctcccgaactgaaagcccatccgtcctcgcgtgggaccgcatcttctccctcgcagctgcttcttgcttttctttccatttgacttgctgtaagcctgagggagagccaacaagacttactgcatcttgggggatggggaaatcactcactttattttggaaatttttgattaaaaaaaaattttataatctcaaatgctagtaagcagaaagatgctctccgaggtccaactatatccttccctgccttaggccgagtctcgggggtggtcacaaccccacatcccacagccagaaagaacaatggtcatctgagaatactggccctgtcgactattgccaccctgcttctccaagagcagaccaggccacctcatccgtaaggactcggttctgtgttgggaccccaaaaaaccagaacaagttctgtgtgcctcctttcagcacagaagggagacatctcattagtcaggtctggtaccccagattcagggcagactgggcttgcctggcaaggtatgggtggcctccaggctcaatgcagaaaccccaaggacacgagtggggccaggtgagttcctgaagctataccttttcaaaacagattttgttttcctacctgtggcccatccactcctctctggtaccccatccccgcatcagcactgcagagagaacacatttcggcgagggttttcttacccacattccccaatcaatacacacacactgcagaacccagaacagaaggccacaggctggcactactgcattctccttatgtgtctcaggctgtggtgactctcacatgggcatcgaagaagtacaacccacatagccctctggagaccgcctagatcagagactcagcaaaaacaggctcgccttccctctcccacatatgagtggaacttacatgtgtcctggtttgaatgatcattttgcaagccacacgggttgggagaggtggtctcaccacagacgtctttgctaatttggccaccttcacctactgacatgaccaggattttcctttgccattaaggaatgaactctttcaaggagaggaaaccctagactctgtgtcactctcaacacacacagctcctttcactcctgcctgactgccaagccacctgcatcccccgccccagatctcatgagatcaatcacttgtatgtctcacgcaacttggtccaccaaacgcctgtcccctgtaactcctaggggtgcgcctagacaggtacgtctgttttttattttaaaagatatgctatgtagatataagttgaggaagctcacctcaaaagcctagaatgcagtttcacagtagctgggatgcatggatgacccatctcacccctttttttttcctgcctcaatatcttgatatgttatgtttactcccaatctcccatttttaccactaaaattctccaactttcataaacttttttttggaaaaatttccattgtatcagcccctgacagaaaaaggatctctgagcctaaaggaggaaaagtcccaccaactaccagaccagaacacgagcccctctgggcagcaggattcctaagtcaaagaccagtttgacccaaactggccttttaaaataatcaggagtgacagagtcaacttctgcagcacctgcttctcccccactgtcccttccatcttggaatgtgtctaaaaaagcatagctgccctttgctgtcctcagagtgcatttcctggagacggcaggcttaggtctcactgacagcatgccagacacaactgaatcgaagcaggcctgaagcctaggtcagggtttcaggagtccagccccaggaggcaaagtcaccaatgcagggaggtaaatgccttttggcaggaaaaccaatagagttggttgggtggggagtcaggggtgggaggagaaggaggaagaggaggaaggccagactggcctgccctttctcccatacttcaccccagcagaggttcatgggacacagttggaaagccactgggaggaaatgcctcactacaggggggcctcctgtagcaagcccagccggtaatcctcctaatgaacccacaaggtcaattcacaactgatatcttagctattaaagaagtactgactttaccaaaagaatcatcaagaaagctatttatataaaccccctcagtcattttgaaataaaattaattttac

SEQ ID NO: 13550 - DNA, 1348 bp, Homo sapiens
agcactgtgatttgaatttgcttatgtaattttatttgcttgactttttatatgatattgtgcaaatgtttgccataggcaattggtacttaaatgagaggtgagtctctcttttgccttggtgctttggaaattaaatgtcacaaacgagtatataattttttatctgtacttttagagctgagtttaatcaggtgtccaaaatgtgagttaaacattaccttatatttacactgttagtttttattgttttagatttattatgcttcttctggaagtattagtgatgctacttttaaaagatcccaaacttgtaactaaattctgacatatctgttactgctgactcacattcattctccgccattcaaatactattttttatccacatttttttttgttcccaaactgtaatgtacaaggatatgtgtgataatgctttggatttgagtaatatttttttttcttccaagaaaactgctttggatatttttagataatttaaacataatttaggataatgatattgctcaatctgaccacaattttaggtaaaacattaaatgtgtcaagaaatcttggcaacagagactctgcagcttgcagtggacatagataaaatgttacagagatactatttttttggttggaattactatattaaatttagaagcagaaactggtaaaatgttaaatacatgtacaattgcttttagttagcaattgattgtagcatgggttcctccaaggtttcaagcaatgggcagagtttaaaattatatcagattcgtttacttcgtttattattttacagtaaatttgaataaatcttaggggtcattatcacttaaataatactgtacctaggtctttcaaattaaaattatacctgaatgaagttgtttgtatacataaaggatatttgtgtacaattaccttttttcccccacacttgttttctttgtttttgttttttatggcaactggaaagtatttactatgggattcatttatgtctgtctttctatcataaagaattgatcaatatgtaaatatgtgatttgaaccatggttgacttacaagtgtcactacagctttttagaaaacatagccctaatatatgttaagcaggacccgggtgagccagtgggcttgcgctttatgtagagctggaagaaggccgtccatcctgtctcttgggcggacagtgtactttcctaatagggaagggaagcacaatggaaatacccctgaaccgttttattgcagtaatttttttcatatctgaaactattatttaatattttgaataagattttaaaaaataaatggcaaagatataaatct

SEQ ID NO: 13551 - DNA, 855 bp, Homo sapiens
atgaatactgtacaattgtttaattttaaactattttgcagcatagctaccttcagaatttagtgtatcttttaatgttgtatgtctgggatgcaagtattgctaaatatgttagccctccaggttaaagttgattcagctttaagatgttacccttccagaggtacagaagaaacctatttccaaaaaaggtcctttcagtggtagactcggggagaacttggtggcccctttgagatgccaggtttcttttttatctagaaatggctgcaagtggaagcggataatatgtaggcactttgtaaattcatattgagtaaatgaatgaaattgtgatttcctgagaatcgaaccttggttccctaaccctaattgatgagaggctcgctgcttgatggtgtgtacaaactcacctgaatgggacttttttagacagatcttcatgacctgttcccaccccagttcatcatcatctcttttacaccaaaaggtctgcagggtgtggtaactgtttcttttgtgccattttggggtggagaaggtggatgtgatgaagccaataattcaggacttattccttcttgtgttgtgtttttttttggcccttgcaccagagtatgaaatagcttccaggagctccagctataagcttggaagtgtctgtgtgattgtaatcacatggtgacaacactcagaatctaaattggacttctgttgtattctcaccactcaatttgttttttagcagtttaatgggtacattttagagtcttccattttgttggaattagatcctccccttcaaatgctgtaattaacaacacttaaaaaacttgaataaaatattgaaacctc

SEQ ID NO: 13552 - DNA, 31 bp, Homo sapiens
agcctgggcaacaagagcaaaactccgtctc

SEQ ID NO: 13553 - DNA, 1550 bp, Homo sapiens
tcacatgctcttaaaaagggagtaacacctataacatgccagcaaaagaggtgactgtatcaagtagtcttgatactttagggataatatgtacttaatgtgtcttaaacatactcttactgttctgtctttatgaatctgaacacttagatgatactgcattttaagcataagaacaattagttttcaatgagaagagctcttgttaatgtattaacagttactagttttggcacctgcaactttctgtatagaccatacatatctgacatcagaaaagcaggccctagagagaagtatatactagggtactttagagcaacttaatgaggggaggaaatgaaagaatagatcagaatgattttgttgacatgactacagactgaaataatgtgaatgaattaactgaatttgctctgtcaactttagtaaattgcccattgcctttgctttgttcataatttcagcagggcagaataaaaaccatgggaggcaaagaaaggaaatccggaaatatagtcttaacctggtgttgttctaattttccatctgttcttctgactcaactcactggctatcgatgaatcagtaggtagtatttataagtcttaggaaagactactcaagttaaggtacttccctatatccatctcttttaggtacgcaaagagaaccagtggtgtgaagagaagtgaaatgttgtgcctgacactgtaacactgtaaggattgttccaaatactagttgcactgctctgtttataattgttaatattagacaaacagtagacaaatgcagcagcaagtcaattgtattagcagaatattgtcctcattgcatgtgtagtttgagcacagatcccaaaccttacggccaagtttcttctagtatgatggaaagtttcttttttctttgctctgaataaaactgaactgtgggttctctataagtggcattttgggctttccctcttttttgtaaagcaatgtctgcctagtttattgtccagttaactttagtgaccttttaaaagttggcattgtaaataaaacaacttgcaaaaaagttttctggaatagaattaacaaaatattatctttattcatgagttggaaactggaaaaaggcttcttgaagtaaatgttctgagtggagctactaggatgtcttccagcctcctgcagtcaaggagtaccactgtattgattagcctgtatgtagcagggctcccttcattgcatctgaggacttgttttctttttctttatttttaatcctcttagttttaaatatattgcctagagactcagttactacccagtttgtggttttttgggagaaatgtaactggacagttagcttttcaattaaaaagacacttaacccatgtgggatgtcatctttttataattagtgttcccatgtggagaaaattattcacactacttgcatgtaaagaataatttaacttttaacattaaaatatgtggtaaaacccagaaagcatccatcatgaatgcaagatactttcaataaaaagtaagttatat

SEQ ID NO: 13554 - DNA, 1314 bp, Homo sapiens
tgaaattttaaacttgtacagtattgccatgaaccatatatcgacctaatggaaatgggaagagcaacagtaactccaaagtgtcagaaaatagttaacattcaaaaaacttgttttcacatggaccaaaagatgtgccatataaaaatacaaagcctcttgtcatcaacagccgtgaccactttagaatgaaccagttcattgcatgctgaagcgacattgttggtcaagaaaccagtttctggcatagcgctatttgtagttacttttgctttctctgagagactgcagataataagatgtaaacattaacacctcgtgaatacaatttaacttccatttagctatagctttactcagcatgactgtagataaggatagcagcaaacaatcattggagcttaatgaacatttttaaaaataattaccaaggcctcccttctacttgtgagttttgaaattgttctttttattttcagggataccgtttaatttaattatatgatttgtctgcactcagtttattccctactcaaatctcagccccatgttgttctttgttattgtcagaacctggtgagttgttttgaacagaactgttttttccccttcctgtaagacgatgtgactgcacaagagcactgcagtgtttttcataataaacttgtgaactaagaactgagaaggtcaaattttaattgtatcaatgggcaagactggtgctgtttattaaaaaagttaaatcaattgagtaaattttagaatttgtagacttgtaggtaaaataaaaatcaagggcactacataacctctctggtaactccttgacattcttcagattaacttcaggatttatttgtatttcacatattacaatttgtcacattgttggtgtgcactttgtgggttcttcctgcatattaacttgtttgtaagaaaggaaatctgtgctgcttcagtaagacttaattgtaaaaccatataacttgagatttaagtctttgggttttgttttaataaaacagcatgttttcaggtagagcttaaactaaatgatgtgtttacttagtgcagtttctggttatgaatattatattgctatgtgtatattatatggactctttaaaatgattgacagattggcaaattcttaaatctttgtacattgttgagtcatatgttcttagagttaaatttgtctcagataagaaagtgttaaagcattagcctgtgtcaagttctttgagtgatactagtgaaaccaaatagaaaactattgttggatcatgatttagtcttatgtacattcacccg

SEQ ID NO: 13555 - DNA, 132 bp, Homo sapiens
gctgtaacagagaagaaacctaaataatacaacattcctgtataatggtatttcaaagaatcgtgttcatagtgtctgtatgtaaactgaacttgaagaaaatatattgaaattaaagctgtataatgggcc

SEQ ID NO: 13556 - DNA, 520 bp, Homo sapiens
cacaaactcacattggttccaggtctcaacgttcaggcttactcagagatttgattgctcaacatgcataacttgaattcaatagacttttgctggttataaaacagatgttttttagattattaatattaaatcaacttaatttgaatgagaattgaaaactgattcaagtaagtttgagtatcacaatgttagctttctaattccataaaagtacttggtttttacagtttataatctgacatcaccccagcgccatttgtaaagagcaactttccagcagtacatttgaagcactttttaacaacatgaaactataaaccatatttaaaagctcatcatgttaaattttttatgtacttttctggaactagtttttaaattttagattatatgtccacctatcttaagtgtacagttaataattagcttattcaatgattgcatgatgccttacagttttcaataactttttttcttatgcaaacgtcatgcaataaaacaaactctaatgtttggc

SEQ ID NO: 13557 - DNA, 1045 bp, Homo sapiens
ccgccccgccgcaccacgcgggccggcggccggagcggggaagggcgcgggcgcgggcgcggaggacgcacgcggggccccggctcgcaagccccagctcaccgcgccgcggacctcacacctgcgcagccccctcctcccacttcccactccgggttggttttgtgtttgcttttccggaccccactctgccctccaaaaagacaaaaaaaaaaaaaaaaaaaaaaaagcaaaaagacgtcggagaaaagtgccgcgaaaaaatggatgagttgcaatttctctcgggatggcgcgggtggtgtgtgtgttcccacgggccccggaggcccactccgcggagggcacgcggcgcggtaggcgagcgccgaggcccagcggccgggggaggacgacctcgtatcccgcgtccccgccgcgctggatccggactgagtggccgggcctgcggactggatgtgcggggcctggacttgcctaggatttcccgaccccgtacaaaccaagttgccctctccgagctaggcccggccgagagcgccttagctcgagtcggatccgtgttggggcgggcgttgggtttggggggacggtgcccccagcccaggatcgggcactcagtggagccgcacacggccccggcgcgcctggtagagcctcgctggccccgcgccccggagccctatattaaggccacggagcgacagcgggcagtgcgggcctggcgggaggtgggggaggtccatctcagaacaccccagccttgagcttagctgcaggcccaggccctctgctctgctcccgggctaggaggtggccctctgtctgggcgaacagccccctcctcaccgcccgccgtgcaagagtcgagccggcagagcaaggggcgcggccccagggccctgcgcccactttgcacacccgctctccggcccgcgcccctgtttacagcgtccctgtgtatgttggactgactgtaataaatctgtctatatcgacttgtccatgtacgtctattaaaaccatagtccgagcgtgctaagca

SEQ ID NO: 13558 - DNA, 595 bp, Homo sapiens
gctgagcaatgacagaaccagctgcaccatgtaccccaccttcagtttaaaagaaaaaaaaaatccccttcactcctactgggaggtgggacccctttcattttcagttttgctcatctagggaaaataaggctttggtttccagtttaattgtttttgaccttctaaaatgtttttatgttagcactgatagttggcattactgttgttaagcactgtgttccagaccgtgtctgacttagtgtaacctaggagattttatagttttattttaatgaaaccctgattgacgcacagcagtggggagaacagcgtcttttacctgtcaccgaagccaggaagccccgtttgtaagcgtgtgttgtggtgctttattgtacatcctccagtggcgttctttttactctaatgttcttttggtttcccccctcagaagaatcatgaatttgcaacagacctaatttttggttactttttgtcttattgatggatttgaaaatgaaagatttaataaggcaaagcagaatctgttgtccttaattatatttgcaatttggaatttgtgtgagttgatttagtaaaatgttaaaccgtt

SEQ ID NO: 13559 - DNA, 2159 bp, Homo sapiens
acatgtgtgcgtgtgcacacacgcaagtatgcacagacatacactaaacacgaacatacagtgcacatgaacgctgctcccagctagggccctctggtcagactgctgcctgggttagaattcttgtccccacccccacttactatagttctgtgatcctggacaagtaactgaatctctccgtgccacagtttcttcttgtagaaaacgggaaagttcacagtacttacctccttagagtcattgtgaaggtcagtttgaggcatcacaaatttaaggcacccagacataagggtcaacagggttagctatcactgtccagtttggtgggaggaactgaatgcatgtaggcacatggacccagtctacactcaggcacaaaaggagctacattagttacattcaggcataccccagagcactacaattctctgagacattgtctggaaatctagaaatcatctccttgccctttaaggtattttaaccctcgcattcctctgcttttccaagaatgtgaatcttgccaagctgtccgtgagagacacgggctcccctcgagggagacttgcaaatgctccataaacagccacagtgtggggctctgccatgaggaagtcacagcagacacgctagacagcatagtcctggatgcaacctggaggaagggaggcccatggtggagcactcactccgtgcctgtctgcccggtgagacctcaagttccttgcagacaaaggccatgggttgttggctcttgtgttcccggtggcctttccagagctgaacagaggacagatgcacagacgggggggctctggtggtcaaggcagcagtccccttggatactaaagtctgagccaggcccctcaggcccggcatgggcagtgcgaggcccatagtggtgggaagccagttggccagctggggtgagaaggccgcgaagccatgggcagacaggaagtggaggtgaatgtctctgcctcctgtaggcctcagcagggacagcacagaccctctggctggggcagcgcagaccctctagctggggcagaacaaggctggtgcttccttctagtccttgagactttgtagctctaactcaagcagaaccctggggttttgggattctgtgtggtgactgctgaggaaggtttatggatttgacagggtgcatgtcacagagagacagttctcagtcagcacttcctgtcccctgcagaggctcataggggacagcccctgccaaggagaccctggaggggctctgaggatagcaatcagaggttgggctggctggactgagcccaggcctgttgcccaccaagtctccataggttctagtctgacccctctctccacccctgggctatgcaggccagcccgtgcagaccacccccgacgcgtccacttgcaacacccgcctcactgtgccaacactccatccacacaggaaaggactgagaacgtgatgcttaacccaaaggagtgagtttcataggatgggtggctttaacagtttcacagcaggacactgagggaatatttccctatcccttcaaatggacggtcactacagaaacgtgtagagcaagactttgtcaaggggctgtttccaggtctcccggtgtctaaatagcagagctggaatgggaactgagaaccgattctttccacaaccgcccactgagcagcaaggctgcagccagcaaagaggtgcggaggcaagcaagctccatgtggtggggacagcgcattgcgacctccaccacccctgcagtgggctgccagctgagccacctgtcttccactgtatctactgtacgaacttctccagctctgctctgttttctcttcctcagcatccaccccgtgacacgtagtggtggctgatgtcgccacagtaccatgaggttaacaggtcctccctccagcttccctcatggtggcagcctaacctgcattgcagccgttcaccggacaccgcaccagaccctcaaaacccatccaagactgtgggaggagtaaacaacccagcccagttaagaggagatgccgaatttaatgaaccctatttgaattgcagggctgtgattcctcttacctttaacgtgaactcacaggcggattaaagtgaaataaaacctaccatttgagtt

SEQ ID NO: 13560 - DNA, 687 bp, Homo sapiens
gccctttgtagacactgttactttccccctcccctagtcagcaggcaatagatggggccccagctgccgcctcgggaccccctctccaggcggagggaggaagcgggagctttaaagcagtcggggatacctgagccgcttgttaggtcgccgcaccctcgcggcggatgtctcttggtctgtttctccggccctcagcccagcgcccctcctgcccgcccctagacggcctttccttttgcactttctgaactccacaaaacctcctttgtgactggctcagaactgaccccagccaccacttcagtgtgatttagaaaagggacagatcagcccctgaagacgaggtgaaaagtcaattttacaatttgtagaactctaatgaagaaaaacgagcatgaaaattcggtttgagccggctgacaatacaatgaaaaggcttaaaaagcagagacaaggagtgggcttcatgcattatggatcccgacccccaccactgcagactcgctctaggaagaactggagactcttgcttagctattcaggcacagggctggagagtactttaatttattcaagatgcttcattcatatgaaaatgtatttttgtacataaagagtttattctattatgagctatcaaagtttacatttttgtactgcagacgcttcatgtaaataaaaact

SEQ ID NO: 13561 - DNA, 1167 bp, Homo sapiens
ggtgaaaaacctcagaagggaaaactccaaaccagttgggagacttgtgcaaaggactttgcagattaaaaaaaaaaaaaaaaaaaaaaaaaaaaaaaaaaaaaaaaaaagcctttctttctcacaggcataagacacaaattatatattgttatgaagcactttttaccaacggtcagtttttacattttatagctgcgtgcgaaaggcttccagatgggagacccatctctcttgtgctccagacttcatcacaggctgctttttatcaaaaaggggaaaactcatgcctttcctttttaaaaaatgcttttttgtatttgtccatacgtcactatacatctgagctttataagcgcccgggaggaacaatgagcttggtggacacatttcattgcagtgttgctccattcctagcttgggaagcttccgcttagaggtcctggcgcctcggcacagctgccacgggctctcctgggcttatggccggtcacagcctcagtgtgactccacagtggcccctgtagccgggcaagcaggagcaggtctctctgcatctgttctctgaggaactcaagtttggttgccagaaaaatgtgcttcattcccccctggttaatttttacacaccctaggaaacatttccaagatcctgtgatggcgagacaaatgatccttaaagaaggtgtggggtctttcccaacctgaggatttctgaaaggttcacaggttcaatatttaatgcttcagaagcatgtgaggttcccaacactgtcagcaaaaaccttaggagaaaacttaaaaatatatgaatacatgcgcaatacacagctacagacacacattctgttgacaagggaaaaccttcaaagcatgtttctttccctcaccacaacagaacatgcagtactaaagcaatatatttgtgattccccatgtaattcttcaatgttaaacagtgcagtcctctttcgaaagctaagatgaccatgcgccctttcctctgtacatatacccttaagaacgccccctccacacactgccccccagtatatgccgcattgtactgctgtgttatatgctatgtacatgtcagaaaccattagcattgcatgcaggtttcatattctttctaagatggaaagtaataaaatatatttgaaatgt

SEQ ID NO: 13562 - DNA, 145 bp, Homo sapiens
agatgaaatattatttatcctatttattaaatttaaaaagctttctctttaagttgctacaatttaaaaatcaagtaagctactctaaatcagtatcagttgtgattatttgtttaacattgtatgtctttattttgaaataaat

SEQ ID NO: 13563 - DNA, 420 bp, Homo sapiens
atcgaaggccaatggtcagatcttcaaaataaaaagtcatcttaaaaacctggatgcatacccttctcttcaagaaatttgtgttcacaaaggaaaaatgcatgaagggatggataccccattttccatgacatgattattacacattgcatgcctgtatcaaaacatctcacgtacctcataaacaaatacacctatgtacccacaaaaattttttaattaaaaaaaggaaatttgagtttaaatagaaacatgataaatgcaagaaagaaaacattttgattttaactcattgtcactctgatgttcatgtgaactggttgcttcgggctctttgatctgtcacctatggaatctgagtggttttattttttagatttctcagtcccgaagatctaagataaataaacaagagaactt

SEQ ID NO: 13564 - DNA, 3354 bp, Homo sapiens
tgcccacaagaaagaggacacaagttttgcacaaaattgcaagtcacttcctattcctgcatttgtatctaagactccaaggcaccaaggtctcttctccattgttgctctctatacccgacctaaggtttggaagacaactgcttgttcccagaggattctgattttgcatatgtttgtatgggagaaagggtgttgtgttttttttttgttgttgtttattttttggatagggaagtcattggcttaattagagcctccttcctttctgtgagatttttccaacaagcatgtgatttacgtggaattctgacagtgcagggagccccaaccctcttaaatgtcaaagaccctttttgattacccacactggtggttattacagcatggttcccagccttacagtgtctaagtgcttctcttgtgtcctgtagatgttgtgaaaaagaaaaaaacaaaaaatacaccacactgtactttttccccctgcccccgttactgccggtgattattattaaaaattagtttttttcacatcattatatctggcttcctataaacaacagccttaattcagtcaagactccctttggggaattcattttattaaaaattggtgtctggatacttccctgtacatgcataaatatgcatgcatgtacagaaagactgtatgtgtgtgccttgcacacacacccatacctctcagaaaaagtgtttgggtatcttaaaaactcgaaaaacaatgataaatttctcagcttgtccagacctggaacaaaatttctggaataagaaatttgtattaaagtccttttttgcactaacagttggctcttgtagcctgcaggctgaggaagtctcttctctgtgcatcagcagagttactgaaagcctctgattgagaaaaaacctccgtctgcctaaatcacttttctcgcagaagccatgcgactcccacacgacacgggcagcttcacaagccatctctttcatttctgcttgaagccccttggctgcagcaatcctgtctgccataggtttcttccttccttacctactcaagggctttttctaaggcatgcacacatatctcctgttctctgagagtaccatggtgttccttaaaagaagaaaatttctaattctgaactcaatgttttgcttttactccctttctactgacaaatcatgataagggcacaaaagctgtacagatttttttttttaaccactcaatcccaaatggaggcctacaaagaacatcgtaataacacatggaagcaaaccctgggtttttaagagcaaattctgtccccccctcactcccccaagtgacaagatactaatgaagaaagttcttcaccatagtgtttgttttaactaaactcattggagtctagttccaaatttggtagggtcatcatctctacattccttaggatttctctccctatcaagctggcccagatacaagtaccaaacagtagtctctgaagttcccccatttccttcagtaccagtctataagctactgtccgccactgattttcatttatcagggtgtcctaatcagaatcagccacccaagcaagcctctctggcccacatatctatctcttgccttcccccatgaacttcagcctgtccacacaaaagccacataaactcaagcaagaaatatgttcagccaaaacatgattatagtggcagctgaccaatcccccatcccaaattgaccatttagatgtaccaactcaccttaaattagcatgttccaatccagtcggcattgcctgaatacagtagcatcatacctatagttggtcttagataagaaatgaactacttgatatagcaaagtcctttggcttcgtaaataaccctgaggttttgtacttactttccccataggaagacagaccataggcaaactctgttttgggatctcaactccatcacctttgtttcaatattttttttctctcttgaacaaaactgagataatttagaaaacaggtgcttaattgcaataaaattactatgaagtatattaaaaatcacgacattgtaaaatctcactttagatcatcaaagaaaaccattgttactatctcctttgagcttaggaaaatgtacaagagaacaaattaaaattgaaaaattgatttcacttagaaaaacttctaggaacagggtgaaccactgattttaatttgcctaattatcttatgacaagtatcaaattaagatgacacttaaagatccttagcattaacttaatgatggagaagagtgctcaatagacagttcccagtaaggtaatgagatgccattttcagagacattctaagaagatattttgattcattaaaacattaaataaaaagccctcctcagattggaacccccaaatcgatggagccacattaataatacttttcatgcctcactttgacatgacagcattcgatttttttaaagatctttaatactttccatgagtactaaagattgtaatgagttaccttatccttagaagtagaatgtttgctttcttcttcttggaaatagtcctccaaaaagtccacttgtaccagtgacaagaagtcacttgtatagtgaccaagtacacataaaatactgattataaaaatattgtaataaaccacttcctcatttgatacaggtattaagctgaatcctcactaattcacttttgaaaagttcttaatgaacagttttattcttattccatgaacagctcttttaatacaatttccttggtatccaacttaaatcccagaattttgttccaccatggttagttatttgccatatgaatgtattcttgtttctaccaatattctaggcatgagaataccttaatactgagttggagattttgtatctgtttctcctcctttacgcccattttcctacccacagcagcaaatgacaacgtgtctgtccaggtctgtccccctgctcatcccaggatgccactcacatttttttcttcttgttaccttgaccacgctgtacagtaacatccaagagcccattctacagtgggtggttttggtctttttataactttttctcaaagtcactgatgtttgttcctgttaaatgtatagcattgtaatgagagcccatcaaatcctgagtgtcagtttgttgtccctattgtagatgaaatagtgatgtagcaaaaacctagtaaattctgaatgcttttccacgtagacttatctggaatgtgaacacaactctttggttaatagtaaatgcttaactgtagtcctgagtaggtgcatttctgtctgtctcaataaattttactttgtctgc

SEQ ID NO: 13565 - DNA, 4596 bp, Homo sapiens
cccaaactcctactgccaggaggtggaggaaggagcaggtgctgcctgtgactctgaacagcaggaccttggtgactggattcaacttgcttgggagggtctgtgctgctgtgagaaccgctctcctctgacttggcagactggtgttgttcatcgcagtgtggacaccattacccacccccgttcccctgaggtgctctggcctatgccctgagcaaggggggtcttgacatccccaggcagcacctttgggctttgttttggtgtttctacagggacaatacagaccctggagtgtgtgtgtgtgtgtgtgtgtgtgtagaccatggtgtttctctatgtttctctaagttggggggtgagcgtgtgtgacagtctactggatttctttactactgatcctttcgctgtgttaaaaatcaagtcacagagacctctcttctggatttgtcccatggggaccctgagactactaaagctgctttcttctgaaggtccagttggacagtctgggaatgtccagaaataaccagtgagaggggcagttctctggccacacccacttatgtactttaactactgtgactttgtctgcagaagagctggaaaattctcgaagctgcaccgtgtcctctgtgtgctagaataagggacaaatgggttccctgtgcttctcagctcactgtttttccttgagttctcctacaggaagcagatgagaactgcccagtcttcaggtttaggccattggtctttgatgtcatagattccaggcctgggaggtgttatgtctcttcagctgggaaaactagctcttcagagaagcctcgggtaacactgaaaaacaaaacaaaacaaaacaaaaacaggaaaaaaacaaaaaaccaaagtggtaaggattcagttcctgcctataatggtctcagagagggtcctacttttaggttttcccaggacaggacagtccccatttatacttattatcccagtttaattattcacagcaccccattttactcagaagtgttctggtctggaggataaataagaggtcaccctcctccagacccaaagatagatttgtgcctgtgttggatggggtcgtgtgtgattcagatggacattggatggcttcaaaggaatataccactagagctggcccttggcactttgtgacagtggtcaagtctgtctaatgtccttgtcttctttttcttgtgctttccccctattccagggtgtgcaccctctccccaacccccaagaaccccactactgctttccctgtgaggtaggagatatcagtgggccttggatttgaggcttcctaagatgtgcttgcattttaaaaagggagcttggtgagagctttgctaattcacaggtaaaaattattaacaatagaacttcaagcatcttgaggagcgggcatttgagggggcatggagtaatttgtatttaaaaaaccttaaagttgtgctgttcctaaactagcaaattgctcatgctgaaatttctggcataagcaggggaagtcttgtgtctggagaatagtctcataccttgcagtctgggacaccctccctactttgagaatccacctacaggaagccaaggaactttataaatcctgatgttggacttctgatacgactgggctacttccaagcaggtgctgcaggagattggcatcccccagcccctgcagttagaaaccccgaagtcttcccagccagtgagccactttgtgtatttactgtatatttattgtgccctaaatgtgcaactctcctaaagacaaaacttctctttctgatgttaagcacatgttacttcaacaagatgcttggagaacaacaaggtacccagaatttttagaagccttcagaagaggctaaaatatccagctttgggggacctggaagaaatgtctccaaaggaagcaaggcatgttttagttgagtgctctggtctcactatgaagtggggatgactgtggcttcataactctacctggctgtgggttggaagctgatggaatgagaaatgtcctttctccttctctgaggaaattttgagacttgtttcggtgtgtctgtgtgatggggatgaggctggggttgggatctgatgtatgccattcacagaagctctcaatttcagatgataggtgaattccctgcccctcccccaccactgagaagctagactttcatgcgggagaggctacttttatgtgtcgtcttccggggaagggtccctccactgaaagctagccagtcatgttttctgtttttggatttttgcaattggtttcacctcatgtctccctccctacaaagcactgcctctactgggcgtgctgccaaggccatgtgcactccatcctcatgtatcctttttcacggggaccagaacactggtacgtcatcaccaaagccaatctgctctagctgcccacagatgccaccaaaacctgctatctcttcatcaccaggtacgattctctttccacagtggacacagcaggctattttctagtttgtgctggtcacgtggtagatgaagcctcttactgccccacttagggtggccacggctgcttgtgaatgcagctttgccagtggcatatctgtcatctgattgcggtggtgaaatggaattgaggcccaaggttagaagcagccgagacgccacttggatactgatttgaacaatgtagaagtcagattctgaattccaaagttatttctcataagtacccaatggcatctctccatctacaaagttgcagtattatgcaaataaaactgacctcattttctgctatgcaataagaatacttaattctagttcccgacaagccagttgcaatatcccctaagatgctttttgagctgtcttactttgatatctgttgtgtaatgtttgtatatttctgagccagatcctttcaaagattgcctttttataaaattgaagctatagcttttaggctaaaattttaacgtagatatttttataagatatttttttcaagagtttgaatcgctttttattgtccatgataatgaaatgttgtgttctttgcatcattcactctcaaacgtagttcatgcctgtagctctcttccttttgtttctcacccttcagaaacatatttttcagtagctccaggtagatgagccttttttttttttttaaaaataccatattcaagggagtctgctgaattttaaaacgcagtcactggtgtttcttgaattgctagggactgatgttatgttcgactcagcacttgcccgtctgtattgattgtgtctttttttttttttttggagtctgctttctgtgggggtgaggccgggctgtctcgtggtggctcccactgacgggcactgagcctggtaccctgtggcatggagaagcctcagggaaaggcctgcccccccagcacatactcccatagtgtcctaggtccagccgaccattccttattctcttctatctccttgttgatctgaagcttccaatagcttgaggcctttgctgctggatgatgccctttttgggagcatcttgtctctaacctttaaaagaggggtcaatcctcatgatccctgtgtgttaagcatatgctttgcaggtgctcacactacacttacaacttgcttcttgagctatgtctctactccaggctctgttttgtgtatttatctgccatttgcatcatggtttttaaaatttattattattattattattgttgggacaggtgccatttaaattgcctccatgctccccatttgcacctagctggatcaagttgggaggctgagcaaactcatattccagttagttggagtttttaaaggctctgtttgcctggagaagcaaggaggttagaatgtaatttttttaagcgtttgcactatttagagtcctaagcccctcatgttcagctgtgctgtgtttctactgaccaagcaggagagccagcagcacttccagcatttgggaatggaagagatttcttctgtagtggataattacagcctcatagcccctgtgcagccttcgtcatgggactcagtgactcatggatatagcatcagccatggcaggaatgcacaggactgtggcatttgcagcatcaaatcaccctagtgccatgtttggttatgagattgtaaattattcgctcccccatcctcccctcccctcattttcagtggcaatagaggacccttgttgtacttcttgtttaatttgcatattatgtgtaaaatgctttcgttgaaagaaaactgaagacactgaatgtgtatgtctgtgtgggtgctctgtccctgtggttgtcatagccagtcagacttgatcactgacaccccgtacaacatattgcataggtaagatcctcgatctggtgttctctgcgtggctgttagggactgtatatcttgtaaaagaacacttgtcacatgcttgatcagttacagcaatagctgaagaaacatttcctcaaatgtattattttaacaggaatcatgttctaatttcccatcctttaattttaataaaagctgaactgtgtg

SEQ ID NO: 13566 - DNA, 1763 bp, Homo sapiens
aagaaaatttaaaatgcctgggagtggctataggggtagctctttccaacagcccaagtggggtcaactcctaagccccaccccctcacacacaccgccttccctgttttgcccttgggggagccacttctaaggctgcttacccttgggggtgttcctctatttgcctgccacctctcttgtctctccctctgaagatggactcggccccacatacacatttttgtgttacagtcattgatggactctatttttttattattacttggaccttggtcgtttttatactagcaaaatgtcttgttttaatttgtgttttttggggggagggagggagtgaacttgctgattctgtagcaaaacctgggtgggggttggggtggggggtagtttactttgttgtaaggacttgataacctggctacagcgttttctatgaaatctacttggatcccatgcctgaaatttggaagcatatgtacaaaaatcatttttacgttttatttttaataaatcattgtgtttgaccgtacatgtctaacattttttttctaggatccattccgtaccgttttttaagggatatttgtttaagactttacgtgttaattctttattcttgatgtgtacttagagaaacttaagaggtcctgtggtttttttcccctctcctgttgccctgctagttgcgtgttgaattatatcccttacaggcaaaacttttgaagtggtggatgtggctttttaaactcttaagtttctgtgcatccatctcttgtactaagcgaattgtttatcatcttgacatggttggtcatttctatgacaatttacttcaaactgtgtactgtgtagttctatatagtttgtgttaagcatgtcattcatataaactgtttaaaatttttcagatggcctagtttcatccctcttactggtttgtctgtaatgaatggttaaaaataagggttatattttaccctcaaatgcgtttttgtactttcagagcaggtttaaacgttttttttttttttttcctatatccgaactgttggcctcatggaaatccctttcccgatctttgtagcaccatctactggcagaatggcagagtagctgcgaaacaatttgtttaaaaacttgcttaagacaattgcatcagatttggaagttttgccatcaaaattctttgcagaattggaagttaacacatttgcttgtaactgagatgggcttcacaggaatgtagttgccagttcatatcacaatagccctttctatatgaggtttgaaaatgtaaactgctatgcatagcttgggcaatagccctaaattgctatgacaactaatgaaccagctacgtatactggtattttaggtgcaagttgtaaagcaaaatatctgtgtattctgcttggttaacaaatgtatatttgtagccctttcctgcaatagcattcaagttgttgtttataagagaagaacaaaagtgataataggtgaaaattgcctttctggatagaaatagagaatagcaacgtttatggatatcacaaataaagaattcaattctttacatgattgagtgagagtatgtataacctggtgggtgggttcagagtaccttttaatctagtatgcttaacttgatgttaatatttaacttaaatatttgacttacatgttgacgttgaaggctcaaagctatactaagaagctttctgaaagattgggctttaaaataaaataatattttaatattg

SEQ ID NO: 13567 - DNA, 2263 bp, Homo sapiens
gatacgttccttgaaaattcatatcataaagtcagttgtattccttgaagctatcatcgtgtgtacttggctggtacttaaattcgttttgtcaggcactcagagaatctcattttgtacttggttgtggtgccactaaacaaaacaaatgatgggagagtaagtaggccctctcaagggagcgtaagtgatgttccatattaaccacagactgtcctctccacctttagcaaacatatggtttacttcattgttttgtactacagatacatccttttagcaaaagactggaattttatcctttcaacttcaagaactttggaaatgcaagctttttgttattaccaactttttgtttctcattactgaagaaaattggaggaaaatcttcatactgaattcttctgttgcctttttcttacagaatgactgaaaatttgaaagaaaagcctataaaagtgcacatacgcaactgtgttctctgttttcctagaaaaccaaaatcaaactgagatttcaagtcgtactatggaacacctttctgtttaattcccaaagtgacatcttctcacaggtagtatgttagtaaaattttgcaattcgctggtcacacagctcccggatgaagataacagttggtagaccaaaaggtgacctcgcttagtatattgaaaacacacaccacacatcacacacagaactgaatcataccacatgctgcctatgggacttcagttactgtttcctgagttactgtttatccgctggcaatggtgtgatttgtctggatcagatccgcgctattccccaacccacctccagataatgtgagaaaatagccatgtcagtatgtaggaactctgatggtgctcagatttgtgtgttcaatcaatgggcttaaatcagcaaaatattatgcctaaagtaaatctgttcttaacaagggctctaccactgcattttcacatgtaccttcagggggttatctttttttttttcccctcctattttaatcagcaaaatccataccaaaacaacgacaacaacgccctcttaagggaccaccctttggtcaatcataacatgctgtttaaagcagctgtttacaggatgtgtagtggtatgccccttgtcatatactcttagcatatctttttttcctttggctttgcatggcttttcttcaggtactgtctcggtatcattctgctaatcattgttacagaatggtgacttcatttgtgctaacagtacaacagcagatttgggtcaggcttaatctaagtgttaacttttttttctggtgcttttttggattgatgactgtctcactttgactatacccatgttttgcatgcaatgactcatgcatggttttcttaactagctaatattaacaatttattccatataaaaatggaattttgcaacatcctttaataaggtgagggaagcatgaacctcagacttctggcactattacatagtaagcacatgaagtagtttgataataaatagcagttctagtacttcacatttcacccgtgtgtgcaatgcctttttctggggggtggggggtgagggaaaacctggtagtgaatgtgtagttggggaataaagaaaagcactaaatcctgccctttttgtgtggtttccttttgatacaactaggttattcataatgtatacctagaaaagtgaaattgaaaataccaaaagatgtatcatttttatttgaatccatcatgcagtgtacatttcagataatttccttcagtctccagataggagtgtatccaaacatctaattttatgtgcactgtgtatcttatatgaatgttttattttatataccacatgcaaaaatgtccatatgcactatttaaatgttttaaataatatattccttctttataatgctaaatctatatgagtaccatatttttataagtcagtggtctgactggtttcattttagaattaacagctgcttcaatatgttattcaatgttaatgtttggctgtgagtagaatatgtaaaagtggcatggcagcacttatgctctgtgacagtattgtgtgtcatagttgagcagtagctggtagaattaggcagttggtgatagttttactttggtacaaataaaaactgtatatctatatacaaataatatatagatatatatgtccaccagtataatggcattgctgtgtctggcacttcattgtacagacttttataataaaagaacttgaaagttct

SEQ ID NO: 13568 - DNA, 311 bp, Homo sapiens
agcctcagagttaccctctttgagccgaacctaaaataaaagtaaacaagatagagcttgggcttgcgggcccagttccagaggtggaagttacagaagaggaggtacctgggccacacgacatgagctggaaaatctctcttagagagttggagtagcacaattgcctgttttagggcagaaaccatgggctatgttaatgtcctaatgtgtagctagcagatcgtagctagtttgtattgtcttgtcaattgtacagactttttaaaaaaaacaaccaccagtgaaatgtgtgtgtatacaataaactg

SEQ ID NO: 13569 - DNA, 303 bp, Homo sapiens
cctggagctgctatcctgactttttctagagtttgaatctctcccggaactctgacctagagaggatcctggtacttctttgccatgtcctcattttcttttccaacaagaataataccttaactcacaaccaacgagtcaaagatgcatgtggacataatataaagaaaaaaaggggaagctgaggtttggatttatgccataaatgttgcccacatctttgttccatcggcttgatttaaagacaattccattagatcttttctaagccttttactctataaataaatgtatttacacaat

SEQ ID NO: 13570 - DNA, 508 bp, Homo sapiens
aaaaaaaatcctcgaaagaacaaatcatgaactatcttattataaaaggctgtacttctactgtttgaaaaaattatttctagggtttaagtaactacaagtaaaataaatttatttcttaaaaataagtgttaaaggaataactattctatgaagcagataacattaaggtaaaatataggcttagagtatgattttaacaatgatgtaacactaggtaatggaaaactcatgtaagatgttgctagatgtttttgtttttcttaagtttgagaagtaagacataaagtttagttatacattttcccaagcacatatcctatatctaaatacataattaatgcacagttgagacagtctagtttaaaaggcttaggtccttttgtagtccataagcatggtgatttggtttcatgctcatgtgtcagatatgcttccctcaaaccttgttacagcatcatcacattacctgtttgatgtaaaaaataaaaaatagaaaggtgtaagt

SEQ ID NO: 13571 - DNA, 1326 bp, Homo sapiens
ttggctactctcaagccagcacattgttagacccatcttaattaagccttacctccatgtaaagaacagcacgtctgttccaaggacctcagctcttcttgtttctacagatggcaacagctccatagggacagcttgtataattaccttcagaggccaactgacagaatcctggcaggaacagacattatcttgccagttagaagtacttctgtctcacttatgtccaaagagtggctatagatcttggccttcttccctgaatgctttttttttttggcccccaagaaagtcccttttatagcactttagcacaggcaatgctacaggaacaaagtttcaatgctgctgagagtgaaagaaaggaggaaagtctgccactctaccctgagctggcagtagggcactgagtaccctaggaagaagtcagagcaatggatacaaatgaccttgctcttggatttgctgagcatgatccctattctgatgtcagagattaggtttaaatggaatagagctatccatttgttcttactctctagggagacaatcttccaaaacagttttgggggggtcttctaaagctttcaaattggaagtaactttattcaactagagttgaataaaagaagggcaaaaataatctcacagagcttggaactgctgatagcccttactgagggcaaaagatggctatattgttagctatactcctaccaaagcaagcaaggagataggattatagataatttcacggacatttggaaataacattggtgattatacagacaagaataaactcacttcaagctggtctgttttaataaattttcaacgtaattgtctatttttttccctcccatctgcaacagaatacatttttttcagcctttatctagatgaggtaaagggaatcattcttatggtgctcttggagagtttcaggcctgtgcatgtgtgtacagcaggaggtaatatgctataatgtctgctgtaatatatttgcacagtagatgctatggatcattctgagctcagggtccagactttattcttattcccagaattttgtgttacgtttttacctcctaacatatgacacttcatcttatattaaggaaggtttagaatatctaatacgacttgaattcatttgttactaagccttctcaggcaagctgtatactagttactggtctccactgccatgccttttcaaggttcccatggtccagaatgatgtttgattcttaatttttctgtcccttttataatttgttttaatgattttgctacatttggaattcaataaaaaatgtgaacaat

SEQ ID NO: 13572 - DNA, 587 bp, Homo sapiens
ctggacttccccagggccctcttcccctccaccacacccaggtggacttgcagcccacaaggggtgaggaaaggacagcagcaggaaggaggtgcagtgcgcagatgagggcacaggagaagctaagggttatgacctccagatccttactggtccagtcctcattccctccaccccatctccacttctgattcatgctgcccctccttggtggccacaatttagccatgtcatctggtggtgaccagctccaccaagcccctttctgagcccttcctcttgactaccaggatcaccagaatctaataagttagccattctctattgcattccagattagggttagggtagggaggactgggtgttctgaggcagcctagaaagtcattctcctttgtgaagaaggctcctgccccctcgtctcctcctctgagtggaggatggaaaactactgcctgcactgccctgtccccggatcctgccgaacatctgggcatcaggagctggagcctgtgggccttgctttattcctattattgtcctaaagtctctctgggctcttggatcatgattaaacctttgactta

SEQ ID NO: 13573 - DNA, 422 bp, Homo sapiens
taacattccagccactggctgctaacaagtcaccaaaagacactgcagaaaccctgagcagaaagaggccttctggatggccaaacccaagattattaaaagatgtctctgcaaaccaacaggctaccaacttgtatccaggcctgggaatggattaggtttcagcagagctgaaagctggtggcagagtcctggagctggctctataaggcagccttgagttgcatagagatttgtattggttcagggaactctggcattccttttcccaactcctcatgtcttctcacaagccagccaactctttctctctgggcttcgggctatgcaagagcgttgtctaccttctttctttgtattttccttctttgtttccccctctttcttttttaaaaatggaaaaataaacactacagaatgag

SEQ ID NO: 13574 - DNA, 2206 bp, Homo sapiens
gtagtcgacatgggtccggcaaaacgtgcctcaccctccagcatccaacccaaggagcatacccatggtggaatccaaacagatccctgccttacaattggaacatttccagaacttaatccatgagcattggatattgaaaagaaaaccgaaacaaaaccagacccagccctacactttggtttgtcatggtgtcagcgcagcagcctacaactaagttcctaaacgccactttggactaatttaaaaaagaatcccagtttttacttttactggatggtgaaattggttgctcttgtattttatgaaaaaaaatgatttttttaaccttcatacatagaagcaaaaatactttaactgctgtaaaccttcaaaagttaatagaagtgagatcatactggtttgtttcttattttgattggagaaaaattaaattgctgcatttcgcagtgacccatttacatggcattctcagcttagactgcgtaagaagaaatatatgtggtgaaatgttggaaccatttctctcttggtctctgtttaatgttgaaagggtgagctaataggaggcactttcaacttcactccctcacgctaccccgtccccctccagactggcagtttcaaggatgcaaattgcattgcaaaatcaaactgactcatgaagcatttgggccagtgcactgtttacttccatctgtttgcagacacatttgtgcccggcgtttgggagccctttgtatcaatgttctgacaagggtccctataaccttaacctactcgaaaccggtttgggatggatatgatggggcttctgtgctattgctgggattgggagaaataaaacatgcaatttaagtggaagcgaagaaatttaaagaggattttattttgcttgggtcaatccttgttaaaagggaggtggatgtgttttccttgtgttggatggcatgagattatgtgaatgttttgatttattaaaatgaactgcaaggtttttcacaggaacgacagacatgtatgactgcatgtaattataaactcctgacctcctggtggggttggagcatctgtttcaaatgtgggacttacaagcacttctcacatgagaaattaggggcgggtgggaagggatgggacacagcttctggcaccatggatttaagaccatgttggatccaaaagttggcctgaaaccctgaagcttatgcttcacagctgggctgtaagtcagacttgaacccagctgatatgcaaggtcatggcgtgcccagggtggtgacagttgaacaaagtgtatagtacgtgcccagtggtagcgatggaaaaaagtataccaaatggactttgaaggaccaaaggttttaaaagtcaattggtatcacctccacactgactagggtagtggggtgcatttggttttcaaattgggtacttttaacactttagtgcctgactgctgttctttactgacttgattcagtcactcgtagctttattggtctgaaccagctccttgttcccaggttacagacctgcctatcgttccaataatcctgtttcacttgaatgaagggagtatgtcttaaatgtaaagtttctggttctcacactgtactctgaggtccaaatactgtctgtcaatgtgtaacctgatgtctcaaccccctgtgagaagagtccattatttggtgttcaccaacgtgggagacttcaccggaacaggcttttttgctttgggctctgctatttgtttgcagaacacccaagagcgagcaaacatgctctcttcacagcagtaccttagggttttgccattgtaaatgggtctgatgtgatatgacaagaccagagaaattggatgtaaatttacatttttgaatatgcttgttgtttcacatgatacatttagggtatgcagctccttttgtagtttttatttttactatttaagtttggaaatgatgccaaatttttgtatttctttaatcaatgtgttctcttcggtgatatatattgcattatatattgatgtgtgtatcaatatatattgatatgtattacacttacacatacaaacacatataagagggggtgaaaaccgtagcctttgcattctctatagcctctgcagagagatactaagcagcaaaatcttggtgttgtgatgtacagaaatggagaagagtattaaaccatatttaag

SEQ ID NO: 13575 - DNA, 702 bp, Homo sapiens
taatagcagaaattttgaagccagaaggacaacatatgaagcttaggagtgaagagacttcctgagcagaaatgggcgaacttcagtctttttactgtgtttttgcagtattctatatataatttccttaatttgtaaatttagtgaccattagctagtgatcatttaatggacagtgattctaacagtataaagttcacaatattctatgtccctagcctgtcatttttcagctgcatgtaaaaggaggtaggatgaattgatcattataaagatttaactattttatgctgaagtgaccatattttcaaggggtgaaaccatctcgcacacagcaatgaaggtagtcatccatagacttgaaatgagaccacatatggggatgagatccttctagttagcctagtactgctgtactggcctgtatgtacatggggtccttcaactgaggccttgcaagtcaagctggctgtgccatgtttgtagatggggcagaggaatctagaacaatgggaaacttagctatttatattaggtacagctattaaaacaaggtaggaatgaggctagacctttaacttccctaaggcatacttttctagctaccttctgccctgtgtctggcacctacatccttgatgattgttctcttacccattctggaatttttttttttttaaataaatacagaaagcatcttga

SEQ ID NO: 13576 - DNA, 3620 bp, Homo sapiens
tatctacccatcatcaaaaatcacatcagataagtaacctattttacatagtagaggctaaatacatatctaatttttaccaatggtgacattaagcctaattttccaaactaagtggagacttagtttttgaagtgttgaagtatttttaattttttaaatgaaaccatattttaagtgttaaatgaatcaatgctcacattaatttgcactcctgttggaaagtctaaaatgcttacttcaaaataagaaatgtatgtaattatatacaatcgtgtgtaaacctttacactaaggtctccatatactatttttttctactgaaaacaatttagaaagaagctattgggcagaaacagatatagatcaatacctgtttgatcactgctctccatcccatgtaccacaactatcttgctgcttaaaaggagacttagtaaagttctcttgtatgataatttggtatttactcaaatcttcaatttcttgccagggtgggaagtagaatttcatgtatgctgaagactggtaaatattaaacattctccttccagagtttctgcctgggttagtagatattatcaaagtccatatcatgaattcagaaccctttaatgtaattctaataagctgagtgactctttaatatatttacacaatgaatccaagtgactgtgaaaaggtctcattacaatgaaaccaatcctaaataattacaccaacttcttatacatttctcgtttgacttataatggacatgatttttgtggcatttagacaactgttttaaactagcattaaactgtcattgtactaattaatgtactaaatcctatgtttacattaatatgtgaaaaaagatttagaagatattttggagataaacaagacaaactgagtcaatttaacaatcctgacatgctccctccaatttaaaagcgcacacacacacacacacacacacacacacacacacacacactctcgcgctctctctctcaactatcatgatcaaagatgccttgacaaaggggtttaaacctctttcttctgctttttcctgatcttcaaacctcaaagagccaagttaaaaataattggctagcaacaggcttaacactgattcttattgtattacaaaggaaccatgaaaaaaaacactttccaactattatataatacatttcgatctttcaataaagatacgcattcacgctgtaagtgtagttcagtgtaggtgaagaaaacagcaccactgagatgaatctcatggcagaacaactcgacatgcctatgcagccacacagtggtaacttgaaggcagcacagaggtgagggattaaaaggaaaggcagattttgaaatctgactctcaggttagctggagttacaaggcagccaacaatgattatacacaatctgcaccaaacagggaaaggacctgctgctgaaaagggaagaggggtagatcctccaatgtaaatataaacatgccatagttaacaaatgataaggatgccacatttttcatgcagaaaagaaccacaggtattcagtttcttgtattatgatttctaaagaaaacctattaaatatttggaatttagatgcaagctactcattcacacagaacttttccataaacattgttccacatattgaaaaaactgtaaaattatagcactaacttgattttagaaaatgagcattttttacaactgccatttactgtatgtagaaaaaagacataaaaccttagagaaagccactaccatttttcaagttatcttttccccaacatcaacatcaacatgatatccttcattcagggcatattttttcttcccaggatcaaactgaaaacatgttaaggctatagtttagccagtaagatttaatcacaatttttcttctttaatactaagagatgggtaccttagtacccttcacctaacatctctcggtaaaaagcagacaagatcacaaattacagtaaaaatgtgctcttttttaaggtgggcagattagtttgtcaaagtctcagcccagttcaattcagttgatctcgagtggtgagtattttgtctcttgttaaaccagaccctgggcttgtctgggcagagacagaagctgatttaacagcatagagcacagcgccctacttccccacagacaggctgaattagaagcccctattacaaataagagcaccacgagctaaaatttaccaacccatttatcaggatgaccattgccatttgtcaggtgacagacagcttggtcacaacacaactgtgtcctgagcacacaagattccatcagccctgaaggacagcagaggagtattttccatcatttcaaaccacaaacaaaattaagatttaaactgtgggatgggtaagaaatccccttctttggctgggaatctccaccttaatccttaaaggaccataactggcaaaatccttagtgtacggacaaaagcaaattggaaaagccagccatttactaattcagaggaacagcatagccaaggctagcgaggcatactttccagttgaaaaaaatcaaaattttttgccttccatttttctgggtaatgtcctttaagaaaagtgaatgacagtagtaccaaaaaggtattttcctttctcatttaaaagcaaaaacctccctttttaattgcctgtagaaggcaagattttctttcatttttgtccatttgtgtttcagaatcagcacaggtttgaagattagactgttagtcatctgtgctttctttaccaactggctagaacggaacagcatcacagcaacgctgcggatcttggttacacagtgtcagagcttttgttttttgatggggttttatcctcttcaccaccactacccactccattttttttctatttttaagattagaggaaaatgaccattaagaaccagaaaaataattaatctctctggaaaaaggaaagctaaagaagactatgataccatacccatctagaaaccaagaactagtttgaaatcgtttatattcatttctgtagcatgacagggatttcaatcacctttctgaaaagagtgggctgataaacttgtaaatccacacacaactctgagaatacccactgccagcatcaaaaagcaaagatactaattttttaagccaaaaatctgtactaacacatgtaatttcttaatgtgcctaagttaatttctgtatcaattcaataaatggaattgactgaacttcccaacgccactaattattaaaatccatctgcttattctaatgctagtcaccaagagctagactccatctttccaataaaaatgagccctatgtagcactaggtttgaattctaaaattcaaaacaggcatttcattttcttaaggcacacttcctacacacagctatcaggggaaaaagctataaatgtcctgttctttttctgaagtgtggatatcaatataaaatttgttaaagaatatttttaacagctgacttacatgatcgttttcctaatacaggaatacagcgacagacctatctgaaaagtctgtttgggggcatacttttcatatcttattgactaaagcccttgagccagg

SEQ ID NO: 13577 - DNA, 394 bp, Homo sapiens
ggccccacaccaggactggactgggatgccgctagtgaggctgaggggtgccagcgtgggtgggcttctcaggcaggaggacatcttggcagtgctggcttggccattaaatggaaacctgaaggccatcctctttctgctgtgtgtctgtgtagactgggcacagccctgtggccggggggtcaggtgagtggttgggtgatgggctctgctgacgtgcagggctcagcccagggcatccaggaacaggctccagggcaggaacctgggcccaggagttgcaagtctctgcttcttaccaagcagcagctctgtaccttgggaagtcgcttaattgctctgagcttgtttcctcatctgtcaggagtgccattaaaggagaaaaatcacgtag

SEQ ID NO: 13578 - DNA, 430 bp, Homo sapiens
gaagcatggtatataacaggaaaagaaaactacatggggaaccagaagacctaagcctgaaatcccagccctgcccctaactaacttctgtgtaaactcagataagtcacctttctctgggattcaaatttttgcatcagttaaaaaaaaaggggtgggggggaatgggccaaagtctgagtcttagagacttgtaccaatgttatgctatgtctctaaatctttactctcctaagtagacttgtcagcatctaggaagaacagctagaaattttcctctgtgatattttagactgcaagttgaaaaaaataaaaagaaatgagggcaggttccagggcctgaaatgtaggtatgctgcaaggcttttacattgaatttgaccctacatcacttcaagactaatgcataatattaaacatcatgttgaag

SEQ ID NO: 13579 - DNA, 196 bp, Homo sapiens
tcctggactctaccctcctctgaaagaagctggggcttgctctgacggtctccactcccgtctgcaggcagccaggagggcaggaagcccttgctctgtgctgccatcctgcctccctcctccagcctcagggcactcgggcctgggtgggagtcaacgccttcccctctggactcaaataaaacccagtgacctc

SEQ ID NO: 13580 - DNA, 2456 bp, Homo sapiens
gaggataatggtcctacgcagggctggggttttgctacttgttcctatttatgttcctgattccattttataatacaaaactaggtaatgatgaacactttactatttgctaacttcgttggttgggcagagtggcaggagcatgggcacgagagccagatgtgtcttcacaggatccttcctggggagtggctccagggaccaggagtagttcatctaagttaaattaatggcaaggcattggattccgtctccctgctccatgcctaccctgcctatgtgaatggagttcagggcatcccagagcagatccatgctttcttccttcttcccttcttcagtgaagtcttaagaaccaggcattcctaggcttagccaaagcttaatattagttatttacactgtctaccaagaattatacctctcccttcattagagtcatcatctccgccaagatttagcctttggaacatgttcctgcccagctttccattttctaggggaatatggagaaatttaaactattgtagtcaatagttttctattattccaatctctgctcagttagtagcattagcaaactgcctaatttgagattcctttatttccttaaccctctctcctttagagagtccagaaattaaaactactgagcagcatctggaggcgggggccagggcgaaggtataatgcaagaccgagcctcatctcctccacgaagcctccctactccatcatagaacccagagaatgtcccttcggtcatttcccctcagtatcatcattggtgtcatcgcacttaggctgagttcctacatcccacagaggcagatggtcagacccaggaggaggcattgccagctctccaggctgtttgctcaagcctagagatagaggagacagatcctctctccttggatatgggggtctagctttggccccagcagccactttgtttaacccagtatcctatagtttgtgatttgagatgatttttcattcattcaacatttattgagtgcctactataaaagcaggggctctcacacatattttcttacttaaacctcctcacaactctgaagtagatgtattatccctggttctatgaatgagaacattggcccagagaggatgacccaggtcttgtagtggcagagcaagacggtaggctgagtgtcaagtagaaagtgggagagcatcctcatgtctcaggtgattctagccagactggcaaagcagaacctttcccgaggatgcctccgtcctccccaaccccatgacccctcatcttttctgtggcaatcttgcatctgttcaggacaacatccctgctgctctttaggaagcaggaccctgtctaacataaattctgtacacaaaataagaggtccctcacaggcaggcagccctccactggtgactaggaagaattcagtcactgcctgggctgtgtggttctgggccttcctgtggagctgagctgcctgaattatcatgactctgaacttggaaggatcattaagtgactgtagcctacactccatgcttccttcatattggaagaaaagtttctggtagagagtcggccgggtgcactggctcaagcctgtaatcccagcactttgggaggctgtggcaggtggatcacctgaggtcaggagttcaagaccagcctggccaacacagtgaaaccccatctctactaataatacaaaaattagccaggtgtggtggcacatgcctgtagtcccagctactcgggaggctgaggcatgagaatcgctgcaacttgcaaggtggaggttacagtgagctgaaatcacgccactgcactccactccatctcaaaaaaaaaaagagtctacattaaacagattccaaagtaaagtttcttcatcccaatgcatggccatgatttacacagacgtgcctagcatggctcatcaacatctgaacggttgttccctaccatgcctctgcaggcattccacagagtcaggagatgggttcacaggtaaagattgggggctttagtggcttgtaggggacaactgctcagttgcagggagagggagcatttctagaaatagccagattttgctgcccaactagatctgtcctcctggttttagggggcccttcttgatcccctctgagtgactgagggaggttacattgtaaaatatgtccatgagccaaacaggcttatggaaagttcttctacacacaaaaaaatcaaagctctcctctccccatccccaaccactgctagaaaattggccataatgaaactgacttgacaggttaaaagaccctgtcctagatgcccaggaatcaggtagtcacacattttatggacttcatggcagcgataagtaatctgtgatgatactaaatagaagcaataataactaactccattaaatgtcacgctgattgtctgtttttatagc

SEQ ID NO: 13581 - DNA, 296 bp, Homo sapiens
gacccagggtcaccaggccagagcctccagtggtctccaagcctctggactgggggctctcttcagtggctgaatgtccagcagagctatttccttccacagggggccttgcagggaagggtccaggacttgacatcttaagatgcgtcttgtccccttgggccagtcatttcccctctctgagcctcggtgtcttcaacctgtgaaatgggatcataatcactgccttacctccctcacggttgttgtgaggactgagtgtgtggaagtttttcataaactttggatgctagtgt

SEQ ID NO: 13582 - DNA, 242 bp, Homo sapiens
ggccccgccgcgcgcccctccgccccgcccgccccactatctttaaggagaccagagaccgcctactggagagaaaggaggaaaaaagaaataaaaatatttttattttctataaaaggaaaaaagtataacaaaatgttttattttcattttagcaaaaattgtcttataatactagctaacggcaaaggcgtttttatagggaaactatttatatgtaacatcctgatttacagcttcgg

SEQ ID NO: 13583 - DNA, 924 bp, Homo sapiens
ggagcctctctgggaagctcttcctcctgcccctcccattcctggtgggggcagaggagtgtctgcagggaaacagcttctcctctgccccgatggatgctttatttggatggcctggcaacatcacattttctgcatcaccctgagccccatttgcttcccagccctggagtttttacccggctttgcctgccacctctgcccaggacactcttccctctcgggatgtgtgatgaactcccaggagagggaagatgggagccagggcaagataggaagctctgcctgagctttccactaggcacgccagccagaccaataaaaagcgtctgtcccactctgctaagcctggttttcttgagcagagggatggaacagagggtgagagaggcagtggccgtctccacctcagctcctgctccctctgcatcagagcccttcctttcttgggggatgggccttgccctcttctcttttcccttcctgtacctttgactaacgctcagcttccgggcctgcatgcagtagacagaagaggaagaaagaacagatgttcacagctgaatctcagtgaacagaatagcagtccctggatggcagtctgcctaaagattcctttccctgccttctcccatacattccaaaaggaagttcaacagtaagcagcacctccaagactgtctccttttggccaatatcataagatggacgccataatcctgaggcctcctagaggctgagggggcaacggtgtgatccagctggctcatcccagcccaggtgggccaattattcaattttcaagaattttgttgcaagccagttgtcaaacacagccattataattatgtaaatttgcaaattatgttaaaaacaaggacaataaatattcaaaatgcatccctaattactacatttgaccac

SEQ ID NO: 13584 - DNA, 1437 bp, Homo sapiens
gaatcggctggggactgctacctctgagaagacacaaggtgatttcagactgcagaggggaaagacttccatctagtcacaaagactccttcgtccccagttgccgtctaggattgggcctcccataattgctttgccaaaataccagagccttcaagtgccaaacagagtatgtccgatggtatctgggtaagaagaaagcaaaagcaagggaccttcatgcccttctgattcccctccaccaaaccccacttcccctcataagtttgtttaaacacttatcttctggattagaatgccggttaaattccatatgctccaggatctttgactgaaaaaaaaaaagaagaagaagaaggagagcaagaaggaaagatttgtgaactggaagaaagcaacaaagattgagaagccatgtactcaagtaccaccaagggatctgccattgggaccctccagtgctggatttgatgagttaactgtgaaataccacaagcctgagaactgaattttgggacttctacccagatggaaaaataacaactatttttgttgttgttgtttgtaaatgcctcttaaattatatatttattttattctatgtatgttaatttatttagtttttaacaatctaacaataatatttcaagtgcctagactgttactttggcaatttcctggccctccactcctcatccccacaatctggcttagtgccacccacctttgccacaaagctaggatggttctgtgacccatctgtagtaatttattgtctgtctacatttctgcagatcttccgtggtcagagtgccactgcgggagctctgtatggtcaggatgtaggggttaacttggtcagagccactctatgagttggacttcagtcttgcctaggcgattttgtctaccatttgtgttttgaaagcccaaggtgctgatgtcaaagtgtaacagatatcagtgtctccccgtgtcctctccctgccaagtctcagaagaggttgggcttccatgcctgtagctttcctggtccctcacccccatggccccaggcccacagcgtgggaactcactttcccttgtgtcaagacatttctctaactcctgccattcttctggtgctactccatgcaggggtcagtgcagcagaggacagtctggagaaggtattagcaaagcaaaaggctgagaaggaacagggaacattggagctgactgttcttggtaactgattacctgccaattgctaccgagaaggttggaggtggggaaggctttgtataatcccacccacctcaccaaaacgatgaagttatgctgtcatggtcctttctggaagtttctggtgccatttctgaactgttacaacttgtatttccaaacctggttcatatttatactttgcaatccaaataaagataacccttattccat

SEQ ID NO: 13585 - DNA, 631 bp, Homo sapiens
tcctcggttccccagactcaccggacaccatctcctatgccttggagaccttctgtcacttggctcccttcttaccaccaccaagactgtcccactgggcctgacccacctatgagggaagaagtcccacctgggccagagggagttcatgtgttactcataacatgcatttcaataaaaacatctctgcggtgggccttgggtaggagagatgaacccttccggtgccaagctagtcccctctggtgtcctcgactgccctgctccctgtgtatctgcaaacctctgttctcccttctccattcatcaggaagggatctgctgggtaaagtcagactactgcctaccactttttcccaaagtagactgaaagcacatcctgtgctgggcggagcagctgtgtttggatggtttcatttcagcatgagaacagactcaaatagaacggggagacttttccctcaacaaaaggaaagacagtcctatttgcactgtatcacccttgagatactactgttacagagattagaaccacattgagtggggttttctgtgtaaatcgaaggagaaaaagaccagattactgagattggggattgtaactctgacttgccaaacaaactgctgcctc

SEQ ID NO: 13586 - DNA, 316 bp, Homo sapiens
acttatctgggaaggctggggaagtaggctctgggtccatgcctaactctgtaccgttttattcctcaaggcctatagcctgtcactccttgaagccttctctgcctgtccctccgatccttgtccaccgtctatttattgcccaatttattgtttatacggatgactgggaggcactgcaccacaacgtaggaccctggctcccctttccttgggtccttgtgttccttgcccctgtccaaccctggacagttggctctacctcagtaacactttatagcaaaatcagtgcaaataaaaatccctcagtgacctc

SEQ ID NO: 13587 - DNA, 124 bp, Homo sapiens
gatccaagacagaataatgaatggactcaaactgccttggcttcaggggagtcccgtcaggacgttgaggacttttcgaccaattcaaccctttgccccacctttattaaaatcttaaacaacg

SEQ ID NO: 13588 - DNA, 214 bp, Homo sapiens
agcctccactgaggattaagagcaacagccccagagcctgggctctgctggacttagtataatgtgaaaaaaatgtgttctcctattcctcataaagcttgtgctgtaaaatactttctcagggtgttcttgtcctcatctaccctctaccccttactgtgcaaccactgaggcaaagtagcttaatataaaaataaaactttattctgtctca

SEQ ID NO: 13589 - DNA, 496 bp, Homo sapiens
ctccattctttctccacaggcaccctgaatgggcatgcagagcctgtgtcaggccccatcccagcaggcctgggtggccactttctgacccccaaaggtggggaggggcatgggcccaggcccatcagcctccctgctgggacagggacctatggcacctgggggcagcttaggtttgggttaagttgtggtgaggggccttgccctcccgctcccagcccagggtccaacctgacccagtgatcttccatggccgttccttgtcccacccccacccgatcataccttcccccctctgccacagcttagcatgaatcttctttattgtcctgatttgtcctctttgttggtttttatttgtggggaagggcagctgagccaaaggggtcagaaattctgccctttgcctccaccacatggcattctggttttggtttctgtatagttttgggtctttctatgctggttgtatttatattaaacccctggttagtat

SEQ ID NO: 13590 - DNA, 351 bp, Homo sapiens
actgaacaaactatcagaggaaaggaagtgggactggcactatttgaggttaagacaaactgcatatgtacttcaattgctttgcacttttccgtttcagcggaagacctgaagagtggtcagaacagagcctttgatttttattatggttattttattgattattactggcaaaaacggccaggtacaacacctttttcatacaaggcccaggaggcttagtccagtctgtgctcctgggctacaaggacccagcctgagatggtcccatctgcagggccccgcaccagttggagcagatgcctccccaccaccaattgccaaaggtccaataaaatgcctcaaccacgg

SEQ ID NO: 13591 - DNA, 330 bp, Homo sapiens
agtgtcttggtgaacctggatccgagtccatgagtttgaggactacagttcatcacagggttcagcagagtacaagaccactgtctaattttgacttcatgggaattttggttttatcttcccttcttctaccctaaatcttaactttatggaagggcctctattttacatcatataatttctgcccataattgtattgaaataggaaagttgctgctcttgcacttgctggaatgtacagggtgggctggttggccctatgtacctaatctgaaaaactaaatatcgttctgtcagggcctttgcataaagccatttgtgtgtacatgc

SEQ ID NO: 13592 - DNA, 504 bp, Homo sapiens
aaagaactgatatttaatttcagtcttcagactggtcagcattagaaaattcttggctttattgtactgggtattaagaccttgctcttcctagtccttttaatgctgtgtgttctgttaagttctttcatttgtttgtaattttgtttttcagcaaatttatattgttttgctaggtgttcatcctataagaagcaggattgtataggcagaaaaatgattgtaggaaagttgcaggattagcggaatgtatggttcaaccttaattatagcttcattgcaggactttactgtttctccattttctagaagctgctgttgctgctttgtgatgacgtgagatcaataagaagaacctagtctagagacaatgatgctagtttgcatatgttttcctatgcaataattgttttcccagttattcaaagcagctttctatatgtagagatgcaaattattaagttgtttccaatacaataaataaaagcatctgtttttcacttt

SEQ ID NO: 13593 - DNA, 1829 bp, Homo sapiens
tgtgggtcctgtgaccgcggcagctcctcagcggagccgcagactgtcctgccctgcagcatgtgcctaaaggctcaaggggatattcctctggggtggccactcccaccaccctgaccctgtctttctctctggcctgctgctctctcaacatcacatacagcttcagctgcctggaggccagaaggaaagggcagtgcaggggaggcctgagcccgacttagccagccctggctgttgtattaccaaagcagggtccatgtttgctgccttaaccctgtctcctctctgttactcagagggcctcatctcagacaaggcccagcctgctttttctcagccctgactttctaatgggctttcccccctaggtcagtcttgctggatttgtgcttttcttttgtggtttctctggccctgagaatagcatggggcttgtaaacctttgggctagatccctcctttcattgctgttgtctctgctcttccctctcctggctgtggttatttattattagtggtgtggcactgggagctgctcctaaggaagcagggagcaaatcccacctttaccccaccttcctgggaaaggcctccaaagcaaaggatctggaccagtttccctgctgtgctgtggcccaggccagagcctgtgggcaggcaggcagggcatagcgacagtgtgggacctgcccccagcttctgccacgctttatgcccttgcctctctggacgctctgcaccaaccccaggctactgagccaccttccctcctcatgccttccctgagctttggtgcatctcatctggactatgggttgtactgtgaccatcccaacacctcaccctctgtctacaaggaaatgggaggtggagcctcctggctgagaaattgttttgcaaatggatctatttttgtatgaaaaaaaaaatttttttaaagaaaactgttccttccccctttcccctccataatgtaagaagctttggtggcaggttacagagttctgggatttcttctcacaggcccaatcctgaatgtgcccctggaccttctggacccttgagtccaaggcagatcctctctcccagggaatccgacacaggaggaaccccttctctggttgagctgggccaggcctaagagtagcaggaactctaagaccacagagttttttataaatgtataaatgtatcaagccaaatgtgcagatgctaactggacattctggggaactgggcaccaggagtgccttcatacactgtaccccagctctcttctaaaagagaagtgggtgggcacactgaactgtttggtggccccaaccacaggaagctgcaattctctggcttagggtgatacttttgccctccttgtgcccctctcagctttccatccccagctaggaagaaagaatggcactcttgggcttggcccagaattagagttattagagcaagagagagcttaggaagcatgagggcaactatagtgaggccttattgccaggagggagggttttggttgctggcgcttgtgtataaaggggcaagagcagctcctttggactattcctgggaggactctgatgcagggcgtctgttgctcccctgggtcacctcctccctgctcgctgacatctggggctttgaccctttcttttttaatctacttttgctaagatgcatttaataaaaaaaaagagagagagagagaggtgtgagggacaaaatgcaaacctatttcccttgcctcataggcttctgggatgtcatcacctccagtttgttggttttgtttccaactgttaataaagcattgaaacagt

SEQ ID NO: 13594 - DNA, 592 bp, Homo sapiens
gagtggcttgggatgctgtgtcccaaggaatttcttttcacctcttggttgggctggagggaaaaggagtggctcctagagtcctgggggtcaccccagggcttttgctgactctgggaaagagtctggagaccacatttggttctcgaaccatctacctgcttttcctctctctcccaaggcctgacaatggtacctattagggatgagatacagacaaggatagctatctgggacattattggcagtgggccctggaggccagtccctagccccccttgccccttatttcttccctgcttccctcgaacccagagatttttgagggatgaacgggtagacaaggactgagattgcctctgacttcctcctcccctgggttctgacttcttcctccccttgcttccagggaagatgaagagagagagatttggaaggggctctggctccctaacacctgaatcccagatgatgggaagtatgttttcaagtgtggggaggatatgaaaatgttctgttctcacttttggctttatgtccattttaccactgtttttatccaataaactaagtcggtattttttgtaccttt

SEQ ID NO: 13595 - DNA, 2195 bp, Homo sapiens
aggccagggaagccttgacccccagtgatgctgctgtccctatcttcaagctgtcagaccacaccatcaatgatccagagcaacacagccaaaagctggaatcgcccttatttccaccctcacctccaagggtggaaacttgccccttcccatttctagagctggaacccactcctttttttcccattgttctatcatctctaggaccggaactaccttctcttctgtcatgaccctatctagggtggtgaaatgcctgaaatctctggggctggaaaccatccatcaaggtctctagtagttctggcccacctctttccccaccctggctccatgacccaccccactctggatgccagggtcactggggttgggctggggagaggaacaggccttgggaatcaggagctggagccaggatgcgaagcagctgtaatggtctgagcggatttattgacaatgaataaagggcacgaaggccaggccagggcctgggcctcttgtgctaagagggcagggggcctacggtgctattgctttaggggcccaccacgggcaggggcctgctcccagctgccacgctctatcatatggagcgaggtgttggggaaggcggggcaggcagcctgttgcaggcaggggaaggagaagagactgaggggctgtgacctctcctgaggcccccagcctgagactgtgcaactccaggtggaagtagagctggtccctcagctggggggcagtgctgtccagtggaggggagggctttcacgcccacccaccccctggccctgccagctggtagtccatcagcacaatgaaggagacttggagaagaggaagaataacactgttgcttcctgttcaagctgtgtccagcttttcccctggggctccaggaccttccctacctccaccaccaaaccaagggatttatagcaaaggctaagcctgcagtttactcggggggttcagggagccgaaaggcttaaatagtttaagtaggtgatgggaagatgagattacctcatttagggctcaggcagactcacctcacatactccctgctccctgtggtagagacacctgagagaaaggggaggggtcaacaatgagagaccaggagtaggtcctatcagtgccccccagagtagagagcaataagagcccagcccagtgcagtcccggctgtgttttcctacctggtgatcagaagtgtctggtttgcttggctgcccatttgcctcttgagtgggcagccctgggcttgggcccctccctccggccctcagtgttggctctgcagaagctctggggttcccttcaagtgcacgaggggttaggctgctgtccctgagtcctccattctgtactggggggctggctaggacctggggctgtggcctctcagggggcagcctctccatggcaggcatccctgccttgggctgccctcccccagacccctgaccaccccctgggtcctgtcccccaccagagccccagctcctgtctgtgggggagccatcacggtgttcgtgcagtccatagcgcttctcaatgtgtgtcacccggaacctgggaggggagggaacactggggtttaggaccacaactcagaggctgcttggccctcccctctgaccagggacatcctgagtttggtggctacttccctctggcctaaggtaggggaggccttctcagattgtggggcacattgtgtagcctgacttctgccggagctcccagtccaggaggaaagagccaaggcccacttttgggatcaggtgcctgatcactgggccccctacctcagcccccctttccctggagcacctgccccacctgcccacagagaacacagtggtctcccctgtccgggggcggctttttccttccttggagcgtccctgacggacaagtggaggcctcttgctgcggctgcaatggaggcaaggggctgcagagcccaggtgcactgtgtgatgatgggagggggctccgtcctgcaggctggaggtggcatccacactggacagcagggaggaggggagtgagggtaacatttccatttcccttcatgttttgtttcttacgttctttcagcatgctccttaaaaccccagaagccccaatttccccaagccccattttttcttgtctttatctaataaactcaatattaagatgtt

SEQ ID NO: 13596 - DNA, 547 bp, Homo sapiens
ccctaggaccagcagtctgagagggtaggtaccagaagacccagaaactcttatcgtggcactgttgcagcttcctctgccctggctggaaagactccagaatccagtgtggtgctgtggaaggagcactggactaaaggcttcagtggctgcgtgtcccaggacaggtcatggcccctctctgggcccagcccatttatctataccatgaggtaactgaagtaaggagagcagtgaatgtcaaactgtgtttcttagagccataagccccacatattatccctgaacaagggcagctcctgctttatatatttgatacgtaggggttccatgagagattttgggttttaaaggaatggttttactgcattaaagaaaaaaaatgctttggaaaccagaggcctgggtgatgttaaagtctatcctgtcccacttcctacattctgggactaccgtgaagcctggagtagggagagcgagtttgggagctgggactcggggagtcaaaaatagatgagtaattgtcaataaacctgggaaccaaaag

SEQ ID NO: 13597 - DNA, 924 bp, Homo sapiens
gccccctactggccggccggcccccctcccccagccgccggccagctcccaaatggcccattccagggcctcactctccaccccttcagcgtggacttcctggccagggccccaagtgggggtatcactgacctcatgaccacgctggcccttctcccatgcagggtccaggtcctctcccctcatttccatctcccagcccccaggggccccttcccctttatggggcttcccccatctgatgcccaagagggctcctctgcaatgactgggctccttcccttgacttccagggagcaccccctcgatttgggcagatggtggagtcaagggtgggcagcgtacttctaactcattgtttccctcatggccgaccagggcggggatagcatgcccaattttagccctgaagcagggctgaactggggagcccctttccctgggagctcccagaggaaactcttgaccaccagtggctccctgaagggcttttgttaccaaaggtggggtagggacgggggtgggagtggagcggaggccttgttttcccgtgctgctcctggactggcccacctgcctgccacatgcccacgcctagtcccatctgggcccccattccctgctggtcatgcagtgtctgtatataaggaccttggaatgacgtccccatttctgcctgatttgcaacttttcttgttgatgtcgtgttgtcttgggggacccctctggggggggacctgccctgtgccccctcctccctgccgcagtgccccccaacccaggcctctattgttccatgttgtaaatacccctggggccatggtgggatgggggtgcaggccagggaaacaacgggtgggtgggggtggggacgggggtaacatttgcctatcagcagagctgggcttttatttaatttttctt

SEQ ID NO: 13598 - DNA, 495 bp, Homo sapiens
tggagcaggtttactgtgcctgcccgtgttgggggccagcctgagccagcagtgggaggtggggccttagtgcctcaccgggcacacggattaggctgagtgaagattaagggagggtgtgctctgtggtctcctccctgccctctccccactggggagagacctgtgatttgccaagtccctggaccctggaccagctactgggccttatgggttgggggtggtaggcaggtgagcgtaagtggggagggaaatgggtaagaagtctactccaaacctaggtctctatgtcagaccagacctaggtgcttctctaggagggaaacagggagacctggggtcctgtggataactgagtggggagtctgccaggggagggcaccttcccattgtgccttctgtgtgtattgtgcattaacctcttcctcaccactaggcttctggggctgggtcccacatgcccttgaccctgacaataaagttctctatttttgg

SEQ ID NO: 13599 - DNA, 415 bp, Homo sapiens
acatacctcagacgcctctggatccaagaaccaggggcctgaggatctgtggacaagagctggtttctaaaatcttgtaactcactagctagcggcggcctgagaactttagggtgactgatgctacccccacagaggaggcaagagccccaggactaacagctgactgaccaaagcagccccttgtaagcagctctgagtcttttggaggacagggacggtttgtggctgagataagtgtttcctggcaaaacatatgtggagcacaaagggtcagtcctctggcagaacagatgccacggagtatcacaggcaggaaagggtggccttcttgggtagcaggagtcagggggctgtaccctgggggtgccaggaaatgctctctgacctatcaataaaggaaaagcagtgattc

SEQ ID NO: 13600 - DNA, 1354 bp, Homo sapiens
cctgtgctgggacctagtgtcaagtacccatagggaaaggcaggtctttctggaaattgtctttagaagaaagaattgtatttctttaatctagtatggttactccagataagtgggtgaacttattgttcttggccatgaggctgggagcctagtcacggagtttagctatagggagaatgtttgtaacttaatcagaaaaaaaatatctgcaaaatgtactccatcattttgatgtctgccaaacccaggttgggagttttaaactttttgttctgcttcagccatggttcacacatatgacacactcccgtcaggaatttctctccttacacgcactgattttcaagtgggagggaattaggggcttatgtatattggataccacctctttgaagagtcttgagagtccttcttgcacaggcctgccccttggttgagaaccattgttccaagtgaaggcacaaactctcaatatctaaaataagtgcaaggaagcagtctctttggtcagtaacaagtgcaatggaaagaaaacgatcccttccttcttccactttcacagcttttctctgaactaggagaacctgggggtggatttgggtgggtggggccaaagaggaggcttctattgataaatccagagcctcaaggggcccagccacgtcaaacttctctccctcagggactctccagcaccaaaaggcagaaggtggaagccgtttttcccccagagccctgtgtttttgtgaaagcctcactgtggctcctctgttttacatactcattagtaagtgggaggtccactggggcaacagacactgccacaatttcagtgttgtgttcagccaaggggacggtctgggcaggcagcttaagtgtgagtttagtcacaactcctgagtgtcccgctctcctgcttacctaggaggtgagtgccaggaaaatacaccaaatgcttctagtattgtttccccacttaaaatagtcctgcttaaattcacatggtgtggtctgatgttctgagagcatcaggaaatacaacccttttgcccatttacccttctccccggatcccaaggtggtctgttgctctggcttcctttcattgtcttaggccttcatggagtggatgctgcctcctcctggctgtttttgtgcctgtttgaagctactgctgcctccatttctgggaaagacctttgagagcctagcccaggcctaagggctatgtttggtaccagtgttttgtctttagcttttctatgtgattgtgccgtcattctgttttaagctcatggatcaatggatttgtttacaatgtgatattttctattaaatccagtattttcaa

SEQ ID NO: 13601 - DNA, 3766 bp, Homo sapiens
cagtttgtgtcgaagccccagtgctctgcctggaaacctggttctcttctgacatctaagaagactgcagcaaggtcagaggttttagcctcctgaggctgaccttgctagtctgcccactccctacccccagcttcggaaaatacagagaccaccaccacgtaccctgtattccccaaggtgatgaagaagcactttggggctttttttcagggtcctgaaactttgtgtcaaacagacaatgcaggggcagggtgtggtttggggggaaatttttctttttcagaagacagaacacagatgtggacacatatccggaaactgcagctgcttgaatgccttcccagcccctccttctccctccctccctccgcccccccccccttcctcttttccattgtctttggctctcacaggagctagctgcctgggaggaattgttaactgagtaccagggtacctttaaagaagacccttggagtcttctataccttcttctccttccccatctcactccaccccactttgtccctgatgtcttggggaaggtgtagaacaccctagcagttcctattgtatatacttgggagccactgagaacagaggacggccagtgagtccaagcctcgttcctccttctgcctccccggagccacaggatggatttaggagccactgctcagtgcacttctcccttccaactgcatcaactaactctcgggggtgttctgctcaccacaccgtccttcggttcttactgagtcacagactcgcctgcccactacgtgtcctgggttctctctactcagatcccttccagaaactttatatgggtagaggaagccagggcggcaaatgcgagaccaaatatcattttgccaatgagtctgaggctgtggtctctggatccagtcattatgtttttatagaataattaaaccggatgctaacggtgttttaaaaaataataataaaacaacttgtttccttttggccacccccaggaagggctgatttcaaaatctgggggcgagcaacctcaaggaacacaatttccctccctatcaacaagaggattttaacagcaaagaagagaggcagcacctcccattggcagaatgaccgctgagccaggctgggtttgggtttcttctcttctgattctgctgctcactgtcatagccttttgtgtatagtgatgtgtctgtatctttaatgtaaatagagagatgatgaaaaaagagtctattttagtgttaggaagccccagcaggggagtcggaagagcttggaagagctggggagagggtaggggaaaggtttttccaggggccactgggtttgagccctgcttctgtgcacagccacaccaccctctcccgacagccctcaaagacgtagcaactctttctctcaaggtgctaaaggactcagaaggtgcagcacgtccagtgggtaggtacttgttgcatgcaaaagctgtagtgtatctggtccttcctccccagcttttgtgtggggttcttgctttgtgtggtattttgttttcccctctaatgagagggcatggcctgagtcagaagagctaccccaggtgaaactggaagtgcatgaggcagagcgtccgtagcatttccagtttgttctgtataggaacagaggtgcctccgggaaggaggcagcgaggtaggtagctatgataggcacctaatgcttctcaaggacttattttttccttcttgaagactagtagtaacatcttatgatttagagtaagttgattgtaaccataggtatttattgattggaggaagggagggtcatattattttcggctttatttatgtaacatttgctagcttgtaaaaggcgaatgtgaaatattgcatctgcattttccaaggctgattcgtgtagctacccttgccacagttgtgacggatgtatggatgttcttgaacatttcagaaggagtggtagaaaaaaacacacattcagccaaccacttatatgaattgaatgtatcagaagtgtactgaagggactggagatggttttcctcagatgagggggccccaaaattgatagtgcacatctgcacgctttctgcgaggcctcagaacttcccagggcccctccctcaaattgtctccatgggaaacttgacccagtggcaagttgcactttggtgatcttggtggtctacacacccgttctgtggagagtcgatttacataagctgtgtatacacacacacacacacacacacacacccctaccccacactgactgtctaccgacaaagaccctatttcctggcaaacggcctcctgaaccctgactttttgtgtacatacttgtaaacacggatttttctgggttttggtttgctttttccttttttccccctgcccctgttctagcttgttcttcttggtttgctttcaacctgcttgatggatgtctgcagagtgctctctaagagtccacctcagtgcctcgtgtgctcagtggtcatgggaaaggagcgaaggaaccatccttggttctcccagcttggttgtgtagcaatccctcagcattgtttttctcagcttcttggcaaaaattaaaacaacaacaacaacaacaacaacaacaacaaacagaaggataaactggcttgcctgtggaccctccccggctctggggccagtcgagagccactgagggacccagcactcagagacacaacacacatgtgtagctgcttctggctgagtgtgtttcctgtcaccaatggcctgtttggctggacgatgcctcggcttgaccttttttgaaaagtgctggttagttcccgcccctggtaaacctggggtaggtgggggttctgtcttaactcgaggggcacctgggatccaggacgcttctagggggctctggctgcccgtgttaatgaaggacagcgcttccgcgagcaccctgggaactgggtcttgggtagcaaagccctcccagagaaaagattgggcacaactaaggctttcctgagcaggaagggggtgaagaccaatcccttcctttggtcctttggtacgcaccccctcagagctgagatggaagacatggctagttcttttcagccttgtggagcctgtcagtcgccatcatacctcgagtgaggcccagctagataatgacttgtccaagatggcacacgtggaaagttgatctgcaccagaacccggatgactgtcaccttgaagcatcctgttctccttctgtgctgtcccaggaagtgtctggcgggcgtgggcagcacagctctacactgtacgattcactagggcatcctgcgagcctcactagccttctggttcatgcctttgacaagcatttttgtgccccctctgcttactgtgacagtcgatgatgaatcttgcgttgccattttctgctgtgggtaactgcgtgcagtgtcttgccttgctttctcttcttactgtcccacagcttggtttcatgttacaaacagaaaagctcgaggctcccaccccgccacatcccaacttcatttccccctcactgtagcccatttccaccccaccacaaagttgccacaggttttctttgtatagaatatttattttgaagctctattttaatagtatttattttagaaagtctactattgtaagagttcttctgtttgtgaagaaaaaaacaagttaaaaactgaatgtactgatttagaaaatatatataaatatatattgttaaatat

SEQ ID NO: 13602 - DNA, 1913 bp, Homo sapiens
ggaatgtttgttcctggaaaggctggaggagaaccattacaacacctatatatccaagaagcatgcagagaagaattggtttgttggcctcaagaagaatgggagctgcaaacgcggtcctcggactcactatggccagaaagcaatcttgtttctccccctgccagtctcttctgattaaagagatctgttctgggtgttgaccactccagagaagtttcgaggggtcctcacctggttgacccaaaaatgttcccttgaccattggctgcgctaacccccagcccacagagcctgaatttgtaagcaacttgcttctaaatgcccagttcacttctttgcagagccttttacccctgcacagtttagaacagagggaccaaattgcttctaggagtcaactggctggccagtctgggtctgggtttggatctccaattgcctcttgcaggctgagtccctccatgcaaaagtggggctaaatgaagtgtgttaaggggtcggctaagtgggacattagtaactgcacactatttccctctactgagtaaaccctatctgtgattcccccaaacatctggcatggctcccttttgtccttcctgtgccctgcaaatattagcaaagaagcttcatgccaggttaggaaggcagcattccatgaccagaaacagggacaaagaaatccccccttcagaacagaggcatttaaaatggaaaagagagattggattttggtgggtaacttagaaggatggcatctccatgtagaataaatgaagaaagggaggcccagccgcaggaaggcagaataaatccttgggagtcattaccacgccttgaccttcccaaggttactcagcagcagagagccctgggtgacttcaggtggagagcactagaagtggtttcctgataacaagcaaggatatcagagctgggaaattcatgtggatctggggactgagtgtgggagtgcagagaaagaaagggaaactggctgaggggataccataaaaagaggatgatttcagaaggagaaggaaaaagaaagtaatgccacacattgtgcttggcccctggtaagcagaggctttggggtcctagcccagtgcttctccaacactgaagtgcttgcagatcatctggggacctggtttgaatggagattctgattcagtgggttgggggcagagtttctgcagttccatcaggtcccccccaggtgcaggtgctgacaatactgctgccttacccgccatacattaaggagcagggtcctggtcctaaagagttattcaaatgaaggtggttcgacgccccgaacctcacctgacctcaactaacccttaaaaatgcacacctcatgagtctacctgagcattcaggcagcactgacaatagttatgcctgtactaaggagcatgattttaagaggctttggcccaatgcctataaaatgcccatttcgaagatatacaaaaacatacttcaaaaatgttaaacccttaccaacagcttttcccaggagaccatttgtattaccattacttgtataaatacacttcctgcttaaacttgacccaggtggctagcaaattagaaacaccattcatctctaacatatgatactgatgccatgtaaaggcctttaataagtcattgaaatttactgtgagactgtatgttttaattgcatttaaaaatatatagcttgaaagcagttaaactgattagtattcaggcactgagaatgatagtaataggatacaatgtataagctactcacttatctgatacttatttacctataaaatgagatttttgttttccactgtgctattacaaattttcttttgaaagtaggaactcttaagcaatggtaattgtgaataaaaattgatgagagtgtt

SEQ ID NO: 13603 - DNA, 3958 bp, Homo sapiens
ctgccttaataagaatggttgccttaaagaaagtcgaattaatagcttttattgtataaactatcagtttgtcctgtagaggttttgttgttttattttttattgttttcatctgttgttttgttttaaatacgcactacatgtggtttatagagggccaagacttggcaacagaagcagttgagtcgtcatcacttttcagtgatgggagagtagatggtgaaatttattagttaatatatcccagaaattagaaaccttaatatgtggacgtaatctccacagtcaaagaaggatggcacctaaaccaccagtgcccaaagtctgtgtgatgaactttctcttcatactttttttcacagttggctggatgaaattttctagactttctgttggtgtatcccccccctgtatagttaggatagcatttttgatttatgcatggaaacctgaaaaaaagtttacaagtgtatatcagaaaagggaagttgtgccttttatagctattactgtctggttttaacaatttcctttatatttagtgaactacgcttgctcattttttcttacataattttttattcaagttattgtacagctgtttaagatgggcagctagttcgtagctttcccaaataaactctaaacattaatcaatcatctgtgtgaaaatgggttggtgcttctaacctgatggcacttagctatcagaagaccacaaaaattgactcaaatctccagtattcttgtcaaaaaaaaaaaaaaaaaagctcatattttgtatatatctgcttcagtggagaattatataggttgtgcaaattaacagtcctaactggtatagagcacctagtccagtgacctgctgggtaaactgtggatgatggttgcaaaagactaatttaaaaaataactaccaagaggccctgtctgtacctaacgccctatttttgcaatggctatatggcaagaaagctggtaaactatttgtctttcaggaccttttgaagtagtttgtataacttcttaaaagttgtgattccagataaccagctgtaacacagctgagagacttttaatcagacaaagtaattcctctcactaaactttacccaaaaactaaatctctaatatggcaaaaatggctagacacccattttcacattcccatctgtcaccaattggttaatctttcctgatggtacaggaaagctcagctactgatttttgtgatttagaactgtatgtcagacatccatgtttgtaaaactacacatccctaatgtgtgccatagagtttaacacaagtcctgtgaatttcttcactgttgaaaattattttaaacaaaatagaagctgtagtagccctttctgtgtgcaccttaccaactttctgtaaactcaaaacttaacatatttactaagccacaagaaatttgatttctattcaaggtggccaaattatttgtgtaatagaaaactgaaaatctaatattaaaaatatggaacttctaatatatttttatatttagttatagtttcagatatatatcatattggtattcactaatctgggaagggaagggctactgcagctttacatgcaatttattaaaatgattgtaaaatagcttgtatagtgtaaaataagaatgatttttagatgagattgttttatcatgacatgttatatattttttgtaggggtcaaagaaatgctgatggataacctatatgatttatagtttgtacatgcattcatacaggcagcgatggtctcagaaaccaaacagtttgctctaggggaagagggagatggagactggtcctgtgtgcagtgaaggttgctgaggctctgacccagtgagattacagaggaagttatcctctgcctcccattctgaccacccttctcattccaacagtgagtctgtcagcgcaggtttagtttactcaatctccccttgcactaaagtatgtaaagtatgtaaacaggagacaggaaggtggtgcttacatccttaaaggcaccatctaatagcgggttactttcacatacagccctcccccagcagttgaatgacaacagaagcttcagaagtttggcaatagtttgcatagaggtaccagcaatatgtaaatagtgcagaatctcataggttgccaataatacactaattcctttctatcctacaacaagagtttatttccaaataaaatgaggacatgtttttgttttctttgaatgctttttgaatgttatttgttattttcagtattttggagaaattatttaataaaaaaacaatcatttgctttttgaatgctctctaaaagggaatgtaatattttaagatggtgtgtaacccggctggataaatttttggtgcctaagaaaactgcttgaatattcttatcaatgacagtgttaagtttcaaaaagagcttctaaaacgtagattatcattcctttatagaatgttatgtggttaaaaccagaaagcacatctcacacattaatctgattttcatcccaacaatcttggcgctcaaaaaatagaactcaatgagaaaaagaagattatgtgcacttcgttgtcaataataagtcaactgatgctcatcgacaactataggaggcttttcattaaatgggaaaagaagctgtgcccttttaggatacgtgggggaaaagaaagtcatcttaattatgtttaattgtggatttaagtgctatatggtggtgctgtttgaaagcagatttatttcctatgtatgtgttatctggccatcccaacccaaactgttgaagtttgtagtaacttcagtgagagttggttactcacaacaaatcctgaaaagtatttttagtgtttgtaggtattctgtgggatactatacaagcagaactgaggcacttaggacataacacttttggggtatatatatccaaatgcctaaaactatgggaggaaaccttggccaccccaaaaggaaaactaacatgatttgtgtctatgaagtgctggataattagcatgggatgagctctgggcatgccatgaaggaaagccacgctcccttcagaattcagaggcagggagcaattccagtttcacctaagtctcataattttagttcccttttaaaaaccctgaaaactacatcaccatggaatgaaaaatattgttatacaatacattgatctgtcaaacttccagaaccatggtagccttcagtgagatttccatcttggctggtcactccctgactgtagctgtaggtgaatgtgtttttgtgtgtgtgtgtctggttttagtgtcagaagggaaataaaagtgtaaggaggacactttaaaccctttgggtggagtttcgtaatttcccagactattttcaagcaacctggtccacccaggattagtgaccaggttttcaggaaaggatttgcttctctctagaaaatgtctgaaaggattttattttctgatgaaaggctgtatgaaaataccctcctcaaataacttgcttaactacatatagattcaagtgtgtcaatattctattttgtatattaaatgctatataatggggacaaatctatattatactgtgtatggcattattaagaagctttttcattattttttatcacagtaattttaaaatgtgtaaaaattaaaaccagtgactcctgtttaaaaataaaagttgtagttttttattcatgctgaataataatctgtagttaaaaaaaaagtgtctttttacctacgcagtgaaatgtcagactgtaaaaccttgtgtggaaatgtttaacttttattttttcatttaaatttgctgttctggtattaccaaaccacacatttgtaccgaattggcagtaaatgttagccatttacagcaatgccaaatatggagaaacatcataataaaaaaatctgctttttcatta

SEQ ID NO: 13604 - DNA, 2234 bp, Homo sapiens
aaatttatctgggatgtggacatcagtgggccagatgtacaaaaaggaccttgaactcttaaattggaccagcaaactgctgcagcgcaactctcatgcagatttacatttgactgttggagcaatgaaagtaaacgtgtatctcttgttcatttttatagaacttttgcatactatattggatttacctgcggtgtgactagctttaaatgtttgtgtttatacagataagaaatgctatttctttctggttcctgcagccattgaaaaacctttttccttgcaaattataatgtttttgatagatttttatcaactgtgggaaaccaaacacaaagctgataacctttcttaaaaacgacccagtcacagtaaagaagacacaagacggccgggcgtggtagctcacgcctgtaatcccagcactttgggaggccgaggcgggcggatcacaagggcaggagatcgagaccatcctggttaacacggtgaaaccccgactctactaaaactacaaaaaaaattagctgggcgtggtggcgggcgcctgtagtcccagctactcaggaggctgaggcaggagaagtgtgaacccaggaggcggagcttgcagtgagccgagatcacaccactgcactccatccagcctgggtgacagggtgagactctgtctcaaaaaaaaaaaaaaaaggagacacaagacttactgcaaaaatatttttccaaggatttaggaaagaaaaattgccttgtattctcaagtcaggtaactcaaagcaaaaaagtgatccaaatgtagagtatgagtttgcactccaaaaatttgacattactgtaaattatctcatggaatttttgctaaaattcagagatacgggaagttcacaatctaccttattgtagacatgaaatgcgaacacttacttacatattaatgttaactcaaccttagggacctggaatggttgcattaatgctataatcgttggatcgccacatttcccaaaaataataaaaaaatcactaaccttttttaaggaaaatatttaaagttttacaaaattcaatattgcaattatcaatgtaaagtacatttgaatgcttattaaaactttcccaattaattttaactgtgttattgaatttacttttactaaactactgttctctttgtctcttttttaactaggctctgattttgacccctaatttaagctttaagaatagaaatcagctaatatagaatcagacaaaaaggggattaaatgagcagtttgagttacattattttattgtattaaatttatttgatttatattgtcatgttctcttgccagagagaatctgtaggaaaatactgtatcttgtatactgatcattggctttttctagaaaaactgtctctgattctggacaaagctcagttatagttacgagaaagatatggtacagggaggaaaatactgccttttttttttttttaaagagattttcagactaaatagaaatgtcaaaatgatgtatcaatggttcttttttagaacaagttttcaaagcataaaaagaggttgagagaaataacatatttattgattcacataagtatgtttttcttcattaatcgtctggagaaacccacttgtcattaatttgttttgggctaggttttcaaacttaccaaattgctttaaaaaagcaatttggaaggtaatttgataggctttccaacttaaccaaattttttattgtaattcttggatagtatttttgtctttttcaattcatttgtctttttcagtatagtttttgttaaggcaaatgtcttcccttaatatccaaatattgctaataaacggtagaagatgctttggaaattaaaattatctcgctgttggttagacttaacactgttaatcttcagccaaatatcacatatggatcaaattattttcttttttgttgtttaccctatcctcaacaacatttttagtttaaattattgtagagattttttttgtggtggttattttttattttgctccaaaataataaggtgcaaagctattttatgcttaactgttgctctgtcaaaacagctatgcagtggagttgcatttgatgttctagagtttgattacatgcagagttgtatatagccaaaacttctcttatcaaactctgttatgtaggcatatttatatatacattaaagactgttgtactgtgtctcaaaa

SEQ ID NO: 13605 - DNA, 1507 bp, Homo sapiens
gagagctgtatccatgtctacttatttatttatttattttttttttgagaatcacttcttggccacagcacatcacagacacagtttctggaatacaggtttgaggatacagtgttggcagcttcaagaagagaagaccttcttgccaggacataaaatgataccctcctctgggagcctgcttcgaatagtgggactcagggagataagaccttcttgctggatttttatgacacaatctctttataattttacaaataaaggaaaaaagaaccatgtaagatatgtgtgcccttcctcagggtgttctgctggttgtctgatgatggtgtcagggcagctaaggacaggataaaggcctggagagggtgcttgtgcccttatgttatcagcaccgttgttcctaggattcgtgaggggattctggaaccaataagggagttgaactggtacctgattcacgggtggactggaacaaacaggaatgtaccagacctatgttgaagctaagccgtatttataacaatgtttaagattctcagaaatcaggagatttttatcctatccataagtaatatgtaactgccataagtatagcttttagaatgtaatatgtaaactgtgatttggtcctctggaaaaaaaaaaatgaaatgaagagtgggaaggcagtttcttttctgctaattcgttctgtgatggtgagcaagcaaatcattaacctctctgttttttattgggcaaatggggataatcaggcacaggtctttccgccaatgcgttatgatgattaaagaaggtaattttgtgcagggttttaagtcaacagacagacctgggtttgaatccaagtgctggcacctacttgctcagtgatcatgaacacaattttaaatctttctgaatctcatttaaaaaaatttgtgaaacaagatgatagaattaattttgtgagattgttggactgatttgagatcatgcctatgaagtacctagcacactgcctagtacatagtagaagtccaggaaatggaagccattattatgtaaaacattttgcaaaggtactttttaactgtaacgtaaagtggtactactgtttgaaacttagatggcagtagtttgcatttctcgtgatcagaagccaaaatataaatacatactacctaaaaaatcttgaagagaggtaataatttgaaattcatcttcttaagataaaaatcagggcagggtgtggtggcttatgcctgtaatcccagtactttgggaggccgaggcgggtggatcacaaggtcaggagttcgagaccagcctggccaatatggtgaaaccccgtctctactaaaaatacaaaaaaattagctgggcgtggtggcgcatgcctgtaatcctagctacttgggagtctgaggcaggagaattgcttgaactcaggaggtgaaggttgcagtaagctgagattgtgccactgcaccccagcctgggtgacagagcaagactccatcac

SEQ ID NO: 13606 - DNA, 118 bp, Homo sapiens
cagcaagataactcctcctccttactccccaacaccctcctctcaaacctctcagtggaacaattgctttttcctaagtttttactgaaatggtatgaaaataaatgatttcccccct

SEQ ID NO: 13607 - DNA, 1079 bp, Homo sapiens
actcatgcacattggagatttatcctggtttcttaggaatactactactctgattgtgtctactgattggctatcagaaccttaggctggacctaaatagattgatttcatttctaaccatccaattctgcatgtattcataattctatcaagtcatctttgattcctggacctaataaattttttttccctttctttgggtgtccaagagaaatggtttttgccaaactctttttaaaaaacaaattgttgctatttcctagaagtttctggtttttaagatgaacataaaagtgtcagtatgcttcttttatgaggtgtactttatactttgatgaaggctaaggtgtacctaacagctttttatagtatattcatttatggagttagctgtatttttttttaaaaaagaaaagtagtaaattagcagcttttttttttaaatgaagagaacttcatgatgatttaaaagaactaatgagaatattttgacttgacttcaattactaagtattttgtataaagaacaaataggtcctgcattttataagactttttaaagctttaattattcaactaagaaccaataatggcttcttcaaggctaatatcaatagtttataagcagtatatttcacctacactaaatatgggcattttaaaagaagattccccccttcccccccagaaatctgcatttactaaatttgtcttaagtccaattgtgtttaaaggtcatgctggtcgggtgtggtggctcacacctataatcccagcactttgggaggccaaggtgggcagtcacctgaggtcaggagtttgagaccagcctgaccaacatggtgaaaccccgtctctactaaaaatacaaaaattagcttggcatggtggcgggtacctgtaatcccagctgcttgggagtgtgaggcaggagaatcgcttgaacctgggagaccgaggttgcagtgagctgaaaccgtgccattgcactccagcttaggcaacaagagtgaaactctgtctcaatcaatccatcaatcaatcaataaaatagaggtcatgctgactattacagattt

SEQ ID NO: 13608 - DNA, 442 bp, Homo sapiens
gtggacaagttattacttaataatctcacatactgaatactagtcaaacaagtttttaaatgtttctttgggtcttcatttgatgcattgactttaatttccctatacaggaaatgattggaatagaattaaaaggagtccaacattcccagctccccagttctaagaaacttttgtcaaacccaataggtttgggacacttctgtttagaattgaaagctgccagctaacagtaattcttccatagttgacttgaacttctgatgcttttattgcccagttttctctggtgggtccagtgttttgttcctaggtgtctgctgcgataaaatgaggttgtctgtagtatttaaggagaaaagagataagttttttttaattaagcaattccatttgattgaaaaaaatcaacaaaaaataaacaccgtttactcttagacaa

SEQ ID NO: 13609 - DNA, 3225 bp, Homo sapiens
gcaagccttcctcaaagagaggggcagaagcaagaagagattgttttgaagccaaaatggtacaccgatatttaagaaggaaagcgaatccaaacggttgtgatctaaagaatcaataagcctcaagccttatgtttctccaatgttacgctcgcttgcctagctttacgaatattgctttgttttctgtttatgcatagccttgatttgtttgactcccctccccccatttacatgcatgcaatcagacaggccactaaggtaaaagagtctgctctatcatagtgttgagagcgtgtgtagtgctgcatcttatgacaaggggacagacaagctgggacgtcagggaaatgaacaaaagggacgcaggttatttggggtgagtgggtggtgggagcctggagcaaggtggagggtgcagaggggctggggtagggcatgtaggagggaggtgggtgggtcaggtgagtggaaggggtgttgtatattgtgttgatgacgtacgttatttccatggaagatagccgctgtggcagctgtcacatcaccacagctccctagggtctgccgagaaggcaggcagtctttgggttctgttctttgtcacgtcccctacaagtaaattttgtttctttgaacgtttattaaaatgccaagacccaaccatttcttccacctgcttgattgtgccagtgtttgctcaggcctctttcttagtgttgctttcaaatccttctctttcctgggttgggaaggccaggcagggacagagcaaatgacacttctcttcctcttgccctccctgcctctttggtgctcttaaaagccagcagctgagaacatagcacaggcccacgtggtgagggcacccacagcttaaagacgcttccttctaaacacggcgaggtcacctctcactcttctgtctttgcaaaccgagaagagtggcatgcttctggcatcccaagtcaggattttagctcagatgaggcagaatgaagggcctctcttacaggcagtttgtgtttgattctctcgatcctggcacatccatgataaataggagtttttgaaagttggttttattaggtgttccctaatttttaccgtaataggtcatctcagcttatatgaaagtcaagtggggaactgggaaagccaaagtcagtcttgagcagagggagcacattttgtggacctggttccacctttccattccaaaccacctgtttccccttccattagcagaaactctgggggaactttgtgtctcagtcctagaatctccccaagtgagtggaagtgacatgatgcagtcttcctcatggggcacctgaaagaaattagtgtgggtgcttcgatctaccttgtctgtcagagttgaatatctctttccctatcatgctgcttctgaaaattcagttttggagcaagtcctgtgagcaagataagaatctatagaaccaagatgctcattttcagaagaaatatgttcaacctgggatcagacttccatgctctggggaatccaagtggtagcacctgtaaccctgtgtactaagtgctttgaagagaagagcaggcctcagacaccttttaattgcttaggagaaaccattgtctctgactgcaggtttgaataagttgaagaccagagaaaagtacacactgggctacaaaggaatttggagatagccaaggaacaggatttcccctagcaagctaccttctgttcaaatcatgaaaaaagactatttccccttagaatagggaagcttgctattttaaagctcttgtagtgcttttcttttaagggagatgtagtaaaagggaaaatgtagctcttagtttacacttcaaagatgtgggggtctttcagagaactaagaataacagttttatgtgcagagagagtttgccagatctgaagcatatacctcattgactaggctgttactttgggataggttgcagtaccagccacagccagcagatagaggaaaagacacacataaactcgcttctgagcgtccacttctgcactctctgctctgctgttactcagcccctgagtctgactcatctctgcacaacctctctgtgccatgaagataagtcttccatggccaaatcggtcatccgcactgcccttgggacttccgaagtgaaccattccaccagaacctttgattctgcacaagatttccttgctctgggaacaacccccaaatgcccttgggaggaacaacatgagctcaggaagcctctctttcttcacttaccattactaactctccaagcatagaaatccctgggaattgcgagaataactcccactattttaaaatttatattcagatttgtttcgtttcataagacacatcaaacaggcctatacaaaaggtttaggaaaagaaaacaatggtgagtcccggccctcttcgaattcactggcacctcatgcaagtgtaggaaggcacgctggatcgtctatctgattccaaagctgtcctttgccatctcatcccttggcctgccccccaaccctgaggatgcccctgccatccccccaacctcctcatattgcctctgaacccagatggcaatccatcccggttctctctgagggccacgggcttgggtagtggaaagggtgtttgggaaattgttaaatcagttacccgtagtagagctatttcttgtacttctaagttttctagaagtggaaggattgtagtcatcctgaaaatgggtttacttcaaaatccctcagccttgttcttcacgactgtctatactgagagtgtcatgtttccacaaagggctgacacctgagcctggattttcactcatccctgagaagccctttccagtagggtgggcaattcccaacttccttgccacaagcttcccaggctttctcccctggaaaactccagcttgagtcccagatacactcatgggctgccctgggcagccagcattcattgtaagttccctctttgaaaactggtgtgtgggtgttcagttctgtgtctggtgggtatggacagacagtaatctcctgtgatctgtgctagctgtgaggcagctctggaacgtgaagagctgtttggtttgaaccgtgaacaaaactgtgttttgagtttagctgacattaaagaaaaaagttcatcacgtgactgttaatgtaaacctggttattaaaataactatgaaattacc

SEQ ID NO: 13610 - DNA, 523 bp, Homo sapiens
gatcccaggaagacaagtgcttctaaaccttcaaagatggcaaaattgtttacaccagtgagagggagatcaaaagctaagaactaccctgtagccaggactacaactgtgtattttaaagccattattcaaggtttcttacttgacagttcctacacaaccctgttgaaaatctacaatatatgctgcatttaatgaaacatgtatatgtcaaatcagaagagaagaactataaacatatattgtgtaaagaaaaagttcagcaatggaactagtttctgcagatcaagcaaagatgtgtcttgggcatggaaccaaagttacaatgaaatattcaacccctgctgtgcaggggggtcattttaatgtaacaccacaccccatggaaacactagtcctgataataaacatcattttaaaagatcaaaacaaacaaacaaaaaaaacaagggtgggtggggagtgaagcacgaggaatacctatgaagagctatttacaataaaatgtttcatttgaaaagtc

SEQ ID NO: 13611 - DNA, 78 bp, Homo sapiens
gaaccaaggttttgaaatcccatcaggtcaccgcgaggcctgactggccttattgttgaataaatgtatctgaatatc

SEQ ID NO: 13612 - DNA, 232 bp, Homo sapiens
gacacacccatgtggctcctggacaatccaagagcagccaaatcctgcttttccagtttggctccacaagtcctccaggacagagccctcaaagcaactcccaacgagttctcaggattcaggctctggcttcaaccaaacagaactcattttgaacaccctgactgcatttttgcttttagaaagttagaataaatatggcgctttgggatcacatagttgatggagagga

SEQ ID NO: 13613 - DNA, 241 bp, Homo sapiens
gtacaccgttctgcacaggggacatcatcaggaactcgagaaactgcccatacacaatgacccagaatccctggaatcatgcttctgattgaggacatggctcacaacttagccattcattcgcattcatgtttgcatgaacaggtcaccctggcatcacttctgaacctcatcaccaccagtgaggcatcaggtagtaggggctgagagcccagaggaggtacatggaggacagtgttgg

SEQ ID NO: 13614 - DNA, 1645 bp, Homo sapiens
gcccctgggacaatgacccagaagacagccatgcctccgaaagagggccaggtcctaagctgctgcttgtgcgcgactgcacccggtattctcttcacctgaggctttccgtccgccagtgcaggaacccggtgctcgctgggcttttcctctgagattccagcaggtggcgctggagggagtcaggggacataatggcctccttgttcactttttatttcccaacactccctcttcccagattctctgcttttgccgcgtggtctctggtgtctctgacatgttcccgtcactcactgtgtctgatctgtctcactcacgttctaagcacgatagcttgctgcgtcctatctcggtcactgatgtctccaaatacgccttctttgctgtgtgggcttccagatatcaacaaaatactccctctctgttcctgtcttagccagaggcgtcgctcctgtcttgcttacttgcttggtcacgtccgtcacagccatgttcaagctatcccctgcctcttcttcgccctgttctgtgccagacgctaacacacttttctccctgtgtctgggtccaaacgtgcatcctcttggttggcccccttgtcagtcccagacgtccacttgctcttccttatgtccaatgtctgtcctcctcttcaggacatgctccatttattttccatggaagacacagggtcagagatctgtcagaggaaaatggtctccacagcaactctggagggaagctgaagacagatagcttcctcctggtgtcctggccgctggcgtgtctgccctgagatgctcgctctcctgctgggctagaacgggacgtcttctaaaaagccttgggcagggctagcaacatcgtaggtgtttattaggcttcaggatctttcccatgaacttgtgatatcattttgaaacccttcaatctggctttgttgctgccaaaggagataactgttggaagttcacactggggaaactcattttcccctgcagctcccccaaggtgcaggagggcaggatccagcagcactggggatgccgaggcaatgctgtacttgaagccagaggacccaaattgccgccctggctgtgctgcaaacaagctgtgagatcttgaatagtgttctttcatctctggaccccactttccacatctgtgcactcaagcttggactagaggacctttaagttttctttctgtttctaagacaacagtatgctgctatagccgtctgctacctcgagaagccatggcctgcctgccttttggctttgtttcaaaggaacgaccctcctcatttgggccttttagacccctgacctttccagctttgtccttcagattaatctggatgtcttttattcaaagctgagtcagtggctcttgcgaatgccccatagcagaagtcccgggaaggtaaatgccaaacccagagccatgtgagattctgactttgatcttggctgtggtttaatagcatctcaggattatttatcatattctctttttttcttattgcttataaggtgtcagttattgtttccattgttgtttactttagttctggaactgaaaccgacaggaagaaactttggaataaggaagagaagattgaccaaaccatccaaatgcc

SEQ ID NO: 13615 - DNA, 22559 bp, Homo sapiens
ggaaagctgtcctgtctctggacatttggcatggccagactctgaccccactgccctaggctcttaaatactcattgggagggtccgagtccttacctggcctagccccctcatttcacaagaagaagaatgaagtccaggaggagaagggctcattgcaggccacagaaagatttgatggtgcagcgatgagaattcctggttccaggctttgcatctggagcctttaccggttgactgttgccttccacacaaacagcctctgaaaagcactttctccatacataattctggagaagatgagggatcttgccctccaggagccttccttcctcccccaatgaggaaatcagtcactgcactggtgcaaaggcaagcagattggaatttgtgctcttcaccgattttctcagggaaagaccccttccccttgccagcagaggaacctgtagttttttccatttctttcttcagaaccaaagtatgtatcactcctcatgctcacagggattgacaggagagaattcaccaggatcttagctcaaaagacacagcctcagaatggccagatggattgcacgaaacctgacttggattcaccatcttcctcctgccataaggctgtgctcccacataacctcccagaagctccagggaagctttccaagagcaaaggcttggaaattgaatgttaagaaaattatgacataaattacatgtaaatagtgtatatgattaaatattgtccagttacatttacacacacattttgtctcatccacaatgggggcagatgagatggaggacttgatggatgggagagaataccaatacatgtcttttttttttttttttttttttgagacagtttctcctctgttgcccaggctggagttcagtggtacagtcagggcttcctgcgacctcagactccggggctcaagtgatcctccagtgtcaacctcctgagtagctggaactacaggcatgtgccatacccaactacaaggcatcttattgatttcagggcagctgctttacaaagcatctctattaataacatcactgcatagcacactgagtggcctaaaacacttataatctcatggtttctgaagggcaggaatccaagcatgacttagctgagcccaccagcttagggtggttcacaggctgcaatcagctggggctgcagttatctcaacttcaactagagaaggatgggcttccaagctcacccacacagctgttgttaggagtcagttttttgctagctgttggccagaggcttcctgcagccacttgccacgtgggcctctccacagggcagtcacaacatggcaccatgcttcactagagggagcaaacaagaggagcaagaaccagagtgagcaggagaaaagggagtgactctttctataacctgatcacagaagtgacatctccttagtcttgcctattcaattcataataaatgagtcactaggtctagctcccacaagaggggagtgtttaccaacagcttgaataccagatggtgaggaatcattggggatcatttcagaagtgacctaccacagtatctgagttctttgataatgaaattgggaattctctaatttcagcaaactgaaaatatggtccactaaccagcagcatcagcatcacctgtgagattgtttgaaatgaaaatctgtggccccacctatgatctctgaatcagaatctctggatcccagaacgctgactcgtccaagctttcctggtgattttaatgcaccctaaagtatgggaagcaccactgcagggcaagagccctcagatagtgtgcataactattacctggtgaggttgtggaacatgaacttcttggtttctatctctaataattctgattcagtagatctgggatgtatcccaggaacatgcatttttagaaagcaactcaagcaagcctgatgcaggtggttcacccttgctccttttctgtgaaccacaaggataccagccataattccctgcatctgatgcccatcagcttagcttttattatcagaccatctgcccttaatttctagcttcttgggctgaccagatgattggttgtatgaaagggtgagatgggagtggtgagttgagccgccattgcatcttctagtcatcaaggttgtctactaattggcacacattttctcttagagatgtggttggttgtcaaaaggctgtctactctagagagtattctccaggaaggagaagcttccagttgtctaattagtaaagttatctaatctactaccatggagaatagatgtggttttgcccccaccacaagctgtaaaagccccaagctgggagggacgttgcggttgaggctattcagtctaatctcccgtgcatagtcctttcaacaacattcctgggagacagtcaggggcacacacattccagaacagttacatatcgtgtatttgaagaaggctcacacagccctggaaaccatgccactggccattccccatctgactcaggttacagatcccctcccttttcccactgaccactcactctcctctggccagatttgtttctgtttctctgaaagagcagttcccacaactgcatgaggcttttgatattggccggtgggtgaagagtacagagggatgttactatacttaatttgattcttcctctccccagcagccacatctgtccttggcttccattgagctttataatcagttgaaacttctgtgtcttctgacttgaacttctgtttggacagatctttctcaattgctgcaaatatgcacatgcatttgcatatgcatacacatacacacacatacgtgaagagcgttgtttctatccatgttacatctccttggaaattttagctaaaatttcccaattctgtgcactttgatttacctataaatctgatgaatttacccataaccaggtcagttataaaaatgtttagcatgtttccaaagacaagggtaagactatttttttaaaataagaaaaacattgtgctatataattgcaattactacattctatatgtaaaccgcttgctaaaactcttttaaaaagtgtttaaaattttcatttttgaaatgtgggccagctattccctttggaaacatgttgatgctgtctttttttcatgatccacagagagtaaagtggtgattggatttggtctctacttaaacatttaaaaaaataagtgtatcatagccaaacatgatctagttaccctctttattctaattgttccctcaaatcttatatgggctgtgtgactgctggctccttacatctaatctaaataaagaacaagaagggcattgcaacattgtggaaaaccctgtaacatgttttctcagctttcaggtatactagttccctgtccaacagtattaacattctgaaatccaatattgcttttgtccttttcttatttgcttttccattattttaagatgcctttatattgtgcatgtgtatatatatgtatgtgtgtgtgtgtgtgttcattttcttcctctttgtaaatataatgcacctcatttggcagaagtttatttggggaagggaatatgcaggaatggagggtgttaggatgagggatcaggaagcctatcactaaagggaacctgtattttggtcttgattttgatattaaattgcagtgcgaccttgggcaagtcacttaacctctacacatctcagatatttgtcctctgataaaagaacctcacctctgggtttttcagcagtgctatttttatactgtatgaataggatgagaaatagtattggagagatgaaataatatatttttatagctcaattatattatcttctttttacaggtgagtaaactgaggaacagaagggtaactttctcccagacacattggtagttagtggcaaagacagtggtacttgaggcgggggtctcatgactcaaggacttagttgcacaaatgacaggatttctgctgttcagggcttccttcacagttgtgtgtgtatatgtacacgtgtgtgtatgtatgcatgcatttatcacgatatgcaccaaagagcctttacaaaacattttctaaattgatttacttcttttactcatattaacttatttttataagggatgactagtctatatagaagaaaaacttgtattgttttccataaacagaattatgtaaataatggcaaatacaatgaaaataaaataatgcattaacttcaagctaggtcctgttgctcattgcaagcacccagcctaggccttatctggcattgtttgaaaacagagagattaataagtggcagagagtgtagatgacagactagcaacaaccactttttccttgcacactcagagaaatggagtaagcagggaagaggactgagctccttctgaggagggtcagtgtcattcaatgccaggtttgggcacacatttcagggaagtggggattcagctgggtgacaggaaaggggcaaatgatatattatgtaatatgattcagtatcagaagcattgtgattggtgttagttacaggatgttacaggcactgcggggaagggattttacccagacagggttacgggcatcaggaagggctttctggaggacgtgatatccaaactgagttctgaaagggacacttacttaattctaactgcagaccagcaggttggtattgacagacagtgcatgtgtcaagcaaaggtccagagggtggacagggggtgatgttttctgagaacaggtcactctgagtgcagtgaggctggagcagattcagggaagcaaagagggtttggattctacctggaggttgaggggaaggtatagaaggattataagcagttgaaagaaacatggtcagatttgtgctttggaaagatgattctagaagcagcatgagactagattagggcagcagtggagaaggtagaaaacacattaggacttggcgattgcaacacaacactccagccttgattcagatatcaacagttttccccactaatgttcttctgatcccacattggatttagttgccatatttccctatgcatctctggtctatgacggtttctgcctttccttgtttttcatgaccttgtcagttttggtctcttttcctcttttaattgctcccattgagatgtgtggacaagcggcaaagaaggaagaaattcaagggaatgggctctgcactcactcaggtggcagctcaggtgggggcaatgtaatgtgttttggagttgggcatacttaggttagaatctgtttcttactagctgtgtgaccttctgcaaattaattaacttccctgagcccagggctgtcagaattatatcagacttacttatgtcatagacaaggaaatggctaaaaaggaaatccatctttggaggcatgtaagccttgacattgagaagtgcagccaaacctggaggtgtggccaggcaccctggtcctgcattcagggacacttgggtctgaagctctttctccttttcatcactgagtgacctgagcaacttactttacctctttaagcttcaattattcctctgctcagacttttaattgagacgagatgtatggatggcttggtatgaatgtcaattggtggtagctgtcacaatgaagcagaactgagtagattcttaataagcacatctattcctgggtcccacaccgttaagcgggagggtgtgtatgttaggggtgctctttgctactgggcctctcacttggcggtcttccctcttcggtgggacagcatatatttcctgatatgtaccccctcactctcccaactctgtctgattattccagaactcaggggacttgaggatggaggctgctggaagtgctggctctgggaatgtgcacttcgttcaccctcctctaaggggtgtcttctccccagagaagcagagacaagtgactgcttagggggtggggattctccccagctgccatggtgcaggatcaagaataacttgcgtggccaggactgcacagtggggctgcttggcttggcttcccagtacagactgcgaggcaggtgagagggaaggatgctgtgctttcaaaacgatttcaaaggtgagaacccagctgccacttctagtgctgcctttgactccttatccagggcatcacactagcttgagggatgaggctctttgagatgaacttccagacagggtaggtgagaggatggttgaagtcacatggctaatgagaagacaggctaatccattgctgtccttttctgtgagaaatccaagagttccagtagggggcagtgatgtcttcctaaatagtgtatcattggtaaagaacgtatttaatattaatagttctgaatcagactagggtagtggctgtcaaatccttttttgttgttatgttgttgttgttgtggcccacagtaagaaatgcattttatggtttatcctcgtgtgcatatgtttgtgcatatgcaacaacatagagaaatgcactcatacattctgttttgttctattcatttttaaaaacattctattctagttaaaaaatatcaaatttatgactcaccaaatgaatttctcactcattaacctgtagtttgaaaagtgctgacctggagggtggtctctaaaaaagtgcaggagggctccagcctttgttcttttctatgtattatttgatggatatcttacttctttttgagaccagagagtgtgtacatctcaaaataaaaataacagttgaggttaatgtgttttatgcattaagtctcatgcaaaacctttgtgatgactctcatgtaatcacacaacattttggtgtagttactattatttttatctccactgaggtttagagaattgatgtggcttgtctaagtccacagttagtggtgatcgaggtgaaatttgaagtcatgtcctctgatgctggagctaggaaatgaaaccattatattatattgtgtttctgtcaggtgacacatctctgagagaaatgctatcactaatatgatcatgaatagaagcattagattaaaacttgtttcatcagcctgaaatactgggctgaaatcaacacaatcattctggtgtaattgaatcaatcaaaattggttactttagaacaggattggagagaactgactttccaggaggtcttgaaaaagaaatactggtgttattgttgaccacagtcaggtaacttagcctagaaaaaaagagagactgcatttcccaaatggaaaatagaaggaggaacagaaagctttgacctatagtagtgattggtcaaaacaaattataagatcagtaagttatgttttgaagaagattccaggttgggagtgaggtgaatgagggaaacttgcaagagactccagagccaatcgtagaagactatggacatctgaggaagggaagcagccaggtggagtttcgtgggtctcacccatcatagtacccgtagctccaatggtggtagcagaaggaagatcatgaacatgagagaatagcctacttttgacatcatggaaaaagctattaggaacatccttctcatccaaatatgtgttgcaaaacaaatagcctgggaagagcccatgttcatgtacagatgctttgtttcttatgcataaatgttggtagtagcactttttttactcacttagtattcaggaatgcttaattatctacttccctaaccttccattttactgtatttttatttagggtcacacattttactgttatctatgaaaaggattttgaaaatagatacctcgcttctgtcttttattttaaccttccaaatctagcggaccatagttaaacatgatctgtatgactctcagctacttgatcttccttgcacgggccaaatatgtgtgaaggtgacttttttggttattgaactttcttgcacatagagaacttctgatgtttgttcatctggggatatatctgacatctacttcatagagacattcataggaatgcccctgaattctttgaacattgtaccagacagcaagcagtgacaatggctacatctgctttcctcctcaggggagctgccacgggctaggctgaaataacagctgcgtggtaatcctggtgaccaaaaagctacttattcataaaacaaaacaaaactaacttttgtctgttctagaacatgtagctttggggctgtagtgggtggagggaaaggatagcaaacagaaagattacttggaggattttcatttccggttgttttacagtcctaagagcttatataaactgatattctgatcctcttccaagtcctgtggcattcttttctttctttccaagttgtataaagtccatctgtctgtttctctctctctctctctttctctcttatttaggcagggtctcactctgttgcccaggctggagtgcagtggggtggccatggttcactgctacctcgaccttctagactcaggtgcttgggtgatcctcccacttcagcctcccgagtagctgggactacaggcatgtacaaccactcccagctaattttttttttttttggtagtttttgtagagatgggtttccaccatgttgcccatgctagtctcaaactcctgggctcaaatcatccacccacctcagccttccaaagtgctggggtaacaggtgtgagccatggcacccggccagttggtctcttttttctttttcctcatgtccttagcatctcccttttgcttgtgctcatttgtccctgtacttttccttcaaagcacttatcatagtttaaaagtgtactttatgtgagtttttttattttaataatccatgtgcaccacctagattagaagttccatgaaaacaggaatcttatttgggtcactcagctctgtatttctggagcccagcccagtgtctgatgcatggcaggctctcaataaagatttgttgaatgggtgaataaaaaaataaaggaatgaaatgttggacttgggttttgaccttcagggagaaagttttaaaactataatataactacttattgctcatgagtgattgagaaatcaggtgatagggctgctcacatatatagcaggtattcagcaaaagtttattgagaataataagcataatttttgtttgtttagaataagttgctatagctgtggtaggtcttttcttaattttcaaacagatagtagtttgaccagggataatcatggtcttttactgaagctgtaatgatggttgtgctaagtaatttacccacagtataggatttgatcctccaaatgatcctccaaagaaggtgaccttatctccccttttcaggtgatagaatcaaggtttaaagtatttcagatgtttgcagagattcaaaatcacttttgtctgacctggaaaatcagtgctttatataattatgtaattctgatacacgttttctctttcagaacttaggatcttcaagataaatatttctcttttgaacatttgaatgtttccctttgtcttaaggaggagggatgatagaaaatctagggagcagggaccttggcttatataagccttattgcaccaaataccacaggaaatcccttcagtgatgaatgttctatggaataaagatccaggggataggcagtacctttaaggtattttgaggcctgagtggtccagagtattgtttcataatcccaagtctctttccttgggaaatcataagttcatggtattgtgggatgtggataaaaacctcatccttgcccttgagtatctgtcagtctgtttgggggagattggatgcatatatgcaaaggactaggaagaaaagtctgagtttagctcctttgggacagaggatgcagacggttatccatctattcatccatctattcatccatctattcatccatccatccatccatccatccatccatccatccatccttccatccatccattcatttatccaaccagccaattaaccaaccaaccaaccaaccaaccaaccaaccaaccaaccaaccaaccaaccaaccaaccatctaaccacccaaccacccacatacccaaccaatgaaacaaccaactaaccaatattcaacacctctcatgtgctaaactcacaatccagtgagcaagataatgacagtccctgtcttcataagtcctatgggctccagggcaagtcagagtcctctgataaacttacctattattcttaccatcacagcttagatttgagcacttttacctcaaacactgtactaaaggttatactcttattatatcattgacttctcttaatttctcctacctgcaagaagtaattgcattgtatagttattcacataacacatgtgaagaaatgagttcaaagaggttaagagattaatcttacccaaagtcctgtagatagagagtggcagcttcaggacaccagtccaagccttatctatattgcaagtattgcataaaacctcagctgaaattttgataaattttatggaacttaagctagatagatcttgttcacctgaacatcctgtctgggatgcatggtagtagactgaacagctccactgcttatgaaatgtgtgacctcaggcaagttgttaagctcttggtgcttcatgtttatcattggcaaatggagatgataatagtacttatctcatgggattgttgtgtggatcaaatgtgtgaatatatgtaaagtgcctggcccatgttatataagtgttggctattattgttattgtgttgacagacatttcagaagagtacttgtttgggcgaagaagttaatgaacacttctttgttgaacctgtggggttaaggcatgcttagaggaatgtaatctgggctagatgcttggctattcaagtgagcatgtgacagtgatggtctcagtctgcctcccttgtcagagcatcatctgtaaatgattgcctccatcacttaccaagcacagtcacaggaagttgtgacctccctttattggaactgtcattttgaacctatgtttagtctggcagacgttttgacctccgtgatatattgctgagggtgttttgactccatgcttataactacaacattaaaaacaccaataatggctgaatttttatcaagaaagtattttcttaattaatgcttactcaatcatttttactccaagataaatgttcaatacagagcagttaaacaatttctacctttttccatcttctattttatcaaaatcattttatggagatgaattcttttgcatttggaattttacaatgatggcttataatttattgacaataatttatttaggtcaaattttagcttctgccactgaattttccatcgtagttttatttctactaagtcaaattttcctggtttaaatttgattgatttgaattttattgggataatttgattcccctgtgaatgtttgctcattaacacattctttgtgtaggttagctgttgtcagttttattttgaactgattatttcaatcgaaacggtgagggacaaatgcctaatcaccttaagcgtctatggaagccaggagtgaggccaggtaaaggcagcccagaccagatctaaatgaaacgctgtgggctaagttttcattcacagaagatgggcagagtggcagatcagaggtaactatcaatgatacaaacttcaaggaaatgatgagatacagaggaccaaagttaaagtcaatgatatatgtgaagcatgatgattttccaagccatacccaaaccctatgagctgtgcatgttatacccagcagtttaatcctggaagactcttggtgcatgttgcagggatgagttagctcagtgtgatgtagttaaagagcagtgggattggggtcaggtgatctggggtctgaacctagttctgtcactccttgtgtatactgggacaagtccatctcccacctgaggtctcagttttaccaactgtcaaaagattgccctaaaagttcatagaccccttcgaaaatctgaaaaaaaaaaaaaaaaaaaaaaccaatgaaatctcttcttggaattatgtatacacacccatacacatactttcaaaggcctcatggaccctttaatgcacgcccaaggatgatgagttaaaaacctcagtctcggtaatctgtcaggacctgtccagggttgacatgctagggcttaggtaggtgttatatatgtatcctccaggtgatgcctgagaactgacatacatactgcttatggataaaaatggagacatccagaaaagcaggatctggaaccctttgtatgcattgttggtttcttagtgttttcattaatattatgaatggttaagagcataaaccttgggattatgctacctgggtaaaaatccccactgtgtgcatgaccttgggcaaggcacttaaccattctgggcctccatttctgcatctgtaatatggaagtattaatgatatcaacttcatagggctgttggatgaaacagctaaatgttcaattgttacctcttattacctagtgattgaattcatgttctgataattttatgtcatacaaagtggcagctggtgggctttggagaccctctagctcagctctgttgttattatatgaaaagtgaaccagaaaagggaaagccttacccatggtcacccaacacatgttagggttgctctctgacactccccttagacaccaggaaagttgagccaccatgacatcatcagcataccagcttccagtgcaagaggaggctcacctccatggataaagtcccatgtgatgatctgccatatttgtagagttctctgacaccagctgtttctgttgtgagtatagagtgattcagggcaggttggacaccagtgagtataatttctacaaaagcagtttgcaagagcctctcattctacctggaaattagtcacactgattctaattacaaggcttttgtgaccccagctgactggccacccctcccagagcaagcatttcaaccacccagctgcaatgtctggagactacttgatgttactaccactaaaagaactggagctcctgggggaaacccttcagatataaccactgtattatctgacagaaagcaaaagctaaggtggaagcccactcaagaaacttccaaagactcctgggtcctgggaaatacaggatgagcccatatggctaaagttagctttgttgttgagggaactgtagatttaattgctggctggatggtttgtgttgctactccccacaaagaaattgaccctcttcttcagagcacagcaaggggtacacattaccctagtgaaagcaccttctttgccctgctggtttcagctgcaggaagtacattcttgcagtatattcactctcacatccaatgtggtatatgggtaaaagcttttgtatagagaagaaaaagtcctctacatatgttaatttctaccccatgtgtagttattggtcttttgctgtgaatgttcctggtgttttaaagggtcatattaaacgttttggggcttctgagggattggggttttgaaagtcccctggaaagtgtcaacagatgttcaacaagtgatctaattctgggttttgggaaatgaagtttgtgaacttggctgggacctcagggcttggagtcagatagctttgggaccttggagacatgacttaacctctctgggtctcagttttctcacctgtcaaatgggttatcccagaacttgccttatagaattgctgtgaaaattaaaagagataatgtacttagaatacttaactcagggccttgcttattgcaaatatttaatatataattgctattatattttgtatcctgtatactctataataaataacacagctaatgtttactgagcatttatggtgtataaagcattggattaaattctttgaatgcatgatttcattttctgtgttcacaacaacctcaagggtggtattattaacatgcccattttataggtgaggaaacaaggtcttggagaagttcagtaacttgtttgaggtccaatagcttgtgagtagcaggggcagaatttgcattcaattgatctggtccaagggcccatgctgttcgccaccaagctgctctgatctccttttgctcctgacttggcttcatcagcatggttgtctttaggttaacctggtcttcccctcaaatcctctcctgtgaaccacttggcagcacaacattgtgtgggtatgtgtgtttgttgacaaaggccagcttgcttatgatgggaggtgtgaacatttacagcaaactaaggaaactaaggctcagagaggcatatatctgtacttctaaagaggaacagtttgtcatcttactatgaatatattttaaatgaccaatgtcctagtaggagaaaggaactgcaagtgcaagcagagacaggaataaatcagagaaagaacaaaacagagtagcctagcgcacccagagcataccatcatgaaacctactttggggctatctcagtttccccaggatggttcacccatgagagaaagcagggaaaactggcttaagggagctatattttgagtgagaggagaggttgcttggaaatgactcctagaaaagaagcagcccccaccccatcaaacacacacacatacacacaaacatgcacacacttgtgtatccccacaccccaagaactcattcttttctgttatgtatctcatttttccccagtgcaggtggattgattcatagggacatttcccaaatgtcctggttgctatatagttcttctctctccgttcattccagctgcttctgaataccagattgttgaagctcttgggtccctgtgactcactctatcctgggtcactctccagatccccttgaatgagtggttccagtattcatgttctggaagaatggcataagattttatcagactgttttattatcagtgcaaaccggacaatacagaattgtaccaacatctgcagcaatatacataggtggtctgaaaatgtcaacactttgcaatccccaaaactcacatgtaagtccttccttcagagtgattttccaaggtacacagttctgctgaccaaggtatagctcctgccaaaggattcaacaactacaatgtgatttctggatgtgaatgaattcagatattcctcagccatatttatgctggttaaggtagacctaggttcaaatcttgtctcaaagtgcttagtatctgtgtagcattaacaaatcactttatctttctgagctatggctctttcaactgtaaaatggggataataaatacctatatagcaaagttattgtaaaattaatgaattaatatgtctaaagcagttagcatggtggctggaatgtaataggtcgttaatagattatggctatttttaaaacccatgacttgagcctgtaatcttggaaaaaagactcaaaaagggaattcaatgactccaaaaggaactcaaggaaatataaagaaaatacgttaaaaaacaatgacaatagcaaattcttccacaatccaagacattgttttgtgtgtgttgtgtgtgttatatgagtgtgtggttggtggttgtttttttatttccttcatgtctgggctcagtagggcacaactagaccagataagggaaacattttgagtgagagagaaggttgcttgcaaatgacatctcaaatccaaagaagaaagcaaagtgataacccttaaacattaaagttatggggatcgtgtttttgaaccatgaggtggaacaagtgacataacaaaccaccccaaaagtttctgatttaaaacagcttatcatcatctgttggtctgatggattgactgggctcacccgggcaattctcgcttgggttctctactgttgttgcagtccaatagtggccagagctggagtcatcaaaggctcctctgggctgggcatcgaagatggcttcctcacggggctaacagttgatgcttgcagttggttgggagctcagctggggctgtgatcaactggagccgtgagccatgtcgactccatgtggcttggccgtcttacagcatggtggctggttccaagagagtgcattccaagagctagcattccaggagattaaacggggagctgcaaagcttcctatgacctggcctcagaagtcacacagtgtcacatctgctatattttattggttatacaaagccagcctagagctggtataggaggggattactcaatggcatgagcactgggaagcctggttcacttggggctatcttggggactagatagtaaggcagctttacaagaccagataacattcccatctggggtaggatttttgataatgattttcatgtccatgggagaaggagtaaagatgctttgttacccacttttcataaaatctagcttgttctcttgaatcttccaccactcaacttctagcctgtgtgcatagagtttttattacccagtaaggccaaaagaacccagccttgtccttaagacatgcaggaaaaatattaggtaagtcaccttctctgtctccaagtgggcagatgatatgactctctgtccttggccagaggaggtgcaacagcattctcggcacttccttgtgggtatctggagaagtggccaaagtggagatggctcacctttaggtgcactcactatgtaagcttactctgggccacagagtggagattttcagatgagaagtttcatgatctaaagaacacacacacacacacacacacacacacacacacacacacacacacagattttgaatgaggcctcgagtgaggacatgacttggtgagcttcccatgcttgttaagtggtgggagagtgaccacagctttgttcttctcagtcttaatctgatgatcttcactgaatcactccaccacactcgttataaggtttccctttgtttctgtagtcattcctggcacttagttatttcagtgtttatatatagtgagactctttgaaaatgctataggtgagaaacccagccaaatatgtggaagtcttatggaatatgcccaagactatagatgtaaagaccatgcaggtctgctgtgggatagaaatgttagctggaagctcagcctgatctctcatgaataaggcctgggagagtttcaacaccttatctcctcaagtttacttacatactcaataaatagttgttagattccttctatgtgcctggcactgccccaggctgtagcaatagatcaatgaaaaaaacttataaagttcttgtcctcttggcacttgcaatccaatgagaatattcctgaacattcccaatggtgacagatagaaccaatctttgttcagaacaaagaccattggcaaaaatgtgctttttctcctctccccacagaggggttacagtggttaaaataatttaaatcaaattaaatttagaagcatttgatttacacatttcttctaaagtgtgagactaataagatgattttggaatggatctaaaataaagaatttcagattagagaattaagcacaatgaactaccatgaaatacattagctggggaattaatatttcattttccaaaaatcattttagaaacaatagctccctggcattgaactggagtctttgaaaactctgcctctccttggaattcttgatatgacctcatattattgcattgttaaataatctcagcattttttgggtgtaactgttttaacaagttaacacttgatgctgtttatacaacgtgtcccttggaggagcaagacagaacaggactgggagattacagcatgggaatgggatttaggctcgtcacatttggttgactgagcaattcttatgctctgatttggcttattatgatgcctacaagtcaccctaacaagtggcttaataatttgtcaaaaaaggtatctgtcatgtactcaaacctgttgtgtatgaataatctaattgaagttcacttttaaaatgataattcaacaagcatttattaagaacttactgcattctaagcaatgtagttgatggaggttgctaccctggcagatcttaactcacaaagggtcagagaaacagcagaaaaatgagtgctatgataaaagtaagacaaggagatgtaatagggagtgagtggggttaccttggctttccagggcttccgttttctcactaagtctatcatttagagctgggacctaatggaagatctctaaggttcttttagttctaacatttagtaatcacatgatttgtgctattaggtttttagaacagtcactagcaatgtctgttttttaattagcacaatatttaattgctttctgatttcagatacattttttttctcttgttcttacaaaaaccctgcagagatgaagaagctgtggtttaaggcagttatgtaacatacccaagttcacacgggcagtaaaataggctattaagcagggccttagtgagtgaaaattgattataattggatcaaaacagccttacttaaagaagttgaactaatgagttctaatttccttttaaacaccaagattctgcatttatgtgtttttcaaaaatcaccctagagatgatactctgtaagtctcatgtcagaaaaatgatcgagtggtatctataggttactttgctcccagcacagacatgaagtcttttgagccctaatggagatatgatagtgggccaaatctatataaaaatgacattccacacattgaaaaataaaagtggctattgctgctgggaatgcaaaatgaaacagctgttttggaaaatgctttgatagtttcttataaattaaacatacacttacaaagtgatccagaattgctactcctaggtatttatatcaaagaaatgaaaacttatgtatacaaaagcctatacacaaatgtttagagtggatttattcatagttgccagaaattggaacaacccaatgtcttcaaactgggaaatggataaacaaactatggtgtattcatacagtggaatactactcagtaataaaaagaaatgagcacccaatacatgcaacaacttggagttacatcaaatgcattatgctaattagaggaagtcagacttaaaatgctacatactgtatataatccatatggcattttaaaaactacaggatcagcaaacagatctgtgctgtgagttggaggaagaattgatgaaaaaagacacaagaaaattgtttgaagtgatggagctgttctatatcttgattgtagtagtgatggcattgaatgcatttgccaaaactcatagaactctgtaactaaaaaataatgaattttattatatataaattataccttcataacagggtaccctcaaatgagtagtaatatatttttgcgtgtgttttgattttaagtgctttgagtgaatagttttttttttttccagaaaagtagctcattcttattcagtgtttgttttctgaggatgtcaagtggagtcagaaccaataaaagttctatcaagaagagtctcagttaaccagattagcttgcccaggttggtggaaccatgaaaaccagattaaaaataatgggagtaatcttccattgcttccatccctaggattcacttcctgtcctgttttatacactttgtaaatggtacctctataacccattatgctttttggcatcattgctcactttgactatttgcagattacaaattatttgaggtcaaagaagtgagtggagtacataaccttcaaggtgaagcaggaagcagatgcctccttctgagtataagttctcttaggtcagatactgggaacaaatttgtttacagcaccaagcacagctctttgagggttggaatacccactaaacatctaagcaaatgtggacatttacccttcagggatacatgctgacaaattccttcctatatgccaacctgaaagaccaaccttggagatatatgaagcattgcctagtccagagtgaggcagaagactgagtcaggggtttcgacttagtcaaggaatgctcaattttcaccttttccctcttcctgcataccttcctcatgagtcatgagcccagacaaggccccagggtttttcccaatatagttcttcaggaagtcactataagtcaagtggagttggtatttatatggcatttgttccttttaaaatgtatttttaattgataaataataattgtatatatttataatgtataatgaataaactgaaaaattcaatagaaagcttcaacagtaggttcaattaagcagaagaaagaataagtgaactcaaagacaggacacttgaaattatccagtcgaaggaacaaaaagaaaaaagaataaaagaagtctatgggatctatgggaaaccatcaagagaactaatatttacataatgcaatttcagaaagagaagagagagataaagggacacaaagcctatctaaagaaataatagctgaaaacgtcccaaatctgggaagtgatatcaatattcatgtacaagaagttgtatgcaggttcttttcactttgagaaacagaaggtgaaactcaaactggcttaagtaattttaaaaaaatgtattggttcaagtgacttaaaaaccacactggttccaggagcaggttgatagtacctcaaagatgtcaccatctcttggatgtgctttccctgttcattcctaagcttcatgcagtttcagggtggtgaccagaagtttacatcttatcttccctctcccctgtgtttgactggaacagaaaaaagagtgtcttattccctagcactttggacaaaagctctggacatgatggccatttgtgacagggaagtagaataccattatttgaccagtctgggacatctgaattcagggctagagaacacagacaggggctaatggggtgcggggtagggggaaggaaaccccaaaataggaagctagattgctgttactggaaggggaatgtgcacttcagcaagatgaaatcagtatgcaattcagctcccacatatgcagaactgtaaaaaagggagctgcatttggtttcttgggacctccacctggataaactgagttcgggggttcagcatgcatctaacaagatgctcctattcccagcaaattttttcttggtgctccttgctatctccttttgagctattttcatccactcagaacctggtctgttccctccattaccatatcttaggccacaggtgtattcatgacacccaggtgcccctcttcagagagatggagagagtgggagcttttcaaaaggaatttgtactaaaaatggtaagtggcaatttgaaaaacaaacaaacgaatgaagcaaagtaacaaaaaatactgtactcaaaatgcttttaacaggacatgttttatacagcatgtgctttaagccaaattaagtaaagcctagccacagattagatcccagaaggtgagactagcaggaggtatttaaaacacctgctagttctccctctttatcccatagatgggacactgaggcccaggaaagggaacaccttgacatcagcatcaatgtcaatgccaatgtcaatgtcagagctgggcctgagaccaacatcttctacttgcagacatgatgcctctgctgcgtcagtctcctaaagttatctttcacaaggtccactggtgttaaaacagctcattttttattttaaaagtatttttaagtaatctatatgaacaaataatgaattctcatgattcccaaatgaaaaattaaacaaggaatagcatgcccccatttccctaccataggccacatttaaaaaattagtttcttgtgtattcttccagggatattttgtgtgtataaaaacaattcagtgacatactctcccgccattttaaatattatagcatactatacactctgctttgtaccttgcttatttcaaaatgtaaatcttggaaaatctttcatatgactctacaaacagtatcctcattcatttttacagctgtaaagtatctccttgcatgatgggaataacagtttatttagctggttctctagtggtgtcaatttggttatttttgatactgtgctactgtaaacaatgctgcaatcaataactttatacacatgtcatttcatgtgattgtgattatatatgtaggaaaaattccacaaaagtgaaatagcagaatactaagggcatatgcatttgttgttttgatagacgctgaatggcccttcatgatgctcttgtcaatgtattctcctacaatgcggagagtgcctttttcctcaggccctccccaacacagccagttactaatgttgtctttgagtgtttaatagttgtgaggtggtatctcaatgttttaaaatttaaactacagaaataaaaaaaaaatactgg

SEQ ID NO: 13616 - DNA, 100 bp, Homo sapiens
atcacctggcccagaagccaggccagcagcccgagaccatcctccttgcacctttgtgccaagaaaggcctatgaaaagtaaacactgacttttgaaagc

SEQ ID NO: 13617 - DNA, 1571 bp, Homo sapiens
gcatgaattgaggaacagaagaagcagagcagatgatcggagcagcatttgtttctccccaaatctagaaattttagttcatatgtacactagccagtggttgtggacaaccatttacttggtgtaaagaacttaatttcagtataaactgactctgggcagcattggtgatgctgtatcctgagttgtagcctctgtaattgtgaatattaactgagatagtgaaacatggtgtccggttttctattgcattttttcaagtggaaaagttaactaaatggttgacacacaaaaattggtggagaaattgtgcatatgccaattttttgttaaaaccttttgttttgaactatactgctttgagatctcatttcagaagaacggcatgaacagtcttcagccacagttgtgatggttgttaaatgctcacaattgtgcattcttagggtttttccatccctggggtttgcaagttgttcacttaaaacattcttaaaatggttggcttcttgtctgcaagccagctgatatggtagcaaccaaagattccagtgtttgagcatatgaaagactctgcctgcttaattgtgctagaaataacagcatctaaagtgaagacttaagaaaaacttagtgactactagattatccttaggactctgcattaactctataatgttcttggtattaaaaaaaaagcatatttgtcacagaaatttagttaacatcttacaactgaacatgtatgtatgttgcttagataaatgtaatcactgtaaacatctatatgatctgggattttgtttttattttgaaatgggagcttttttgtttacaagttcattaaaaactaaaaactgtttctgtaaggaaatgagattttttttaaacaacaaaaaatgccttgctgactcactattaaataaaaatctccccaattttttgatagactacttcaagccatttgttacatggtattcctttgcaagtcaatttaggtttcgtgttataacttttcctctttttttaagaaaaatgaaaaaagtaattcttttgtctgaaggggaaaggcattctttcatttttttctttttttttttttttttttatgacttgcaggcacaatatctagtactgcaactgccagaacttggtattgtagctgctgcccgctgactagcagctggactgattttgaataaaaatgaaagcattaaagggtttccctacaaaacatttttctttaaaatacttttgaaatggctataagcagttgactttcacccttggagagcatcacactgtgtgaggttcagtgattgttgaccctccccagcccctcctgcttctttaagttatctgtgtgcgtgcgcttcctctcaatcttctttgcacgctcatttctttttctctgacccatgagaaaggaaaacttactgatgataatttttaaatagtgtaatttattcatttatagcatgtcaggataaattaaaagaacatttgtctggaaatgctgccgggagcctattgtgtaaatgtaggtattttgtaaaataaccttgaaattg

SEQ ID NO: 13618 - DNA, 232 bp, Homo sapiens
caccactggggatgtgctggctggacggcaccaccctttcctgggaagagatgactcaagccagtggaagaccacacaccttgagaagtagaagagtcataggatttgaaagctgttagagaatttagcttccaggactgttcaatcttttggcttccctgggccacattggaagaattgtcttgggtcacacataaaatacagtaacactaatgatagctgttgaacttaa

SEQ ID NO: 13619 - DNA, 1661 bp, Homo sapiens
tgcaggaatttatttcagaaaatgtagtttacaagaataaagatttctttagataggttgttgagccaatttaagtaaagcaatgttattgtgacaacattccagtactctgaaatagccaggaaacttctttgaatggaatttgactaatatgtgtgttttcttttcttttgtttttggctgtctctggtccttgattcaagatgtattttgattcatccaagggtttccaaacttgtctgcaaattaggatcacttgagaatcctttaaaaattccaaagctcaggccatatcccaggcctattaaatcacaatctttggtgacgggtcacaggcattggtagttttgaagctctccaggtgattccaatgtgcagacaaatttgaaaactgaaccaaccacaggaacatcaagtacactgtgggcctgggtccagcttctttccagtaagtgtatctcaggggcttccaaatttagcttacatcagaatcacttggaaggcttgttaaaacccaaggctgctaggcccacccccagagtttgatacagtagacctcaggtgggacccaaaaatttgcatttctaacacattctcagctgatgcagtccaggctccatgctttgaaaaccactggtctagctttagataggatattgagccaatttaaataaagcaatatactggtctagctgagttctagaacttctctctttagctggccatctgaatactcccccatcactaattgttaaaaaaagaatcaactgttcttactctagagctcttttttcctttctgctgatttgctggaagcactacaagacttctgtttgttcgttcgtttgtttgtttgtttgtttttaaagatggggtcttgttatattgcctaggctggaatgcagtggttattcacaggcatgattataacacactactctctctaactcctggcctcaagccatcctcccaaatagatgggactactgatgcacactgccatgctggccttacgaaatgttttaataggcatttcactaatagggatctggagtacaaggaaatacagtgcatttaagacataggctgggcatggtggctcatgcctgtaatcccagcacattgggaagatcacttgaggcaaggagtttgagaccagactggccaacacagcgagacccccatctctaaaaaaaaaaaaattaataagacatggatacaaccagggagggaggttataataatagagcatcctgttaatcagaatcatgggggagaacatacagcccagcgtgcctctcactttccagaaagggtgagaggatcattagagagttcattagagagtatttattcctaataagtcagataaatgtcagtttcatttttagaagtttcacacaatacctgctaatggtgtgatgtcatttttccccctgcttcaggttaattttttggatatttcagaaacccatagcaattcagtgatttttctttttgtagtagctcagtcaaaacaggtaacagcagattaatcatagaaaatgttgcttccacattaacaaaacaatcactgaaaaacagcagatgtttaaatagattattttatagcttattttggatattttttcttttaataaactaatatgatcatttgaatt

SEQ ID NO: 13620 - DNA, 774 bp, Homo sapiens
ggagttgacgacagggagtaccactctcccctcccacaaacttcaactcctccatggatggggcgacacggggagaacatacaaactctgccttcggtcatttcactcaacagctcggcccagctctgaaacttgggaaggtgagggattcaggggaggtcagaggatcccacttcctgagcatgggccatcactgccagtcaggggctgggggctgagccctcacccccccctcccctactgttctcatggtgttggcctcgtgtttgctatgccaactagtagaaccttctttcctaatccccttatcttcatggaaatggactgactttatgcctatgaagtccccaggagctacactgatactgagaaaaccaggctctttggggctagacagactggcagagagtgagatctccctctctgagaggagcagcagatgctcacagaccacactcagctcaggccccttggagcaggatggctcctctaagaatctcacaggacctcttagtctctgccctatacgccgccttcactccacagcctcacccctcccacccccatactggtactgctgtaatgagccaagtggcagctaaaagttgggggtgttctgcccagtcccgtcattctgggctagaaggcaggggaccttggcatgtggctggccacaccaagcaggaagcacaaactcccccaagctgactcatcctaactaacagtcacgccgtgggatgtctctgtccacattaaactaacagcattaatgca

SEQ ID NO: 13621 - DNA, 1924 bp, Homo sapiens
ggggctggcccctaccctgccctgcctgaagctccccccctgccagcacccagcatctcctggcctggcctgaccgggcttcctgtcagccaggctgcccttatcagctgtccccttctggaagctttctgctcctgacgtgttgtgccccaaaccctggggctggcttaggaggcaagaaaactgcaggggccgtgaccagccctctgcctccagggaggccaactgactctgagccagggttcccccagggaactcagttttcccatatgtaaaatgggaaagttaggcttgatgacccagaatctaggattctctccctggctgacaggtggggagaccgaatccctccctgggaagattcttggagttactgaggtggtaaattaacttttttctgttcagccagctacccctcaaggaatcatagctctctcctcgcacttttatccacccaggagctagggaagagaccctagcctccctggctgctggctgagctagggcctagccttgagcagtgttgcctcatccagaagaaagccagtctcctccctatgatgccagtccctgcgttccctggcccgagctggtctggggccattaggcagcctaattaatgctggaggctgagccaagtacaggacacccccagcctgcagcccttgcccagggcacttggagcacacgcagccatagcaagtgcctgtgtccctgtccttcaggcccatcagtcctggggctttttctttatcaccctcagtcttaatccatccaccagagtctagaaggccagacgggccccgcatctgtgatgagaatgtaaatgtgccagtgtggagtggccacgtgtgtgtgccagtatatggccctggctctgcattggacctgctatgaggctttggaggaatccctcaccctctctgggcctcagtttccccttcaaaaaatgaataagtcggacttattaactctgagtgccttgccagcactaacattctagagtattccaggtggttgcacatttgtccagatgaagcaaggccatataccctaaacttccatcctgggggtcagctgggctcctgggagattccagatcacacatcacactctggggactcaggaaccatgccccttccccaggcccccagcaagtctcaagaacacagctgcacaggccttgacttagagtgacagccggtgtcctggaaagcccccagcagctgccccagggacatgggaagaccacgggacctctttcactacccacgatgacctccgggggtatcctgggcaaaagggacaaagagggcaaatgagatcacctcctgcagcccaccactccagcacctgtgccgaggtctgcgtcgaagacagaatggacagtgaggacagttatgtcttgtaaaagacaagaagcttcagatgggtaccccaagaaggatgtgagaggtgggcgctttggaggtttgcccctcacccaccagctgccccatccctgaggcagcgctccatgggggtatggttttgtcactgcccagacctagcagtgacatctcattgtccccagcccagtgggcattggaggtgccaggggagtcagggttgtagccaagacgcccccgcacggggagggttgggaagggggtgcaggaagctcaacccctctgggcaccaaccctgcattgcaggttggcaccttacttccctgggatccccagagttggtccaaggagggagagtgggttctcaatacggtaccaaagatataatcacctaggtttacaaatatttttaggactcacgttaactcacatttatacagcagaaatgctattttgtatgctgttgagtttttctatctgtgtacttttttttaagggaaagattttaatattaaacctggtgcttctcactcaca

SEQ ID NO: 13622 - DNA, 613 bp, Homo sapiens
tccccatgtgagagcagcagaggcggtcttcaacatcctgccagccccacacagctacagctttcttgctcccttcagcccccagcccctcccccatctcccaccctgtacctcatcccatgagaccctggtgcctggctctttcgtcacccttggacaagacaaaccaagtcggaacagcagataacaatgcagcaaggccctgctgcccaatctccatctgtcaacaggggcgtgaggtcccaggaagtggccaaaagctagacagatccccgttcctgacatcacagcagcctccaacacaaggctccaagacctaggctcatggacgagatgggaaggcacagggagaagggataaccctacacccagaccccaggctggacatgctgactgtcctctcccctccagcctttggccttggcttttctagcctatttacctgcaggctgagccactctcttccctttccccagcatcactccccaaggaagagccaatgttttccacccataatcctttctgccgacccctagttccctctgctcagccaagcttgttatcagctttcagggccatggttcacattagaataaaaggtagtaattagaac

SEQ ID NO: 13623 - DNA, 3218 bp, Homo sapiens
gggaccaggctggggtcgctgcgttgctgtgccgcagagatccactctgtccgtggagtggagctgctggttctcccaggtggattttgctggaattctcccatgtcatcaccccaccaccgtcacttctgtacctgcatcaagaaaacctgcttgttcacaaaagtcatcgcaacttcagagcgaacggccacatctccccacctctcacccccaccctctcccctgccaggctggggcttcctcaggcatgggtgtccacagcactggccccctctccccagcctcagctgctgtccgcctgatctgtcttgggctgtaggctagaatgcccgggctggtgcccaccaggggctggggagaaggaggggtggcatgatgaggaaggcagcatccgtccgtccctctcccagacctctcctcttccagtgtccccggggaagggcagatgacactcccttccccctaagccaaccgcactgaaggagtggggagaagagcatacgccaggagcctcctgcctcaaagtgctcccctaagtcttcttcctcctgtgctgacctcagggtggtctgacccttccctcggtgtgggggatgtggccctctcaggtgcccctacttgctttctgcttccttctggtgaagtccacctccaacattaacctgcccaccccacccccgtcatccctggagaattccagctttgtcgtatctcagagagggaatctaattgtttttggggggcaaaagaaagcaacgtttaggtatcacttctacttggaccgcatgcctttttatagccaaatttctgtgtatttcgtaaatggatttcgcgttaatggatatttatgtaataactagacttctcagattattgtgagaagggtcaggttggaaggggtgtaggaagaggggtgaggggtagtttttttctgttctagtttttttttttttttttgtcatctctgaggtggaccttgtcacctgtggttattggggccaaggtggactcagctccggggagaagggcctctctgccatttcggtcccaaggtgagctgacacaggcgttccttttgggactgtggaagcatcagatgccagcactgactcaggaacagcaagtcagggcagagaggaggagggaggctgtcaggatggaaatacctggacttttctttgcttccctcgcaaactggggtcttctctaccgaacttcccaggatttcatctcaccatatctgtgtgccgcccccagcaccccccacccacctctggggggcccgtgagcgtgtgtcttcattgcctctctccccttggcgtctgatgaccacagcaaagcactgggaatttctactcttcatgcctcatcctgcagcctcgggttcgcattctctctttcttttcctctttccctctttccctgggattgactctgagtggaataccttggcacatccactaggatctactgtctgcactgttttctttgcatgactttatacgcagtaagtatgttgaaaacaaacaaaaagaagaaaacactcaacaaaaccaatctacatgttttggactaaaaaaaaaaatagaggttgtattctcagtgtccgactcggaattatgttgctgcctctctgtgcttttggcctctgtgtggccgtgttttgccagcatgagatactgtcccctctggaggattttaggggaggaagagccacgtccccagggattggaggaggctccggtaccctcgaccctcctgggtgttggttggagcagaactggtgaggatgtttgatccgagattttctgagctctccccaatcaccagctgtctgctgggttcttttctcaagtcctgctgcccaggcccaggtgagacaggcaacgccaggtctgcaggccaggagagatgctgcccaggcctcctggtttccaagctggtccatcactggcctctgtccttggcagagaccttgctgcccaggcccaggggcaggctcttggcctgccccaggcccagagggcttcccagtaaggcccagtgatcccattatcccaggggcaaaaccacctgtccccttttgagctgccagttccctacagccatccccagtcaagggtgagggtgtggccttcaccaggggctgctgtaattaccgagcaaggtctgagctcttcttcagcctcagttccctcattggttaaaagggttctttgttcccatccagccgatgaaggagcaaacgtctggctatgtgaagcctaatttacctgcaggaactggcagggatagtcactggctggactcctgtttacttctagacctggtcaggctccatcccctcccccacctgcccctgattcccctcgtcggtgcctgtcaactgcttttcagcagtggactgcaggggaaagagcagtgatttggggtgagtaggcttcaattcccagctctgaccagacttgctgtgtgaccttgggcaagttcctttccctctttggagcttggtttccctgccagaggaaactgagctggaggagcctgaggtcctgcctttcattggctgacacacctcctgtccactgtgtcactctccaagtgccagagaagtggaggcagatcgctaccccaggctgagatggcccccactgtgaaggccacgcctgtgggtgggcagccacctggtgccaccacagggcaccagggatgatcctgatgtggcaggcaggggagactcacagaaaaatctgcccagagcctaccctcaccagacaaactctgtgctcctccaaaacatcctttagatgcaaaataataataataataataataaataaataaataaaaatccaaacccaagtcaaaaccttggctccagcatgaaaacacgtttacaggaaagtgttctcctgggtttgtgcccaccatggtgcgaatcctgacccaaggcctcctgtctcccttcaaagggagacccttttgggggatgagtttgccagactccccgtgctggtttctttgttactatttgtttggggttttgttttagttctttttttttttcttttcttttttaaaaatatgtggctgtgaacttgaatgaacactgctcaaactttctgctattggggggggcgggtgggatgggaagaaggggcgtttgttttattcttggtgttttcagtgcaataaatagctacaaacttctgtgc

SEQ ID NO: 13624 - DNA, 55 bp, Homo sapiens
acaagattcctcaaaatattttctgttaataaattgccttcatgtaaactgtttc

SEQ ID NO: 13625 - DNA, 957 bp, Homo sapiens
caccttgtcaccactctggggctctgtggaagaaagggcacttaaaactcccagtaaatcttggaataaatatatttttccttcccttgtagtttccatggtagctgaatgtgctcagatgtgagcagtcagagactgacagccatgctttcctatacttgttcaaaggatcgatggaccgtaaataagctgccattaacacatctggttactgctgtaacatgactaataaaaccgaacgcctgttccccttacccgtgtgggggacacgcagatgagtgaattggaatgtccagcagagttaccctcccaattatatgttcattttgtatattttttggtcgggggaaaaattgacctgcagtaaaaaaacctttgaccatttttatgtccattggatactttcctttttatcatcttaaaaaaagataactagtactaatcattgtagtggcctaagtgtgatttaactcttgaagtcacaccctccgaaagatgagtagaaaccagcaccagcacagcccagatcttctctttcctctccttttcctcatttattcctaaaggaatctgaccattttacgtctctacggcccaaaaaaagacaaaaataaaaattcctttttattcctgtcaactggatggaaacacaaatttcatggagctgtgtaccatcgaagaaacctggtgtctggcatgaaattactgtaaagaacttcctgtaaaacacgttctttaacaaactgaaatgaaaagcattggagcgtctgaatgaaagacgtgacctcctgctgggactctgatggtcttcagcattcaccttcgtgtgtcttcagtgtctcattgtcatccctgcttctgtttggtcttagagtgtttggatataactgaattgtagatggtaaaggaaatttgatgtgttttttgtttttaaataattaaaacgggtcaattttt

SEQ ID NO: 13626 - DNA, 2401 bp, Homo sapiens
aaggttccactggagggcagatcccaaaggacagtatcaccgtaaacctgcgttaaaatgtggaagctgctgcttcattaggccttgtttataacgatgtacccatgcactacggaattctattgctaagaaagtgggagcataggcaaggcattgggaacacagggtagctgctgttgctcttgctctcacccctgttgacaccagtaagtctgtgtctccctcactgaaccctgcacgttgagtaacagcagcataattccatcctaggaaaggggatgggtgttccttggaatggcattgtatttaccacctgagaaactctgtactgtctcttgatctgatctcactaaggatcacaatgtcacagatgaaacttaaatgataacccaaaggtagacctgctgttaatgatccagcattggtcacaatgtaccaactgctttctgcattccgttaaatatcatctaacagtctaaaacatatcccttcattgccataatggctgccattttgccatagatttccatataactgaaaaactgaattgtcactttatctttagtatcatgatgattggaaaaacctgtgaagttgttaaggcactctcatttgccctctttttctaagtgaatacaggacacgtattagttgttcttaatttttttcccagtaaaatatggatcttttaagaagaatttgagaagcaaacaattacatgtcatgtcaagggggtagcagattccattcgttttcaatattgccacaatacccagggattaatgctgccacaggggggcaatctttatttgtcttacttcctaccccttccctgttctgcctctttaactcagttaagttgttctgtttgggacctggaaaagaacccaaagaaaacctgagtggacaggttcatttctggaatgcagaaaacattttaaaggctagatttttagaatattctcaactagcattctttccattgatttgaaggggaaattaactattataatctcttgaatccaaaactggatattaagaactttcccccttactaagtttaagacttttgtcatgtggtgagtcaaataagaccattttgattgtaaaccataaaatagttcagcaagtagcccacagttctggcctaacagcagacttgctgttttcacttggtatcctggagttgggttgctaaccttaatttctatgatgttttctaaaatgaaacttgataaagtagaccaccagctgcaccgtgttttctgtaaaagtattgttagtaagtggccaagagacttgaggaaaatacagattttttgtttaccttggtcttgttttaagtcttaaaaaattaaagataacattataatgtagaatacagatgggacatagtccttgtaagcttcccttgaaaatgttttaaatatttaggaagcttttaaaagacactaaattgtactctaaaagacactaaattgtactaattgtacaaaggtcaagccaattttatgaaacagtcctacagagtaatatatgtgatgcagtgtaagaaggaaaatactcatctctaacattatggtaataacatttagcctcttaggagttggagcagggggatgggtaattacagatttgcagactatagaaagagtttcatttttttgtgaccccacagagtctcaaatttttatttcactacctgctagagcctactgtgaaatcactgctccatatttgccagtggaggaaatgggcatagagtagagaatagcttcatatgtttacacgtttgcatagactacacacatgtcatgcgtttatggcaggtagctggtatttattccccaaagtaataatgttgaagtatgggtctcatcattcccatacacagaaacacaaaacactttgatcataaacttttttcttcagaagccaaactaacttgcagaataatagagccactggtttaatgtttcctcaagataggttttagtgtaagctagtattctgtgtgttcgtagaaatgattcaatacctgcagctggtgaattaggaattgtatttgttgccttttttatattagatgaggtgcaaaaattttaatgctagtcagtatgcaccaccacaggaaagttagatcccattagcacttgaaactacagctttggaaacttaggctaagttaatttggatttgttacttgattcacctactgaccttttcttttgtttgaagtgcttatcagcataatgagctaagtgtcatgcatatttgtgaagaaacaccctttttggtcccttttgggacagagaggtactccttgatctttatgaatgacaggttactgttttgccttattgcttaacttaatgtagtgaaataaagcagacaaagcttg

SEQ ID NO: 13627 - DNA, 1022 bp, Homo sapiens
tgaactggccacagaaaagccttagtattagctcaagccttaataattactagaaacccaattaatttgataagcttggggacaacatcccaatagataaaaatttttaagggaatttgtttctagtttggtgatgcctaacttttccagcaaagatgatggaaaatagttatataaatgaagaacatttttaatatggcatgtaaagcttttaaagttatgaactcagtgatcagcacagcaagttaagcatacagaatattgtcaagttgcatattccttatactacaaaatgataatcagccattgtgaaactgctaatattagcttgtcataattatggccataaactaatttttctataaaagacgtggaagaaagcttaagtaaacaataaaataaaacctatacactattttaagaaggggcttgagcatgacccctaaagctacatgtaaagttcttgtacaaaaaatggaatgataggttgatcagattcagtaaagttgatctgtatgcattttcccatctcaagcatataagttgacctgcatctctggaaggaccttgagattgatgcattttgagcaggtctcccttttactcttcccaactgggaacttggagctgaaaaacattggcactgaggccagatggccttgggtttaatcctggctcagtgcctcacagattgtgtgactttaggcaaacatacttctcctagctgagtattttttatcagtaagtacaaatacaatgcagagctcattttcagttaatattagtactttttaaatctttactctctatcttgaagcattagatgttaagactaatgtgtaaaaaccacgtctgagcttgcttttccctctggacactctgcttttgattgcctatccctataagtggctcattttactgtcttctgatcctggtggccttatttttgctatgttaaggttgtgttttttaatacttggatttattttcatatacttacataaaccgtggtgattgcacat

SEQ ID NO: 13628 - DNA, 766 bp, Homo sapiens
gaccagattgtgtcatttggctccaccttcatcttgcagagccagctgatctcagattgccaagaaactagaagccacttgcacggtgtggccagagcctcagctggatgagaggctgagatgggtggccagcttgtacaccagtccctgaactgagctgtttacaggactggggaggctccacccagaaggctttcatttgtactctgctgggagtgactgggaaaaactccttccctgctgctgagtggagagaggcctcatccggctttgacccaccatccgttgcagaagcctccaggagcagcaatcctaagagtgggaggcagccaagacccccttccttcaaaacctcccggaagtggtttcaggccctctagttgccatgaccaatttgtgtgtgtgtttaatttttgcttcaagctctgtagcaggacctgccccacgcacacccctacccctctgtgaggagctgtgggaagtgtgggtttgtctccagaacagaagagaatgatggatattctggctctggggccctctccaccaccactcacagtagccttgctgaagccatcacagatgggagaaggccatgccagccacgtccgccgaggggcgccagcctgaagctgccaggccctgaggttcagaccctggaccccatagctggaggcctgtggtgccagaagcccagattagggtggctgtccatccctggatagctatttgcacgaatcatggacataaatccaagttgaagaagatc

SEQ ID NO: 13629 - DNA, 741 bp, Homo sapiens
ggccacagctttggcgggcacttctgccaagaaatggttatcagcaccagccgccatggccaagcctgattgttccagctccagagactaaggaaggggcaggggtggggggaggggttgggttgggctcttatcttcagtggagcttaggaaacgctcccactcccacgggccatcgagggcccagcacggctgagcggctgaaaaaccgtagccatagatcctgtccacctccactcccctctgaccctcaggctttcccagcttcctccccttgctacagcctctgccctggtttgggctatgtcagatccaaaaacatcctgaacctctgtctgtaaaatgagtagtgtctgtactttgaatgagggggttggtggcaggggccagttgaatgtgctgggcggggtggtgggaaggatagtaaatgtgctggggcaaactgacaaatcttcccatccatttcaccacccatctccatccaggccgcgctagagtactggaccaggaatttggatgcctgggttcaaatctgcatctgccatgcacttgtttctgaccttaggccagcccctttccctccctgagtctctattttcttatctacaatgagacagttggacaaaaaaatcttggcttcccttctaacattaacttcctaaagtatgcctccgattcattcccttgacactttttatttctaaggaagaaataaaaagagatacacaaacacataaacac

SEQ ID NO: 13630 - DNA, 2384 bp, Homo sapiens
ggtgcagggcctgggcccaccacgacgcctgaagtcacagctccttccaaggtttttctggagaagacagcaggagcctctcagttcttttccaggaaggaacgagggtgggagcgagatggagatcctgggtgtgtgcccagtgagccctggggccttgagttacatggaatcacccacagggttttggaggccccgagaagcgtcttcccttgagttggccaagggaataagcaagaggagacatttcctccctgccccagcactctgtcccaatccgagaagttccgaggctttcccaggggcagtctgtgtcacgctggccatttgacataaaggagacagcccctggtcccagcttgtcagctctgctgccgacttgctgacttatcaacttcctctaggtgtttccactccaccctggcctgctcagagcctcagtttacccctgcattaaaatggtggggggactggtcaaaggactcttatgtcactgcagtgtcccattctaggattgtctgaaggccagagtaggggttggggggagtgtggacaaaccccgcaaatcagagtggggaaggtgagtggtagagagggggtctctgaaggcccttggggctgacagggccaggcagcctccccagctgaggcatcattcctgggccagagtcgtgtccaccaagggacagtagccagagctcctcttcctttaccaggcaaggtgcatcccctcagccctcctggcccttcagtcttggtgccacctgggcacaggggcaagcttggtggttgtgagtccattcatctatcagagctggaacctcatccctgcacagatgaggaaaccaaggcatggagcagttcccagagtcgaatctagatctcatctgtcatccgggtcttatcctttgctctgtttttctcttcaggctctggaaaatcagatctgtgacttaatcttcctctccctggccctcacccacttagtttctttttcattcctgctccctgccttaactcctcctcccactgcccctgatcccaggcccaggcttttacaacctggtgctcagcttccccatcagtgaaaaggggtggctagagtaactaacctcagcaggccgtccagtcctgatagtctgtggatttcggatccttctcaggaagcttcatgtctaatggagactataattataactcctgttctgcatagagcatttgcatcaaaggctttccatacccctccctcccctggtcctcataagatccttgaagcaggttcctattcctcattggcaacatggcaaacagatcacaggagtcaaagggccttgctcaaggtccccagcttcagccccaggccctaagccagcgtcagaacagtcaatctgcatttttcatcagtcattctatagtgacatcatcccagactgccttctgtattcccctgtgtacagtctccttctgtttctaggtttagaagttcagaggtgactgtgtttctccatttccacagccaaatgggggaagaggtgaggctaggggagtgctgtgctgattctccagccatggtcagacaggtcacccaggagcctcgaggaaagccctggagggaatcacatgtgtactttttcatgaagctttttgcaaagcacatctgcgatacactagtttattgaactaatgtccaggagtagacatgattggtggccaagttatttggggacacctaaacagatcagtgacctgaatgacttctcagaacctttaatatgccaatgtgtgtggcaaacttacaagaagggagctaagtatccagcctctcccaaacctctttgaacaaagcttctgtccctcccacacctctcacctcacaggcacatcaggctgcagaatgcgctttagaaagcattgttttagtccaggcacagtggctcacgcctgtaatcccagcactttgggaggccgaggtgggtggatcacaaggttgggagattgagaccatcctggctaacacagtgaaaccctgtctctactaaaaaaatacaaaaaattagcttggcgtggtggtgggcgcctgtagtcccagcagcttgggaggctgaggctggagaatggtgtgaacccaggaggcggagcttgcagtgagccaagatcgcgccactgcactccagcccgggtgacagagcaagactccgtctcaaaaaaaagaaaagaaaaaagaaagcattgttttaattgagaggggcagggctggagaaggagcaagttgtggggagccaggcttccctcacgcagcctgtggtggatgtgggaaggagatcaacttctcctcactctgggacagacgatgtatggaaactaaaaagaacatgcggcacctt

SEQ ID NO: 13631 - DNA, 2118 bp, Homo sapiens
atccactccttccacagtaccggattctctctttaaccctccccttcgtgtttcccccaatgtttaaaatgtttggatggtttgttgttctgcctggagacaaggtgctaacatagatttaagtgaatacattaacggtgctaaaaatgaaaattctaacccaagacatgacattcttagctgtaacttaactattaaggccttttccacacgcattaatagtcccatttttctcttgccatttgtagctttgcccattgtcttattggcacatgggtggacacggatctgctgggctctgccttaaacacacattgcagcttcaacttttctctttagtgttctgtttgaaactaatacttaccgagtcagactttgtgttcatttcatttcagggtcttggctgcctgtgggcttccccaggtggcctggaggtgggcaaagggaagtaacagacacacgatgttgtcaaggatggttttgggactagaggctcagtggtgggagagatccctgcagaacccaccaaccagaacgtggtttgcctgaggctgtaactgagagaaagattctggggctgtgttatgaaaatatagacattctcacataagcccagttcatcaccatttcctcctttacctttcagtgcagtttcttttcacattaggctgttggttcaaacttttgggagcacggactgtcagttctctgggaagtggtcagcgcatcctgcagggcttctcctcctctgtcttttggagaaccagggctcttctcaggggctctagggactgccaggctgtttcagccaggaaggccaaaatcaagagtgagatgtagaaagttgtaaaatagaaaaagtggagttggtgaatcggttgttctttcctcacatttggatgattgtcataaggtttttagcatgttcctccttttcttcaccctccccttttttcttctattaatcaagagaaacttcaaagttaatgggatggtcggatctcacaggctgagaactcgttcacctccaagcatttcatgaaaaagctgcttcttattaatcatacaaactctcaccatgatgtgaagagtttcacaaatccttcaaaataaaaagtaatgacttagaaactgccttcctgggtgatttgcatgtgtcttagtcttagtcaccttattatcctgacacaaaaacacatgagcatacatgtctacacatgactacacaaatgcaaacctttgcaaacacattatgcttttgcacacacacacctgtacacacacaccggcatgtttatacacagggagtgtatggttcctgtaagcactaagttagctgttttcatttaatgacctgtggtttaacccttttgatcactaccaccattatcagcaccagactgagcagctatatccttttattaatcatggtcattcattcattcattcattcacaaaatatttatgatgtatttactctgcaccaggtcccatgccaagcactggggacacagttatggcaaagtagacaaagcatttgttcatttggagcttagagtccaggaggaatacattagataatgacacaatcaaatataaattgcaagatgtcacaggtgtgatgaagggagagtaggagagaccatgagtatgtgtaacaggaggacacagcattattctagtgctgtactgttccgtacggcagccactacccacatgtaactttttaagatttaaatttaaattagttaacattcaaaacgcagctccccaatcacactagcaacatttcaagtgcttgagagccatgcatgattagtggttaccctattgaataggtcagaagtagaatcttttcatcatcacagaaagttctattggacagtgctcttctagatcatcataagactacagagcacttttcaaagctcatgcatgttcatcatgttagtgtcgtattttgagctggggttttgagactccccttagagatagagaaacagacccaagaaatgtgctcaattgcaatgggccacatacctagatctccagatgtcatttcccctctcttattttaagttatgttaagattactaaaacaataaaagctcctaaaaa

SEQ ID NO: 13632 - DNA, 631 bp, Homo sapiens
ttatctgtttttattctaatagctctcccttcctcccatccccagtttgacttccatgtggatgttatataccttcatcaaatcccaacatctctatattaattagtggcgtctttatctttccaagagaaatgcagatgagaaaagttagcactgatgtctctcaggctacacctcttttggttttatattttttggatggccttttgtacctctgaaccaaaattagattcaactattcatattatcagcctcattttatggaaaagggatgccacttaccccaatagcccttgaaacagagaccaagcataaatacaaaagtaactgttttctctacactgcagtagctgcccttaaagcatcagatttagaaaagtgtatgttgggcgaagggagttttctatttagatattctaagtagaagagtcatagacagaacaaaaacagaactcagcagtaattttgtccaaccactggctccgccactgatttcctactggccctcaggcaagttcctccccatctctcagtctatgaagtgaacagttggactaactgattattaaggactctgtcaactctgatattctgaaagtgaataaaagaaattaacttatccaccaaccac

SEQ ID NO: 13633 - DNA, 1838 bp, Homo sapiens
gcctggcactgctccttgcctaccagcacccgacttttaattatatggatctctttttttttttttttttttttttgagacggagtttctgtcttgttgcccagactggagtacaatgatgcgatctcagctcaccacaacttcggcctcctgggttcaagcgattctcctgcctcagcctcccgagtagttgggattagaggcatagtccagcacgcctggctaattttgtatttttagtagagacggggtttctccatgttggtcaggctggtcttgaactcccgacctcaggtgatccacccaccccggcctcccaaaatgctgggatcacaggcgtgagccacctcgcctggccagatctcttttatatgcattatctttatgtcactgctttgccttttctctgggccaagtcatggtgaaacaagaaagctacaagctctaaatggtaattttttacatttttgttttgtttattacttcttcttttcatacctctggcattccactacattgtgagctttcccttggaaggctctggactctatccaagcttatgataattcacacaatgaatttcatacctagcgtggagctatgcaagaagcagccaccagagggccccaagtggcagcaactggccaaaggagatgcagccagctaagactgtccacactttggcagacaaccggttttcccttttctgggtctgttcaaaaagcaaacattaagggtgggcacataatccacaagccagaaagttgtgcacggctccagtgttgagatgggtagggccaagatgaccagtgtgaaaactctcagatagaaaggagccatgcatattaaatgaggggcaacaaacatttcaaacgattagataacattttctcccaactcaaagatcccaacaatgaataggaggcatggaagtagatgtgccaatggggagggatgaggagtgaacatgaatattatttgaatagactttacctcttaattcttgcaacatgcattcttgattacctactgtgtgccaaacaagattttgtagaatattgcaaaaatgaccataaattcctcgtgataatgtgactttgcacctgctcctatgaaaagatgaagtctgtatctgtatcccttaaatttttttgcttgtttgtcggttttgttttgtgttttgtttttttgagatgaagtctcgctctgttgcccaggctggagtgcaatggcacaatctcggctcactgcaacctccacctcctgggttcaagcgattcttctgcctcagcctcccaagtagctaggattacaagtgcctgccactatgcctggctaatttttgtttttcgtagagatggggttttaccatgttggccaggctggtctcaaactcctgacctcaggtgatccacttgcctcggcctcccaaagtgctgagattacaagtgtgagccaccacgcccagcctctcccctttaaatttgatcttggccttgtaacttgctttggccaatgggacattagtaaatgtgatgcagtcagaggtttggtaataacctatgcatcaggacttacatcacttgctgctctatggagttgagaccaccaagtaaagcatcctgggctagcctaccggaggatcagagaccatgtggaacataaatgaatcatcccagttgagccctgtccgcagatcaaccagcctaccaacttccagacacgagtaaagccatcctagactatatccaaccccagtcaggctgacacagaccataagaattgtacagataatccacagaactgtgataaataataaagatgtttgtaattttaat

SEQ ID NO: 13634 - DNA, 1472 bp, Homo sapiens
cttcccattcccagagcaaggcaggcgggaggccaaggactggacttggcttatttcttcctgtctcgtagggggtgagttgagtgtggctgggagagtgggagggaagccctcagcccaggctgttgtcccttgaaatgtgctcttccaatcccccacctagtccctgagggtggagggaagctgaggatagagctccagaaacagcactagggtcccaggagaggggcatttctagagcagtgaccctggaaaaccaggaacaattgactcccggggtgggcgagagacaggagggctccctgatctgccggctctcagtccccggggcagagcctgattgactgtgctggctcaacttcaccaagatgcattctcatacctgcccacagctccattttggaggcaggcaggttggtgcctgacagacaaccactacgcgggccgtacagaggagctctagagggctgcgtggcatcctcctaggggctgagaggtgagcagcaggggagcgggcacagtcccctctgcccctgcctcagtcgagcactcactgtgtctttgtcaagtgtctgctccacgtcaggcactgtgctttgcaccggggagaaaatggtgatggagggcaacaaggactccgaggagcaccaccaggcctcgggccccagaggtcccactcctcagcctacacgcagaggaacgggcccacctcagagtcacaccactggctgccagtcagggcctgccaggagtctacacagctctgaaccttctttgttaaagaattcagacctcatggaactctgggttcttcatcccaagtttcccaggcacttttggccaaaggaaggaaggaactaattcttcattttaaaaattcttaggcactttttgaccttgctgtctggatgagtttcctcaatgggatttttcttccctagacacaaggaagtctgaactcctatttagggccggttggaagcagggagctggaccgcagtgtccaggctggacacctgccattgcctcctctccattgcagacgcctgcccatcaagtattacctgcggcgactcaaccctatgcatggagggtcaatgtgggcacatgtctacacatgtgggtgcccatggatagtacgtgtgtacacatgtgtagagtgtatgtagccaggagtggtggggaccagaagcctctgtggcctttggtgacctcaccactccctcccacccagtccctccctctggtccactgccttttcatatgtgttgtttctggagacagaagtcaaaaggaagagcagtggagccttgcccacagggctgctgcttcatgcgagagggagatgtgtgggcgagagccaatttgtgtgagtggtttgtggctgtgtgtgtgactgtgagtgtgagtgacagatacatagtttcattggtcattttttttttaacaataaagtatctttttttactgtt

SEQ ID NO: 13635 - DNA, 137 bp, Homo sapiens
gatgctgatcctcccgctggcttccagacagacctgggacttggcagtcatgccgggtgatggtgttcctgcggagaccctcagttgtcctattccttcctagcttccctgcaataaaatcaagctgcttttgttgg

SEQ ID NO: 13636 - DNA, 66 bp, Homo sapiens
agggtctgaaaggttgggggaggctgggagaggggaacgtgggaatagcacaggaatctgagagac

SEQ ID NO: 13637 - DNA, 642 bp, Homo sapiens
attctttcagagctgactctcctctatgcctcaaaacttcagagaggaacatcccataatgtatgccttctcatatgatattagagaggtagaatggctcttacaactcatgtacccattgctagtttttttttttttaataaacgtgaaaactgagagttagatctggtttcaaaacccaagactgcctgatttttagttatctttccactatcctaactgcctcatgccccttcactagttcatgccaagaacgtgactggaaaggcatggcacctataccttgattaatttccattaatggaaatggttcgtcctgagtcatctacgttccgagtcaggctgtcactcctactaccaatggccactgtgagccacagaaggaagacatgtacgtgctgttctactttatatgatgtgagaagccaacatcagtgtcccttggcagcagtctacaggcataacttgttttattgtgctgaattttattgtgcttctcaaatattgcacttttaaaaaaattgaaagtttgtggcaatgctgttgagcaaatctgctggcatctttcttcccaaaggcatgtgctcacttcatgtctctgtatcaattgtcataattttcgcaataaacttgattattatt

SEQ ID NO: 13638 - DNA, 1271 bp, Homo sapiens
agaatggagacgttttgacctgggacttgtgacggccaaggaatgccaccttattctggctactcctgcagaaatgaaggagtggggttattttagtatataaaaattcaggcaggagagatggtttaaagaggaagattgttgccttcagtgtttgattgaagtattcaggttctcacagtattctttccagttgttgtaattcataaattatttgaaaagaaacttttgtagaaagtccaagaataataactctagataaagattagtgggacactcaggcaaaaatgttggtctttctttgacatgttgcaaaatgttatcaattttgtcatggatataatttgcagcccatggatataactggttgataagccagagaaaaataatttagtgttctaaaattcatggcatgtgtggtttattaatgccatgtactttctcctttctggaataaaatctatggctttaagaaaactgagcatatgtaaactctgtgatgattaccctttatcacatgaattcttggaaatagaaagtttcatctgcttttttaaattcttagtagatatttggcattgaggagaaacttgtagactattatagccatgtgaattaactgtagcaaagtgccctttttcttcaaattgctccccctccccaggatgacacacttcatgtcatagctgaaccctactctactggattcaaggccagtaaatgcaatttagagaagcagttttatgtttgcagatattctgagtctcttcaggatgtgtttcgtgtctaccatatatgcaggataaattctttaacagcaaactccaaaggaatgttgaagctgttttagcaatgaggatttttttgtttgagtgttgaagtgggccatagtcctttagaaatgatgttcatttatgataggatttaacttctaaggcatagtttattttttcctctttcctttttgtttgttttaatgtattctttagcatgtttttgatataacttttatcctccagatcttaagctttcttttgctctcttcagcaatttaagagactattaagctgtcgtcttcctaaaagctattttggtatccactctttttaaaaaaattctccaactttgtggttttttaatgattaaggtaatttgttagctctgcccctcatcttctaaaacctttgtaataaaatgtattaatcatgttatttgatcctttcatttacttttgtaaacacgagccctaatatcttacttagaccaaaaaa

SEQ ID NO: 13639 - DNA, 833 bp, Homo sapiens
gccgaggcccgcgccgaggacctggccaggccagccactcctgaagccccgggaggagaggaaggcagcggcgaacgccaggctctgggctccggcgactggtgctacgcatcccgcggagcttctgctgagcgccggcaggtcgtcggctgcaaccacacacttggatcgcacgtgcaatgtcctttgattttttttaatacattaagagaaagagaaatatatatatatccacccccagcccaaccgagggcggcccttggcggcaacatgcaagaaggagggactgtcgaacccaagggctcaaagacgcactcttccacccttttggagcgaatttagaacctcagccctatctccatttccctatctggctctttctctcttgtccctccatatgatccgccccgacgccgtcttctctaattaaaatgcaataaggaatcaattcttttctgcctgagaaagagaaccagacgcaggaagatgaaaggctgccctttgttcttcgaatcgtggtggttttattttatttttctttttgtcgctgcacttcctgtttagttccaagggaaacactttctctctttctctgtctctctcttttcttccttcttttccttcctttttgtttctatctaaataaaagctttccctgtgttggaaagtttttatgtatttaaactacctaccatgcctgttgtgctcaggtgtttgttcatcctgccatccccaacccttttctacctcaagtctgtgtgaccactcacagcccccctcccttcgccaaagcagtgtctatgctcttgattaataaaacattttctgaaatc

SEQ ID NO: 13640 - DNA, 1824 bp, Homo sapiens
gagacagcctaagtgtcatcctggctgtccctcagccatgggatgcagacacggcttcctgattgcacctaacaatttgcctccttcggccacacgccctaatgatggcaccaccagggtagagggaaggtcggcttcccggaaaagcagggccaaggatgaggctttcttcaaactactgcccttgatgtccctcaatgggatcaggagttagcttaagaaaaaggaaaacacagctccccagactggaggctggtcagagggaggagacccctggtcctctgctgtggaaggagaggggttcagccccagataactcctttgtggcctgggcaggatgcagagaatgacaaggctgaaaggagggggactggaggctgcctggctccagcgagagctccttctgggaccagagggtgggacggccaggtatcactttgccccttcctgccccaaaaggctttcacatacccgactcaggccagagccaagacaccctggcaaatcattataggtctcaattcatgacataccagatgccagtcgccacttcacccaacacacacacaaacatacacacaccaaacactctgagtgagtggtaaaggccccgttttaactctggcccaccgcaaacaaaaggtttccctctgtgggggagaaaaagaaatccaggagctcctccctggattaaaaccaacgaggtgcagaccaaactttaacacctttagccttatgtggaaaccaaaaaccaactgctgggaaactgtgaaaagcccttttacccacaaggggaggggtcaaagttgctgccctttggggacacccgagacccctaattagcctatctgaatgaggaccaaaggttagagccctctttctccccgaagaaagagcccggaaaaacatggcagagcaaagagcaaaatcctttctcccccgaatgctttaccagtttctcagcaacatttattcaagatgatttttaccaggaaccttatcaaaggcaaaaccacagctgcttgggttgaagtccccatcctggcctcctctcagccgccagacatggccaggaaccctgtggttcccaagaacaatttaaagatcactctttgatttgaaagaccaccattatcattttactaaattcttatatatacttgtgccttttccaactttcagttctcttaagaaaaacatccactgtagctttataaaataccttagtatcagctaggtccaagtctccaggcaggactatcaaaatggactccttcttcctatcagctctagaaccccagaggacttgcccagtaggccagctgagcacttaccaggcagcatctccctggccttccacagtctcgcctgtctgtctctggccttggtggacctggctccctccctaggaggcttttgccctcagcttgaatacagttcctggtgcatcaaagctgtaagttctcagctgctggcctgcactcatcacctcttcctacaaataaacatttggaaaaaagtccatcttcaatatgcttaaagagaagggtaggagataaggagaaagaacagatacggtttttttcccctttaaggcctttagattttgaggtactgtaaggggcctagaaggacaaaaggctttcattccctcttccttttggcaggcaggttatcagtccttggcagaagggcccagccctatccttttctgtatcaaacaaaatccttgaggttggtatacaagttaaggctgaaaaaaggccttaaattcccagtaaagaatgtgaaagcaagcatgtaaaataaactggtcttcatgaa

SEQ ID NO: 13641 - DNA, 97 bp, Homo sapiens
caacgcagtagcatgttagattgaggatgggggcatgacactccagtgtcaaaataagtcttagtagatttccttgtttcataaaaaagactcactt

SEQ ID NO: 13642 - DNA, 213 bp, Homo sapiens
gacccagtggtgctctttgagagtttacgcccatgagtgcagaagactgaacagacatcagcacatcagacgtcttttagaccccaagacaatttttctgtttcagtttcatctggcattccaacatgtcagtgatactgggtagagtaactctctcactccaaactgtgtatagtcaacctcatcattaatgtagtcctaattttttatgct

SEQ ID NO: 13643 - DNA, 1270 bp, Homo sapiens
atccaaccaccttatttttgagcttggtgttttgtctttttcagaaactatgagctgtgtcacctgactggttttggaggttctgtccactgctatggagcagagttttcccattttcagaagataatgactcacatgggaattgaactgggacctgcactgaacttaaacaggcatgtcattgcctctgtatttaagccaacagagttacccaacccagagactgttaatcatggatgttagagctcaaacgggcttttatatacactaggaattcttgacgtggggtctctggagctccaggaaattcgggcacatcatatgtccatgaaacttcagataaactagggaaaactgggtgctgaggtgaaagcataacttttttggcacagaaagtctaaaggggccactgattttcaaagagatctgtgatccctttttgttttttgtttttgagatggagtcttgctctgttgcccaggctggagtgcaatggcacaatctcggctcactgcaagctccgcctcctgggttcaagcgattctcctgcctcagcctcctgagtggctgggattacaggcatgcaccaccatgcccagctaatttgttgtatttttagtagagacagggtttcaccatgttggccagtgtggtctcaaactcctgacctcatgatttgcctgcctcggcctcccaaagcactgggattacaggcgtgagccaccacatccagccagtgatccttaaaagattaagagatgactggaccaggtctaccttgatcttgaagattcccttggaatgttgagatttaggcttatttgagcactgcctgcccaactgtcagtgccagtgcatagcccttcttttgtctcccttatgaagactgccctgcagggctgagatgtggcaggagctcccagggaaaaacgaagtgcatttgattggtgtgtattggccaagttttgcttgttgtgtgcttgaaagaaaatatctctgaccaacttctgtattcgtggaccaaactgaagctatatttttcacagaagaagaagcagtgacggggacacaaattctgttgcctggtggaaagaaggcaaaggccttcagcaatctatattaccagcgctggatcctttgacagagagtggtccctaaacttaaatttcaagacggtataggcttgatctgtcttgcttattgttgccccctgcgcctagcacaattctgacacacaattggaacttactaaaaatttttttttactgtt

SEQ ID NO: 13644 - DNA, 290 bp, Homo sapiens
aagatgtttctttttctttttttccttttgataatagcatcatatattagttcattttcttttggacagtcttaagagaagtttcactaaaaatgtaaacagctttaatcttgactccaaatttttcaattatgagatgtcataggcagtaatttcgctgtataacaagcatagacaaatgagtgtccctgcactaagaagaatcactttaaaaagcaaagtgttagctgctgttgtatgggacattcctatgttttagagttgcagtaaaactttgatgataacctcaa

SEQ ID NO: 13645 - DNA, 107 bp, Homo sapiens
agaggagccagggctacaaccgcccagggatctggaagtatccctagaggagcccatcccagctttctttactgcagttcaaataataaaggaaatcgtacaactcc

SEQ ID NO: 13646 - DNA, 1263 bp, Homo sapiens
gagtggggaggagagcgcccgcatcatgtagcctaaagctttccacacagtaggtcgtttgtacaaatgtgtctatagactacccatttctctcccatcaaacgtcactgctattgtaggtcacctgggttggatgaatgccccatgacaaagcttctcaagctggaaaatgtatcccccagggtatgccaaggcacaaacgaggcatctcagcagcagcgtccactcggaggacacagttaagaattgaaagcattgttttaacattaaaacaaacatggatatgttataaagtagaaagcaaaaatttgcatgacaaataaaacacagcacttgaaggaaacacttgagttacaagtaggctctcagaggtacacttttgggcaaaggtagatgtccagtttcctctgcccttgaggggattatttggaaataatttgggattatttggaaataatttgtgagaacccttgctctggagtgttttccaacttttaggcaatcacataccaccgctctctattttttaaaaccatggattatcttcactattattaataatactttcctttaaattgactcattttttaagcgtaaacttattttcaaagacagccttatattactccataagtgaaaaaccagcaccctcctgctgcaaacagaagggaagagacataagaataaacatcatgaaaacaagataatattaaataatctgacttagcttctattgcctgccagtgattctgagcttaatgcctgcttgcttgtctttgataaaaagggagatccagtgttggagaggtaataaagacatattagcaccaatatttgtctttctccttgatatagcataaggtttgaaagagaatcgaaaagggaagtgctgtttttactttgcgagtcagtgttagttaaatgccatgtctgtgaaccacctcaaatgctgtcagtcagcttcccttgatttgagaaaattgtcttgaccagactaggcaggctgttctggagaagacgcctgtactctccaagcatcatccaagaccttcccagtaccctcttatatctatagagcacaaaatcccagaatcacaggacgacactgcagtgaatcaactaagaaacagcaggagctgagaagccaagacgagaagccccacatccctattcccttgcctacctcatgcattccctgctcggcacccagacttttgcccccattcctgctacttgtgaacaaataaagattcatatactcac

SEQ ID NO: 13647 - DNA, 3644 bp, Homo sapiens
acctgtccaaggggcttctccctttccttgagctctctggacactgcagaggacccatggccatggaaccctgaagaagcatgtctggccgcctctgagctcctcccaccctcctccaggaacctccacatctccaaaaatctccctgttgactcagtgcctcctcggcttccttggaagcccagagggactatgatctgatggcctctaggtgttgttttgtgcaatatacagccccaggtagggaggggagagtatgaggagggtgactggcagcttctcctccagactcctagccccgaggtgctgatggagatgctcaaggccagcaagcccctcaggccagcacttcgcttgcagaagccatccattcactcctggggtgcagggcacgcaagagagcttcccattgcttctgctctcctcagaggtcccgggctggatggaggctggtacttacccaccccttttagcttttagggattaaggaagggtcaagccagccactgctgtggccctgcccagggcttggttgagggaacggcttctggctgtatggctgcatgtgacaagccacgtcccctcccacctctccccaaacccctgcatccctgtattcacacgggtcactctgactcagacaggtactattcgtaggcagtgtagacagcaggaggagcaccgggcttgggcttcctctgagccgtgatgccaaaggttgcgactcctgactctggataatttttagttgctctttgttttctctgccgcactttcctggtgccccacgcttttctctcttccttcccctctcattctccctctaatgtgtggtgctttggtgagcaaaccctcagcagtcctgaccttcgggtgaccaggtgcttgtgacctacaagtcagagtcctctctcacagtcggccactggatttccctcactggctctcaggagtgtgaccagagtagacttggggcatggccattggggtcatatgtttatttttcattgtgttttgtgacctcagcagggtgggggtcttcctccttactctaagctaaatctaggtgaggtttccccttagggagcccagctatttacaaagtacacacgagggagcaggctggtcattgacttcgggctggaccgttgccctctgagcagagaacagacccatttctgggagctgcccgagatcactggagaaggcagccagcagcagctgcactggaacagtcagagcagggagcctcttcctcaacccagctttttgtcattcacttccttttgttctctctctggtcactgcccttacctgaccctcacagaaagagagctctgagcaggtgagggggtctgcggtggctcctgtcttccctgcagcagggaaggagggccgtgtggtgctttgctagataggacggtttttgcaaagcacctggagatgtttgctgggagatagactcccactccacaaaggtgctgggtggctctccggacaggagctggcctgactctcactcctctgaggctttcctggggcctcctcccatcctgccatgagcaattgtttgctcttgaaaacctcactgcaaggctgaggctgagcttctgattcaccaccccagggcctccttatagttctctgcacacaataggtgcttcttggatgttcttgggtttggaaataagtggaaaatacgggatgtacccctgggggaaaagcctgggttgggtttagaaagatctcaggaaaatgagtttctcttccctcagggtggctgtgatacaggttccccatgtccttgccgtgggtcatccttgctgtgggtcatccttgctgtggagatccattccccacctttcctgtggcccaaccttttatttaaatgtgctaccctctgcctcaaggcttggttcctggaaagtaaaggtgaaaacatcccctttcacccctctgcaaaacaaacaagcaacatcctcaaaacccaaccccatgcctcacagagcttcctgtggcttctccagcctttctccctcacatcaggaggtagatagctctgaaatgacagcgccacagccatagtgactgcatgagccatctgaacctgcagtccaccctccctggaaccacaccagaaagagacctgggttgtcgttttcttgctttttgttttgttttgttttattattttcatatcacctccatcccataaagttgtactgtgaactggaagatggtggaatgttttggaatttgatagactttcggcaaccagttctactaatgcttcactcctggctctgttcagggaggctgcccaggaggaagactggccattatgcatccccttttctttccagtgcccagtatgctgttttgaggtgtcaaatacaaataaatctgggcttagggaaggagagaccttattccaaagcacgattgcagaaggggaaagggaatattgcaaaagggagaggaaggggccttatgggaatagtgaaaaggctcagaccgaccgatggcaagatctgcaagcgtctcaaagcccaggcagaaaaggacttttcttttattggaagaagtaaacatggctagaaagaaccacgttcagggaatgacgttgtgcccagcctttttttttttttttttttttttgtctccaggggaggggctgtttgctggctcaggctgaggatggcccaaagtccagggtctggtggggaggagggaagcttaactcaagtttgggttagtgagttagcaagctctttgtgcagatggggatgtaggtaaatctttttaaaagtgaaattaacctcctgccaattttacaacccaagaatttttttttaagggccttggagccatctctaaaacaaacctcaagggatttagtgccctgtctccctgtctctagaagccttagcctgggcacctggctcaatcttgtaactgcctgctagccatagattcctttcagccttgctgacttctccctataaaagtaaagcctttttctgccccagctctgagacacttgcagatcttaaggtctgagacttgctgattttctggttggagtgtttttttgtattgccatagtcccttccccctgaagcaatagcccctccccacctcctgcaatacgcctttccaatctttattggaagtctctccctgcctacttcctaatttattcttatttgacagagggtatggaagacttgcaatttgaaaactggggaccagttccaaagtcagtaattgtgttaaccacgtgtataacagctctgctggacacccaagaaagccatgggaacgccaactggaaaggtccccttccccaggggagcctgcgaaggagaggttctgtagaatccaagcccacatttccaaagtcacccccaacgcgtcctctcacaccgtccactgtgcgtttgtatgtgtctgggatccagggcaatgtgaattttctttttatttgggagattgttcacggaaaacagatcttcttctctcttgtccacctattaattgtttacaatatttgtacatctatgcaaaatacttgaatgggccatggtgccttttttccttgttagtatttaattaaaaatgaattgtttgtcatttgcaatgtt

SEQ ID NO: 13648 - DNA, 192 bp, Homo sapiens
ctgtggagttttggcttcatgtgaaaggtgattcttagaatcctgagctgtggtggcttcagtcctgcccctgcacctgacctggggagggaccctgagcaagtccctcttgagtctgtttcctcatttgtacagaggctatgatgagcagtagtaccagccccatcaggttgttgtgaagagcaaggaagt

SEQ ID NO: 13649 - DNA, 924 bp, Homo sapiens
atagagactattcttttagagactactcaagtgaatgcacacacagtgaaaattctcggagttgtgagaacatgaatggaacttcttactataacagtcatagccacagtggggaagaaaacttaaaccctgtgcctcagctggacattggaaccttggagaatgtcttcacagccccgacatcaactccttctagcatccagcaagtcaatgtcaccgacagtgatgaggaggaagaagaaaaagtgctcagggatttataattttaaaacaaatatgcacagaaaataaacatttcttaaaatatattctgggtcagttggtatgagaaaaaaaaaagcctagaattctttgttgaaagttttcagtcgtgatttgaggagttaaaaccaaatgcaatttatgtcttcataaaattttgattagtgaaactagagtctggatgtttcattgtaggaatatttaagttattaagtagtttaattttaatggctgaaatttgcatcaacatgtattattattactttatcctggaacatgcaaaatactgaagcctcacagttgtatgtgaggggaaaggggaaataaatctagcatagtgtgatttttattttatctcaggatacattttttaaatgattttttgtttgctttttatgtaatacttatggatgttgtcaatttttgatgtaacattttgaaagtattttgacaactcctagtgaacttggacttggttgctaaatttaacttacactaataaccaattataagttccaaatgtgttttaatggcacctgggtgattcttcagctaaatttagtcatttctgtttctaaatatttttatcattttaaaatattttttttccatttggcatacatcgttctttgttgtaattaaataaacatagataaaattgtt

SEQ ID NO: 13650 - DNA, 1357 bp, Homo sapiens
gagattgtaaaagaagcagattgaatgaagaatttttagctgtgcagataggtgatgttgggatggaaaatgctaatcaactaccctttcttttatcaagtaattaaaataaatctacataaagaaccaaaaaggctgttttataaaagtgaaatatccagtatttcagagggccaggcaagagcacttcagatgaggcagtcaaaatcatttttttccagtgaggatagaccacaagtgggtggtgagaccattgaaagcctttatcaactgaagagtccatttaacagcataatttgtgggaagactggaatagggctgaataaatgtgtttgaatctctaattttatactttcttttcctgaggaacttgatttttctgtccctggatcgccttgtcataattgggtctgttccttttactaccactcttgagtccatatatgaaatcattaaagttggatgatcagttttttataaaaatatatatttttgtccaagaaaaaaaaaagcatacatatgtgattatggctaaatcaaaggtaactggaatgtatatacttttgctaatgttccagcaacactgctattatactatccaaatttttattgtaacaaaacctctttaagcaattggtgattgccatgggacttttcccatgtcttctgctgtaattatcctgtgcagaactaggaagaaatttttttcaggactgctctatggtttcctttaaaagaaaaaaacttctgtttgtttttagcagtcattatttacaatttgcagtgattaacttggcaaggcttccttccgtgtttatccctgtagccatcatttaagtcaggaacagtcagaaaaatatttattttattttttttttgggtgtctgcaaaggtaaaaatccattaaaaccttaagttaaatataaatgttacaactcaatgtttgcttttagattttatacagtatttgttttgttttggttttgagtgtatataatgcagcattagcaatatggttccaatagaggagttaaatatatattgttaaaggagacctgtagcagtcaaagattttattgatttaatgacaaaggaaattaatgaaaatgtttttgtttttctgctgtaattctgcattaagctcacatgaaaatcatgattctagagtttggaatgcaaaattaattgttttaccctcaagctgggaatatttttcaaaataaatactataatatagatatcaaattattacctccccatgttatgttgaaaatttttttattaaattgataaaactttatttccattatattcataatgttctgttatacataacattaaaatgttcattaaaatc

SEQ ID NO: 13651 - DNA, 691 bp, Homo sapiens
aagaattgccttgaagaattgtattaatgaagaggttggattctgctacagagagtaatctgatacaagtcccagagtggaacttttaactcaggcctttttaagaggaatcacaataactgcagatttttaaacaaacaaaatcaccgaccttgcaaatactgaaattggaagagggatctgcaagtgcagggtgttggttaaagttgtacctcccaagtatttgggggatatatttattctgtattgacaaaagcaaatccactttttctttttcttttttttttttaagcttaattctgcaatcatttgtcttttataaaccgtaaagctctatacaagggacactataaataagactccatgttttaatttatgatgtttttaaagctgtgtaaaggaagaatgaagtggtgatatttacaaaaaagtaaaaaaaaaaaaaaagaaaaaaaggaaaaaaaaaaaagcttgtatgggacagaataggaatgccagttagattttttagaaaaactaagggtcggcttttgcgccttaaagcatatcaaatggtagttagctcagacagtgcattttcaatatctaacttaacatgccaccccttagcagtgcaagcttatttatctcttttgtattgttgtcttaagcaactgtgtaaataaatgcagcctggaaagttaaaacgcga

SEQ ID NO: 13652 - DNA, 1259 bp, Homo sapiens
aggagaagcagcaggaatgatgctttgatactctggaggagaagttaactcaagatggaattcatgttctgatttgaggaatgaaaatgagatgatcaggcaggaaactgacattccaaggatctaatccaggaagtactctcagtggggaccacctgctttcatcccctgacattgtgggagaaattttgcaatgtatgctaatcaaaatgtatttatatgttctctgctgatgttttatagaggtttgtgaagaaaattcaacctcagcaacttcagaaactgcccctgatacgtgtgagagagaaataaaatcagattttgagtgttgaagggactgaggaagtgaggataaagagcatgaggacagcatggaaagaaggaggcagaagtggaactgaactttcactctccatgggacagatcaatctcattatcaagtctgaatagcaaccagccctctcctccaccccgtttctcctcagttaattggagctcagtcaggtgattattgagtcttgtacagcactgaaatgaaatcaaagatgaagaagcattgattgtattcaaagattgaagcacgctcatactttgtatgtgctttagggaaggggtgggtgggcacttgggccttgcgggtgcattcatgtaatctgagactcttgaactttatgacggagtcttcagtattttgatgtatatgaaacttttgttaaatatgttgtatacttcgctggctgtgtgaagtaaactaaaactctgatgaacactttggagtctgctttagtgaaggagaccaaagtgggaagggctttagggcactgatagaggccctgggtgtacttttcaatcctgtgtaatgtttaattcttgcaactgaatcaaaacagtgttaaattatggcaatatttgcactttgggaatgagtacataactgtatgatcacactctgcaaatgccacttttaaagctgttaatagactttgcaccttttctttgacaaggatgtgtcatatttaaatttttacattcatcatggctacaggtagaactggggaggggggaatgtaattttttatgggaattttgatatgaaaagaaactagtcatttatttatacaataggcttggctcaaaaagtgtttttcagacctcggtattcctaatgtgggatgtgactttattttatttttagtagcaaatttggatgtagactgacagacatagctgaatgtcttaataaatttaaatttgaagat

SEQ ID NO: 13653 - DNA, 1318 bp, Homo sapiens
gttctgatccaggatgaaaatttggaggaaaagtggaagatattaagcaaaatgtttaaagacacaacggaatagacccaaaaagataatttctatctgatttgctttaaaacgtttttttaggatcacaatgatatctttgctgtatttgtatagttagatgctaaatgctcattgaaacaatcagctaatttatgtatagattttccagctctcaagttgccatgggccttcatgctatttaaatatttaagtaatttatgtatttattagtatattactgttatttaacgtttgtctgccaggatgtatggaatgtttcatactcttatgacctgatccatcaggatcagtccctattatgcaaaatgtgaatttaattttatttgtactgacaacttttcaagcaaggctgcaagtacatcagttttatgacaatcaggaagaatgcagtgttctgataccagtgccatcatacacttgtgatggatgggaacgcaagagatacttacatggaaacctgacaatgcaaacctgttgagaagatccaggagaacaagatgctagttcccatgtctgtgaagacttcctggagatggtgttgataaagcaatttagggccacttacacttctaagcaagtttaatctttggatgcctgaattttaaaagggctagaaaaaaatgattgaccagcctgggaaacataacaagaccccgtctctacaaaaaaaatttaaaattagccaggcgtggtggctcatgcttgtggtcccagctgttcaggaggatgaggcaggaggatctcttgagcccaggaggtcaaggctatggtgagccgtgattgtgccactgcataccagcctaggtgacagaatgagaccctgtctcaaaaaaaaaaatgattgaaattaaaattcagctttagcttccatggcagtcctcacccccacctctctaaaagacacaggaggatgacacagaaacaccgtaagtgtctggaaggcaaaaagatcttaagattcaagagagaggacaagtagttatggctaaggacatgaaattgtcagaatggcaggtggcttcttaacagccctgtgagaagcagacagatgcaaagaaaatctggaatccctttctcattagcatgaatgaacctgatacacaattatgaccagaaaatatggctccatgaaggtgctacttttaagtaatgtatgtgcgctctgtaaagtgattacatttgtttcctgtttgtttatttatttatttatttttgcattctgaggctgaactaataaaaactcttctttgtaatc

SEQ ID NO: 13654 - DNA, 1714 bp, Homo sapiens
gccacctccagacctcacgaggaagccttggagatgtgggcagaggaagaggacactgaagaggagagctcagccaagtgaggcagcaggaggccatccctgaagagccttggaacgtggagggtctgtgctccttttaaataaaactgacccagagcaaaacattcaataacatacctcacccgagagcattcctctgagaaacgtctgccacgtgtggctagggtacaaaaggatggcttggtggccgtccccccacacaggggcccagtgaatcgagaaagacttgataagaggccaggagagtgggaactggacacagaccactgatctcaagcatgtccagtttttagcattaaagacttttctattctttgctgatggcagctacaccgctgaaaaaggaggggcagcctggcgtgttctcaggacccccggaggatcccatattgggtgcttttctttccctggctctatgcagaggggcctgagttggtgtgtatgcctgagtgtttgccttgcgaggcacagtgggtggctgtcttgcctttgttttcgaacctaaaaccattttcagccttttagatatgtcatgtgctgctgcttcccgaagtggtcttgctttctgtttcgtaagatgtcttgtttacacactgtatcagggatttggtgatacttgaaaattcctttggagaaaaaaacaaatttaattgccacactgcctgtcccacatgagggctgttaatttggaacccaagtttgaacccaacttgtgatggacccgcaggtaaccacagagcttcctttttgaaggcatatggttggagagaaccattttcccagctctcggttccggaagattccacgtcttggaggctgtgttcaccactagaactttaataactacccagggagggagaagctcgttgaaaggaagacaaagatttaaacagttcccacctctctccaccacatacttacagggcatgagtttaacccagtctaggctttgagtgtggctgatagcgaaggatagcaatgtggaaaatttgcttagtcccacctgtatttggggagtgggatgtacatgggcgtttgataccaccattgataggcaagcgactggttggatcaaaagccagtatttagggatctgcagcgagagggccctcaggaagactcttgtaaccatgtgcaatatgtttttattctgactcgcagcttgtgctcagcatgttctttggtttagtttggggttgggggacacattgttcacccagcagaactgggaggtgcaaaggaccgtggaagcaatttttgttttgtttgaggaatacctgtcttggattccttagccccttgccagtcctggagactgtggcaggggccgccaggaaggcagctgtctgctgctgagtcagatcggaaggtggtgaatctttccagagcagctgaaaatctcagcatggagacagtaagaaaagagacggggtgtggataagactctgccaccgtgtcacactagcataggaggctgcacgttcatttgttgttgtttttttttcctttgccaacctccgttctatttatgtgcaagcagtttggattcaagttcttgtatctgtctgttctgggacctggggattgtgagggttccctcacagccagcacgacccccagaaagaggcgtcccacaataaacacgtcacctgct

SEQ ID NO: 13655 - DNA, 1388 bp, Homo sapiens
acatgccacggcggtcctccaggcagggaacaagcttctggacttgggcttacagagcaagaccccacaactgtaggctgggggtggggggtcgagtgagcggttctagcctcaggctcacctcctctgcctctttttttccccttcattaaatccaaacctttttattcatccaaccatctatttattcacttctttttaaagtatctactgtgtaacaggcactatgctattctctgaaagatgcagcagtggacaagacagagtatctgtcctcatgcagcttacattctagcaggagatacaatttacaaatatacaagcaaataatataatattatgccaggatagaaatgaacatgccatggttgacagtaataggaataacaggagacagggaagaggtggaaatttgtttctttttttaagtttgcgtttttaggtttacttacatacagtgactctccagattttaagttgacaactcagtgaataatttttgcttatgtgcacactctgaaacctccatgtagatcaaagaacaagctatttccaacttctcacctcccttccccaaaagctctcttaagacccctctaagtcagtacctggaaaatttccatttttgagctgagttccaaagaaggaaatagagcaacacaaaggcctcgaaaagaggtctccagcaaaaggctctgcaagtgcaaagaccttgacaggaaagagggaggggccaaggtaagaactgagaagggaggcatgaggcgtgaggctggaagataatacagaatgtcccaggccatggcagagctcgttccattcacgaaggcttatcagaatacaaagtgacactgataggcggatcatcttgaatctgctcattgcatgagtcaagtcggccacagacttgagcgctttattattagttaatcttttgcaggcccgcttctcaatgaatgagatacaccaggatatgcacgtgcatctgagaaccgctgctctgagatggcaggaatggatcccacgcaaatgaatcgcaccccaagcacaggtgttgccagtatgcagggatctgggggcttaagaagctgcagtaaaagtgccaggtgctggcgggatgtggtagctcatgcctataatcccaggactttgggaagctgaggtggacggatcatttgaggtcaggagttcaagaccagcctgaccaacatggcaaaacatcgtctaaaaaaatacaaaaattagacaggcgtggtgttgggtgcctgtaatcccagctactggggaggctgaggcgggagaatcgcttgaacccaggaggtggaggttgcagttagctgagatcctgccactgcactccagcctgggcaacagagtgagactatctc

SEQ ID NO: 13656 - DNA, 556 bp, Homo sapiens
gctgatatacttttttaatgaataatttcaatcttaatatcattgtaaaattaagctgtaattctgtctctttcatatttatgatatactgaattctatgtctaaaaaacttaagaactttaattttgaatgaggcatgtgaaaatatgttttgagaataaaaacacagcagaaaagattaagtactactgcctagttgctatcatgagattttcccaattctaagtatctgtttaacctgttcgtgtggtatatgaaaaagatacctaagcactagaatatccagctaaatggtgcaataggctaggaattgagccaggagaaaagagaagatatcccagaagtcaaaaaggcaaaatgaaagattgagttcgcccgtctttgttatggagaggttaatgaaatcagaagaggattatgaaatataatgggaaaaggaatgatctggcttatgtaagacttacttttaaatatactctttggagttagtctcacaatgtccattcccctagctcctgtgctatgaatatcatattaataaatagcctaatatatt

SEQ ID NO: 13657 - DNA, 1643 bp, Homo sapiens
caactagtcagaagaccatccaagatagatgcagctgatacattcttttcagcttcttattgatgattgtagatagaaaaatccttgtttattcttcttgctgcctggctttaataaatatttcagatgcctcacagtaagttcactcctttccatactgaggaaacaagaaaagaagaagaggcacatgaagtgtgcttttgggaatagaatttaaaattggattaagattttatttccagttttttttatttatttatttttttttttgagacggagtcttgctctgtcgcccaggctgaagtgcggtggcgcgatctcggctcactgcaagctccacctcccaggttcacgccattctcctgcctcagcctccctagtagttgggactacaggcgcccgccaccatgctcagctaattttttgtatttttagtagagacggtttcatcgtgttagccaggatggtctcgatctcctgaccttgtgatccacccgcctcagcctcccaaagtgctgagattacaggcgtgagccaccgcgcctggcctatttccagttttatgtgagtcatgtaaaaaagccttggctctctacctattaagaatgtctctttctctgtatttattaagcttcaaactttattgcttcgatttttgtggccctatatttagtattagcacaccttggttttgagaaaaaaacagggctttgtttttttaaataattactagcaactctgtgactacatttatttttattttttttagagacaggatcttgctatgttgcccaggctagagagcagtggcttttcacagacaaagtcataatgccctgcagtcttgggctcaagcgattctctcttccttggcctctggagtagactaaatgtgttagtctttgaatggaaaacaactattttctcatcattgggtcaatattgactgatcagtagtaggtcttttaccattctggacataagtctaggtgtagaaatcctttcctttatcatagaggatatggtttacattaccgtttgttttcattgtgattgcccctatgtaacaatcatgaatattagattttttaaattgtagaatatcctaatatttatagccagcagctgttactttgtttgtaaaatttgcaaaaaaacaaaacctgaagttggtttattgaaagaattataaggatagcttctagggatattagtaatagattgccatgatcctgaagcctcttctcagaacactgtgaagataatactgacagtagaatcagtgaaaacagcctaacaaaacctctgacatcagtatatcaacttttaacagcccactcactggcttttctaaactaccaaaaaccacctgtaggatactgcattaagtcagcatctcagaaacagtggtgtgagtaactgagtcaaattgtcaagtactttggatatacatagtgtcgagctttagattggtatgaaattaaacagcaatgcaaatagatttaattcctatttactttaagaatgaaaaacaatgttcattttcctacctaaacagggtggttcaacataaaggctgatgttgtgtccgttttgtattttatcttttgttaaagatacataaatgacaatacttaactgtg

SEQ ID NO: 13658 - DNA, 5652 bp, Homo sapiens
aacatggcctcccactggaagcaaggactagattcctcctcaaaccagttgtacagcctgatgtaggacttggaaaacacatcaatccaggacaaaagtgacgctaaaataccttagttgctggcctatcctgtggtccatttcataccatttgggttgcttctgctaagtaatgaatacactaaggtccttgtggttttccagttaaaacgcaagtgatttttacacatggtggctagacagcctgagtgctccatgttgtctgtttagtatgcagcctactcagaggggaataatttggaagatattcttagaaggctcaacagcattgtcagtcatttggtcataaccagatactcctcatcttcctttttaaggtcggcatgctgttgagatggcattgtccttatgaaacattatctgtaatgccatgcaaacacattacttgaagatgatctatgattttcttactgagatgataatggtgtcatgggaagattattcccactggtttctaaaagattctcttgtgatttgagcaggctaggggaatcaagacagagactcaggaaaccgatttggccagtccctttgcttgagcacggagaatcaactatgatgtctttcattttggcatttagagatgaggagacttctggacaatatcatgcatggtggccaagaaaatttttgctaaacggctatttcctaggtggttaaagtaagagttaacaacacagagcagagtagaaaatcagaaacgacggttgtaacaaaaagcaagcaagcaagaaagcatgacccttatcagctccacacagcatctggtctatacatactgtgtctagtggcagagggtgagtaagagagattgtttttccaacatcactagcttttgacagcatacctaaagaggtttttatagtttaatcgaagataaccatgaaatacaaaaattagagaaatgagaattgtcttagatattcaggttagattcagagtcattcaaatatacaaatacagagcacaaactagcaaacagattgtttttctcagacgaagtcagctgtccctgcaatttttgtccctataattttatttcttaatttaatagagtatttcaagagaaggatttgttcatcactttaaaggattcatggtcctctccagctttttttttgcttccaaaattctgattatattcttaggagactggcaaagtaaggctttggagagattgagtgaactatattttcttatatgcaatgaaattcaccattgtatttttcaaagcaaataatacttcaaggagtatgaacacacagagagttaatttgtgcattcattggtttggggcttgattttcttaagagtgctttcattgtatatgttgcaatctgcctaatcaaggaaaatatgaaaactagtggaaaataataacaaagccacattaacatgataaatgttatgagcctcagttgatattgcagaaaaatatataactgttaatcaggcaggcatgatgtattttttttctatttttaagttatgccattgtgcttctttctacactaattggacataagcattcatatgttggacaagaggagaataagctaatatgtcttccttctatcaatataaggctcatattttgcttttcttatagaaaatagtgaattgctaaattttccttaaagttgaatttgattgaactttttcttggaggatgactttgctatttctattttgaaaacaaagaaagctcttctttttagagtaatatccctaattgtgcatagcagccagtatccacctgtgaataatgtatgttttcttgattccttgtttccttcatgatttagcagcttggaatatgatggagtactattgcccttgcattccagctgtccaagaacaacaacaaacctttatccttcagctttctgaatttgccccaaaatggaatggtattttgtttttcaccagtgtaggaaaccttggccattatattttgattacataatcttgagcacctctgagtatcatctttgggcagaatctgaccaagattcttctcacaggctcagagtagagattcctcatgtttctccaggacacactttctcctaggcaatcattttggggcatcacactaagtaaagtgcctgccccttgtcaacagggggtaaagtttgactaaaaaacatcaggaaggaacatattgataactcaggggcacaactccaaaatgccattctgaaaaggctcttctagagtcaactcagagcccaagtgtagaagtgggctcttatgtgcaatcactgtacaagccataaaaatctttgatattgccatttatgattacaacaaaattttagatgtccaagaaagtcaacagaacaatccagatcaaagtgtagagaagcatctttgcagcttgagcctcaaaagcataaaaccaggaattcatttctgctctcagtgatacaagaaacaaggcaaaggaaaaaagatgggaccttagaagcaatgccctagagtaaaaagcatacattggcactcagtaaccacagagatagaaacaactgactcagcctctccagaaataacagtagatgtagaatttgttcttaaatatatgtttcgttgaaatgaaatgcagtcatcaaatgcgaggaggggtgctagacctgataagtctaggaagaccagtcagcttgatagccagttgttaaactaaaggaccacaaaggtgtgtttagtagttctgatatgggattactatcagtttatacatatgtatagattttcttttaattataaacagccagatagccagcaattaaggtgttttttcatctttgtgaaattcatggacaaattctgactctaaaatgcacagtctacatgaaatctttgatctcaatctgtatatatatatattgtacatgaccgctagtaggtatgaaatgcatttcagagttgaaaactcatgcaacataatcatgtgtttgcataaggaatgttaaaattctttctactacaatttattaacaggggaaaagattcaagcagtgccatctagaccttttctcttctcatttcttcaaaagcagtgctaagtaaaataataataataaaaatggtttatgaaccaaaagactttacattctagcattaggaacacacacaaaaaaatctgtcagcttacaaaagcacaacacataaagaaagagcagtggaatgcgtaatggggaaatgaatcatgtttaaagcaagacttgcattaaattggcaactaagataatttccattttctataggtaaccgtgttccagtttaatgattaccttcatactcaacaagaaaaatggcaaagcaacatcatcaaaataggtcttacaacatatctacatgtatatatgtgtatatatagattcatataaacatacatacatatatatgcattcatatgttggaaaacaaaaggaataagctaatatgttttatttccttcattaaaccagtatatgagtatttttaatttggcaaacaaaaatcaacatactgaaataagtaatacagggtactgagcatttctctatcagcaaatcaatgcctacagtttttatgaaccattgcacagttcaactcgacaatagtactgtaccccagaacatcagaagttaagtagttgtcacattgcttgtctaattgctctctttttcaaggaaacaaataacattgtccattggtgagtcaaaaacaaacatgtcttaagaaaatgaaaaatgataaaaattcctccaaagaggaagaaaaaaaaaaaactaaaccccaccatgttggttagggcaaaatactaagtattcacaactgtagcaatcatgccatttggctaaatgtacagagtacatgtaatgtgagcaaccataactttcactgaacgtgtgtaaatattaaaacagatttcttaaatatttttaacttctaatttgtattttatggtaaggcaatgtgctaattccgtttatggcttaagttgatgtgttataatatgtaaataattaaacatgctgtaaatgaatagtcaatagatacaaataattgtttagtttttttcttaatttttatttattttttactaagtactattactgcagtgcccccagcagagtaatttaaacacccttttgcataaatggtttgggaatcccagacagaagggtttcaatttgctatcacacacacagtcacacacagtcacacacacacacacacacacactcaaacacacataatcttttgctcacccactctgtctctctgcccgtctatgggaaacactctactatttatgtagtcaatataacaaacaagagatagcctttgaaatggcaattgggaaaagcaaaaatgatcattgataacttaatagacttttttatatgtcagagttcaagaaaccaaagtttgcaacttaaatctcagttttcaaacagtaaaagtttgtatagatggcactacagaaaaataaaaatggttattcctaccagctccagaaatgtgttacacaatatacactagaagactttttttttaataatagtattttgtccttaggtagtattgttcctttcaaccaaagactccagaattattgaaaaacaaaaaaggaaaaaaaaaatgagataatgggggaaaaaaaggacgctgcttcacaccaaaggtttaaaaaaatattttccaaatgcactaggaacattgtaaaaaccagaaaggagtgaacagaatgctaatgaagatactgccctaaagaaatctgtacaaaaaaaaaaaaaaaaagcagcactcttaaaaagctactaggtttttggaaattgaagtaaaatatttctgtagatatattcaaaattctgacatcaaattttaatttgcttaaagaagttttatttgtgatgaagatcaatatgattcaaatgatgaaaaacaaaactgtatgtcctttgagttcccaaaccaaatgtcactgccgtgtcacatcctctaatctgatgcccatgtgtgtgtccttgcgccatttgaagcaagttgacagttccatcagtttgtttttgtttttgtttttggttcaataatttgagttcaaccatcgtcattttaaacataattaatcccaacaaagttgcctatagtttaatttaaacctcacagcatttttaatttattttgcatgggtgtttaaatagttctgttacgaatattgtccctgcacagttctaaattgtccttttataaaaaaaaaaagtgatattctagtttcttcacaatgtagtgattatcagccttactaattaccttgtagcctttcttaatatgcacataatgcacattttccgatggctagaaaaatgcaaaacacagtggatatcattgcatctattttcatgtctttctaaaaacaggactattaaaatctctgggatacatgagatagtaaaaaatgaggattataaatgaatagcacataagaattattttcttgaatttaaacttattgcagccagtttcagcatgtaaatatataataatgttggctagtgtgtaattcttgaactaagaaatataaataaaaataaaaagattgtg

SEQ ID NO: 13659 - DNA, 386 bp, Homo sapiens
ctgctttttttcctgcattctgtggatcctagcagatattgccaacttaatcagataaacagattatgtaatggaagaaaaatgcggatgcctacagttaacagattgcaaaatgtatcttaaaatggttctaaaaattgcattcaaacataatttacataggaaatgtactgtgggaactattctatggatatatggtaaagttgttttggacttgtttttgctcagcatgaagttttatatgctgcattttactaattccatatttaaccatatttttaatacaaaagaacattagagtatagatcatgtgaaatgaagggtgcctttggggaaaattaactttttcttttgataagtatgatattcaataaaattttctaaat

SEQ ID NO: 13660 - DNA, 1946 bp, Homo sapiens
agcatcaggtctctctctctgctaataaatgtcatccaagaggaactaaaaccagaggcattattactgcattgtttgtcactgggaaccaaaggataaaagagtagcataagctgctgaatgttgccatattaaaggagagaacttggtaacgtgaagtatttctcattgaaatgctttcccttttgtatatagccagtgttaaatccttaaatgcaatacagcctctgattattgagcttcctcttaaaaagatttttttattttatgtagccaacattgcagtactgtatgctcaaacacaaatcttaaagtatcggaactgtttagcttatgaaaataatcgactctgaatatttgttacaagtctgttttatgtgttttgattactagtgagcagaaaataacataccctgtattcaaaattactgaaatggcaatcaaagatgatcatttttatgtgattttagaaatgttaaggcaatactactaattattgtaggtttttttaacgtatcacccaaagcatgtatgtgatctttccccattagtatctttttctcaaatgccataattaactgaaatactattattaaattttcatgagaattctaaaatgaatcctgggaaatgcacgtttggtgatgttgcactttctgtattttacaggaattagtcaatacatgttgaaatgtttaacattttaagattggaggcttaattactgggagtctgtctaatgaagtcctgggactattgtaatggaatatgatttgagttcactgtgctctttttgtttgtttgttttggtcatatatacattcagaacttttattttaaaacaaccacaataacattaataatagaaaattcatctgtaaatattcacagtctagtcactgaaaaatgggaaaacctctaccatgccttattattaccctttgctgtttgaggagccagaaatagaggtgcagttagaggacggtcactttttccaacaaaacccactccatagccatgtggatttttatccaaaggctcaacaaccagagggaatggtgagacctgataactaaaatactgttattggcaagggtttgaaatgtgtaagaacctaggagggaaaggaagattgagcaacataggaaaaggggaagagaggctgagtgtcaccaaggtccaaactccatttataaaaatactgcaaaaccaggagttgatggtagaaatgcatatgatccatggcaggagtaaatctctccacctcctctaactctctgaaaactctagagttggagcaagtcttccatttgcttcttatccccttaaaagaatgccttccacttcccaacagcccccatcaagggaccccaagaggccaccatgctcttatctcgcactttctttcctattccccttgcctgaatctggagtggggttgagccctctgccttcaaccttaagatttaggaagttctttccccaactgtctaacttggaaaggtagatgagtctgaattttgaagtaacgaatgcaaattccactcagcagaggcaatgttatttatgtacatagggatagtggaatgagttttaatagattctgtccaaaaggggtttgttcctcttatttcctctatgtaggaagttgtgtcttaggcaactttatcagtatcaatggaaaaatgataggcactacaatgaaatggcaggatgccaatatgagatatttcaggaataataagaaatacagtttgtttgtataaaataaactatctcaagaaagttttcaacgacagtgatagtgttcatttgtaagagagagttctagaacttcgatgtccagtgcagtagccactacccatatgtagctgttgagcatttgaaatatggttagtccaaattgagatgtgctctaaaggacaataaaaggttaaatatctcct

SEQ ID NO: 13661 - DNA, 177 bp, Homo sapiens
gcccctgcccgcctgcctgccacctctcggactccagcttgatggagttgggacagccatgtgggaccccctggtgattcagcatgaaggaaatgaagctggagaggaaggtaaagaagaagagaatattaagtatattgtaaaataaacaaaaaatagaacttatttttattatgg

SEQ ID NO: 13662 - DNA, 612 bp, Homo sapiens
caagttatagccgagcaaatgaaccgtcctcctgcctctgttgccaacacgagatcaatcagccttggtcaatggacaaacacttaggactgaactgaacccctccccatgaacacaagggttttatcctttcctttaaaaacagtgtttgaaatgaagactgtcaactatcccataatttatttattcttcttcaatgtttgtaaagtgcatgagtcatgttcacacttgaagtctagtagtgcactgtaataattcattttttaaaagattatttaatgcccatttcaaaatacagtagtttacacagctacagaaacaatttggggcaagttttaaaacactgaaacagtaatagttattggtgtcacataaaactgatttgttttttacagccaaacctctgtcagtcagaggcattcattagttttatacatgtaatttgaaaatcactaaacctcgttttctcagcagcaataatttaagaggcttcaaaaatataatttcactcttatttagtattttttcctgggggcatttttacgtaatttttttatgaaaagacaaatgcatgttgagataacttctgggattaaaatagtcttttgcttt

SEQ ID NO: 13663 - DNA, 541 bp, Homo sapiens
agccatccatccatgccataccacttgtcagggcacaggggactggctgggcccccagggctgctccccacttgcagcacaatgccttctccacctgccctcccactcttccagtccaatccacgctgtcttctgttgcaggactaacctttgagaaatccttttgtgaagtcattgcctgctcaagaatgtacagtggctccccaatgccttggaggccataaggccagccagttctagctctctattacctgtccccactcaactgactcatacctgtttccggctgcatcactatgtgccccacagagaacgatgatcgtcacctctgtgcctgagttctccctgttgtctcaaagcggtacccatcctcccccagaagctgtccccagcgagcctcccttctttgtttgaattctctaataagagcaacagcagctcccatttctagaacacatttacagtattactattttctaggatataaagtgccatatatatttttaattccaatattaataaatgtatgccaaacaacaat

SEQ ID NO: 13664 - DNA, 2550 bp, Homo sapiens
ggttttctagtcttgaactactggctacgtggctaccaaatgcctaagggagttcgttcacagctgagttatgaagctggaattggttctagacgctgggtagatgcaaagcagcctaactcttcaagtaccgacatttctcacctctgattccggctctcctttgagaaggagaccttagcttccccggcttcaagtagaacagaagcccgtttccttccctcatcagtgaaaaaatctaatgtttcaaatgtaaattgttcatagaaaaggaacatagaatctgttttacagaagtaaatcgaccgtcaagagaagacttggcctctaatttatattgctttgcactttggtttgatattaagaaacagcattcttcttcagtgaaattttgggtgccaaacacctacccagaatgtccagggctttcattttcaaaagttagcattctccttttgaccgtccaagtcattatgaattctgacttgttgtattaggaacatgttggacagtggaaaattttctctggattgttttagtaatatttttgggattatacttcctttctgtaccaatttcttttaatttaaagaactataagtcagttatattatctaccaacaggtaatatagctctttcttttattaactgttctctgtcccccaaccatctcctgatatttggtagagtaacacctttatacgtgtgcttgcctcctaatttaaaatactgtattcgcatgtagatataatgtacataacagtttaacctcaaagttgctggagtcagggccccctgtgcttgagacactaatacagagtgtgttcgcacttagccatgggctgggctcaagaacctgatacctgggttgatgtggattacctagaacccttcctgcagtattcatacagtgtttttattttgttgttgtcattgcgtgtgtgtggtttgtgtgtgtttttaatgagaatcttgttttaaaatgtaatttctaaggtttaacaccaaaatgttttatttgttgtggagtatatattatacaatagagaggtaccttaaacattttttgttcttattctttttctcataagtactcctgagtacaagtggtcacctcccatagtattcatttggcttcgctgtcaaaaatcattattctgtgcagtcgtggccctgggaaggggaaataagaaggccctgttgacgggctgtcttggctctggaattcatgcatcctggccttgccaaggttctggcagggcctgctggtgtgttggagcctgcagggcaggtcaggctggttcagaggcccatgctgaggggtgggtgctctgaagtggagtgaagcctcaagcccatgaatgccaccccagtcatctctggtgtcagctgctgctgtggccccagcaggttctcaaagctcccaagtcctccctacgacacagcccaaatgtgtaaatggcactgttgccctgacagtgcatggaaaggacgttggcatccaattggcactccttctcccttattcaatattaggtttgatttgcccttcgccattgtttccaaagatcaaggaatgtcaataacattttaaaggaccaataaacagcctcctataaagtaaacctcttcccgtggaagcacactctactactaaagggaaggccctgggctctgatttgtcctttgcattgagaacggtgtggggatcagtgtgtgtgtatgtgatttgtttattgagttggctttgcttttttagtttttcttttaaaaataaaatccttccttcccatgttactaaattaatttatgtttttgagaggttgagtctcaaagtgtaaacaataaacctccattcataaggtggatgttgtaagcttgatggtggttgtgaaagtgatttagctttgaccacttttcatcctacagcttcaatatcaaactggttaggaaagcccagggggaagggagggggcaggggaggaggcaattctgaatgaatgaatggattttttgttgtttttgcatgtttaatatagaagttcccctcgttccttgggagatgatggcctttgaatatgcagacaacctttgaattgtgcctactaaattatagcaggggactttggcacccaaggagttctgactttctgggattataatagtaattcccagccatactctggactttattttgctaaccataactgagcaaatgtaaattactgctatattaatgttttaaagcactgggatagtctaattctaacttgtaattaattatgtttgccaattatctgtttgaaataaatttgtgtctgaacagctattgaaactgttaaattgtacagatattattcatgacagctttgtactgtggaatgtgcttaataaaaaacaaaaaagtttgacttttgtccagtaaattgctaagtaatgtcaataaatcgagtatgggtattatgcagtgcacctaatctggcttcatgcaattgttacttcagctactgattcaaagccaatactcttaataaagtgttgcaatactc

SEQ ID NO: 13665 - DNA, 2812 bp, Homo sapiens
caaccgcccggggctgtggctggcagcttggtgggccccagggccttctccttcattctctgtgaacatgtaactcaggaccccttttccctcttgcgtctgtgccagctcaaatccagcccctcgccctgtgccaccccaactgtgcctgatagacctgccccagcgttcctgacttcttgctggcctgtggagggtgaggtgtaattatttgtcacctgaacctaatgtatattctccttgagccccagatcccttcaagctggaagggatggggctgttggtggggtcagggtccaagaggaatgggtgttctgtggcctcgagtcctctcctgtttgcgaaaataccagttttgctctctgtgggacaaagcactgctgatgaagtccccgtgggctcatccgggctggaattcttggtttttcagccattccctgcagagtcactcaatcatcaagtccctcacagccatttctgttcccagaggagccaggcctgcagctggctgctcaggagatggcctcattcctcctgttctcccagtttgctttccacttaagacaaagccttgtctatgtggggggcggggaccggggaaagagggaggctgaaatgtttattctgcttctcccgtgtttcatgccatctcgcgtcccccttcctgcacatgggtgtgaatgcacacacatacgcgtacacacaggacttggtctgctggcctggcctcttctgcccaggtgggttggaacacgtttgctgcctgagcctgtgccactgagcatgttaggtggagcagttggtgtggcacgtgcggggtgttggcaccggaggcatggaaaagcacaggctgtactgccaggctgcgatgcgtgctggcccccgcacaggctcctgtgtgcagggactgattcctcagcacacgaggcttccacaacccagtctgctccatagcactctggcccaccctgtctgcaggtgaaacaggagggctgtttgcctctgccccatccccccgactgtgttcaggagtcccaccttgcatttcagacctgggctggcagtctgttggacttctcttcaggaagaaaaagcatcagggggaaatggaatgcccctgccccaggaacatggcagaagcacaggttctgtacctcagatggactcctgctgggccttcggggtctcagttggcttcccccagattctgattctacagctgcagaatgtatataacgcaataaaagcaaatgtttgaaccagtatgcgggtttacttacaaggaaaccttttttcaccctgatttctaattattttattgaaacaactataaaatgtatggtttctccaggaagatatctgctttttaaaacaacaaacaagaacaacaacacaaaactggtaatgatttggagtaatcatgcgggcatattgagtctgggtagtgtttcgctggtggtagagtggttgagacttcctgggaggactttttccgccttcactcctacagatttaagattctttatttttaggccgggcatggtgactcacctgaggtgaggagttcgagactagcctggccaacatggcaaaaccctgtctctactaaaagtacaaaaattagccaggcgtggtggtgcatgcctataatcccagctactcgggaggctgaggcaggagaatcgcttgaacccaggaggcagaggttgcagtaagccaaggtcacaccactgcactccagcctaggtgacagggcgagactctgtctctcaaaaaaaaaaaaaaaaaaaattctttgagacagggtctctaatatgttgcccaagctgatctcaaactcgtggctcaactgattctcccgcttcaaccttgagtagctgggacgacagatacatgctactgcacccagctaggttaaggttctgtatactctgtctttctaaagcaattccctggaaattttctcaacattggttataactgaatgcttgggaagggaggggcagcccttcaacaggaaaaggggactgcccaaatcttaaatgcacagtcaagattctcttggagctagcaatggttctcaggttagtgagcatttagcttgcctgctgcagaatttgacccagatgggggtgttttttaggtctctcacaaatgagacaagcgaaacaattgtctccttttattctctttggtgcattggtgctggggaaacatgaactagcggcagtgtaactgcagaacatagacccagttctaccaggccaggccagcgttgggaaccaccagacagggctgctttgggctttgcttacagtatttccatgtgtagcctggcgtgtgagaaagtattaggtgaaatgccagtttcatggttcaggtgaaagtctgtgatcattcccctcgtggctcgtccttcacatcacttttgcccttcaaggagttgccgcgtccccgctcagtgccgcctgagccctcagagctcccctgtgcttttctggatggggactggcggggtcacctagcctcaccgtggagccaccgtgcaatgcccatctctgagaggcccacgcggtattcctcgtgccctgtgttagtgctttctgtataagggacagacagaactgggtttttttcctctgtctggttttagagtaaatgtaactaacttttattttccctttatgaaagatagaaattatttttatgtagtttccagactttatacaaaatttttgtaaaatgttctctggaaagttaactacaagaatgtaaatatgcttctaataaaataacaaggttatttgccgtt

SEQ ID NO: 13666 - DNA, 2184 bp, Homo sapiens
actgagccctgttggccagctcccacatccctctgctcctttttatggttcttgttgtcatttcctactctgcggcgtgaaatctatttcactgctctaaattccctatgaatggatttagttctgaggaattaccagtgaaaaattccatctgtgatggagaccaacaaaaataataaaacacaaagagccaggctttgagactcatgtaattacaatttctaatttgaaaggcagttaagaaatagataaccatttattttagaacactcaacaactatgtaatggctatatttcagtgacttggactgtaaatgaaacattgcatccatgaaggacagcaccaagcacctttttgaatacagaatttttttagaaaaatatatcaaattatataatttccagaaaccataaataatggatataaaacttaacctttttgttttgttttgttttgttttgttttgttttgttttgttttggttaatggaaactgaaaagagcagtatttgaggttgcttctattctggttttttattcttagctcaattaatatttagccataaatgagtagagactggcaaattgtgctttagtgttgctttcctcatccccacatcttgagctccttatttacattcacactaaattttggtgccttccagcacattagtggcaggcacccttctggaacactaggcaataatttcatcaatacagtcaggtctcttgagtttcaacagatactcagttgaaaagtcgctgtcatcttgctgcataagtattttgaaaggtctgtataacgaagccatttttatatccaggcttagaaggtcactactatatagtaccttcattgatctatctattctgcttggaacttttcatagctaagtataacccccaaatgcatggttcctgggtcaggagacaccaaaatcaattatagctgttcccactcaagttaataaagtaaatgatttcctccactttgcatggaggggtgtaaggaaagcctattttatctgtgcctgggagaactgtgcctattttcagtcttttagaggaaatttcaactcaaaatttttaagtgtgaaagatttactggtgtcacataaacattagcagtgagaccaaataatgaaacattgctttataccttagtgctttccagttcactgttacctctagtcatggtagatgacaattttcctccctcatcttttgtagcaaagaagcaaattaagagccttttgcaagttagattaggggactgaaaaatccagggagataacctgattcttctatactatgactggagtaaagctgccaagagttaggttgaatttggagccttttaaaagttggttccataagtgagaaggggggctaacatgtgaccactgtgcccctgagaatccatgagatggaaaagtacagacaagaaggcacttaacgctgttctcagttggaaaatgtcagccctccacacctgtttggatgtgaagtgcattattaattttaatgacaaaatgaaactgctaattagtttaaatgtaatgtttaaatggtattgaatttcctattgcctgattaaatatatctgtaattgtaacatcatgtttctgagagctttaactacttccttatttttatgcaatcattttaaagattgtggctatatctaatttaaatttgctgatgattgaatctaaattcaagtgaagaccacagcattaatcccaaaggagattttttttatgtttagaggtggagatattagggtaaatcagtatattgctcctgtcatcaaagtttttgttcatttgtgtgccacatcgaatagcagcacttctcaaagtttgtcaactggaaaaaagtgtttaaaactgtttttttcttaagcagatttggtgatgtcatcaatatctatgatatcgattggtaaaaggtctttctttgttgaggatttgagctctctttttaagagtttattttattttaaaggaacatatgctttgaataacaattctctgggcatgtttaactaacctaggtgggaaaaccatggtgctgtttaattgtaaatagattgatataagattggaccagtacttgatgtgtataattttagtatgtagggtttatgtgctttttttaaaaaaaaaaaaaaggttcaatttt

SEQ ID NO: 13667 - DNA, 4868 bp, Homo sapiens
ccgactccctttctgcctagagggcccgctggtccttgctggctttacccacgtatttaatacgcctcttaatttatcattctccacgcagcttccaaggcagacagactctggggtactgtgacttcttgcctcccatgggtggagagtgagtttcggacacctcgggcgcccctgggcctgatccctcctatcacagcatcactggaggctcagaacccacagcctttgctttctgtccatgtcagcatccctgccttaagagaactcctcctggccaatggcattgccacccagcagtgggaccaagactctccaagacctccaggactggatcccattgcctggagaaactccagcaagggtctctcatggcttggacatggcacagtaaggggcagccaacccagtccatgatgacttttgctccaacttcttcatgtttctaaaagcccagtggctttattcactcctcctaaattgcctgctaccagaaggaacttcatcctgaagaaatgcattccattaccagttccagggaaagtgtccccttccccaaagcctcaggcccgtgggcctctgaggttccactggatgcggctcccccaggagtgggcctggagatccgctcagccgccctgcctcccaccttctatcttgggaccgtggtcagccctgaagggtggttccagccccgcgtatgctgcgctttgctgctgcaggctccggtccctccagggcttttcaatgagagttcccaccccaacttggagcatttcatttttgcctacctaaagcaagaatctcaaagtttgtttgaataagaggcccattcacaagtcgtgcccttgtgagcacccctttgctgagtgcctcgtgggtgccaaacactgtacttggcgctttgcattcatgctttgaccctcacaacctccctttatagatgaggaaattcacgctccatgtgcccaaggacacaccagccaggaggaagagggaagaggatttgagtccaggcctgcctgacttcagtgcctgtgccctcccctctgtaaaagacaaaccaggcagggaagagatagaagctggctaagtggtggccaagtggcttcattgtgaggggggtgagggggcattcgtggctgctcccacacccaccatccctccagcccacagcagcctataccaaaggctgccctggactcaacagctgcatctccatgacaggagaatgccagggtcctggtggttgacacagagccctgttccctcttctaagctgttgccccctggggaatagagcttatggagcaacgggagctgaggtggcctcgagggccagcctggagggctctgagcatagcatgcagcggtcccatagggaggcaggtaaccaagggccaggcagagctgcttcctgtgcctctccggcatttgtaatgtttttttcttttttcacgcactgccaaatctgttttctcccttgaagaaacccagggcagatgtggtcatctgtcaaactgaggtctggagaggcatgactaaatcactgcagaagcaaaatcaggacccagcatttctagctcccagcccagagtaagagagcagagcagaaccccttcccattctacccgaccgaggcagccctgccctgccctgccccgcccctccccaccctgccctgccccagagatctccagttcacagtgttcatcaggcgagatacttttggacccacaaagccagttttttggggggatgctcagtgtctacctgcagtgccaaagttttgcttgaacagccctcttctgccgcgcctcccagctccaccccctatcacgtgggtgctggctgcttctgcgtgaggagcttcctctgatcacctgtagcatctttagtgccttcgtccagtcggcctgcaaatcccatttcccagagaggcttgggcagggcccacttgccacttggccctgtgcccagagcgttgggggcagatggcagccaggggaagaagggaggtggggaagggccgccaccgcttgagggtcccctcccttgagaggaggccccatggcagttttcctgagttcttgatccactttggtttaaacaacttttgtgaagctatgtgagatttgactgcatttcaaaagacaaaacacatgtttttttctgatttgctctttgcctttcagcgacgctttcagatactttgtgagtgtctactctgtgctaggtgctgagtagactgggatgtgtgtggctccatccctggctggaagagctttgagtcctgtctgctgacttcactgaaggagtttctctcttgcttcattccttcctcccgggggtcagctgggtaggagcagacttgccctgccttcctctaggcagaaagttttcctgcaaatgaaagaatctgccattctcttttgctatgatgatgatgattattctgacatgacccgcgggtactgaagccacagtcctctctgttcactgttctctccttgagtcatatctatggcctgaggacgtctgtatccagctccttttcctacaatggtagacacttccccaggcagtgggtgggtcagggtggccagtcactctcctagctgtccttgcctggggacttagatttaccccatccaggactgtggtcgctattctgtgagcgattgatggcgcatatgcagaactcccctggagtcatggctctagaaagtgtccaggcccatcgtgacaatggtgccaagcaccgggctggtgaccagtgcctaaacacacacgctcctttaatccttacggcaagcctgtgaggcggataggaccagccctgatctatagtgagaaaattaaggttcagagggagaaggtccaaatagtggccaagctgggactgagatctcgagtttgggtttgtttggttttgttgttgttgttctttccctcgtgtccatgacttttctctgccattagcagggaagtgtgcggagggcttccagggaatcaagtgaccctccctctgaatttcggtgcctcttccccccgccccttgctcacacatttcagtaggtcacaggccaaatggcagcccaaaaggtgggcagagatttttttttcttcccctcacccctgcttattaacacaattgtgacaactactttaccttacatcccagggcaaacggacagcttgcggtacctccaaaaatttggaaaaccctgagtctaagaccacctcttgataaaagaggcctttgctcacatgttctgctcggaatctttctttgccattggtgggtgtatgtcgtcccagctgagactgcgggagagctgagctccagcttaaaccgcttttaatggcccttccctactgggggatcgctggagcccatgccaggttacggtagtcattttaaacctctgccacaaggccacgccatagaatcaatttccaagtcaatgttcttggccctaaaatgtttgcgcccactgaggatttcattaccaggtggaagatgggggaacatatgccacgttaaagagcaagtgctgagtgtgccaggacttgagaaggaccttaggctgaggagtggacagtctggtatttatttcgcctctcccaagtacccagcacagagtgggaaaaagaagaaactgctcctgccttccagtagctggcaacttgacatcaagaacaaaaacattcgtagctggacccccgtcctttcatcgtgcccaagtcttacatgttggcttaagctgcccccttggaggccgtacctttctctttggactgtgacagtggacacctaacagcctgagccatgtgtggctgtcttatcccccaagggttgtccaggcccgttctgcagggctgttgtgtagactgcagacatccatacctcaccacagaccaaagatgacctcgtgtcagactgtgggctgatgagaggtagagcagcatgcatcgaggcctgagggtgcagggcgccctctcttggcctggaggaattgctcctaactagagtaagtttccacgagggtcccaggcagagctgcagagctggaaccggaggctccacagtccttgcctgctcatggacctccttcagagcacctttctacagactggactgcccagctccgtggggtggcatctggtttctggtgctattctgccaagttatcgagctcctcctcatgtttcaacattccatcttcccgtttctatcctcgactccaaagtaagccttcttagctccaatcagggatgaggggctcaacctcttctgtcctcaaagaggccaaacgcagtgccacagtcggtagccttcacttttagatgtcctattcatgtaaaaaagaaggtgcccccaccaggcttacatcagcaataagcaattctaatgcaacgatggtgtccacattttaccccagtgtgtgcccatgtatgcctttgtgcccgtgtaattattgttagcgcccctttcacttagaggggtgatgataaactgtggccaccttgattacaacccacatttcctgctttggggagcttccaagtaacaggccatttcttacctccctccaggaacagtgggcactgcccaccacctcgtgtctgctcataggatgacgctggagatccccacacttactctaccctcttggcaaattggcattccggtggtggtttttgtttcctttaacacattaaataaatgagtatataggatgtgaggggaggggtgagaacaactagctgtagcatgtgtaggctatatactttaccatttgacttctttcctttttttttttttaaataaaaaaagtgcttgactggtttcaagcttcatcatg

SEQ ID NO: 13668 - DNA, 664 bp, Homo sapiens
aaggccacgggaggtgaggctcttcacatcccattgggactccatgctccttgagaggagaaatgcaataactctgggaggggctcgagagggctggtccttatttatttaacttcacccgagttcctctgggtttctaagcagttatggtgatgacttagcgtcaagacatttgctgaactcagcacattcgggaccaatatatagtgggtacatcaagtccatctgacaaaatggggcagaagagaaaggactcagtgtgtgatccggtttctttttgctcgcccctgttttttgtagaatctcttcatgcttgacatacctaccagtattattcccgacgacacatatacatatgagaatataccttatttatttttgtgtaggtgtctgccttcacaaatgtcattgtctactcctagaagaaccaaatacctcaatttttgtttttgagtactgtactatcctgtaaatatatcttaagcaggtttgttttcagcactgatggaaaataccagtgttgggttttttttttagttgccaacagttgtatgtttgctgattatttatgacctgaaataatatatttcttcttctaagaagacattttgttacataaggatgacttttttatacaatggaataaattatggcatttctattg

SEQ ID NO: 13669 - DNA, 434 bp, Homo sapiens
ggaagggacccgcgtggcgcgaccctgaccgatcccacctcaacagctccctgactctcggggggagaaggggctcccaacatgaccctgagtcccctggattttgcattcactcctgcggagacctaggaactttttctgtcccacgcgcgtttgttcttgcgcacgggagagtttgtggcggcgattatgcagcgtgcaatgagtgatcctgcagcctggtgtcttagctgtccccccaggagtgccctccgagagtccatgggcacccccggttggaactgggactgagctcgggcacgcagggcctgagatctggccgcccattccgcgagccagggccgggcgcccgggcctttgctatctcgccgtcgcccgcccacgcacccacccgtatttatgtttttacctattgctgtaagaaatgacgatcc

SEQ ID NO: 13670 - DNA, 3124 bp, Homo sapiens
aatgaaaggcctggccacgaaatctttcctccacgccgtccattttcttatctatggacattccaaaacatttaccattagagaggggggatgtcacacgcaggattctgtggggactgtggacttcatcgaggtgtgtgttcgcggaacggacaggtgagatggagacccctggggccgtggggtctcaggggtgcctggtgaattctgcacttacacgtactcaagggagcgcgcccgcgttatcctcgtacctttgtcttctttccatctgtggagtcagtgggtgtcggccgctctgttgtgggggaggtgaaccagggaggggcagggcaaggcagggcccccagagctgggccacacagtgggtgctgggcctcgccccgaagcttctggtgcagcagcctctggtgctgtctccgcggaagtcagggcggctggattccaggacaggagtgaatgtaaaaataaatatcgcttagaatgcaggagaagggtggagaggaggcaggggccgagggggtgcttggtgccaaactgaaattcagtttcttgtgtggggccttgcggttcagagctcttggcgagggtggagggaggagtgtcatttctatgtgtaatttctgagccattgtactgtctgggctgggggggacactgtccaagggagtggcccctatgagtttatattttaaccactgcttcaaatctcgatttcactttttttatttatccagttatatctacatatctgtcatctaaataaatggctttcaaacaaagcaactgggtcattaaaaccagctcaaagggggtttaaaaaaaaaaaaccagcccatcctttgaggctgatttttcttttttttaagttctattttaaaagctatcaaacagcgacatagccatacatctgactgcctgacatggactcctgcccacttgggggaaaccttatacccagaggaaaatacacacctggggagtacatttgacaaatttcccttaggatttcgttatctcaccttgaccctcagccaagattggtaaagctgcgtcctggcgattccaggagacccagctggaaacctggcttctccatgtgaggggatgggaaaggaaagaagagaatgaagactacttagtaattcccatcaggaaatgctgaccttttacataaaatcaaggagactgctgaaaatctctaagggacaggattttccagatcctaattggaaatttagcaataaggagaggagtccaaggggacaaataaaggcagagagaagagacagaactaaaaatacgaggaaaggagagtgaggattttcattaaaagtctcagcagtgggtttcttgggttatttaaaacatcacctaaataggccttttcttcctaattggccatcaaattaaagcctatcctttctcaagcaggagctggtattgtagggagtggccgggtattctgggctgggctcttctggagtagggggtcagcaaacattgtctgcaaagggccagatactgaatccagtactttcagtttggcgagccgtgaggtctctgtcgaaactactcaactctgccgtcctagcacaaaagcagccatagacaacacacaaacgagagggcttggctcccttccaggaagatttatttaacaggctcccagctgaatttcactcacaggacacagtttactgatctctgttctagtgagtgggtcaaaaagcatatgcatccttatccgtcaactcatcagctcttcctcaaggcaacctgaggccagacaccaagaaaccaagcgtatctgctctaaaatgacttgttcctggggaatgccttcaaccaaaacacagctagtatttctatgccccaaatccaatcccagtctttcatgatccatgccggcggttgggtggggaggggaatcattggttgggggaagggaggaaaccccacctccagcccccgccaccgggctccctgggcacccagcaagatctggggctgcagagaacagaagagctggtgcacttaatccagctctgcccttggggggaggaggacctgtgtgtcaggctctgccatgggaacgagtgtaaaccgtggctgtctcctgcagtgagccaccgcggcaggcacgttgactgttttactgacatcactcaaaagctaaagcaataacattctcctgcgttgctgagtcagctgttcatttgtccgccagctcctggactggatgtgtgaaaggcatcacatttccattttcctccgtgtaaatgttttatgtgttcgcctactgatcccattcgttgcttctattgtaaatatttgtcatttgtatttattatctctgtgttttccccctaaggcataaaatggtttactgtgttcatttgaacccatttactgatctctgttgtatatttttcatgccactgctttgttttctcctcagaagtcgggtagatagcatttctatcccatccctcacgttattggaagcatgcaacagtatttattgctcagggtcttctgcttaaaactgaggaaggtccacattcctgcaagcattgattgagacatttgcacaatctaaaatgtaagcaaagtagtcattaaaaatacaccctctacttgggctttatactgcatacaaatttactcatgagccttcctttgaggaaggatgtggatctccaaataaagatttagtgtttattttgagctctgcatcttaacaagatgatctgaacacctctcctttgtatcaataaatagccctgttattctgaagtgagaggaccaagtatagtaaaatgctgacatctaaaactaaataaatagaaaacaccaggccagaactatagtcatactcacacaaagggagaaatttaaactcgaaccaagcaaaaggcttcacggaaatagcatggaaaaacaatgcttccagtggccacttcctaaggaggaacaaccccgtctgatctcagaattggcaccacgtgagcttgctaagtgataatatctgtttctactacggatttaggcaacaggacctgtacattgtcacattgcattatttttcttcaagcgttaataaaagttttaaataaatggc

SEQ ID NO: 13671 - DNA, 752 bp, Homo sapiens
aatacgccagacaccttttgaaagctaatttttggtgaagaaatggattcggttacataagagtgcaacttcagactgaagataggccaaggtcgtcactgatctcaagatttcaaccttgaccatgggcagtgaccagattgaaaggggagcaagttcggcagtgggagagttgaccgtgtcaccccctgcattgtgctgccatttggccagcctgtccaagggcatgacaccaagtagacactacagagagagaaacactacagcaacccagggttgtcctgaaacagacttttatacttgaacatggagactgcacatggactttagggtttgtgctgtgggataaacggaagctacagtgagaacatagccagtcccaaagacaatttcaaagaaaaatgacagtaaagattagctgggagtagtctttgacagtgcttatttgatactgtctctcagagtttgcaaaccagattgtacaagtcattagcgtcagatagctttaaagttgtgaccttcttgtacatgaatcttctagccagtttcctttcctttgtaacgaaacatgaaatcctagaatgtatgagaagttcagacattaggcataaggaaactcgtttgcaggctctctgtccagggctgcttcctgtcctggaggggccagtgagtcttaggtatgtttattttattctcacatttgtgtttttttagaaaagtgaatggtcaataaatggcttatctttcataat

SEQ ID NO: 13672 - DNA, 1087 bp, Homo sapiens
actcgcagatgaatcctgccacacatgctcatcccaaaagctagaggagattgctctggggcttgctattaagaaactaaggtacggtgagactctgaggtgtcaggagagccctctgctgctttccaacacacaattaactccgtttccaaatacattccagtgtattttctgtgttgttcatagtcaatcaaacagggacactacaaacatggggagccataagggacatgtctttggcttcagaattgtttttagaaatttattcttatcttaggatttaccaaatagggcaaagaatcaacagtgaacagcttcacttaaaatcaaatttttctgggaagaaaatgagatgggttgagtttgctgtatacaaacaggtgctaacactgttcccagcaaagttttcagattgtaaaggtaggtgcatgccttcataaattatttctaaaacattaattgaggcttacagtaggagtgagaaatttttttccagaattgagagatgttttgttgatattggttctatttatttattgtatatatggatatttttaatttatgatataataaatatatatttatcatatttaataggataaattaatgagttttatccaagaccttacaaccacatttctggccatttaactagcactttataagccaatgaagcaaacacacagactctgtgagattctaaatgttcatgtgtaacttctagaaacacagcagaaactgatagataagggaataaagttgaaatgattccttaaaattcatggacacagataaatgcaaggtgagaattgacaaatgctataaatgctttctttttctgaaaagattttgaaaaatttaaaaaagtatagctactactgtgttcaaaacgttttaaatgacaaatgactttcccaggggaatttgcagttctgtaaatatcttaaataaaagccaacttaagaagagcccagcattaaatttacgatcttaggtggtaatgaaaagtatatgctgctttgtatttatgtaaaataattggccctctccatcttttctcatttcatgtgtcaggtagtttttctga

SEQ ID NO: 13673 - DNA, 1535 bp, Homo sapiens
agccctctttccagggattctggtaaaggtggtttcttgcatcccactccccttttaccttggctttgacataggaaaggtatatttaaaaacttaatcagctgggcgtggtggctcacgcctgtaatcccagcactttgggaggccaaggtaggtggatacctgaggtcaggagttcaagaccagcctggccaacatggtgaaaccccgtctctactaaaaatacaaaaattagctgggcgtggtggtgggcgcctgtagtcccagctacttgggaggctgaggcaggagaatcgcctgaacccaggaagcagatgttgtaccgagctgagatcatgccattacactccagcctgggcgacagaacgagacgccatcaataaataaataaataaagtaaagtaaaaaacctattaaattgaggctagagctggagatgtaattggtttttgagaaacattagtataaagcttgcccttgttgtgtggaagaagccattttgtactgctttaaagttagactaatattctcagcacgggtgtatggggacctcattacctatttttttcatcatttaccctaggtaagaactttgatcactgcttactaggtaaagaatgtttgtactgttccaaaacccaggcttctttattcctttaccactatccatgtgagcattgacaaatcatggcttagaggtgctcactgactcgctaagacgactttggccctgttgatgactggtgctgtgctccagccttatcagttaggggacccaaggtttgtttgggacctgggtacaggtaaaagccagacttggcagggacccctctttctaggctgaaccttgagtccccctgctttttggcagacctaatggatcactgtcttgcagctagttcttcatgtggggcctcttaggccagtgccggaggaggcatgctcctctttctatgccacagaacaaacactactctagcagagcctttcttgcactttaaagtgagattaatttagctgtaatttggttaaaaacttcctaagagagaaaattaagtctactgatttggtataggtaaatggacattaaacttttttaaagtaaaggagatggtagataccgttagattatagtcttgaggttcatgtgaagccagtggtgttaacttactttgatttccttgttcaggtcagggcctggaacgcctgtgcggggaggtcactcaattcaaaattttctgtatgaaagcatttttcaccaaaatgagcctcatccctttatgcaacacataaccttactgagggagggaaatacagaagccacctttttatttctcttcactgtgtacaagttcacttgttgtcttgaacactgtctcaaatacctgctttttgttttggatagtaccttgtctgtataagaagctggcctttccatagagaggccctggagtctaaaattatgagaacaattaatttatttgtgtcttctattatgatctcgttttgacaataaaaatccttactactttctc

SEQ ID NO: 13674 - DNA, 290 bp, Homo sapiens
ctggtttacatcacagctgccccaggctgaggcgtcccccggaccagtgaagctggagccagggtgtaaggcaaggaggtgctgtgtggctccagaggagctggccaggtcccatggaatcagaaggttacacacacgtgcacactccccgctctggggaaggaactgttctcagaggctccaatttatattcatctgggggttcacggaaaagccagaacctgctgttttcagggtgggtgatgtaaatatagtgtgtacataataaagcaaatatattttacttctct

SEQ ID NO: 13675 - DNA, 318 bp, Homo sapiens
gtgcctgctaggtgcatggccacagagcatgggctgggcctgggcacaggaggagcagctgctttggtcggggtggagactcgcagcagctgctacccacagcctattccactcctccccatctccaggcgctgggaggggggccctcaccccatcacgcctcgctccctcctggccctctggtccagcccctcacgcctcctctcagtctactcaattgtgactgtccctcctgatgtattttttttcttggcttaaagggtgtgttgttgactctttttacacttatttattatcattctcacttctctggaagcc

SEQ ID NO: 13676 - DNA, 2329 bp, Homo sapiens
ggccacgcagccgcctgcccgggagaaccctgcctgaagctctggaaacttgtgggtggggcccagggaggatggggagggagtggcccaggcctgccccttcgctcctgcctgcatttccagagctggtgccagggtcagcccagcgaggagtccctgcaataagcccctgcatttgccaagctccaaagactccctccctagtctgcctgcctgcccgcccgccacggagctgcctgagtgtccctgatcgggtctccctcctgtgcaccctcaggtccctccttttcctgctggcactgagtgccaggggtccgctccctcagtggggccggtggagatccttggccccaggatgggcagacagagcaccatcctgggtcagaaggtctcatgctctgaaatggcgtgccctctgcccaggtggcactgccaggtgcgtagacagacggtgtcacgagccatttcctgagccccagggctgaatcccccctccttgaccccgaacagtgaactcaggcagctggctctgtgttggctgctgtgagggctgagtctggttccctaggggaccctcatcccaggaacaacattccagccccaccctcaggctggagggcgtcccagcctaatcccgagctggggcacacgtatcctgaggggcttgggccatacggggagagggagccctgtgttcccggtggttgtccctcccagggatgcagccagacccgtgcccaatctcctctccctctgttgttttgcatgaacgtgaggagcagcagtttttgttcattcatttggcccaaaatcacgtgtaggatttggggatgtggatatttaagacaatttcttttttcttttggtttaataggggcgggtatagggaccaactgggaccgagtgcccagggggccgagcacggtcatgctggccggcctgcatgcatgcgtgtgccgggctgggctgggcggccggcggtcgtggggcagggttgggggtctgtgctcagctgataactgccatgcactgtactgcacacgtccctagagcctaccgggacccgacgcttttcagggcatttctccctccagccagggcccaactcccacctgcctgggcgaatctcctccaaggaagtcccaggaggatggggaccaggaaggctgtggacccccatctccagggggccttcccagcctgatccctgtcctccaagttctggaggaggccgctgtagggtctggctgagcttcccacccactttccctggtcccaatcctttcttgtcctatacccagctggggttgctgccctgaacgaactgcgtgtggggccggcacatcctagcaggcagcccctggcgcctgctgcctcagggatgctccaaccaccctcgttctcctcgcagtggccctggctcccacctcccgccccagcctgccgtggggcccgtcagcctggtcccacccccatggagaacccaaagtcttactgtatataactccaggtgacgtttctatatttatagcagtgttgaaaacccacgtgttttacacagaaccaccctctccaacccctcccttcccgaccccaacaaaacgttttcaaaccccttacagttcctggggcaggcggaaacaggctcacagattgtgtgtcggctgcagcagtgattccaacaagcagctattgggggggaaacacagcatttaaaaagatcatcattaaaaaacaagatttatacaacaattacttaggatgtttgtgatctgccgaccttgctatagatgccatgttaccaatgatttcctgtggtgggggcttgccattgtttactctcttatttaccaacttctggcctaggcatgacagtgggcaccttcccccagccctggctgggcccagcgcctgtgttctgtgttagaaaggttttatatatatataaaattacatatatatgtagaaatatatgtaattttgggggccctgttccttgcacattttacagttacctcatttttcccatgtatgtatttgagaaaatgctaatatatagagaaaaaaatggttcttaaagcttaaatgtgtggttttttccattccatgggattcacattggtttgtagcatttaacataactagtatgttgtattatatatatgtgtatactgattgaaatttttaacagatttgtactttttttaaaatgaaagttgctagttctgcttgaccaagtagtgcaatcattattttttttaatattgttgctgatttcagagggatattcactaataaatgtatgatgtataccaacgaccgcccacgc

SEQ ID NO: 13677 - DNA, 1004 bp, Homo sapiens
tctgcccccattttgtacgcccgagtttccgaccttctcaggctcccttcttgatcacaggcccctagaaggggtcccctctgcgtgccacaggcctccgaggggttgtgcagcctctagggctgttgcgtccccgtctttccagcccctcccatcacaaatacagaagaaccccttctaccaagctccctcgtggccacgaggccacgaacccggccagccctgacgccccactgtcccctcacagccctcagctctactcccggtcacactgggcgaccacgggggcctgctcagcaccctcacctcccaccccctgagagctggggcaggctcctgagatgtctagactggtgcgttgtggtctccggtggggccagatccccagaacagggagagactgcatacaagtctgagtggcagaagcttcaagtgggtgaggatcggtgtgtgagacccgcgagtgggcacgtctctgaatgtgaggtctcgggcagcacgtgaggtagaacgagtgtgagcgtctccacgcagtggctggccccgtggccggggcgtctcttgcatgctgttggtggtccttccccagttcctatctcccacccgcctggttccagccccatcccctctcccactgagtcacaggtttgagattcccagagaggccaaagacagctacaggaagtaccctgggggctcagctgagagagagtcacagaaaggccagagggtctcaggaaggtctggaggtcacagctgggctcacagaagctcttgggccctggcatcctgggtgaccggtgttcttgggtattggggacaggacagagagctcattctataaccacagttgtcttttaaaggccaccctctccagccccttgtcccccctgtgctgtgagcccaagtcccttgtgaccactcagtgtcccgtccccacccctccagccgcagtttttggctacaaactgtcacagtatacattggtaataaaatatttcccc

SEQ ID NO: 13678 - DNA, 601 bp, Homo sapiens
gggcccaggagagcccccaccagcagcacaattctgtccctgtccctgccccgccccccagagccagggctgtccttagactccttctccccaatcacgagatcttccttccgctctgaggcaaccccctcggagcctgtgttagtgtctgtccatctgtctgtcctacccgcccgcgtccaaccccggggcatggacagggccagggttgcggtcgcggctgggagcctcgcccctccagtgttgcctcctcccatccagcgtctgcgcggatgtagcatgttctatgtgtttttaaacgaagatccgagcgacggctcctccccgatccccgacagtggctctccaagcggcccccgggcagccccagagcaccccgcccgactcccattaacctcgagaacctttttttttttaaccaaaaccaggagccaggctgtgccatgtcccccgccccccatcccagccggcccggtccgaacgcgggcgtcgtgtgttgtgattgtggcatggagagtccccatcccccccatgtgagcgtgtcccgggcgggtgggcccggccgcccccgagagtccatgaataaagctaatctgtctgt

SEQ ID NO: 13679 - DNA, 203 bp, Homo sapiens
ggaaacctccaggctgaggaggtctccgccgcagccttgctggagccgggtcggggtctgcctgtttcccagccaggcccagccacccaggactcctgggacatcccatgtgtgacccctctgcggccatttggccttgctccctggctttccctgagagaagtagcactcaggttagcaatatatatatataatttatttac

SEQ ID NO: 13680 - DNA, 277 bp, Homo sapiens
atttctagggtccaaaagttgacaaaaccattagtaggaggggtgggccatgttcattaagccatagtggtccctagttcattgttgagcaagttttagccctgcagttttcaccaccagcacctacccagcattctggtttttatgttttttatgatctatgcagacaactgtgtattctgttttataacagtttgtttgaatttacttacagttaaaaaatttaaatatatttatgtttgtacgaaatcttatttcaatagatggaaattttaat

SEQ ID NO: 13681 - DNA, 154 bp, Homo sapiens
ttgctcagggactcatctttccctccttggtgattccgcagtgagagagtggctggggcatggaaggcaagattgtgtcccattcccccagtgcggccagctccgcgccaggatggcgcaggaactcaataaagtgctttgaaaatgctgagaa

SEQ ID NO: 13682 - DNA, 213 bp, Homo sapiens
gccgacagtcttcccttctctccaagaggcctcagtccccaagactgccaccagtctacacatacagcagccccctggacagaatcagcatttcagctcagctggcctgggatgggccaggctggtcctggctgcctgttccctgtgctcttcagaattactgtttttgtttccttttaccccagctgccattaaagcccaaacctctagccc

SEQ ID NO: 13683 - DNA, 544 bp, Homo sapiens
gtcagcactcacctggcctgggggaattaaaggaattccccgtaagggctggacccagctcctttctgggcttgggtagtcaaatgtctgagctaccccaggtcctcatgtcagcagagtggcgcctgcctgtgctggcccatggaacggagacagcattgggctgactgtgggcatgaggagggataaggctgatttggaccccaggcttctgccctggacagcacttgtgtctgcagattatttaagtggcttttgatctgtaaataaaatcagtgcactgtgcatcacacccagcccctttccctgctgtgtggattaggtgtcaagacacctagttcttcctggggccacccggctggcctcactgcttatattaaggctcctcccaactctcattttcctttggaaaacaagacttttttccccatggttaccgctgagatactggggctgtagtagtataaaagctcacagttccttctgagtgctgaaaagagtgcatgagttgcttcgaaataaaagggtcaagcattcctacctg

SEQ ID NO: 13684 - DNA, 376 bp, Homo sapiens
tgttcctcacccagggcgggcctctgccctctactcgtgccaggcccacttgccaggcaggagccctccccaagccttcagggctgctcggagtcacctgttggaatggactaaaaggacccttgtgtgggaacaggtgctccccaaacaccctgctgctggctgccaggcaggccctctggaagggaaggggcaggactcatcaggacctccctggacccctgcagggcaggcagcttgggcccgagcccaagcatttggctctgctgcccccaaggggacaggaagcctcttgggcctcttcccttcctggacaaggccccctgcctttgcctcacataaactgtacagtattttcattaaaagcctctttcat

SEQ ID NO: 13685 - DNA, 336 bp, Homo sapiens
gtggcgcctccggcggggcctgtccctgggcccaggagccaatgtgaacttttttttttaccgggattataaaagaacaacaagatgaccttatttcttaactgtttcaaataaatgattaaagtattttcatacattttgcttcttgcccagcagggacaggtggcagagccgaggcttagggtctggcaccccccacagctggagacggaggctctcctggggctggtgtctcaggagcaggggtctgtgtctacagatgggctgtggcccctgcaggcagctgttgaacactggagggtcccccggaccacactggggtgggctcctgaggac

SEQ ID NO: 13686 - DNA, 820 bp, Homo sapiens
cggtggcgccagccctaggctacccttgccaaggccgcccacctgcatcagcctctggccagacggcccgccgtgcctgcattcgcagcagctccgcctggcacccactccggattccggccctggctggggacttggccgcttccctacccacagggcctgacttttacagcttttctctttttttaaaaagttgataggagacttgtacagttgactggctttcctctcgttggtagttgagacgctgttgcaaattccacccctccttccctggtccagattgtagctcttagtcctccctgctcagctggccgggttggaggcctcaccctgcttggggcctggcgtggggggagctctggtgggaaaatgtcccccacctcttttcctagttttatgtttcttgggaaaatatcactttgtattctctgtccagggcttcagatattttgcacgaattttaaaacatggcaataaatggctcgtgggctctggctccctgggaccccctccccgcccttcttttgaccccttcctgtctggcccaaaggaagtagcaggcccagctggggcccctcggctaccccccgtctcctgccgggcaggtcccaggttggaggccctaggcgcggttcaggtcagggctatggatggggcccaggggctttggtggcccctccccaactccttcctctttgcttgggttcctttttcacgtttagtaactgttttttttttttttttttttttttttttggaaagcacaaacttctgtaacgggtcgtgctcatgtctgttaataaagaaatccagatcc

SEQ ID NO: 13687 - DNA, 251 bp, Homo sapiens
cccggccctctccagccggctgccctctctgcctccctctttctgttcctcctgcccagggcacccccttagtgcctccagcttctgcctacctcaccccccctttcgtgcccctggcctgagcctcctgctggcctggccctggccgcccacctgggttcatctgacactgccttccctctttgccctgtggtactgctgtctgccaggtctgtgctgccttgggcatggaataaacattctcagccctg

SEQ ID NO: 13688 - DNA, 250 bp, Homo sapiens
gccccttctgcccacagctgccgcggtggcccctagcctgaggggcctggagtcgtggccctgcatttctgggtagggctggcaatggttgccttaaccctggctcctggcccgagcctggggctccctgggccctgccccacccaccttatcctcccaccccactccctccaccaccacagcacaccggtgctggccacaccagccccctttcacctccagtgccacaataaacctgtacccagctgtg

SEQ ID NO: 13689 - DNA, 232 bp, Homo sapiens
acgcccagcagagtggtggccagaggggagaggtgctccccctgggacaggagggtgggctggtgggcaaacattgggcccatgcagacacacgcctgtgtccaccctggcctgcaggaacaaggcaggccgcctgtggaggacctcagccctgccctgccctcctcatgaatagtgtgcagactcacagataataaagctcagagcagctcccggcaggggcactcacggc

SEQ ID NO: 13690 - DNA, 393 bp, Homo sapiens
gccctgcccaggctgagctgcttcagggcgtcctgaggccctgactgccagctgaaggcgtataatttttccctccgtgtgccccacctacccgtccaagaccctctgtgctccccaccatcctggaccaaccaaaagctgaacggatgccacactgtgctggggccccttgacctcagcagagccgcttcctggtgctacgcagcctccacactcagagcccgtggactgggctggcctaagggccagggctgatggtactgctggcccaacactgctctctttgtgtttggtttttttgtttttgtttttattttgtttttttccaattctttacttttgatactgtgaagatctttcgtgccgaaagataaagcaacatttggacacaga

SEQ ID NO: 13691 - DNA, 749 bp, Homo sapiens
agacctctgaaggcaagtgaaggatgccctgagaacatgctccaggaaacagacacccactccatagcagcccctgagcctgctgggctgagccctccacaggctgcttagtgagggagacactgaggtgctggtcgcacccccatgtgcaggactccaagggctttgcactgtgttgtctgcagtaactcttcagctcaccaacatctcatttggggggacctagctctgtcttcccagccccttgaggacaacagggagcatcactagttcatcctgaggagacactagggttgacatgaatccccctggttcaggcctcctgggaaaggtgtgagagggatggaggcacccccaggctccttgtcacacaagcgagcagcccacccgacccagtattgcaggccagcaggccctcagtaggtcctggtgtcaagcaggggacacggcaggatccaagaagcactgaaatgtgtccagtcccaggagtccttcagcctctggggggtctgggggcctccagttccaggggtccttcagcctctgtgggggcctggggtggcctcatggccccctttttcaagatgaggttggaggcttctgtatgtagagggcactggcttgggccaaatgccaacaaaacaaacccttgaagacatttcagggccatgctcacttgggagggtttgaggacatgatttagcgagcctctgttttttaaatatattttccaatcttgaaataaggta

SEQ ID NO: 13692 - DNA, 474 bp, Homo sapiens
ggtcaaacaagtaccaccaaggtgatccccagcctgcggccctcgtgaaaagacaagaaaatggggtggcttcctttccatctatgggtgaagcagatgcatggtgagggtcagctcagcgattagaaatttaaaaatgggagatcatggtgaattctcactggggtgattagtggaggaagtctggggaggtgagctactggaagagacagggcaagatgcctcggtggagctgcctgctgaagggtgatattgatgaagacagttgctggtgagtggagatgattgaagggctaggaggtgagggccttcattaattgagatcacgattgaagaagatcccagctctttctggctgatttcagtaaggcttctgacttaagagtctacctatacatcccttccccattgcccaccccgccatctcaatcagtcactgacttttgtttattctgtcctagaaatacctttttt

SEQ ID NO: 13693 - DNA, 329 bp, Homo sapiens
taatggtcaagccccatgaggagtaccaggaggcttacgatgagtgcctggaggaggtgcagtccctgcccctacccctatgaggggctccggtagcacctgggcacctgccgctggaagctattgggctggcagcaggacgactggctgtcctcctgcccacccacactgacggcatcttcccagttccccaaggcacgccttcttcccaggcagctctaacagccctttcatgaaggtaatgctagtcttctgtccatcagtgccatttcctgtagaactaaaggctgttccaagaatgtggggtggggaaagtaaatgctaagact

SEQ ID NO: 13694 - DNA, 326 bp, Homo sapiens
aagaaactcatctcatccaaatacacgctattgagaaggcgagcctgacctccctcttacagataaagtcagctttcagaggctcagggtgggggggcctgcccgaggccataatgctacccaccccctcctcctaaccactggtctgttggaataacccagatgtctgcatcccctcaagtcagtcaatttcctttctgtccactgggggtggaatggggtagggtgggatactttaaagtgctcctgcttaaataaattagaccagaccagtgtatttctaaagaaaatcctgacatgcacacccattaaaaatagtacatttt

SEQ ID NO: 13695 - DNA, 1080 bp, Homo sapiens
cccacaggcccagctcacacctgtacagatccgtgtggacatttttaatttttgtaaaaacaaaacagtaatatattgatcttttttcatggaatgcgctacctgtggccttttaacattcaagagtatgcccacccagccccaaagccaccggcatgtgaagctgccggaaagtggacaggccagaccagggagatgtgtacctgaggggcacccttgggcctgggctttcccaggaaggagatgaaggtagaagcacctggctcgggcaaggctagaaagatgctacgttgggccttcagtcacctgatcagcagagagactctcagctgtggtactgccctgtaagaacctgcccccgcaaaactctggagtccctgggacacaccctatccaagaagacccaggggtggaacagcggctgctgttgctcctggcctcatcagcctccaaactcaaccacaaccagctgcctctgcagttggacaagacttggcccccggacaagactcgcccagcacttgcggctgggcccggggagcagtgagtggaaatcccccacgagggtctagctctaccacattcaggaggcctcaggaggccagcctgccatgagagcacatgtcctctggccaggagtagtggctgagctctgtgatcgctgtgatgtggacccagctccagggagcagagtgtcgaggatggaggggcccagcctggactgactgctacttcctgtctctgtttccattatcacccagagagggacaagataggacatggcctggaccagggaggcaggcctcccactcagagtctgggtctcactggccccaagtctcccacccagaactctggccaaaaatggctctctaggtgggctgtgcaggcaaagcaaagctcagggctggttcccagctggcctgagcagggggcctgccaccagacccacccacgctctgacgagaggcttttccacctccagcaagtgttcccagcaaccagctccatcctggctgcttgccttccatttccgtgtagatggagatcactgtgtgtaataaaccacaagtgcgtgtc

SEQ ID NO: 13696 - DNA, 952 bp, Homo sapiens
aatgggaatcagtggtcttactatatacttctctagaagagattacttaagactgtgtcagtcaactaaacattctaatatttttgtaaacattaaattattttgtacagttaagtgtaaatattgtatgttttgtatcaatagcataattaacttgttaagcaagtatggtcttgataatgcattagaaaaattaaaattaatttttctttttgaaattaccatttttaaatacctttgaaatatcctttgtgtccagtgataaatgtgattgatcttgccttttgtacatggaggtcacctctgaagtgattttttttgagtaaaaggaaatcttgactactttatattcttaaaggaatattctttatatacttcaaatttagaacttaactttaaaagtttttcttctgtaattgttgaacgggtgattattattaactctagataagcaggtactagaaaccaaaactcagaaaatgtttactgttagaattctattaaattttaagtgttgtattctttttcattgggtgatgtcagggtgataaccagacattcatggaaaggcatgcagtttgtccattgtgacagtttgtttaataaaaccacatacacactttatttaagattaaaatctaactggaaagtcagcttggaaaatggacatttccaagtatgtttggtgagtcacagatataaaaatagaaattctgatgagaggtttcagtttttaataccaagtccttaggagtcttaacattggccagcatctgtttatcaaatgacataaatacgtaaacctataagaattaagtttattaattaggcaatttatgtctgtgataattcttacgggagaaagaggatttgattggaaagcagtttgggaagaaagtgctgctgaaatttccagaatttaattgattggttacataaactttttgacttc

SEQ ID NO: 13697 - DNA, 530 bp, Homo sapiens
aaagtagatttgtatgtgtgaaagccttaaaccaaagctcatcgaagaatacatccttgagagagatgtaataaatgtaatggatgtgaaaaaaactgtaataatttagccctcattaggtatttaattccatggataaacctcagctatataatagatatgaggaaagtgtttgtgcctgtcagacacttaaaaaaataacctgagatgaagaatttacaattgaagacattgactttagccatttgtgaaatgggtttgctttttcccttttcctacagacgtatatgctagatgtcacgtgatcatcagaaacagatatccgagtgggtggggaggtgtgctttagatttctcattagaagaccaccaaactggtaatatttttatagcattttaatagcttgatcaaattgtacctttttagagaaaaggaccaaaataaaagaaaaatgaattatgaactacctctcagtctctggggtttgtccttttcctaccctgatgtcaaacttatgcatggatttcatt

SEQ ID NO: 13698 - DNA, 3328 bp, Homo sapiens
cagggcaggtgggaacgggactgcttgctgcctctcctttcttcctcttgcctcgaggtggaagctgtatagagcccgggtccacggtgaacagtcagtggcagggagtttgccaagaccatgctccgcgtcggtggggctggccttgagaaggaactggacccagctctaccccgattccagcatgtgagcttcatgcttcctcaccacagaccagactcgcttcccatggtgggaaacagccaccgagaaggttctagctctagaaagggactaaacttattctctcatccgaagtccaaagaggatgatgaagccctgggctttgcctggtttgcgggagatttcctcccctcagtcaacccccataacctggggattgggcagtgtggaagaacgtgtagaccccagaatgaaacatggggttggagtggaggaggagctgtctcagcaagaggagacctggggctgtgcatctggatggaggcactcaggcctgggtaggattcctctggcacggagggagagaccctgggtgagacccctgtgagcatgggaagggcctgcagtgggcgcgggagtgagctgaggaactggggtgcgcccccatgagattcccaatgccatgggctttcccccatccccccgggattgggcaaggtcagacttagagtacagctgttttcctcccctctgtgtactcccttaaatcaccccaaccttggccaggcatggtggctcacacctgtaatcccagcactttgggaggccgaggcaggtggatcacctgaggtccggagttcgagaccagcctggccaatgtggtgaaaccctgtctctactaaaaatacaaaaattagccaggtgtgatggtgggtgcctgtaatcccagttacttgggaggctgaggcaggagaatcgcttgaacctgggaggtggaggttgcagtgagctgtgattgtgccactgtactccagcctgggtgacagagcgagactctgtctcaaaaaaacaaaacaaaaaaacaccaaaaaaacccccaaacctgaagaaattcagatacacgtgtgtaatgttagtgatgtgagaacaaggagcaggggtgcatttgtgttgtgttcgggttggggatgggtttaggagctccaggttgggagcagtgacagagagtcatggccgtggtgagggtgaatcccaagtggatggctcaggacgggtatggaaacccttcattcctcataggtactgggaagtccatttgcaagctgagcgccaggcctggggaggaagaggcttgggctgcagatgcacgcacatttgtttttcactgatagtttttacaaaaagcttggtttaagttatggagttttatgtccctgggagtagaatttacatttgttaaattgaccactgtttaagatcagtatacattctctagtctgtgatgtctggagctagttttgagggtgaaccacactttatccaacatacaaactttcccatgcagcttctctggtgcgcagttggttttgaccgtgggactaggtgcttctgcaggttttaagtaattaacttaaaagcttctcctctgagaaacatttctgttgcgctactgactctccttctccacatttgttgtgttcctagggcttctctatagtgcacattaggacgtttcatttgttgctgaatgctttccagaattatttattccatagggtttctctcctgtgcagctctctcatgggtaatggggcgtgttttcttgccaaaggcggttccaccctcgtgattgtatagggctcttctcctgtatgaactctgagatcagtgagctctgatctccaagggaaagttttcctgcatttgctgttttctcatgtctctcccagtgtgaattctttggtgtgcagtgcgctctggcttctagctgaaaacttttccacagttttacattcatgtggttttctccactgtgaactctgtgattcagaatcagaagcagttcttagtagaggcatttctacactgattgcactgaggatttctccccagtgtgaagtttctggcatagagtcctggcttcccgcagacgactttcacactctgccatgttcatgcctgtgggcctctctggcaggaactctgatgcaccgcgaggcccatgtactcctgtggctttctcacattcggtctacttgcagggtatctccacagcatgcaccattctgggtacagggggacatcctctgttactgaagatgttgtcatatttagtaccttcacaaggtttctctccttccagaattttctgatgtacacaaataactgacttccacaagagggcttttccacactcggtgtgtgcatacagtttctgcctgtgatcatttctttatgttattattttattttttcgagatagggtcttgctcaatttcttaggctggagtgcagtggcacgatcatagctcactgaagtttcgacctgggctcaagcaatcctcccgcttcagcctcctgagtagctggtgcgcacgaccatacccagctaatgttttattttttgtagagacgaggtctcactatgttgcccaggctggtctcgaacttctgagctcgagcgatcctcctgcctccacctcccaaagtgttcggattacaaacgtgagccatcgcacctagcctctttgatcatttctgtggtgttcagtggaggttgacagctccctaaagattttcctgtttttttgcatgcatgggtttgaattctttgaggtccaatttatttggacccctgaataaagttttgtgggttttcttctatgtgtggaatttataaggcattcttccagtgtggtttctcttatgtcgagtgagagctgacctgcaccgaaggttttgtcccatttgttgcccttgaattatttgtatgaattatatgttccagtgaaaatggagttctgggttggaggcttattccatgtttacacaattaaaattgcagtgttcctctctgggatgagagctctaaagcagagtaagattacgttctgatgtaagctttaaccacctatttataaggtctcacctgtggtccactgtgttgagacttctacagaagagcttctgtatagtaaccattttcttaggctgtctcacttgtgtgaatcttctgacacatttattatagctttgtcccatttcttatcctttttgctctttagaaatttccctttaatttattacattcattgcttactgtaaagagtccaggtaactgactttattcagttacttcctgttcaataaatttaacttttcccaa

SEQ ID NO: 13699 - DNA, 18 bp, Homo sapiens
taaaatggaaagatagca

SEQ ID NO: 13700 - DNA, 781 bp, Homo sapiens
gtaaccaaggagcagtgaacagcagctactacagtagtggaagccgtgcatctatgggcgtgaacggaatgggagggttgtctagcatgtccagtatgagtggtggatggggaatgtaattgatcgatcctgatcactgactcttggtcaaccttttttttttttttttttttttctttaagaaaacttcagtttaacagtttctgcaatacaagcttgtgatttatgcttactctaagtggaaatcaggattgttatgaagacttaaggcccagtatttttgaatacaatactcatctaggatgtaacagtgaagctgagtaaactataactgttaaacttaagttccagcttttctcaagttagttataggatgtacttaagcagtaagcgtatttaggtaaaagcagttgaattatgttaaatgttgccctttgccacgttaaattgaacactgttttggatgcatgttgaaagacatgcttttatttttttgtaaaacaatataggagctgtgtctactattaaaagtgaaacattttggcatgtttgttaattctagtttcatttaataacctgtaaggcacgtaagtttaagctttttttttttttaagttaatgggaaaaatttgagacgcaataccaatacttaggattttggtcttggtgtttgtatgaaattctgaggccttgatttaaatctttcattgtattgtgatttccttttaggtatattgcgctaagtgaaacttgtcaaataaatcctccttttaaaaactgc

SEQ ID NO: 13701 - DNA, 940 bp, Homo sapiens
gctgcgggcttctgagggtaccctgtggccagccctgaagcccacatttctgggggtgtcgtcactgccgtccccggagggccagatacggccccgcccaaagggttctgcctggcgtcgggcttgggccggcctggggtccgccgctggcccggaggccctaggagctggtgctgcccccgcccgccgggccgcggaggaggcaggcggcccccacactgtgcctgaggcccggaaccgttcgcacccggcctgccccagtcaggccgttttagaagagcttttacttgggcgcccgccgtctctggcgcgaacactggaatgcatatactactttatgtgctgtgttttttattcttggatacatttgattttttcacgtaagtccacatatacttctataagagcgtgacttgtaataaagggttaatgaagtgtgtgcctcaaatgtgagcgccctgggcatctccctctgccctgcggttggcttcatttggtctgtgccccaacatgccaactaagcctggcactgggcctccccagccagcatcagcagcgacctttccctgctaagtcaaggagccagcctggcctgcaggcgcggggtccagcccctggctgtgcagctgcagtgccacctcggcgccagcgtaccccccttcctaggatcaggccgcaaagtctgtcactggtgaaaccagctcagaatctgggaccacaatgcctatagcaggtcccccgaatgtctcccccatgtccaaggcctgcgatgaggccttcccttagctcctcaagctgaaggcatttcccagcctccttgttcccctccgtgtgtctcagcttggtcctcatcctgggtccccgacactcctctggcacattagggtctcccgctcacctcagggcctttgcacacactgttgcccctccttggaaagct

SEQ ID NO: 13702 - DNA, 124 bp, Homo sapiens
tctgggactggcaggttattaatcgagatacacttgttaggagggacagggttcccctaaggcacttttaaagatactctgtaagaaccattaacaataaacttactgtcaatcatttctctct

SEQ ID NO: 13703 - DNA, 1375 bp, Homo sapiens
tgcctgcagctgtgaggcctggcccaaggtgtcatcagtggggctggcctcatctcctcctgcctttcctcccttatcagtttctctttaaaggtgtgcccctcctgctctcccaggagcagtgagttgtgagtggaaagaaggctggtgcagacccagctgccttagacagattccctgggcctgcatctcctggcgccggctgcttctgggcccaggaagaggctgtggctcccaccttccttacacctggtgggagcccgcctcgcaccagctgcacctgcctagcattacaggctctcagatctgcccttgcttgcctcatacctctgtgctccacactgcggccaggccagctgagtccctccatccgtggatgctttcctgcagctatgtggtatgggggtcattcctgcctcttggcaccaggttggggggcatgtgcttgttgggcaccaaagtgatggaaccctcaggtgctctccgggagcctgaacctcctgactgaggaacatgggcagaacatgtttattgcacagagtgggcgctgcgcacaggcgtggctgtacacgtgctctcagctcatcatcctttccagtaactttaaaaaaacatccctcaggtcctgatatatttccttggattcatttcacttggctagaaattacactgtgctcaatgccttaataaatccctgaaagaaataaaaaccactgtgtgcaatgccttgctgtggcccccaaccactgcttaggcctcccaacttctccccaggccaagtatggggccctggctgtgttctggaagttcaagacacttagtcctccacagtgggtggaagagtgcaaggtctgccaggtcagatggagacgcagaacctgctggtgcaagctgggcaggtcctgaccaacctgcatcaggggatgccctgagctccacaggtcttcatgggcaggggttgtgggtcctggtgaaggaagtgcatcctcaggcctgggctgtagcaagctgtctgcccttgggttcaagaaccagactgtggagccaaaggtgaccgcagggggccccagggctggagccacaaggataccctcactttgcatgaggagctgaaactgaccagtgtccagtgttagcccccacatggggctgctcttgcttctactaaaagatacagcagttacccccttatccacaggggatacagtggatatctaaaaccagacccccagtggatgtctaaaaccacagataataacaaaccttatacatactgttttttcctatgcatacatacctgtgattaagtttatgaattaggcaccttaagagattgacaacaataactaataataaaatgtaacggttatactgt

SEQ ID NO: 13704 - DNA, 180 bp, Homo sapiens
agaagaaaaaacctgctttctgactgattttgccttgaaggaaaaaagaacctatttttgtgcatcatttaccaatcatgccacacaagcatttatttttagtacattttattttttcataaaattgctaatgccaaagctttgtattaaaagaaataaataataaaataaaaagtctgt

SEQ ID NO: 13705 - DNA, 705 bp, Homo sapiens
aagcgctgagctgagggacgaggaagagctggagcccgcagaagccgtccacagccctgcctcagtggcccagtgggcagaggccagggagtgcctcactattttgcaaatgccgaccctgtggcctgctgcccgccccccccccccccacagtggccatacgggcacaggagaccttttatgggactttggccctggcaggacccagggcctccagacgtgcgggcggcacatgccttggggacatcctgccttcaggaccgtggggcctggtcagtctgtccatcctcggcaaggacacaacactgccccagagggtgggaccactgcaagctcgagaccttgcttggtgacatgtgccactttggccaccacccacagtctgtcaccacgtggcttgggaacttctggagccacagcaggcatcacggtgcgacgtgagatgcctgcgccagccccgagcccactggcagccactgccattccacccatggtccctcaccctgccctgccgacgagcttgtctctgcagccccaggtacccccttcctggatgctgctggccccaggagatagctttccggtgacagctgtggaacgcgtcaacaggacaaactggacacatggagttacagtgtgtacacggcagtcccgccacccagcccccttgtaaactctagtcactataaacacacccgtacgcct

SEQ ID NO: 13706 - DNA, 731 bp, Homo sapiens
gtagcaacgccactccttctcagtcttcatcgatcaatgacatttcatccatgtccactgagcagacgctggcctcagacacagacagcagtcttgatgcctcgacgggaccccttgaaggctgtcgatgataggttagaaatagcaaacctgtcagcattgaaggaactctcacctccgtgggcctgaaatgcttgggagttgatggaaccaaatagaaaaactccatgttctgcatgtaagaaacacaatgccttgccctactcagacctgataggattgcctgcttagatgataaaatgaggcagaatatgtctgaagaaaaaaattgcaagccacacttctagagattttgttcaagatcatttcaggtgagcagttagagtaggtgaatttgtttcaaattgtactagtgacagtttctcatcatctgtaactgttgagatgtatgtgcatgtgaccacaaatgcttgcttggacttgcccatctagcactttggaaatcagtatttaaatgccaaataatcttccaggtagtgctgcttctgaagttatctcttaatcctcttaagtaatttggtgtctgtccagaaaaagtcgatttatgtgtattaattggccatcatgatgttatcatatcttattcccttttatgctatgatttattctatcttttgtatttcagaagacatataattaaatctatttaataaataaaaatatatagcttt

SEQ ID NO: 13707 - DNA, 864 bp, Homo sapiens
ggctgagaccgtgacaagaccatcaccacctttcatctgattccagacctgtcccaacagcagggatgctacatgggaagagaagtggacatcccacatgttctgcgtgctcctgtagagcttgacagcttccacgtgccttctacccaagtgcttttgcttacagcagatactgtttctctgtgtcctgaagtcgccagaggagaagggaatcattgtttacacatggggatcagagcagacttctccactactgtgcaatagagatacagctctcttcagagtaactgtgaaccttttataaccaacactagagttagttttaaaagacaagatatttataatgacgactgtatagcttttaagttatttttctagtatgtggctttctgtagccgtggtaacggccaaactgttcatcctagctacccatgctctgtgtccaggcttgctcctggcaggtggcattcatctcagatgtgagcacaaggcattggccctctggactcctttctccttttctttcctctctaggctgctcctgaatcctgttctctgacatccgtggagcccctcctgcatccacctatgcctcctataagtccagttgaaatctcagcctccttcaacattttcttctcgtgtgtggcccacatccctccacttctccaacttctgtttaatctgatcacggctctttttaagccctggcagcattttggtccctgctccttgcccatagtaaaacagcttgaaatatcccatgcaagagagtagtttcaagtgggcaactctgctctctatttaaaagcgtgcacaatcaaaagtactatgcaattttaggacaataaagaacatacagtt

SEQ ID NO: 13708 - DNA, 126 bp, Homo sapiens
gccgagactggagcatctacacctgaggacaagacgctgcccacccgcgagggctgaaaaccccgccgcggggaggaccgtccatccccttcccccggcccctctcaataaacgtggttaagagca

SEQ ID NO: 13709 - DNA, 1685 bp, Homo sapiens
gcagcatcggacaagacccccagcacttgggggttcaggcccggcagggcgggcagagggctggaggcccaggctgggaactcatctggttgaactctggtggcacaggagtgtcctcttccctctctgcagacttcccagctaggaagagcaggactccaggcccaaggctcccggaattccgtcaccacgactggccagggccacgctccagctgccccggcccctccccctgagattcagatgtcatttagttcagcatccgcaggtgctggtcccggggccagcacttccatgggaatgtctctttggcgacctcctttcatcacactgggtggtggcctggtccctgttttcccacgaggaatctgtgggtctgggagtcacacagtgttggaggttaaggcatacgagagcagaggtctcccaaacgccctttcctcctcaggcacacagctactctccccacgagggctggctggcctcacccacccctgcacagttgaagggaggggctgtgtttccatctcaaagaaggcatttgcagggtcctcttctgggcctgaccaaacagccaactagcccctggggtggccaccagtatgacagtattatacgctggcaacacagaggcagcccgcacacctgcgcctgggtgttgagagccatcctgcaagtctttttcaacagaacttcacagactgttagagctgctgagaagaatttgctttccgaattcagcctggaaggcgcccagggacagctgtactgagtctagatgactctgacccccgccccaggtcaaggccagcagagcagtcagtgcctctggagaaggcccttgctctcccacctggcccagactccgaggagcctgggtctggagctgccggtctggttcttccctttagagcccggatctgccacctgcggcccctcccaagccgtgaaccagctcatgagagatgaacactgtgggatccactcaggaaggctcggggctggcacaaaggaccacccagcattgccctgtgccacccagcactcagtggacattctggggacctgccttcagccttttcctgccctgtgcctgacatcagcaccctggctggtcagaatgccgccctcccagaggagcagccgagagatcccctgaaggctggaggcattctgctcaggacccctatcccagctcacagtgcccaaccatctcaccaggagaaagagccacatccccacgttaggaccacggagactgaccaccaccctgaccccccaaacccacgcaccagacgcttgcaggacaggcgccgcgcagcgggcaggggcttgcccggccgaccctcccctccccacctcccccactgcgcgttactccaggatatgccgagtgcacgtataaggtcatcttcgtcgtccccgtggacctcccccttcctctgcacgtcgtccaacgtgggactggcgtgtcaggcttccctgggaggatctggaggttgttctctgcagagaaccagcctggctcctggcgcgcacctctgctcccttctcctcactacccacccacgcatgtaccgggaaaaaaactactatgcccttctagaccatgttctgagaaaagatcgaaaatatttaacaagagataataataaatctgatgccggtctttgtgtgtgttgcgg

SEQ ID NO: 13710 - DNA, 527 bp, Homo sapiens
ctgaagcagagagagagaaggcagcatacgtcagcattttcttctctgcacttataagaaagatcaaagactttaagactttcgctatttcttctactgctatctactacaaacttcaaagaggaaccaggaggacaagaggagcatgaaagtggacaaggagtgtgaccactgaagcaccacagggaggggttaggcctccggatgactgcgggcaggcctggataatatccagcctcccacaagaagctggtggagcagagtgttccctgactcctccaaggaaagggagacgccctttcatggtctgctgagtaacaggtgccttcccagacactggcgttactgcttgaccaaagagccctcaagcggcccttatgccagcgtgacagagggctcacctcttgccttctaggtcacttctcacaatgtcccttcagcacctgaccctgtgcccaccagttattccttggtaatatgagtaatacatcaaagagtagtattaaaagctaattaatcatgtttat

SEQ ID NO: 13711 - DNA, 1087 bp, Homo sapiens
cacctgcctgtccttcctgggcccctccttgccacatcatgagctgaggtgggaccacagtccccaggctgcatcggcctgcctgtgtttccctcttaggtgcatttatctttttgatttttccgagtggcatttaagtgcacaaatgataacaagaggattattctcccgttctcaagggagtcagatcaggggaactattctagggtatgttgcggggtattaagcaggaaaccactgtgtggtggggggcactgggcttgttggggccagaaatgtccacgtcctgagctttctcctggagcatgtgcagagagtttggcaacgttcgctctcttgaccagaccccttctccctgacctggctcttccagccagggcacgagccctccttctatacctgctccccttcccccagtggggactgagttatgggagaaggggacatatttgtggccaaaatgatactaaccaaaggggcttccttgtcagggcctggtggagttggtgggtcatcggggctcactgcctcctgcccttctctcctgtctgacccccacttagcccttctctccttgcagcctagcagtttatagttctgagatggaaagttgaagggggcaagcaagacctctcctcagcccatgcccagctgtcaggagagaggtgcagggaggaaggccttgtgctgggacaacctctctcttgccttacctcagagagggactatgccctgacccctcctttctgaaaatcagtgccctccctgttgctctaggaggctcctgctggcttggtagaagacagaattcgatctgcctgtccctttttcccctggggtttgacacacaggctcctctcagcatgaggtggagcagtgaccaggtggagcagtgaccaggacgcctctggcccagtgctgcccagcctccccgcccgctcccaggcgccccatgtcctcacaggccaggacgccatggcaggatggagaggacttggtggatttttgtttcttgcctgacctcagtttcatgaaagaaagtggaagctacagaattattttctaaaataaaggctgaattgtctga

SEQ ID NO: 13712 - DNA, 1241 bp, Homo sapiens
ggggcactgctggggagctcctgtctctgggctgccggtgggaggggatgtcgcctccccagagatgcctggtccgtcttgggtctgccctccgtgctcctgacccctgctgcccaagagagcctgctacagacacaaccccgaggcaggagagtgactgtggccaaccgagcaggggaacaggggctttggactcctgagggtgttcccttcctgaggtcacatgtggatttggccagagccttcaggaggtggaggccggtgaggtcaggagcccagctctccagggggcttctgccctgactgggaagggtgcctggctccctaaaacaatgtcaaagccagtcctgctgttctctgttgccagggggcaggtctgggcctgggccaaccacgtttgttatcatggctgctgccttctggacagctgccagctctgccttgagaggttgtgggacctctggatccagctgacctgacaggtcatctactcagggaggagccctgtgctcccagctcagaggacagtctgggccagaactggaaggagacatctgtcccgtctttgagtgacaagcccgggacaacagccagtgggcatcacggctctccagcactccttagccggaggatacagagtgatgggtgcatcctgaccaatgcgacaaccaacacgtgctctcacaaacccctgactcccgcactttccagtgccaaagtacaaacgctgcttggataaggagagcaaagcttctggaactttatttactctttctttttaattttcttttaagagactgggtcttgctatgttgcccaggctggtcttgaactcctggcctcaagtgatcctccagtttccatctccctaagagctgggattacaggtgtgagccgctgtacccgaactttttttgtttttgcttctggaactttgaaacacaaaacacaagttggcacttacaattttaaagatgcagccagctctaaacaacacacagagcacaaatatgctcctgacggactcaggaaaatgccaacagcagagcaccctggtgccaaggccttctcagcccatgccctggagggcattcccctggccagcctcagccccttgtctacttgttctccagcttctgggtagctgggcttctggaagggtggcagtgggctactccctgctcagcgctcccctgggaagggggtgaggagatgaaaatgaaactatgagctgtctttgg

SEQ ID NO: 13713 - DNA, 373 bp, Homo sapiens
gaactcagcaccagggctcggtgtgtgtggtgttggagtgtgtgctatggaaccgcagaatcgatttcagaaagataatagagtccatattatatagggtgtccacataattgttgtacaaaccagagctttttaaagtgaaaagcagtgctaaaataattattgcaaaacaactggcttaaactggagctgtcccagcgaatcaggacgctcagtcactctgatattacgtaacataccagttagggcctgcggaagcatcttgtaatggaacacattactatttctgcagagaaacatggatattcaataagtgggaatattaatacaataaagagcctcatggcatgttttgtcaacaaaacagtagtga

SEQ ID NO: 13714 - DNA, 49 bp, Homo sapiens
aagtttatggcagagctttacaaataaaaaaaaaactggcttttctgac

SEQ ID NO: 13715 - DNA, 485 bp, Homo sapiens
tgtacctgaagtttctgaaatattgcaaacccacagagtttaggctggtgctgccaaaaagaaaagcaacatagagtttaagtatccagtagtgatttgtaaacttgtttttcatttgaagctgaatatatacgtagtcatgtttatgttgagaactaaggatattctttagcaagagaaaatattttccccttatccccactgctgtggaggtttctgtacctcgcttggatgcctgtaaggatcccgggagccttgccgcactgccttgtgggtggcttggcgctcgtgattgcttcctgtgaacgcctcccaaggacgagcccagtgtagttgtgtggcgtgaactctgcccgtgtgttctcaaattccccagcttgggaaatagcccttggtgtgggttttatctctggtttgtgttctccgtggtggaattgaccgaaagctctatgttttcgttaataaagggcaacttagccaagttt

SEQ ID NO: 13716 - DNA, 3595 bp, Homo sapiens
aaaatgtcaagatgagtggttttctttttcctttttttttttttttttttgatacggggatacggggtcttgctctgtctcccaggctggagtgcagtgacacaatctcagctcactgtgacctccgcctcctgggttcaagagactctcctgcctcagcctccctggtagctgggattacaggtgtgagccactgcacccacccaagacaagtgattttcattgtaaatatttgactttagtgaaagcgtccaattgactgccctcttactgttttgaggaattcagaagtggagatttcagttcagcggttgaggagaattgcggcgagacaagcatggaaaatcagtgacatctgattggcagatgagcttatttcaaaaggaagggtggctttgcatttcttgtgttctgtagactgccatcattgatgatcactgtgaaaattgaccaagtgatgtgtttacatttactgaaatgcgctctttaatttgttgtagattaggtcttgctggaagacagagaaaacttgcctttcagtattgacactgactagagtgatgactgcttgtaggtatgtctgtgccatttctcagggaagtaagatgtaaattgaagaagcctcacacgtaaaagaaatgtattaatgtatgtaggagctgcagttcttgtggaagacacttgctgagtgaaggaaatgaatctttgactgaagccgtgcctgtagccttggggaggcccatcccccacctgccagcggtttcctggtgtgggtccctctgccccgccctccttcccattggctttctctccttggcctttcctggaagccagttagtaaacttcctattttcttgagtcaaaaaacatgagcgctactcttggatgggacatttttgtctgtcctacaatctagtaatgtctaagtaatggttaagttttcttgtttctgcatctttttgaccctcattctttagagatgctaaaattcttcgcataaagaagaagaaattaaggaacataaatcttaatacttgaactgttgcccttctgtccaagtacttaactatctgttcccttcctctgtgccacgctcctctgtttgtttggctgtccagcgatcagccatggcgacactaaaggaggaggagccggggactcccaggctggagagcactgccaggacccaccactggaagcaggatggagctgactacggaactgcacactcagtgggctgtttctgcttatttcatctgttctatgcttcctcgtgccaattatagtttgacagggccttaaaattacttggctttttccaaatgcttctatttatagaatcccaaagacctccacttgcttaagtatacctatcacttacatttttgtggttttgagaaagtacagcagtagactggggcgtcacctccaggccgtttctcatactacaggatatttactattactcccaggatcagcagaagattgcgtagctctcaaatgtgtgttcctgcttttctaatggatattttaaattcattcaacaagcacctagtaagtgcctgctgtatccctacattacacagttcagcctttatcaagcttagtgagcagtgagcactgaaacattattttttaatgtttaaaaagtttctaatattaaagtcagaatattaatacaattaatattaatattaactacagaaaagacaaacagtagagaacagcaaaaaaataaaaaggatctccttttttcccagcccaaattctcctctctaaaagtgtccacaagaaggggtgtttattcttccaacacatttcacttttctgtaaatatacataaacttaaaaagaaaacctcatggagtcatcttgcacacactttcatgcagtgctctttgtagctaacagtgaagatttacctcgttctgctcagaggccttgctgtggagctccactgccatgtacccagtagggtttgacatttcattagccatgcaacatggatatgtattgggcagcagactgtgtttcgtgaactgcagtgatgtatacatcttatagatgcaaagtattttggggtatattatcctaagggaagataaagatgatattaagaactgctgtttcacggggcccttacctgtgaccctctttgctgaagaatatttaaccccacacagcacttcaaagaagctgtcttggaagtctgtctcaggagcaccctgtcttcttaattctccaagcggatgctccatttcaattgctttgtgacttcttcttctttgtttttttaaatattatgctgctttaacagtggagctgaattttctggaaaatgcttcttggctggggccactacctcctttcctatctttacatctatgtgtatgttgactttttaaaattctgagtgatccagggtatgacctagggaatgaactagctatgaaatactcagggttaggaatcctagcacttgtctcaggactctgaaaaggaacggcttcctcattccttgtcttgataaagtggaattggcaaactagaatttagtttgtactcagtggacagtgctgttgaagatttgaggacttgttaaagagcactgggtcatatggaaaaaatgtatgtgtctcccaggtgcatttcttggtttatgtcttgttcttgagattttgtatatttaggaaaacctcaagcagtaattaatatctcctggaacactatagagaaccaagtgaccgactcatttacaactgaaacctaggaagcccctgagtcctgagcgaaaacaggagagttagtcgccctacagaaaacccagctagactattgggtatgaactaaaaagagactgtgccatggtgagaaaaatgtaaaatcctacagtgaaatgagcagcccttacagtattgttaccaccaagggcaggtaggtattagtgtttgaaaaagctggtctttgagcgagggcataaatacagctagccccaggggtggaacaactctgggagtcttgggtactcgcacctcttggctttgttgatgctccgccaggaaggccacttgtgtgtgcgtgtcagttacttttttagtaacaattcagatccagtgtaaacttccgttcattgctctccagtcacatgcccccacttccccacaggtgaaagtttttctgaaagtgttgggattggttaaggtctttatttgtattacgtatctcccgaagtcctctgtggccagctgcatctgtctgaatggtgcgtgaaggctctcagaccttacacaccattttgtaagttatgttttacatgccccgtttttgagactgatctcgatgcaggtggatctccttgagatcctgatagcctgttacaggaatgaagtaaaggtcagtttttttttgtattgattttcacagctttgaggaacatgcataagaaatgtagctgaagtagaggggacgtgagagaagggccaggccggcaggccaaccctcctccaatggaaattcccgtgttgcttcaaactgagacagatgggacttaacaggcaatggggtccacttccccctcttcagcatcccccgtacc

SEQ ID NO: 13717 - DNA, 842 bp, Homo sapiens
gtagcgccgcggggcccgggaacgccgagtgcgcgccgtcggggaggcgggaacgcgggcccgcgcgcggactttgcactttgaatccagaggaagatgaatttttaaaatctccatcaaacgtgccttaaagctaaagcattttgacaggagtatttaaacttagtccaggatattttcctttgtgttttataactttacagaggaccaaagcaattcttgttttagtttctttgcgaagcctgctcctccttcccttcataaggactttttttgtctttctttaacgcccaggcttcgtcttatttctactgtttttgtcgcaacttccattgatttatgtcccttccctcccccctaagtacatcagggaacctttccacactataaatgatatgactactgtttggggtttctgggcccccatccgtgtacgtatgtggcatttccaggtatgactgagtgtgagagacatgtcagaggctcttcagtgatttcttgctattgaccgatgcttcactgtgccaaaagagaaaaaaaatgttgggttttgtaattaaattatttatatatttttgaaacccgaattgaaaatgttgcaggcaacgggctacagctttattagtggttctctaactgtggtctccttgggccaagcaatttctttaaaggaaaagttgattatgtatgtggggtgccaggaccactgccttgaaagcaagtgtgatttttatttttaatattattttatttgtgtctgtgtacatattcatgtataaattttatgaaacccaagcatagtgcttattttttaataaaacaactgacttaacacattgtga

SEQ ID NO: 13718 - DNA, 737 bp, Homo sapiens
acggaaagaggccaagcgatggccgctctctcctctcccctcctcagagggggcagatagaaactgggacggattcaagtcacatgcacgcggatagcagtaagccacacacctgccacttagccagaatgcccaggatcgcgttggtcactgttatttgcctactgctggaagaaggacaaccgctggcaaggtagcgttccccaatctgaatacctgcaggctcccacatgagggagagggcagactcaggtgggaagatgtgccatgcgtaaggcatcaacgtgtatctgtgggatcttcgttgccttcagtaatcagggtgtgaaaaaagcagacaagttgtgtgtgtgtgtgtgtgtctaagaaaacttgtgtgcttttcaaaaaggcagtgctaagcacaagatttcaagaaagcctcttcttgttgcctagctgagtgggagagtcattttccccagacactacatttggatacaggtgccaaagaacattattaaggaattatttagaaacaatgtgtctagtttaagaaagtggttttcagtattgtgacaatacaacgtttttacaaggttgttttctaccaccatattttaaagatatttttatgaccgtgtatactcacactttgcttgtattttaaaaggaggatatatttgcacttatgtatacttttacagtttgccaaaatattttgttgtaaaattttttttcaataaaatgtatataac

SEQ ID NO: 13719 - DNA, 1785 bp, Homo sapiens
cacaccctcaaagccgaactaaatcgaaccccaaagcaggaaaagctaaaggaacccatcaaggcaaaatcgaaactaaaaaaaaaaaatccaattaaaaaaaacccctgagaatattcaccacaccagcgaacagaatatccctccaaaaattcagctcaccagcaccagcacgaagaaaactctattttcttaaccgattaattcagagccacctccactttgccttgtctaaataaacaaacccgtaaactgttttatacagagacagcaaaatcttggtttattaaaggacagtgttactccagataacacgtaagtttcttcttgcttttcagagacctgctttcccctcctcccgtctcccctctcttgccttcttccttgcctctcacctgtaagatattattttatcctatgttgaagggagggggaaagtccccgtttatgaaagtcgctttctttttattcatggacttgttttaaaatgtaaattgcaacatagtaatttatttttaatttgtagttggatgtcgtggaccaaacgccagaaagtgttcccaaaacctgacgttaaattgcctgaaactttaaattgtgctttttttctcattataaaaagggaaactgtattaatcttattctatcctcttttctttctttttgttgaacatattcattgtttgtttattaataaattaccattcagtttgaatgagacctatatgtctggatactttaatagagctttaattattacgaaaaaagatttcagagataaaacactagaagttacctattctccacctaaatctctgaaaaatggagaaaccctctgactagtccatgtcaaattttactaaaagtctttttgtttagatttattttcctgcagcatcttctgcaaaatgtactatatagtcagcttgctttgaggctagtaaaaagatatttttctaaacagattggagttggcatataaacaaatacgttttctcactaatgacagtccatgattcggaaattttaagcccatgaatcagccgcggtcttaccacggtgatgcctgtgtgccgagagatgggactgtgcggccagatatgcacagataaatatttggcttgtgtattccatataaaattgcagtgcatattatacatccctgtgagccagatgctgaatagatattttcctattatttcagtcctttataaaaggaaaaataaaccagtttttaaatgtatgtatataattctcccccatttacaatccttcatgtattacatagaaggattgcttttttaaaaatatactgcgggttggaaagggatatttaatctttgagaaactattttagaaaatatgtttgtagaacaattatttttgaaaaagatttaaagcaataacaagaaggaaggcgagaggagcagaacattttggtctagggtggtttctttttaaaccattttttcttgttaatttacagttaaacctaggggacaatccggattggccctcccccttttgtaaataacccaggaaatgtaataaattcattatcttagggtgatctgccctgccaatcagactttggggagatggcgatttgattacagacgttcgggggggtggggggcttgcagtttgttttggagataatacagtttcctgctatctgccgctcctatctagaggcaacacttaagcagtaattgctgttgcttgttgtcaaaatttgatcattgttaaaggattgctgcaaataaatacactttaatttcagtc

SEQ ID NO: 13720 - DNA, 462 bp, Homo sapiens
ctcctcagggcacgacagcagaaggatgttgcttttttaagggagggccagaaagaaagttagtggattgcaaagttggttgcctggtggaagttagaacagaccaacattttgtgccagaaatttaagagttccataggtggaggcgcagttctttcgaataaatgtgtaactttgaaattgtgttcatttgcactcggtgcagcggttatgcttatgaaaatacctggcagctttgtgcaatgaattaatgttataaggaattatctattttgtcatagtatttaagtcataatgtcatttcagaattcagttctgtaggattttcttttctttaaaaaatgtatattctgggtagttttaattggtaaaaaaatgtaattgtgatttaatactgcatagtgttttgggtattttttttatatgcaaaggtcttacgagccaataaaactatttcaaagt

SEQ ID NO: 13721 - DNA, 1751 bp, Homo sapiens
tacatacaatttagtttaaaaatgttgcaaatgttaacatgtgtcacaaactcaagcaatccagtattatagaaagcaaagaatgaaatgtgctgcttctttctcccccagacgcccttgcatacattaagatatgtatatatggaaatgttaccgggagtcccggttatcccaaaaagggttgtttcctgttgcgtggtgaggccaatgcacgaaaccgaaagggagtgtgtcaagcagtgcaggctgtattcaatggctatggaattggaagatctgaaatcaacttagcttgtgagagctgggaagtttcagaggtagggtgtctttaatgaaggggctgggcattaagagcacgggggggaatattcgtgctttccttgggaaagaacggagatttttcccggaatcaagaaacccctttttttctgtcccttcttggtctcttccagtcgttgtcatggcgacatgttgtttagcatgagaacaggatgatgataaagccagaggctcttcagaggcgccatcttggatttcgccagcttcagctggtttcgtcctaagaaggaacttcgaaacacaggcattctttttcctgaaaataagcagagttacagctgagtaggaatttagctctgtcccatatgctatcgcattgggcagcaaaagcagggtggggtccagcgaaatcagcaggcactgcaatgagtaacatacccagccacgtttatgcagcatttttacgaaaatgaaaccatactacctgtaaaggaagatatgctaacaaacaacaaaactggcaggaaccaagattcctactgacactacccttagttttaattttccctgacaacaaatgaggttaacagagcataattatctaccgtgaccccttcaaaaagacaggctgtatacatttgcactaagagaagaaatcgtgtaatgtcagcaaatttcccccacttaaagcttctctatttaaaaagcttcacgcacacatgcacgcatatgtcttcaagatgaccacaatttattttgcagtcattctttgcaccagttcccaatttttcccactagcttgcaagctccgtgactcgaggagaccgggggatcagagtttgtttttgcggagaagtgagtcctttatgccccaaatagtgactgacatagagaaggtactcagtaaacactttttaaaggaatgcctgcctgactgaagcttaatgatgtgaggcttctagtgggataccctaccttgttttaacctgaagtgactcttccttagctaagagagccagacggactccatcgtgactccttcactcgcagccccttacccacccccttcctcaaggacttaacttgtgcaagctgactcccagcacatcaagaatgcaattaactgataagatactgtggcaagctatatccgcagttcccaggaattcgcccggttaatagcacccagagcccctgcgtttgtgtccggttgataacgcccaaagcccggcgtccatcaccttaggatagacttaaagcctctgcacctggaactgtttactttcctgtaaccgtttatccttttaactttttgcctactttacttctgtaagattgtttcaactagactccccctctcccctgtctaaaccaaagtataaaagaaaatctagctccttcttcggggccaagagaatttcgagcgctagctgtctctcggctgccggctaataaaggactcctgaattcgt

SEQ ID NO: 13722 - DNA, 105 bp, Homo sapiens
ctctgtggcacgtgggcatcacgtaagcagcacactaggaggcccaggcgcaggcaaagagaagatggtgctgtcatgaaataaaattacaacatagctacctgg

SEQ ID NO: 13723 - DNA, 1846 bp, Homo sapiens
ccctggatgggctacggcagctgaagtggacgcctcacttagtggataaccccagaaagttggctgcctcagagcattcagaattctgtcctcactgataggggttctgtgtctgcagaaattttgtttcctgtacttcatagctggagaatggggaaagaaatctgcagcaaaggggtctcactctgttgccaggctggtctcaaacttctggactcaagtgatcctcccgcctcggccttccaaagtgctgggatatcaggcactgagccactgcgcccagccaacaatccgctctgaggaaagcgtaagcaggaagacctcttaatggcatagcaccaataaaaaaatgactcctagttgtgtttggaaagggagagaagagatgtctgaggaaggtcatgttctttcagcttatggcatttcctagagttttgttgaagcaagaagaaaaactcagagaatataaaatcaacttttaaaattgtgtgctctcttcttcacgtaggctcctgttaaaaacaaagtgcagtcagattctaagccctgttcagagacttcgtggatcacagctgcagctcaccgccacatcacaggatccgttaacgttaatacccaatactctgtcagccactgtaggctctaagaaccacgtgcagtcttcagcccattaaattatcgattattttttaatgaattgaatttatattgagtcttcaaattaactgaatggatttaaaggggtaccaaggaggggggaaacatcagaatttcccaggcagttgttgcaaggaattggtactaaccgtgactacaacaaaaattcttgattgacttttaaagttatttcctggcattctggtaccttcacccagcctgagtgccctggagagggaacaggaaatgctgatctctacccctgggtgagaccagaacctcagggctgatactgttgagtggcttcctcggtttactctgtgtactgtgaaagtattttcatattttttctgtgtgccagagtgaaaaaggacagcttctgagtgtggtaattgtgcctctagcacccagcctttcaaagcccacctgaaacctgggggtggatgaaagaactagaatagaagactgaagctgggtaggccgctcagtgtccactggcattttgctaaaccgacaaggaaggctgtgtgcttagctctccccagagggagggcgagaagggtgtggtgatggtcaatctggctgtcggaacagattctggtgtcttgggctgataacagtgttgttgattctgattgtgaatcccctcaactctagcagacacatacacacccctgaaatggggctgcagagcaggctgtctcagccttgccactgtcggcatctcggcctgggtaattctgttgtggggactgtcctgttccttgtaggatgtttagtagcatccctgcccccacctactagatgccaggggcactgttctccccagccccccgccccagttgtgacaatagtctctaaacattgtcaaatggtccaaggaaaggggaaaattgccccggttgagaagagcactgctgtaaagtaatgagcctcggctctcctgtctgcacctgtccggttactacttggccaccacgcagccttggctcctacagcccaaaagggagaatggagggaggctccaggctttgctggaggggcctgggtgagttctgtttgctccttgtaccaccatccaaatggtgttatcaaatctcttagattccaaagaggttgaataattaatgttcaaaggcaagagggcaaggcattttttaacactttttaaaataaaaatttataccac

SEQ ID NO: 13724 - DNA, 463 bp, Homo sapiens
gaatgcacactccagtcttggtggttccttcgtgtggggcttgatcgtgttgctgcctgttaacatgatgcctttgaaactctccgcctttgaaactttctacccctcccttcaatcttatcctaaccaaatgagaataatgacatattgaaaacagcctctagcttcaggctgggcacggtggctcacagctataatctcagcactttgggaggctgaggtgggagaattgcctgagcccaggagttcaagaccagcttgtgcaatatagggagactccggctctacaaaaaagagtttttcaaaattagccaggcgaagtggcacacatctgtggtcccaggtgctcaggaagctgaggtgggaggatcacttgagcccaattcaaagctgcagtgagctgtaattgcatcactgcactccaacctgggcaacagagtaagaccttgtcttaaaaaaaaat

SEQ ID NO: 13725 - DNA, 527 bp, Homo sapiens
cacccgcctgccagagcggaaaccgggggtggggggagacactcatttctaggccccatcaccagtcacttgatttcgtgaccttgatttcttcccccaaatttaataaagacagagggttctcatgattcacattggttgtgctattgctgatgttatgctttggttgcttggttggtcttttctgagtattttagtgttgccacctggatttgctgcattgctctgctgagctgtattgaaaccatgactgggcccactgtcagacagaaattagaataggaggcacattttttacctggtggttatgagcatggacttgggggccacagtgactgagtttgattcccgacacagcctcctccttgctgtgtagttttgggtaagcttattaaacccccatgcctcagtttggtcacctgtaaaaggaaataacaagagcacttactttataagattgatgtgagtattaagtgaattaatatttgtaaaacgcttagctcttaataaatgtttctgttgttatt

SEQ ID NO: 13726 - DNA, 4366 bp, Homo sapiens
acaagatgaagaaactccaagggtttgagtaaatacaaagactgaagaaatttcacagcagtttattaatgtatataaacttataaatatttctccagcaaatttgaggaagcatgatatatttgaattaacaccaagggtgatatttcttttagagatgttagttaatctgttttgtgtcttacgtgaaatttcactgtagactgttttaaattgccaagactgcacaaaattacagtgctaatgtatatggttgcagttcacataaagacaaaagcatctgttatgaaatgagtagtaatattgggtggttgatttgttcttagcagacttggcttcattttggtcttgagataaaatggccagcataaatgctgtttatattcacgttttcctaggtgtgtgtgtgcaggccacagcagcatgcccttggtgtagtcagtgccgaaaggggtctgttccttcttgagcctgcctgcagggatggtctccttttaaagcaggttgtgtgcagcattcagtacactgaaggtaagctaaaccatcaacatctctggtgttttaagatgttattttattggaacaactgacaaatgagggatgttagctttgtggcagaattccctgcatgtgtgataactgatcttgttttattttttggcattgcaactgtggcatagttacaatttctgtttgttcatcacatttaaaattggaagagaacgcgcttgatggatagagcgccttcagtgtactgtttcttattaactttactttttttaaatcaacttgctatagactttatatacattttgttaaatatagttcctagtgacatagaaacgatgcgtagttttcatttactaattacaaatgttgaggcctaattctgaaagtcctcatatttaaaggctagacaacgtaatgaaatttttaactatttgtatgtcattttgaaagtgtactgctttatggtaaaagtgtttttcatttgttcattgttttcattatttgtgatcatgttgtctttcaatacaggcataaaccttccactcttgaacaaagcagctgctttttaaaagcggtaattgcttctttaccttttatttcttttgtaaatgaagcttttctttaagaatgtgactttaaagtgttgtctattgcataaaacagttgacactcacttattgtaaagtgaagattgttctactgcatgtgaagtggaccatgcagatttctgtatgttctcagtatgcatcactagataataaagtcttttgtgaacaaggcatttgtagccatttttaaaagtttttgtcttcagtgctggtaagtcaggtaaaccataaatagttaaaagcaaccttttgtttttttcctgaaagtttttaattgaaagtattattagttaaagatgtaaacctagccaaaattaccagtttattaataattaggatcctaattatttcaaaaaatcctacaaatattgtcagctttcagtgtagtgagattattcctgtaggttatggggtataattcaggatttaactaatgtttctgctattttctcacttttccttttgatggtgcggaaagagaaaaaggaaaacggggcacaggccattcgacgccttctccaaggggtctgatttgctgagacaccagcttcaccttcttaacaaggttatttctgacagcatgtgtagataaacatttagcaacaatttaagacaaaatcgtttaaatcagcttggttttgcaacacaaaggaatttgtattattaacatggtagaagagaatttttcagaaatatatgtaatctttgctgtttggggggtaaaattaatgcttgtctccctgaggaatatggaaaataatcagattttaggggtttaaataatatttttaaattgtaaatgggatttttttattcacccaggcacctaattacaacaagcatgcacattttggtgcattcaagaatggaaaatcagaatagcagcattgattcttctggtgggttttgctccatttaaagacatgaaatgaactacagccaggaaggtgatagatgatataataagccacctctgaacctacaccccgtctcttcacggtttagacttactaaaataaatacaaggtgattttcatcttcaggtagagtgaagccttttaattaaggcgtcacaggtgcagctattctaccttaatgaaatgggtagtgattttcccaccattatttatttcggtgataatatgctgcatattcaagtctcttgtagttattttcacccaaagtagttgacaatttgatgcttctggtgatgtttatggcttcattttatgtaattttttaagtaagttccactagaaacagttcatcttataccttcaaaactgttacctgttctttaaaaaacaaagttgcttgttacttgttctttgtgttttaggtgcagctcagtggaagatgatgacaaccagaagacatgagctaaggtttctgtcctataaaagatttattaaaaaacaatccttcatttattttttgtctaattttttagttttcagcattatgatttgggttttattggtgtttggtatttagaattagtgctgttgtggagtgcgtctgtaaagtgcttgttttatcatacttcctgcctctcccctcccccagtttctcctcccctaaaataaaaatagtggtcaactttagtaatataaaaggctgctggatgctgagattccacataacacatggttgtcaaaattggatgttaaggattcttagaaaaacagcaaccaccagaatagcatatatctgaaagtagtcttcagctttaggcagatgcaaaagaatacaaactggaatattaagaatactgttcaactcctttagtatctgttccccaacttaccctgtagaaacctcgttattaaccagtgttccagtcttaaagtagacaaaatattcagagccattttttttaagggaaatgaaaaagatactctgggttttttatactccccaatttagcatatctagactacctatttgaaaggaaccctatcaactgtcttatgtacgttacatgattttcctacactctgtaattttgctgaggtgcaatttggaactctgcaagacctactagattgaatttatttagtgaatgctcctgaataaatgtgcattcctcttttagagtagctgtatgcttttcaaatgctatctgccgtgaattttttgcttttattatactttatggcaaaagtgatatcaagtgattgtcagacttgagggctcatagaagtgttaggtacggctctcaaagatgttacagttttttctagggttgggagaatagttgagatctggaaagcatagacattttttacactctggatagactttattcttgaagatcatcagaaatgaggttggaatttcgaggttttgagcagggggagcatcttatattcacccttaaatcgttattaatacatcctgttttcttcattccctgatagctatctcatttcactctactgtctcaaaattttgttttaaaataatagaaatgttttgccattattaagtaccactttattcctaacaaaaataagtactcaggacttttttttcaaaatgaaatatttatgtactgttttatggtatgtggtagagtaagtaaaatgtaatgttctcagttttgttccatatttgcattcctcttatgctttacctgtattttatcatttgtaagcagaactctagctatatggggtagaaataaaatctctgagatgaaacaaaggaatcaacatgataaaatttaggcgaagtagttaagaaatggcccttttgaatgttgaagataggaaagaaagccatatattcaaatatgtaattttcctcatttagttataatgacatctttaccaattgggcttcataaatgtgtttctttcttaatagtatcctagttccagcatatattcaacatgaattttatcattctcctcctaatggaatgtcttccttatagaaatgttcacgacaaattcatttgtgttttttacatgtcaataatgtatgctaaattaaaatgttttccagttattctgatagatgtcattatggcatccttaatttttcttctccttctgtatatagggtaagggactgttctgaagaacctttccatttagtgatcaagatatggaagctgatttctgaaaatgctcagtgtgtactctaattatttatggtaccatttgaattgtaacttgcattttagcagtgcatgtttctaattgacttactgggaaactgaataaaatatgcctcttattatc

SEQ ID NO: 13727 - DNA, 1487 bp, Homo sapiens
gtgtcgggctgcccactggtgacaccgggatcgggctgagcaggagaacatcaccggctccagttcccctgatccattctcacagcctgaaacaagctcacccgtagcttacgcttggaagcaggactgggaacatccacgctatttattatcgaggagttttaaagtactgtaactttaaaataaataactacaaagcttctttgtccaaacgtcattattttatacttatatacacgcaggtgtaaaagtataaaggtgagcactagactgctcttagaagctctaatttttgttttctttggctagtactgtataaaaaacagaattgtgttttattggttttggatgacagaaaagtctggaataatgtttgttttcctcatttcttccttctagaacacagaatctaaaggggtattagccagcctcgcctccctgccccacgtagagacacagagtgatgtgaggcgttggctttttctccaagaaggtacagatacctcagattcgggaaactcaaaatcaaaagacttagcttctaggataaatacttctgatgaaaaatccgctgaggagcataccccaaaccagacatatgcttaggattcatgctgagatatcaattggtttccccttctttttaaaatacgtccagttcttacccagttaacatgaagaaaccactgtctctagaagaaagcttgttttgcagtattagtgaatcactgaatagcttaagtatgactatctaagttataagttagtctttagtgggttttaaatagtttttctgacccttctgaaaaataactacataagtgcttcttgttgctgggtgagaaatactactttatagacagttttggttttctgtttgcagatatgattgatgtatttcaccaaaataaaatatttttatgtttataaagtgtaatttttaggttcacttagaatatattttatttaataagttaaaattcttttggcacactattaaatgcaaaaactcctttcaaaacaaaaaagaactaccttatattcaacatttaatgttcttggcctctgcttttatgtctatacaatatactgagttcagtatggtgtccaagagtgccctgtgtggatagacatgtgcactccttccaggagtgggtactgattccagactccagatgcctattattagttaggcttctgagcttgcaatcatattgaatgtatgaagagcgaaatcaaattcttatttttgtacagttttgaagtttatacttagaactgaccacctccccggccacgcggagagctgtacagtgtgtaaatctgcctttatcttggattgattggtacagtatttttgcatctgtgggacctaccttttcgttcagtagtttgaactatatataaactgtacaatctgtaaagtttttatagaataaatattcagctgtgaaaactggttaaataaaactaatatttcttaacac

SEQ ID NO: 13728 - DNA, 154 bp, Homo sapiens
tgtcaccacttcactcaggctgcagccctcttggggctccaggatttgctgaaagagaaaaagatatggtttgtgaactggggcatcaatcatcttttgataaatggatcagttttaggactttcagaaaataaaagatcgctcttgaaaagct

SEQ ID NO: 13729 - DNA, 356 bp, Homo sapiens
ctgtggcctgtagcaaaaatcacagccagctgcatctcgtgggacctccaagctcctctgactgaacctactgtgggaggagaagcagctgatgacagagagaggctctacaaagaagcgcccccaaagagtgcagctgctaattttagtcccaggaccagacatccccagactccacagatgtaatgaagtccccgaatgtatctgtttctaaggagcctcttggcagtccttaagcagtcttgagggtccatcctttttctctaattggtcgcctcccaccagactcacctgcttttcaactttttaggagtgcttcctcacagttaccaagaataaagaaagctggccaccat

SEQ ID NO: 13730 - DNA, 1994 bp, Homo sapiens
cagcctcagtccccctcagcacagacaaaagccagcagagcaaagcgtctatacttcatggggtttcctcagtgccctttggctgttgaggagtgagagagagagagagagagagagagagagagagagagagagacaagcaggagcgtggctgctcgctcagtgccatagccttaccgcagcctgcgcgggaggccacagcccgtgccgattccagtgccttaactacttaccggatccctccatattatcatgggtgttgtatttttccaaaatgacttcttaaacaaaacaaatattataatgaattgtctggagaggacctcttcatttgagcattagcgttattttgtattggtgtgtgtgagcttgttcttgtgaatctgtgatagcaccgtttgttctgtgagctggaaacagaaggaaaaaacatacccttgggtacccatagccaataactggaagaaaatgatgtgaatttcatgtaaatgaccagaggaaagatggataagatgataatttcttaaatagacattttccttttttctttgtgcttcatggtggagctgtcatctggtccttggtattacaggatgtggttgatgaaggtttccaatatggtttcaggccaaaaccagggaagattctagcttcagcctcatgtccatttccagtctgtcagcattagacatggtcactgttcaagtttcaagacatccattcttaactatagagaagagttactcccctggcgtcttaacctatggaaaacatgcacggataggatatatttgattgcctcctcttccctttcagtatatgtattattaatattattattattattattattattagttcatcagtttgctgttctctgcagtgagcagaatcaaatgggcaatatttgtcctgggagacctgtgccgcacccaggtccccgtgttaacgtgtgcctgcggttgtggttggcaccctcgggtggtagctcttctactgtaatgagacaagcctttcttctgtcactgcagaatttagaaggggccgtgagcagtcttcccaagcatggtccaggagcagctcagagagggtggagtgaggatgcatgcatccagggaacaggcatcaagaagccagggccgtgcctggagcactgcagagatgactttggagaaagcaaagcagtgacccagtgaccaggcacattactcgtgagcgaggtattcccagtcttcctgctaagcctaatccaagccttacccagctgtgctactgtcatttgcaaagcaaggaaatactactactggtaataaaactacacatgcaagatgtcagataagaaataggtttatatttaccttcctgcgatgtggggttggtgcttgaagataaatgtgctgtttctagtttcttaaatagcccacacccctggatgcaaaaaggcagggttatttttacccatgagcatcctgtgcaggcaatagacttccctcactgtctccgcctgcagggaggagaatgtaccccactgcacctgagctcctggtccctcagccaagacctcaggggtccccagccagcctgctgctggggacccctgtgcttgctgcagtgtatggagcctcttgccttcccctggggaggcacccctgtaccccagcttccttcccctggccttttctggccccagtgctcctcctttacatagacttgttcacacagaaacgtgcacgcccccttttctccgccacttcaccagtttctgaaatccaacctcccagacttcacaggaagatagatattcttgagataatgaaaagtgatatcttcgcatacgaaaggaaaaaaggttgaggtatatatgatttttaactgtattaggggtgtatgaaccagtttaaaaacgaggttttatttactgtagagatgaatgcaaatcagaaccaatgatcccttggcctacttagttaaaaccagttcatacatcccttagg

SEQ ID NO: 13731 - DNA, 594 bp, Homo sapiens
aatgagaaccatattatgtacagtcattttcctcagttccttttctcgcctgaactcttaagctgcatctggaagatggcttattggttttaaccagattgtcatcgtggcactgtctgtgaagacggattcaaatgttttcatgtaactatgtaaaaagctctaagctctagagtctagatccagtcactgactctgtctggtgttgacagaggatttatttaagctattattttaataaagaactttgtacatttttatttttatatttttttctcttacaaatatgtttttggaagcatgataaatgtttaaatgtagtcaacatctgtaactcttacatgagtgtccagaggcactcatgggaaaattggttttgctttctttgtacacaccagagacccatctgaggtcatctgattataaggccatgtttatataaagggaatttcacccacagttcagctggctgttgattttcactgcaactctgcctttgtgtgtattggcgatcatttgtaatgctcttacacttcgtctttaatgttctttttggagttaggacctctcagttcataaagttttttacaattc

SEQ ID NO: 13732 - DNA, 835 bp, Homo sapiens
tagtcagttgggagtggttgctataccttgacttcatttatatgaatttccactttattaaataatagaaaagaaaatcccggtgcttgcagtagagtgataggacattctatgcttacagaaaatatagccatgattgaaatcaaatagtaaaggctgttctggctttttatcttcttagctcatcttaaataagcagtacacttggatgcagtgcgtctgaagtgctaatcagttgtaacaatagcacaaatcgaacttaggatttgtttcttctcttctgtgtttcgatttttgatcaattctttaattttggaagcctataatacagttttctattcttggagataaaaattaaatggatcactgatattttagtcattctgcttctcatctaaatatttccatattctgtattaggagaaaattaccctcccagcaccagcccccctctcaaacccccaacccaaaaccaagcattttggaatgagtctcctttagtttcagagtgtggattgtataacccatatactcttcgatgtacttgtttggtttggtattaatttgactgtgcatgacagcggcaatcttttctttggtcaaagttttctgtttattttgcttgtcatattcgatgtactttaaggtgtctttatgaagtttgctattctggcaataaacttttagacttttgaagtgtttgtgttttaatttaatatgtttataagcatgtataaacatttagcatatttttatcataggtctaaaaatatttgtttactaaatacctgtgaagaaataccattaaaaaactatttggttctgaattcttact

SEQ ID NO: 13733 - DNA, 3093 bp, Homo sapiens
atgaagtacttgtacctatattaattatgcttacgccatgataaccaatatacagatatattaattggaattcctttgcataggagaatgtttttatgatctgtttagtgcttattattttttttatgatctgtttagtgcttattattttccagtaaatatgcttcaaaccatgagtacactattaggccctacaactttgttttccttatattttattagatgatttgcttcctataactgatgttgttttgttcgttttgctaatatatgtatctcaaaattctttaagtcaatatttatcatatgtaaattaaacatgaatacattctcatcttataactacatcttataaataaggctaataacccttagaacaccacctgcggttctgtcctcaccccagtggtgactactgtttaccactacactggtgaattgtagtagggaaaaacaatctaaatattgaagaggaatggcctaattaaaatatgatgtagtcataggatagattattgtattggagttaaaagaaataatctagatccatattaacctggattggtctcaaaaacataatgctcagtgaaaatagcaagttgtagaaagttatatacaaattatatatatgtacaaaacaatactatgcattctctatggctatataatgtacgtaaatctatttttaaaggttcagaggaatccataccaaagttctaacagcgagtaggaggtatagatgagagattaggggtgcaaatcaggattgggagggtggtcagagggaactttagctttatccataacattaatttttttaaaaaataaggtcttaatgtttcatttaatttaaaatatactgtcatgttgtgttttgtaaatcaactgaattgaggtactatttacttagatttattgcaccctttttacgtgtgtattttattgggttttgacagattcatacctctgtgcagccactatcacgatcaagatacaaatattttcattgcccccaaaattctcataccccctttcccaatcaattcctctacccctagccctaggcagccacagatttgcttttggttaccgattagatctatccattgtagaattcatgtaaatagaatactgtagtatgtactttgccttcttcctctctgcagatttttgagattgatccctgtgtgtcagttgtgcattttttttgttgctgagtagtatgttctatcttatgtcagatcattcacgtgagactttggcatgaaatgttaagcatccgacatctaaatagcaatattttgaatactggaaactcaggttaaagattttgtttccaagtagaaatgaaatcttattattttaataagtagctgacagtgacagaaagattggatttggatcagattggctgttaggcttcaggtatgggaaacagctctcagatttataaattggaaatcaccaggttacttgccaatatatagtcatattgctgccattgtacttaatttctaaatatataaaatccacatttaaaaattataaaagcaaggacttgggagtgactgatgaatcatgaaattgctgcttttatagatcaaaactacttgaatcatcaggaatttcatatttttcatattgtgtgacaacttataattttgtttcaaattgtgatttcattgattttactaactggaaggaagaagagtaaaattggcatatttaggttttttgtagaagaaagatacaagtgaaaattaggagtggattggagaaattggggggaaatagaagagtacggagaaaggaagagattgaaaatgttaccagagttctttaaagctcacattttatagtatcactgctacaaactatttaatgaaatgtggcatcgggtgaaaagaggcatttgtttgatccttgaacgaattaatctcacgtacttccctgtttgtggtttgagcctttcactggatgtgagctacttgagagcagggtttatgccttcatcagcgtgacccctgtgcctgcagcctcataggtgttaatctgtaattttaaattttgacaaaagcattttcacagccctgccacataagatctagtttttatttctagagtgctgctatgaataattactatagctgctgtccatcttgcccatccattaaggtaccttctcacaaacatttctaatctactggctggagtgcagtggtgcagtctgtagctcactgcagcctcaaactcctaggctcaggcgatcctcttgccctggcctcccatgtagctgcaactataggtgtgtgccactacacctggctaatgtttttagttttttagagatggagtcttgctctgttgcctaggctggtcttgaactcctgggctcagatgatcctcctgtcctcagcctcccaaaatgctgggagccaccaggcaccaggtgtgatctaccacacctgtctaaaaagtatgtatttttaaatttttttgtagagacaggatctcactatgttctccagctggtctcaagctcctggcctcggcctcctaaagtgctgggattacaagtgtgagccactgtgcctagtcactttaattgagatattggcaagtcaactgccatgcagagcccagggcactggttatattcagtaggaaactgaactcagcactcagaattttaaattaaatcaatgatcttcaagtatttgccactttcgagtacagctaattggataatctcaaaccctttagtgaaaatatcttaaatgcattgagaatattttctaattacctgtgtatgctacagtacagacattaattctataaacatgttcataggtcttccccctcgccccgcccgtcttctaagggcattttctgtttctttttagtgagttcatgaatgtttaacggttctggcgcaaagctttcttgcattctgagcataaaaataataaaacccacttatatttgcttgagtgtgtttacaagtcaatttccttttatgtagcttgctttttcatttgctataattgatcctgcaggtgtgtgaattattaaactaacgctcttttaaaccac

SEQ ID NO: 13734 - DNA, 1385 bp, Homo sapiens
ctcgaaaccagatgctggggacacacattctgccttggattcctagattacatctgccttaaaaaaacacggaagcacagttggaggtgggacgatgagactttgaaactatctcatgccagtgccttattacccaggaagattttaaaggacctcattaataatttgctcacttggtaaatgacgtgagtagttgttggtctgtagcaagctgagtttggatgtctgtagcataaggtctggtaactgcagaaacataaccgtgaagctcttcctaccctcctcccccaaaaacccaccaaaattagttttagctgtagatcaagctatttggggtgtttgttagtaaatagggaaaataatctcaaaggagttaaatgtattcttggctaaaggatcagctggttcagtactgtctatcaaaggtagattttacagagaacagaaatcggggaagtggggggaacgcctctgttcagttcattcccagaagtccacaggacgcacagcccaggccacagccagggctccacggggcgcccttgtctcagtcattgctgttgtatgttcgtgctggagttttgttggtgtgaaaatacacttatttcagccaaaacataccatttctacacctcaatcctccatttgctgtactctttgctagtaccaaaagtagactgattacactgaggtgaggctacaaggggtgtgtaaccgtgtaacacgtgaaggcaatgctcacctcttctttaccagaacggttctttgaccagcacattaacttctggactgccggctctagtaccttttcagtaaagtggttctctgcctttttactatacagcataccacgccacagggttagaaccaacgaagaaaataaaatgagggtgcccagcttataagaatggtgttagggggatgagcatgctgtttatgaacggaaatcatgatttcccttgtagaaagtgaggctcagattaaattttagaatattttctaaatgtctttttcacaatcatgtactgggaaggcaatttcatactaaactgattaaataatacatttataatctacaactgtttgcacttacagctttttttgtaaatataaactataatttattgtctattttatatctgttttgctgtaacattgaaggaaagaccagacttttaaaaaaaaagagtttatttagaaagtatcatagtgtaaacaaacaaattgtaccactttgattttcttggaatacaagactcgtgatgcaaagctgaagttgtgtgtacaagactcttgacagttgtgcttctctaggaggttgggtttttttaaaaaaagaattatctgtgaaccatacgtgattaataaagatttcctttaaggca

SEQ ID NO: 13735 - DNA, 2760 bp, Homo sapiens
gctattcatgagctactcatgactgaagggaaactgcagctgggaagaggagcctgtttttgtgagagacttttgccttcgtaatgttaaccgtttcaggaccacgtttatagcttcaggacctggctacgtaattatacttaaaatatccactggacactgtgaaatacactaacaggatggctgggtagagcaatctgggcactttggccaattttagtcttgctgtttcttgatgctcacctctatattagtttattgttaggatcaatgataaatttaaatgacctcagatctttgcaccagatactcatcatatacaaatgttttagtaaaaaagagaattgtagataatactgtctaggaaaataagaattaggtttctttgaagaaggaatcttttataacaccttaacagtcaccactgtgctcaaccagacagatagtgaaacagctttctgggtaattcaccaatttcctttaaaacataagctacctgaatggagaatacatcttgtttctgagtttcaacactagcatttttggcttactcatggacaaagttctgtatatagtataaagtcattaacaagaaacaggatatgctttaagacagaattcactgtctgttgcttcagtaaaaggacctcggggaataaaacatttctctcttatatgccagaatgtaggctggtccctatgtcatgtcttccattaagaacactaaaaagtccttgcaagaatggagatatgcattcaagagaggtgctatcacatagatctagtctgaagtctggaacactttcctcttctatgacccctctctccccagtattatcttacttgcaaaatggagaccaaattctatcctgtgaggcttttaattgcaccatagtatgctctgagtagctttacactgcctggtactgatagtagtggctcgatttttaagagccttcaattgtagatgaacatctctgttatttatccctcattcatccatccgttcattcattcagccttcaatcaacatctcttgagtgtctattatgtacaggacatgtactgagacaaaaaggaaacataagagctttttcactctaaaaatcttggcaataatgtcaacaccagaaagcctcctctggagaatcttacagagtgattgtagtttaatacaggaacacacagggctgtgtagcatgataccaggcccaggagatcagtaattacaaattaagggttaaatcagagattattcaacagagagggagaaaggaggagacagagggaggacctgttgtgttccagccattctggtattcctttatgtatctaatttcattcaaacctcacaacagtcttgtgaggcccttatataattactcccattttgcagatgaagtaactgaggcttagaaaggttaatagcaccggggaacaatttctctgggtgagaattgggactctgttgctggtcttctcagttcatttcctgaggtggatttactgagagaaggtgaaataaagccatatttagtataccagagaaggtagattttaagaatggtctcagtgttaatactgagaaaaagtcctgtcagttcagaaaaaatgtgaagtctactttagtattcctgtaatactaaaccgttgagtttctaaatatttatttattctaacaaaaagcaattactacaaatggatgacacatttaatgaacacaattttattttttttctgtaactgtgcttgttgaatgtcaatcatatttaaagggaatgactttgaagtaaaaccttttttcttgctactgaaaaaaatggagttgttttgggtggtaaagtgttaaggaatagggacagctggtcacacaaggaactcttgaaggccacatgtgaaaacctgtcacttgcacagaggccagtcccactaaggtgaccagagtgggctccaagcacaaactgccattggctatagatgggactgtgtccccccaaaattcatgtgttggagccttaaccctcaatgtgatggtatttgagatggggcctttggtaagggaagtttagatgaggtcacgagggtaggaccctcatgatgggatgagtccccttacaagacctctggcttgggccgggcgtggtggctcacacctgtaatcccaacactttgggaggccaaggcaggtagatcacttgatgccaggagttccagaccaggctggccgacatggtgaaaccccatctctactaaaaaatataaaaattagccgggctttgtggcatgtgcctgtaatcccagctatttggcaggctgaggcatgagaatcgcttgaacccaggaggtggaggttacagtgagctgagagtgccccactgcactccagcctgggtgacagagcgagactttgtcccaaaacaaaataggtgaggggatagcgaatgcactcagggtcagcagtggagtttaaaaattgtctcttttcaacttatttaaatgacagcacctgagaagaggaaccgttttacactggatgtttctcatgtagaacaagaaatctttctggaattgatgtttacatgtctgttgttggtcatctctcctgtgtcttaaatactttaatgttggaagagcatagtgtttgggctagtgggtttctgacagcccatgggaatgccctgaaactactgtatctgatgtttgttttcgatgaggttccatgttttgttttcttgggaataaattaatatattgttttcc

SEQ ID NO: 13736 - DNA, 283 bp, Homo sapiens
atcacagatgtctcctgaaagaactcttttagatgaaatcattctactcaaatgtaccttaattttttttttttccctgagtaaaagcaagaaatttcttcctttggaaaaaatatatatattaaaaaaccacttttagatggttttttttaaaaaaaaaaaaaaaactggtaaaattacttttggcagacagtgttttatgaattatgtatcatgttgatatataatatgttaatgtgtcatgtaatttttactttgtacaaagcaaataaagatctttctc

SEQ ID NO: 13737 - DNA, 459 bp, Homo sapiens
cagaagtcatgttccagcttagactgatgaagaattaaaaatctgcatcttccactattttcaatatattaagagaaataagtgcagcatttttgcatctgacattttacctaaaaaaaaagacaccaaacttggcagagaggtggaaaatcagtcatgattacaaacctacagaggtggcgagtatgtaacacaagagcttaataagaccctcatagagcttgattcttgtatattgatgttgtcttttctttctgtatctgtaggtaaatctcaagggtaaaatgttaggtgtcagctttcagggctctgaaaccccattccctgctctgaggaacagtgtgaaaaaaagtcttttaggagatttacaatatctgttcttttgctcatcttagaccacagactgactttgaaattatgttaagtgaaatatcaatgaaaataaagtttactataaat

SEQ ID NO: 13738 - DNA, 459 bp, Homo sapiens
cagaagtcatgttccagcttggactcatgaaggattaaaaatctgcatcttccactattttcaatgtattaagagaaataagtgcagcatttttgcatctgacattttacctaaaaaaaaaaagacaccaaatttggcggaggggtggaaaatcagttgttaccattataaccctacagaggtggtgagcatgtaacatgagcttattgagaccatcatagagatcgattcttgtatattgattttatctctttctgtatctataggtaaatctcaagggtaaaatgttaggtgttgacattgagaaccctgaaaccccattccctgctcagaggaacagtgtgaaaaaaaatctcttgagagatttagaatatcttttcttttgctcatcttagaccacagactgactttgaaattatgttaagtgaaatatcaatgaaaataaagtttactataaat

SEQ ID NO: 13739 - DNA, 537 bp, Homo sapiens
tggattttattttttatttgctttttttttatataacacttaaaggtttctttgaaaaccctcctttccttaaagcacatttttctgacataaactcatgactaatctttgtgcaatcatgaacttttgaccaataattgttgttttgtgtcagctccagccatttttgtacatgttgtatagacaattgtgccttttaggagctttatgtttagaaactgtacagattgttgaatatctatatacataaaaatatattatatatgtatatgaaaaccaggtagttatttgtgtttagtaaggaaaacctgtcaaataaatcaaatgattaaattatatgttccactgttgaatataaattttatggctatggggcagagtttctgtgtataaattagtatgtaaactccatatttattgtattcatattagtctttgaaaatgggtctgtcctccttgtgtaagacagtaactttacacttcagacagattttctgtgttatgaaatgtttcagtaaaatattgtttactgacttt

SEQ ID NO: 13740 - DNA, 1127 bp, Homo sapiens
cagaccttcggggcctgtctgaagccatagcctccacggagagccctgtggccgactctgcactctccaccctggctgggatcagagcaggagcatcctctgctggttcctgactggcaaaggaccagcgtcctcgttcaaaacattccaagaaaggttaaggagttcccccaaccatcttcactggcttccatcagtggtaactgctttggtctcttctttcatctggggatgacaatggacctctcagcagaaacacacagtcacattcgaattcgggtggcatcctccggagagagagagaggaaggagattccacacaggggtggagtttctgacgaaggtcctaagggagtgtttgtgtctgactcaggcgcctggcacatttcagggagaaactccaaagtccacacaaagattttctaaggaatgcacaaattgaaaacacactcaaaagacaaacatgcaagtaaagaaaaaaaaaagaaagacttttgtttaaatttgtaaaatgcaaaactgaatgaaactgttactaccataaatcaggatatgtttcatgaatatgagtctacctcacctatattgcactctggcagaagtatttcccacatttaattattgcctccccaaactcttcccacccctgctgccccttcctccatcccccatactaaatcctagcctcgtagaagtctggtctaatgtgtcagcagtagatataatattttcatggtaatctactagctctgatccataagaaaaaaaagatcattaaatcaggagattccctgtccttgatttttggagacacaatggtatagggttgtttatgaaatatattgaaaagtaagtgtttgttacgctttaaagcagtaaaattattttcctttatataaccggctaatgaaagaggttggattgaattttgatgtacttatttttttatagatatttatattcaaacaatttattccttatatttaccatgttaaatatctgtttgggcaggccatattggtctatgtatttttaaaatatgtatttctaaatgaaattgagaacatgctttgttttgcctgtcaaggtaatgactttagaaaataaatatttttttccttactgta

SEQ ID NO: 13741 - DNA, 218 bp, Homo sapiens
cagtcgaattcctcttgagtgctatgctgtcttcaaaacataaatttataagaaccataagtgctggtatttattcacttccccattacgatgtaaatcttctgaactgccttttttttaaaaagaagaaaaatcaaggaaacacaatcaggattttatgtgtgaaaacgcaaaagtgatggctcggcggtccgagctgctggtcccacttctgacac

SEQ ID NO: 13742 - DNA, 1218 bp, Homo sapiens
aacaagtcatcattgtagaaaagcaagaaaatgcagatagagaaaaagaagaaaataaaactggagtatttccacaacccaagtttagagttggcccccacctcccatgccatggactgagcagcaggggcccagcatcccttggatatggtggctgtgtcttcatgtgaaagaaactgaacttggtggtttttcctgccagttcaggagagattcttggcatgtaatatatatcactgctcaagtcaagcctcctaaaaccacagacctgtttcagctgctacttcagccaaaattcttcagcttcatattgtcttgaaaacctatgattgtctctaacaaacaggctacttgctagttagaaattcttatcaatttggcaagctacttatcaaccagactgaccacaagaactgtcatctcatcaatgaaggagtaactgatcaatgaagccagcaatgcttttttcttggcatcatcaaagctgacatttagaagagatgctggtgatagtcatctcatcctactcaatttttcaaaggcagaaaccaaccctggagcaattgagaggactgtttaaacacagagcttaacaatggcagaattgtatatctcgtgcttaacagattttggttgaactttaccctaggtcaggggtcagcaaactactgcctgtgggccaaatttgcccaccacctgtatctgtaaataaggtttcattggaacacagctgtggccatatgtttgtatattgtgtgtggctgcttttgcattaggatgacagaggtgaatagttgcaacagagactggctggtctgcaaagcctaaaatatgtcctgtgtggccctttacagaaaaagttttctaacccctgctctaggttacggagaaaaaaaaaatggaataatgttctctgctacttttaacctgattttctttgttacctaaataggcagctagaatgctgcctatattttaataaggatttggatctcacaagacaccttaggccttacacaagttgttcagattctttgccccagttctaatctagtgacaaaggcatagaattctcctcccacaggaatgtatttctattttcaaggtgttaattagttccagttttggttttgtcgttttccccatgtccgatgcttatattggatgatttctgataaaccctgactattccaataaaccctaggcatttttgaattt

SEQ ID NO: 13743 - DNA, 423 bp, Homo sapiens
gtgtcctggggaagaaagaaattacagtatatctaagaactaggccacacgcagaggagaaatggtcttatgggtggtgagctgagtactgaacaatctaaaaatagcctctgattccctcgctggaatccaacctgttgataagtgatgggggtttagaagtagcaaagagcacccacattcaaaagtcacagaactggaaagttaattcatattatttggtttgaactgaaacgtgaggtatctttgatgtgtatggttggttattgggagggaaaaattttgtaaattagattgtctaaaaaaaatagttattctgattatatttttgttatctgggcaaagtagaagtcaaggggtaaaaaccctactattctgatttttgcacaagttttagtggaaaataaaatcacactctacagt

SEQ ID NO: 13744 - DNA, 67 bp, Homo sapiens
atcaatgctaaatgaagaatctgtactttgtatgtatagaatttatctaataaatcattcatagatc

SEQ ID NO: 13745 - DNA, 2141 bp, Homo sapiens
ctgatatgcaaaataagaaattggacacacattgccctgtttgagtgtgaagttagataatttataatttattttcttttatgttctttatgattagtatccatgacattaacaaaacccttggccacatgttgacttgattggttttcctgtaggctggaagtaaaaatgttcatttctacttaggggttagcaaaattgtataagctcacacttcatggagcactgacagcagtgagtcttcccagagaaaggacagggtttctctcagcactgccagacagacggcaggggtgtggtgtgttatactatagggagagcatggatccctcctttcgtattcatggatgttctatgatggcagttggacacaagaggaaagttgctctgagacacaaagtgtgtactcctttcccaccccatacccctggtattggaacaccctagaattgtcttcaggtgttttctctcttaagtcactctctgtggtcggcgatcccattgagatacttgtttcctctgcccattctcccttgccaagaggaaactcggttccattcccttgggtagtttcaactgaataccagttttgccacattactaaggagaatgaaaagcactgaggaatttgcatcacagtcagcttcatggcagaatgtggccatttgtccttgagacacactctttcctccatgtctgttttcctctctcctcagtcttatctgagaagaatggaggagaaggaacttctcatacagcggttattattgatgaaaaccttcatttgagtctttccttataacatcttagttttggtttttttaaaccacattgcccaatcagcctcaccccttgtcctgaaaaggttccatttaaattagttgctataaattcatcaatactttttttccctattatatttttggttctattaggatttacttaactgaatcttataacaattcgaggtgaactgtggcaatgaaaaccagaaacagttaatgagatgcttcagctcacagtttgaagtgctgagaacctaagtattttgctgtacggtactgagctgtaccaaaatatgatggtttaggtttatgtgcaagactttgtgttgtagtctagacaaaggggtgggcaagagacatgcaaagctgaagccctgcttgaaaagacccttcaaggaagtaaaatggcaggggcagagtgcagcttaacatgttgctatccctgttgtttttgagttggttttggaatggattcaagttcttacacaatttattttgaatacaagcataatctaggtgatttgagttaatgaacttcttttcatgatgtagggaaagttgaatgtatatatttctaagaagaatttgtttagcagattacaagttggcaaaatagactgttcacagaaactaggcaaaaatttaaaaaaacattctagtctctaaaacccattactaatgattaacattaaaatatttgtaactcttagaaagggggcattactaagacgactttaacttgttatgaaatctttgttgtgtgatgcaggtacagtgcgcccattccaactggaatagcagtttgattttaattgtaaaactaaacttcgggaatatgtatgcccaaagtaagtaggatgagaatagtatacatgggatatggtccaatgaatttaagccccaagatacagctaaatacatttatgatttcataaaatctagtttagatagcattgtgatgcaatttccagaaatccatttgtgtttagagtaaataccatgtttagaagatgttttgtggtttggatttatatatttgtaaggtttttttaaaaaaatgttcgttttgtttgaaatgtaacattgagtaaattggtgagttatataatgagatttctagaaagctctggacatgggtacgatgtgttttgcttctctgtataatgtctacagtgataaacttgtgtctccgtgtattgtggcagtctttttttctagttaatttggctttagagagcaatctttgtatgacaccagaaaactcttcatgctattgaatgataaaaagataatgctttaatattttattcactgtgatactattttgtttgtctattaaattgttattatttccaa

SEQ ID NO: 13746 - DNA, 1679 bp, Homo sapiens
gcaggatttctgcaggttcttcttcctgaagctgaggctcaggggtgtgcctgtctgttacactggaggagagaagaatgagcctacgctgaagatggcatcctgtgaagtccttcacctcactgaaaacatctggaaggggatcccaccccattttctgtgggcaggcctcgaaaaccatcacatgaccacatagcatgaggccactgctgcttctccatggccaccttttcagcgatgtatgcagctatctggtcaacctcctggacattttttcagtcatataaaagctatggtgagatgcagctggaaaagggtcttgggaaatatgaatgcccccagctggcccgtgacagactcctgaggacagctgtcctcttctgcatcttggggacatctctttgaattttctgtgttttgctgtaccagcccagatgttttacgtctgggagaaattgacagatcaagctgtgagacagtgggaaatatttagcaaataatttcctggtgtgaaggtcctgctattactaaggagtaatctgtgtacaaagaaataacaagtcgatgaactattccccagcagggtcttttcatctgggaaagacatccataaagaagcaataaagaagagtgccacatttatttttatatctatatgtacttgtcaaagaaggtttgtgtttttctgcttttgaaatctgtatctgtagtgagatagcattgtgaactgacaggcagcctggacatagagagggagaagaagtcagagagggtgacaagatagagagctatttaatggccggctggaaatgctgggctgacggtgcagtctgggtgctcgcccacttgtcccactatctgggtgcatgatcttgagcaagttccttctggtgtctgctttctccattgtaaaccacaaggctgttgcatgggctaatgaagatcatatacgtgaaaattatttgaaaacatataaagcactatacagattcgaaactccattgagtcattatccttgctatgatgatggtgttttggggatgagagggtgctatccatttctcatgttttccattgtttgaaacaaagaaggttaccaagaagcctttcctgtagccttctgtaggaattcttttggggaagtgaggaagccaggtccacggtctgttcttgaagcagtagcctaacacactccaagatatggacacacgggagccgctggcagaagggacttcacgaagtgttgcatggatgttttagccattgttggctttcccttatcaaacttgggcccttcccttcttggtttccaaaggcattttattgcttgagttatatgttcactgtccccctaatattagggagtaaaacggataccaagttgatttagtgtttttacctctgtcttggctttcatgttattaaacgtatgcatgtgaagaaagggtgtttttctgttttatattcaactcataagactttgggataggaaaaatgagtaatggttactaggcttaatacctgggtgattacataatctgtacaatgaacccccatgatgtaagtttacctatgtaacaaacctgcacttatacccatgaacttaaaatgaaagttaaaaataaaaaacatatacaaataaaaaaatcccgactttgggatgagtgctaggatgttgt

SEQ ID NO: 13747 - DNA, 1770 bp, Homo sapiens
agatgccaacgcccgtggtcgatttatatatatttttttgtaattattatattctagtttggagtacttgctgtaggattcaagctgtctttgcactagctctaaagaagattttcttctggttttagagaactaattttgttttagcattaaactgttgaacttttttttgtacttagaaaacctagatactgcagtcagattttggaaactgccgtatagtcactgttttaaaaaccccggaggggctgtattaatttgtattgccccatggctgacaaaagcctttttttttggttttgatttttttttttttgtaactgttggggggaaaaaggctttttaacccatttttgaagagggtgaagtttggagaacaaatttaaaaaccatcagtcatgtgagcagattttttagaagggataggagacacacgcgcacacacacacacacacgaaacttgaaatggctttgctttggctgtcgtcttctgccgtgtgccagatgagcttgtgatctgggaagccggggcacccccgttttgtttctctgggcggttgtggcagctgaaggcggacgttgtttcctaaccataggtggaacgaggagacgggagcgagtgggctctccaccagcacatcactatgcatctgttccaggaaagaagaaaagcgagcgaggaagacggaaaagactgcctgccttggaggggtcacatgagggagacctgtgcctgatttcattaggaaatccattctgttattttttggtgctgttggctactttatcaaaaaacccttcaatagcatccttaagatttaaaaaaaaaaaaaaaaaaaaggaaaaaaaagtgatggaagccgtaagtgcttctttgtcatcgacgtgcaatctttctaacattccatctccatctcaccgcttcttgtttgacaccttcacaagtcagcattaatctttcttttaaaacttgtttcatttatgatcatgtagagagccactaggaggcctgcagttatttttgaatgtgaaaatgcatttgcgttcatcttgtctattttttctcttcatgttgtaacaaaaaggaaaaaagaaaaaaaaatcccatcccttttgtacatatgcctgtaaattgttttaaatacttgagcctttttctcggtggggggtggggaggggggtgagaagacaagatgaagaaaagccttacatttcagtttcttcatcggttggattggatgcttacagggtttttcttgtaacatttataagtgctgcttacatcactgaacaacaacaaaaaaataataatggagtagctgttgcccttctccggttgtgtgtacagtatgtgtggaataaaaaagggaaactgttttcacaagctgttctttgtttcataattggattcatcaatcccgtagctacccatattgcactgagcttgccagtggtgactgccaggaacgtcctatgatccactttgttggttgttgttgcagaagactgaactgttttggaatatttaacaattacagaaacagtcaagtgttttccaatgtggttgtccggtttctatggccttgctgtgtactttccctctttttgacagtaaacttctgcctatggcttacagtttgacatttaatttattagcgctgctctgcacccctcccttgggagggagacttcatgtggtttattgcgagttttttgtttacttttcaggtttgtactacaaggtttaataataaaaacaaagttttttgg

SEQ ID NO: 13748 - DNA, 1494 bp, Homo sapiens
tctgttgtgcttttgttggacttggcatgtttccatgaactgcactattataaactattaaaatgatagattgtggagaaagtaattattccaacacccatctgccatgcgatgttaaaaaaaaaaaaaaggaagaaaaataacacagctactcctcactgcaaaaacatatccatgcgtagaatcaacaactccagtcatgggaccaggaggagctctgggacgcagacacattccttggatgttgattttttttatgatctagtaaaggaataggtaaagtctttgatgtcagtgaagtggcaacatagccaaaaagttgggtaccttttaggaaatgatgttgtaagtctccttaatgtatcctgaggtaagtttcctactggcagcagattttgtaagaattacttttaagaatttcattctttttgtatggtcatggagctccaaccatttttaataggaaagtcttttgtaaattgttgtcgttttaatgtcatttctgtctttataacttgatcaagaatgattggaaggcaaacaggtttacaaatcaattctgtgacttttaaaaagttgacaatgttgtcagatttaaaccagtgtggctagtaaaaagcagctcactcaatgtgggtggctccctattcctttacgctccccctatccctaccccacaagcctttcgattataaaatactaccaatcttgttataagattactgtggagtagtcaagtactccccgggccttctgagctggtggaatattttatttcagactgaaaacagagagcactctccttgggaagggaaagcggagcttgctgagtgagagatggagcctcatggtgtacaactgagggtagttaactcatcacttctcccaagcactcgatcccagcttcacccactggtgttgctttgcttgaactgttcaagccttttatagccttaccataagtatttagatatggtgtccttttctgtttttggggggggagttttgttgtgtttttttaaagtaagtgcttaagtattaactttgggttgtcccctctgtatgtttcgaaggggttttggttctttttgcttctgttttcttaaacatgttttccactcccacttgggcattttggaagctggtcagctagcaggttttctgggatgtcgggagacctagatgaccttatcgggtgcaatactagctaaggtaaagctagaaacctacactgtcactttactgagatttctgagtatacttttcatattgccttaatgtagcagtaatgtgtttatgcatttgtttctttgcacagacattttgtcaaatattaaaactctacttttttatggcacatattagcatataagcctttattccaagaggtatttattttttcacttgtaaaaaaataatgtttccacgtaaagaactctgttatatcctagaggactctgtcttttatattcgggataataaagactttaaagc

SEQ ID NO: 13749 - DNA, 363 bp, Homo sapiens
ccctggggacaaagcagcgtctggctcgagtggaagcgtccaaacctgcttttcccatctccccccaagtctgttccgtcagagcttctggctgctcctgaatggtggaatgctgtgtcctctcttctgtctcctgctgcctggaggcttcggggctctcccgcctgccttctcggggcccagacgcaaggcaccgattgggccaacatcagagccctgctgcccagaactcataacctcattgttcaaaccaacacttgcacctttctctttttctctttctctctccctttctttgtttttctttcttttttaaaagaagatggtttcactttaatataatgctattatcttaagacttaa

SEQ ID NO: 13750 - DNA, 1723 bp, Homo sapiens
accagccatctgatcaaagttgaattgttttctctttccctcccaattttccaatttttagtagctaataagagagttaacattgacttaacagctttaaaaaaaaaaacagccatgctattgtgaagcagagttattattttttttatactccaggtagtgttctagatgagaaagaggtaagaatgaggggaatgggcacaattttggaaatcaatcccaaagagcctgagtaaatgaaaggccactacgaaatgacgccaggagtaacaacggaacttcacttttgtaacgggatttttatttttgctctttttatagtatcagggaagcaaactgccttttacaagttagaaaatgctgtttgaatctagttgaaccagggaatacagagcgagcaatatgtagcttgaattacatttaaaagcagattttttacaaacaaaatggcgaaagcactgattgtcatttttagcagtcacttaaggcctatagaacttttttcaagtcggaaggtcctgttcttactatctcaaaaatgggcatcgaacaatcaatctaggagcgtggcagtgggtaaaatggtggacaggcaccaaagctattttctcatctgtcctgtggatgagtggaactgtggaacaagtgatgtggaattaatgggtgcaacagctgtacagacaatcaataacacacacagttctggaaagaacacatcacttgtgcttgtttgatgagcttgtcacattctaatccctctccccatcctgtttcaattttgggaaacttgtatctgctggtgtcagcaattctgattctgaaataggatcaggcttttactacaacagccttctctttctatttattgtgtcgactcgtggcttatgaataaaggcaggcaaagtttgcagaactgtcttaaggacatttattttttttccctttttaagtaattttacactttagtatctatttcagagtcatatttaaaactatttattagtgactacagtacatgagacaacaaggttactgagattacaattcttcaaaggttaatgataatgtggtttatactgtgccttaatagtaatgctatttaagatatttatttttaagttttactatgctgcactctaaagaaaggaactttagatgtgacactgtaaaattatgtattcatctcatggcataaattatttagtaagtctagatgtagcgtattaaatattaacctattcaactaaagatgttgacttggatttatttaaattcatatgtgcactgtataagagagtactcttacattaacacattttagtttagtttttagatttttttttaaacgatatattgctagtttcatgcttcctcctctgattttgcctgtgtagatttcatttattggtaattcattagtttaacactattatgtagtttttaaatgctgctttacatttttcttctgaaactgcaatacttgcaatttttattcttaaactaaattgaatactattttacactgtattggatttttatacttgaacaatttcatacaagggaagacaggttagcatttttatggactttctccattatcactggatttactttaagtattcccatactagacagtgttatgtaatgtagacatgactctcctgtgcaaattatttattcgttgtgtatattgctttataacatttcagatcttctaatctat

SEQ ID NO: 13751 - DNA, 1348 bp, Homo sapiens
cttcctgagagaccgaaccccctcacctgaatccccctctatcaaacaaacaaaaaagcagcagtaaagagctagaagttgcagtagcccctactgctttagctttggcctccaacgattctgtgctatagatacagcactgtttctggcacgcctcgtgggcattttgaaatatttaacgtttcctcatgatttgcctttgtgtgtgattttagttccacatgatgacttgtgaacattagggatttaaaggaaaaaaaaaaagaattctgttcccctcatatcatgaacacagtaactgataggtaaaaagactgcatgattcacttttacacttatatttcattgctagttaaaaaataaaacctttgagaatctaagatgtacatttttaccttttaggcaatttcaatataatgtagaagtagtagtgtgccctgaaaaatgtacacgttttttcttattgttaccacatgttcacctttatcagcgtggatactgtcagcatgagtacatatttcaacccacgcttgtaaaagacataagagtttataaaggaccaaattcagttccttggtccttggaagacctatattctctgtagttactgaaaaccgaaagtcaattctaattattcatcttacatatttttccaccatgtcatttgaaaacttgcttttcttctgcataagagattcttatgccaaaaacattaaacagaagaaatcattttttttgctatgtaatacctcgcaactttgctctaaaatcaagctcagttattattttccaagtttgaacatgttaaatatcagatgccttgtaaattatgtctttaacgttttcttatagactaatttcctcttttccacctgccagacttgctaaccaagctcgaaaatgaacatgaaaaagccatacatgtattatttctcctaaaacctaaggcattatctgttggtttggcttgctgctcctattttgtagtcttgatagtagatgcttcttcagcgtaagagtagctatgatattcctttttatcttttcagtacatagtgctgaaaaatctgcaacttcttggatcatatttaatgaattatagtataatgcttgcaggcccagtacaagcatatatattgtgcctcttacagcctttggaatacattgtttccattttttaaatatcttctatatccatatagtattcaaattattaatgctcatgtaccaaggttttgctataaaagttttgtctgtatgaataatgtggctttagtaaataatcatttttcaactgtaaacttattctgaaataaagtaaaattctaattgtttaaatactgtgatg

SEQ ID NO: 13752 - DNA, 3379 bp, Homo sapiens
tgccccccaaaaccctgatttccacacactaagactaaattatgtatcaaggccatcagtatccctgggttacactaattgatgatttagaaattaaagcagtcactccagtgtgatgcaggtgactactctgaaagtattgattatacttgaatgccaaagaacttgtccagaagaaaaacctgttaaattcaagtattaaaatttttagatcaaaaaggcaaatgattttataaacaatggacaatatatactttcttaagatctaaggtactttcttaagatctaagaatttgctgaaagcattttcagctttgaaatctccaaatgaaactttaaaatttattttggtttatcccaaaataatggaaaatgtccagttgtgttttgtaaacacctatgtaactcatcttttagtttacacttcctggggaaattgtctttggtgtttagaggagggaatgagaacacaaattggataatccactgtctcccatcccaggaggtggtgagttggctacaagagaaagggacaagtgaggcaggcctagcagttcccttacctgaagttttcaaatccatactgcagttccctctcgtaatgatgtaactttacaactattcttaatgcttgaacatgtatttaggggcaagtttctcatgatgatgaaaaagtatcaagtcatattgctatgttaattggtttttttttttaaaaggtaagttagtgattactgttaatggtgggggagtaagttttcactgtaaattgaacttataatttatgtgcaagtgttttcagtgccctgaatcaaactataaatgtggggagaaatcacctccatcaaacagttgcatatttactgtaaaagtattcccagtatgtgtgcagcatgaagaaagtattagtgcttctcagtgttctcagtgtaaattctatttatatacagcatattcacatactactttccttatattttatatagttctatgactgttgaaacatcaaggagttaaaaaaatcttaatatttcatgattaactctaagtactattaattaatagcttgcgaaatattagcaattttcccattatggactattctctctaaagcaagagagactagcattcccagacatcattctagggtctttaagctcattttgggtctgctaaagtttggggggaaatgttacgcaaagtgatactgtgtatgttgccattttgctttattcttctgttgaagcaaaattgtggggttttattatgtgtgtgtgcttttcctagatgtcccagttagctgtgctgagatatacctgtactatttatggtttaagttttgattcttaggtattttctccagctctgacattgttttccaaagacacactaaactgcattgcacagttcaaaatttgattacttaagggatcaatctaggtggtgttcttggtcttaaatttaacagcaaacacagcacatatctattatcactatattaattttcaaaggtttttctttgacgtttaaaactgtgacaacagatattcacatttgattatagaaacttaatgtctattaataattttagtacaaaatttcataaaccgtgtttttcaaaataagtttatgtcaaatccagcttcccagaaacactaataattaagtacatcaatgtactaaataaatcattcagttgcacccatggggaagattgtgttactgcccttcacagtgaaaaaaagaaaaatctttcatttttaaaattaggagatgttacgtaacttggcactttagtagtgtatacactagcattagtttatacaccacttttgccgctggggaattcaagttgaaatgtccctcaatcatataggtctggaatacatctttcattcataatttctgctcagataattgaatagtttgccatcgagattattttcatttatactataaaacaaaagcaaactagtccagtttaattttttgtacttagaatattgcacattttctatatatgagttattcagattagtatctatgtaggttcagtcagatccaaccatggattcgaggtattatactgtataaccctacaaaatacatagaagtattatttgccttcataatagaacccaagagtctgtttcaatttatgaattcagtatttgcaccgagattttgattcccaaagtttggaaaaaaatgacaaaacaacgagggaagaaggaaccagaccttagtgccacatatttttctcttggggttgtaaggtagtctcctgctttccagaacactttattatatttcacttatagacctgattttctgtgtcaaagtataattctcatgctgaagctgtagcctaaaaagccaaaagaaagttgtcttcattgtacaaacatattcatcactttaacaataagggaacaaaatttagtattcaagctgagtgagaatactgtttcaatgagcatgtccctaagataaaccagaattggcagttaatttaggcgtctagaaaatctcagttcccaccagtaaaattatcctgagtagctaatgcaccttgagaaaaatctggcatactgaataaataacattaacttgggagccaagagctgggtaagccttacctttagactactctgtgactacagaaataaagccagcacttttggaactaataagccttcacttgtcagtatcataaagagtattgcccaactgaactttgctcccactggtttaatagttacttatttctgcctaagcactcaccttccgattttacccaagtatatatataggatagaaaaaaatgcattatatttgagagctacttcgcccaaattacaaaatgagtgtttttagattcaagtgacagtaaaaggatttgttcccttcagtgacttgagtgttttagttatgcataagtatttctagcaaaggaagggtagaaaggaattgaaaattaatttacactagttgctacttgggaataaagggctttttgaggggggtatggatattaaatgttttcgttatatacttatccctattaaaacaggcagttgtttctttgaatatgcctaaataacagtattcttaaaatctgacagacaagtaacatgtcaattacttgatattccttgtctccagtaccacaggccactcttgacatcccatgtttgcctggataaagttcctcatttcaaacagtatacatacttctttgcagttcattatagtaaggcttaacctgtaaacagtatctgatggcccacctataaataaaattcagcattctatttttaataatttgtatgccaccaatttgtattatttgtctcaataaatacttagtcatcaatgc

SEQ ID NO: 13753 - DNA, 1861 bp, Homo sapiens
gaattcggtggacccagctttcttctgtaccccagatggggaaatttgaatcacatgttaaacctcagttttataagagggggaaaaaaccgtctctacatagtaaaactgaaatgtttctaaggcgatatgataatgcaaacctatttcatcactctaaaagcactgacctcaaaaaaccttataagcacttagatttaattgcattttccataggttcaactactgctgaaagtctggatttcagaataaagcagaatgtaagtttcagttgaggccatggatttgattgttccatggctggaagttccctttagatttcacattttatatggctgatcaattttcatacattgagaaaccaagtcaatcaagcaggaatcatttaaaaaccagataaagccatgtttttcttctgtgacaatttatcagtatctttaccaatgagccttaatttttatataggtccaatattgagcttttacttaaaatttagatagaacttttttttggatacagcacaaactccagttgacagtaaaatgaagcttctaggtattttgtattgtacatatttcctcctactgggtgttcaaaagaaatttaaattcaagtaccttttgtgataaaatgttttagatttgtgcacccattggcaaaacaggaaagtttccagataggtattgtatcattgagaatgcagcacagatagtgtgggcttcacactatagacacagaatatagctttttcttaaagccaaatttgggtgataggacactttaaatatccttaattttggcaaccactagcaaaaaaacttgtcagaataatttaaccaagcccctctccacttcttttatttaaaagcactgattcaattgctaggaatatttttgcagatttttctttacagtattccataggcaggtccactggaaaactgcagaaaaatgtgagctctcctggtaaatagtatacattttataagctatattttaaaggcctaagaacatggcaagtatttacttttatcttttttttaaaaacactcatgacagaaaacagtttaataatatctcattctaaaataaaacactggttgcagggtcttcaggatgcctattttgccaagaaacttcagtatacaggttagaaatatgcttttgtttttgaacaataatatactggtttgctttaaagaagggactaaatatgactttaaagagacttcaaaatattgagtattttaaaaatttaaaagtaggtcagtttataacgagtaaatacctaacacaccaagaatgtgcagtgaacctcaggcatttaagacacctcccccaccgcccgccccccgccccccccaatcaaagtgtggtcccaaaacaagccaacagctgtatatctcaaaagttaacccaagacaactctgatatttaggttatttgttgagactcattggtactgactggcaagtattctgctttaaagtatcatgtattaaaatgtttagacagcatgtgttttaaagtgataaatgcaaaatgttaagtttgaaatggttaacagtaaattattatgttagtttccaggcacttgaactgtgctacaagtaggggaaaacctactttaaagtatggtaaatgtgtgttttaaacttcctatcaagtgacatacttcatttgattttttgtttaagaagccatggtacttttttcttgagttactttggatatgttttttcaatgccatctgaagattttgtaattgagtagcagtaaatatacagatttacaatgttttaactacagttcatgaatagctggttgtgtaaaactaataaaaaactagactttcacatgt

SEQ ID NO: 13754 - DNA, 3550 bp, Homo sapiens
agatctctgtgttcatacgccccagatatgtgagttacatgagatggcacagtgataaagccccatttagtgaccttgcctccttctccttgccaactttgaaagtgcctccgtgtccagactttgaacttgcctgccagccttcagcatcaggaaaggccaagtcctgggtgtgagtgttcctgtgtaacaagaactgggctcaacggtccagctgtttctatggagctttggggttccttgagatgaatgaacatatcattttatcatccaaaggatctcactggactgttcaacttccagccaaattcaaggagcttgcgggaacatttgatataacaaatgtgttgtcattgttggcaacatacaagataaccaagaagctggagtctgttctgtgttgatttgactgccatgagaaacacaggggaaacctgatgaggagaaggataagactgcgtaaggagaaatcctcataggagctataaagcaggctgctgatctcagcagttgatatggtggttgtgcctctgctggctactgggtgtgctgtccccatgttcccgctgtgatttggcagaaacacaataggcttctccttgtgtgatctcagcttcaagcaggtgaaactgctgtgcagagggagttgccccttcccagtaaaagagttgcagcctgttaaacaatgtggtctaatttagtgtctctcccttggcaaatgtaagttttctaagttggccaacttgtctcttacagccagtggctgtggtctacagaattgtttcatataaaatacgggtagagtggtagagtttcaaaactttcgtcatagatatctgggacctttctcaggatctgtgttcacacagccaatagatttggaatcaggcctaagagtacacatggagggtaaatattaaagtgcgtattatgtacatctagaatccatgtgacttgcagcctacctgtaatttctatccattgagcatgcatggatatacccaatagtacacacaaaataaatgtttacttaagagccattctatccttttgtgactgaaatggtttattgtaaatctgcctaaagattttttgcatattatatatgtgaattttggttgtaagttcataacttacccaagggtatagactcataactcttttaaaacagtgcttagtacaatatcctgccatctctgtaaaaacgctaattgataaccgagtcatttacatgttttcgaacacagaatagctcttttctcagcatcattattgctctttcagcatctgttaggacagtctgaatactttctgtttcaaggcactgataaaaccgcaacaaaaacatgtaagaaataaaatagaaatgctttatataatttagtttaaatttatgtatcacctcattgtgacttattttttccattataccattagtcagatttgaataacgaggttttgaaaggataaaaccttttctccaatgacaggattatataattgctattggcaatgtagcctggtgcttcatgagacctatgctaaatgttactggagagttcttgaagccagggataccatatcaggaactattcaggatctatgatattttctgaggtaactgggtaatagaatatcaaattgctgctatctcggacctattgttaaaggatgatgctttgcctatgtaataggatatatcctaagtggggatgtgtatatttcaggaactttaattcacaagtatatattgatatctgatgtgtgtatagtacatctgttggttatgtacattttaatttacatgttgtgtagaacatagatgagaactctgggaaaacttgggaatggcaaccaaccaaaatcatttttaatcatttattagaaatttctcaatattgtgtctttttcttttgaaactctaaacacttcagaaaaaaacactatcagtgtagttcatgttagtataattatagatttacatatatttgaatagttaatttgctttgttttacacgtagcccactgcctcattataggtaaaaggcatttataactgctcaggggattacgagaactcaactgaaactgaatttttgtaacaagaatgttaatagtggcaaagtcctctgtcagtaaactctttaagcttggtgctgcaaagagtctttaaatgggggctgatttcaagtaacctaaaagactgtgttatcagaggaagaggtcccaaatttggagtaaagatgggagaaaataaatatgtgctatttccttggcgagttgagggaatttgccaccttacagagtttgtatcactgaattagctgcttttgtttttttttttttttttttgccagggctatggagtgggggttgtttgtcaaactgattttcaataattggatttaattttttttaacattgaaaagtgcctgaaaaatggtaaattcttaaatgtgtgtgagattgtcagaatcaacaaaactaggttggttaaacatatctctggtacatcaaggggcatgatacaaaccagtctaaagactgtttataaaggagagagctggcgacttatttttatttttattttttggacagagtctccctttgtcacccaggccggagtgcagtggcatgatcatggttcacttcaacccctacctcctgggctcaagtgttcctctcaccttatcctcctgagcagctgggactacaggcacacaccaccacacctggctaagttttgtattttttgtagagatggggtttctctgtgttgcccagtcttgtctcaaactcctgggctcaagcgatccacccaccttgggctcccaaagtgttgggattacaggtgtgtgtcactgtgcctgacagctgacagttttaactgacaactttgataacagaggctgctatttttgttttagataattggccagtgacagagtttacccttgcctcctttcttggtctgccagctttgtcctttctgagtgattctctttctgtattgagaggaagtgtgggtctacatagggatgtttggatgctatggcaagaatctttttgtgtttggagtgtagtccatttgcaatagaaataaaaaaatccgtcaccaaattgtaacctggatgttatagcccagcatctagaaatcctatgaaacgtattagcacaatatcttgccattgtcccatctaggaaattttttcttgttgtgaggtagggaagtgaggaggaaagccatgccgaagcaaatgttagaatcttaggcatcctatttgttcatgccatgggtatttgctttggacttggagtctgtactttgaaagaggcctttgaaaaacaaataattctgtgtgaattttcttgtagcgtgcttcatgaaaatatctacttatccaggtttgcaaatgtacatgttcatttgaatgtaaatcaccatttcttggaaccccacgttttttcttaaaaattattctgaattaaatgtatatttctttagccttccctacacagtactaataaaagacttttctttctgttcatg

SEQ ID NO: 13755 - DNA, 1474 bp, Homo sapiens
gtgtgcggccgcctgagcccgagccaggagcactagagagggagggggaagagcagaagttagagaaaaaaagccaccggaggaaaggaaaaaacatcggccaacctagaaacgttttcattcgtcattccaagagagagagaggaaagaaaaatacaactttcattctttctttgcacgttcataaacattctacatacgtattctcttttgtctcttcatttataactgctgtgaattgtacatttctgtgttttttggaggtgcagttaaacttttaagcttaagtgtgacaggactgataaatagaagatcaagagtagatccgactttagaagcctactttgtgaccaaggagctcaatttttgttttgaagctttactaatctaccagagcattgtagatattttttttttacatctattgtttaaaatagatgattataacggggcagagaactttcttttctctgcaagaatgttacatattgtatagataaatgagtgacatttcataccatgtatatatagagatgttctataagtgtgagaaagtatatgctttaatagatactgtaattataagatatttttaattaaatatttttttgtaaatattatgtgtgtgtttttttttaatctatgggaatatttcttttggaaaatcatttttcagctcaattacagagctcttgatatcttgaatgtcttttctgtttggcctggctcttaatttgcttttgttttgcccagtatagactcggaagtaacagttatagctagtggtcttgcatgattgcatgagatgtttaatcacaaattaaacttgttctgagtccattcaaatgtgtttttttaaatgtagattgaaatctttgtatttgaagcatacatgttgaaaatacaccttatcagtttttaagtacagggttttatagtgtaatatatacagagtaagtgtttgtttttgtttttcaactgaggtcaaaatggattctgaatgattttgcatatgggatgaggaaatgcttggatccttaaggagtttacgaaatctgctgttttatcaaagtgaaaaaaaattgcttattactcttcattttacactaaagcttaatgtcactaagtttcatgtctgtacagattatttaaatcatggaaatgaaaaaaatgttctctgcttgctaccaaaggacaaactcttggaaatgaacactttctgctttccttcctccaaagaattaataggcaacagtgggagaaaaaaaaggcataatggcaaatccttcaagcagggataaaagtcgatcttcaaacattaacttaagcagaccaaaaattctgatgaccgcatctagattatttttttataaaaatgattttcactatagctatgttacgctaagctactgtccaatctcttgtgatgtgtaacttttacatgtgaatattaaagtagatttctctgtcttgt

SEQ ID NO: 13756 - DNA, 3280 bp, Homo sapiens
ttatgcttcgtgtgaactctccttaaaaaccgatatttttttatcatggaaccagaacatctgtcatgcagtgttgtcccttcctaccttcttcctccaagagagtatcatgaagtaaactacaaacttcagaagaaagctgacattttaatgaattttttaaaaaattaataaacaaattgtctaaacgcacagttgcaggctcccttgggaaagccctgctttgctccaggctccaagatctcctggctaagtcagcaagtgagaaaatgtgcaatcaggtgtctctcaccccgaattgtccttcctccttcctccccggattggcttgctgtgcctgacggatgggctgtagaatggggtctggccacctggcctgctgggaaacagcaatcttccttaatagcatttcaagccgtgccttctccgcagaatgcatgtctttgaggtctgctaatatggaatggaactgcagcaaatgcaaacttgaagtcatgcaaaagtatgaaatggatttcttcagctcttcttaggaatatttaaattactgtcataattcagtttaagctatgaactgtgtgtcccagtaggaggtcaagaaaacctccacagccttctggatgaagaacctgttttcaaatatacttgttgcagatacagaagactagtagagttctgccactctaagctgttgtggattttcctgtctccatgaaccactcccattcccccgtccccaatgtgtttgtgagtttccagttgatttgtagcaaatgcctacttagttctttgtggattgttctagacttttaatttttttagctgccatttaagcattcctgtggcacccatcaccatttcaatttaattgtttactttgaagcggtttttgcaaattcatattacttaagcagagggagagaacctctactgatcagagcatctaaacctgtgtgatctaaggtttatcagcctctgcaaggagctttgtcccatcgtgcttccattcccaggagggggagcttggagcgagtcagtcctggggcttgctgacatgggtggcccattggaaaggagaaccaggtcagatgatgtaacagccccaaggagcagcaggcatgggtccctccatccttgggcttcccgggcccctgtgacaggggaaagggctctcttacaccgcactcagggagaccacttctcaggatggggtcagatggagagacctctagggagaaagacatccccattgtgtgagtggcatttccttaagctggcaggaacagggagcagccctgtgtcgggggctggaatagttctggccagaccccgttccccttcctctatgaaggaataagttggaccaagggaagtcggggacgtaaaaaatgaagcaaaacaatgccagggtgtctcccgctttactcttcaggaatggtgtcccaagttggaggctttgtgtcagctgcaaatcctaccagttatgtccaagaatggctttccctcgggcaggtggcagcggccatctcccactgggaatatggcgtagtatctccggtccattccttggatgctaaggactgcgggaatgagggagtcagataaagaacaaacctcgaaacgaacagttaaattgaaatgctatgtgcctgacccaatggtaggcacatagtaggcactcaactcatatgtttaattgaattgaaaatatcccttaggaaaaaaaaaaaacacacaaaaaaccacaagagccccagccagtttactccaggtagatttccacaatatgcaaagtggtggtggggtcaagacagatgacaccagcactttaaactctttgtgtgggtatgcgtgggtgtatgtttgggaagaaaaacaaaggtgcagactatcttcctttttttcttcttcagcctccatccctggcctcctcccctcacacacactggacttggtacaaaatgtcggtgtggtcctagatgaagcattggggtgggggagggagagggagctttgtgttaagtgcctactggaaatgcactgtggggttttttcctgtatgggaaaccatttatgccaagcttttccccatttcccatatttatctcatctggttagctgcctctgcttccagctttgtgtaattctctttgccagctgcacaaagctgattttttccaaagtctaaagactgagctcacctggctagattgttgtgtgttttgttgaattttttcataatgtaatgccgtatttattgtttttaaaatgaaaggaatactaataagtcttaaaagttccttcatgcataagatttttttccagttactgggtttaactggtgtacattaattagatgtccatactgtattttgtttgcattaagtaattttctttttgacttagtatccggcacacaaagtgggttagtactacagtatttgcgttactttaagtactaagtatgcaggtttcctggtaccattgagttgctgctattaaagctcacacacgaaatggctaaaagttacaagtgtgcaaattatgactgcgtgagccttagaaaataaaatgtataaagggcaacacatgagctgtcaaacagtgttaggagtgtgtttatatgtacagagttgtgcatagcaatcgttttatttaagttgatatgtagtctactcacattttcattatttagcaattttgtacaaaaatagcaattaatttgtaaacactgccagaatactttctagctgctttgtaattttttaagagtgttattttgtttttgtttttctgttctttgttgtggctcttgttttcatttttgttgtacgtgtagatctgtaaataaaattgcagtatttaaagcttaagctttcaggaaaaagaaaataagaattcagtgtgtgcatgacaactcgtgtgtatgagaaggagggatatgaaggaagatggcttgcagagtaagtcgggtggcaattgtcagggtgtgggaatttcttttcctacggggtacgtgattttgtaaaaaggaagtatttctcccaaaattgggagtaggcaaactactaatcagtttagctttgtgttgtatgctagtttaaaaaagaaaatatgtaatataatgtaaaaaaaaacaaaaaaaagcttttatgatggattttgtaaatagatttgttacagggtgacctgttctctagctgtgatcttaccacttcaaatgggtgtaatttgaataaattttgtatggtaaaggatcaataaaatgattttttttaag

SEQ ID NO: 13757 - DNA, 494 bp, Homo sapiens
aatacaactaatggaaacatctataaagaagaatacatttctaattaaaatcttcaatgaacaggaaagcgacatctccattctccaagggcaataatttgtactggtcatgctgcctccttctcagccactcttcttaatgaggctccccctgtctcacattgagttgggcccattggttatttgacctaaaacctaatcaccgctaccatagcacatccttcaaattaaactgcttttggtttacttttagcaagaaatgcaagcggttgcatttttttctgtttgtttcaatctctaatctttaagtcagaacctaattgtacagtggctctggccatcttttcctcatgtggaagaattttctatctttaataaactttttctttgttttttttttccagatggagtttcgctcttgtcccccaggctggagtggtgcagtggcacgatctcaggtcactgcaacctctgcctcctgggttcaaacgatt

SEQ ID NO: 13758 - DNA, 2657 bp, Homo sapiens
agggcgcgcaggcagggagaagggccggggggggtaggagaggagaaaaaaaaagtgaaaaaaagaaacgaaaaggacagacgaagagtttaaagagaaaagggaaaaaagaaagaaaaagtaagcagggctggcttcgcccgcgttctcgtcgtcggatcaaggagcgcggcggcgttttggacccgcgctcccatcccccaccttcccgggccggggacccactctgcccagccggagggacgcggaggaggaagagggtagacaggggcgacctgtgattgttgttattgatgttgttgttgatggcaaaaaaaaaaaagcgacttcgagtttgctcccctttgcttgaagagaccccctcccccttccaacgagcttccggacttgtctgcacccccagcaagaaggcgagttagttttctagagacttgaaggagtctcccccttcctgcatcaccaccttggttttgttttattttgcttcttggtcaagaaaggaggggagaacccagcgcacccctccccccctttttttaaacgcgtgatgaagacagaaggctccggggtgacgaatttggccgatggcagatgttttgggggaacgccgggactgagagactccacgcaggcgaattcccgtttggggcttttttttcctccctcttttccccttgccccctctgcagccggaggaggagatgttgaggggaggaggccagccagtgtgaccggcgctaggaaatgacccgagaaccccgttggaagcgcagcagcgggagctaggggcgggggcggaggaggacacgaactggaagggggttcacggtcaaactgaaatggatttgcacgttggggagctggcggcggcggctgctgggcctccgccttcttttctacgtgaaatcagtgaggtgagacttcccagaccccggaggcgtggaggagaggagactgtttgatgtggtacaggggcagtcagtggagggcgagtggtttcggaaaaaaaaaaagaaaaaaagaaaaaaaaagaaaaaaaaaagatttttttcttctcttaatcggaatcgtgatggtgttggattatttcaatggtggggttaatatagcatgttatcctgtctatcttttaaagatttctgtataagactgttgagcagtttttaaaatagtgtaggataatataaaaagcagatagatggcgctatgtttgattcctacaacgaaattatcaccagctttttttcattcttaactctttaaaggattcaaacgcaactcaaatctgtgctggactttaaaaaaacaattcaggaccaaattttttctcagtgtgtgtgtttattccttataggtgtaaatgagaagacgtgtttttttccttcaccgatgctccatcctcgtatttctttttccttgtaaatgtaatcagatgccattttatatgtggacgtatttatactggccaaacatattttttcttttgtccctttttttctttcctttctttttacttcctttatttctttattccttccttttcctttttttcttttttttttctttttttttttttttttttggtagttgttgttacccacgccattttacgtctccttcactgaagggctagagttttaacttttaattttttatatttaaatgtagacttttgacacttttaaaaaacaaaaaaagacaagagagatgaaaacgtttgattattttctcagtgtatttttgtaaaaaatatataaagggggtgttaatcggtgtaaatcgctgtttggatttcctgattttataacagggcggctggttaatatctcacacagtttaaaaaatcagcccctaatttctccatgtttacacttcaatctgcaggcttcttaaagtgacagtatcccttaacctgccaccagtgtccaccctccggcccccgtcttgtaaaaaggggaggagaattagccaaacactgtaagcttttaagaaaaacaaagttttaaacgaaatactgctctgtccagaggctttaaaactggtgcaattacagcaaaaagggattctgtagctttaacttgtaaaccacatcttttttgcactttttttataagcaaaaacgtgccgtttaaaccactggatctatctaaatgccgatttgagttcgcgacactatgtactgcgtttttcattcttgtatttgactatttaatcctttctacttgtcgctaaatataattgttttagtcttatggcatgatgatagcatatgtgttcaggtttatagctgttgtgtttaaaaattgaaaaaagtggaaaacatctttgtacatttaagtctgtattataataagcaaaaagattgtgtgtatgtatgtttaatataacatgacaggcactaggacgtctgcctttttaaggcagttccgttaagggtttttgtttttaaacttttttttgccatccatcctgtgcaatatgccgtgtagaatatttgtcttaaaattcaaggccacaaaaacaatgtttgggggaaaaaaaagaaaaaatcatgccagctaatcatgtcaagttcactgcctgtcagattgttgatatataccttctgtaaataactttttttgagaaggaaataaaatcagctggaactgaaccct

SEQ ID NO: 13759 - DNA, 189 bp, Homo sapiens
ttaccagcgtttccagaagagcccctgccccgttcctgctgcggcctggccgttcttggggaatctgaccacggcgtgcaaactgggactgcctttccctctcctcagcccgtcctcctccaacccgcgctcctttgccctgccgggccccaggatggcaggccacctgactctcacctctgtgccccc

SEQ ID NO: 13760 - DNA, 1456 bp, Homo sapiens
aacctttcccaccccagttcttcttgtctgatttatgcccgtggttaaaaagagcaggccagttttcgagataaagaagatttggcgttgactgccctagggctgtgttcagctgtgggcaatataatgggtggactcacacttgctcagttcaggcagctctgctggagggcggtgccatgcctaagcctgtgcacatgcatccagctgcttaagatgggtgcttccttgtacccggccaccagaaaacccctggaactcctctttcatagatcgtgactttgtgttattttccgtgttgtttgaaagtgccgaacagtttagaccagctcaccaatggctaatgtggtccattttattttctaatattggtttatctaatgttttctgcgtggtgctgtcttccattcctgtctcactatgtgtaagattttgtcatatgtgttcatagaaacatggaattctctgattttgagccgaacatgagtttttagactgtatcttgacatgaggttcctgacattggatacaaagttatcagcattcacaaatctttttgttttctccattttttttccctttgagatgaagtgctgttcttttgcctaggttggagtacagcggtgaaatcatagcgcactgcagccttgaactcctgggctcaagcgatcctcccacctcagcctcccaagtagctgggactacaggcacctgccaccacccccagttaatattttttttaattttttttagaggcaggatcttgctgtccaattttttttaaaaagctaaaattgccaactttagaatcttgaccaaaaaaaattaattttaggagcatctatttatgcagtgttcaaaagtactgaattagaaaccaggaagttttagttccttctactacctgtgtgatcttggggaaattatttaacctctcagtcctaattttccccttctgtataatgggagttctggatcacaatatgtctgggctctcattacccaaacatctgagattccatttttgccatgtgtcatcgagtcgctccccaacagatgtttgtgatgtttttgtggctgtcaccatggtgggattctttcagaatgagactcctggaaattcactgagtcagcagccttcacaccatctacccttaaatatccaaccccagcaatttatacaacgctgtcatatttttaaaaaaacaaaagtaagccatcctcaaataaggaaccccttggtagatattaaccttaaaaagggttttcattctcaaacaagatgctttgttctccaacaagatgttcatctcatcacttgcacttttgttttaatgtatggattcagattagactgagaaaaatggatggtattttcttaaaattgtgccaccttagagcccccccccttttttttttcttccttcactggataaataaaatatgtgaacaagtg

SEQ ID NO: 13761 - DNA, 390 bp, Homo sapiens
cggccgtgcgcctaggcgtccacccagaggagacactaggagcttgcaggactcggagtagacgctcaagtttttcaccgtggcgtgcacagccaatcaggacccgcagtgcgcgcaccacaccaggttcacctgctacgggcagaatcaaggtggacagcttctgagcaggagccggaaacgcgcggggccttcaaacaggcacgcctagtgagggcaggagagaggaggacgcacacacacacacacacacaaatatggtgaaacccaatttcttacatcatatctgtgctaccctttccaaacagcctaatttttcttttctctcttcttgcacctttacccctcaatctcctgcttgctcccaaattaaagcaattaagttcctgg

SEQ ID NO: 13762 - DNA, 1887 bp, Homo sapiens
gaacagccccgtggatactgaagttttttttatggtagttacaggaaacttctgatactctttttattattttcttgtatagagtcagacacttgaaaaaaactaatgtttgaagacaaaaatattttggcagtcacaataccagaactggattgcatttccagaattctgagttaaagaaacaaagtatttgctttgtaaaaggccaaaattctatttcctacaaactttaaatgctgtttttatagatgtgatatgaggcaacacaagcacagacagttgcatagattttaatttatacatatcaagaaaagtgcaatttcatgctgaatgaagcgtaggaacttgacaagcccataggtagctatagttctttgtcagtatagggaattatgttcatgtgaatttcctgattctcaggtgactaaaaagctagcattctatgtattaaccttacaacagactctgtaagtttgagctttaaaaaccaaactttgacataaccttatttcttgtatttgcccccttttttttataaaaggtgaataaaaagaaataatttaatatcaccattgtatggattcctaatcaagatttcacgttctcagcccctgagactagttttctttgctctctgtaattagagcctttggaagcaaagttgaaaggaagtatttccattctgttactgttttgtagcactttgtccatttattgatttttaaagtagatatttagataccacccctgccctgccccaaaaagaaaaatgtttattgtcctgctaatctatatgcctacacctcagaagctgacagatgagcttcctaaaacatgaggatgaataaatgttagaactgtgatatcttctcatttccacagagatttgggtttaaaacaaatggctaatatttgtaagcctgaaagctgccatcctctttaacatcctacctaccttttaaaatattttctggaggttaagtacagttaggcactagaacatttgttaagcctcccaaagtagtgtgcatggaagattctagagtgtccagctcttgcactacaaatgtaataataacagaataaatacacttaccctgatgatattgagggtacatgattagcctaatgtgatgtcatatgaggaagtttaggagtccatttttcaggtggtttggtgataggaataaaaatgttactcccgtcgctgatttggaagaaaaccgatgaagtacaagtaaggtttccccactcctgtgtgtggtcatgggaagccattagagggaagctgcagaacagaatggaacaggacaggctgggctagactcgagcacgcagtggcccctgtgccaccacactgtgggtcaggaacacgcgtcatggtgttcttgtcggaatgtgaacatacagcaccctctagcattacgaatctcttaggatttttaagattgtatttgataatacttatatttcacagggcacacttttggcacacctcagagcacactgctgctattttgggtcgtatcactgtaaaatacataataagtactacttaactgtgacatgaagaattggaatcccagagggcaacatttgatttgactaagatcaggcataagatagaatttttgtcatttttccttgcagttttattgacttagtttatgagcttggataaaataattttttgatgaatcatgtcaataaaaggaaaaataatgtaactacctcataagtctgataaaaggaagttgctagtgttttatagaatttctgaaggtggttaaatcaagtatgatttcaaaatatcaactagttccacttttgtgattgcaggatgcttcttatactaaagttctcataaataataaatcagcttatgcc

SEQ ID NO: 13763 - DNA, 3494 bp, Homo sapiens
gattctttggttctttaaaaaaatttaaaaggagacttatctacatatataggtacatgccatccattattttaaataaactaataggttttcagaattatgaatttttcagaactcatccagtccttgtaatcttaaacagatgcaaatcctacccctgcccttaatgtaactagggaccaatatgtgccacgtgcctgtggctgcagactcccagagaaccagcactgggtttacagaatgaggccctggctccccaccacagccccagctgcctcagagcaggcacagcacaaggcaggcccagccccatgggccgtcacaaaggcttgatcactgcctgggcagtggcacaaccatcccccatgtcgctacagaacatgggcccagagcaccttgaaggagacccttgactgtgactggcaggcaggtgaggggcacagcacccctccccggcatctgccagctcagcacagaagacaccgaatgtgcatctggaggtgttgcggcagaggtttgagtgaaccctctttcaaagacaataaatagcacagaattgtccgtgcttctgtgaggcacgaaggagcacctctccctattcctgaaccatattttaattgatgcctttattgtcccaaatttaccacttaaagaattctattttcatttctgtcctgtttgccacttcatttcatttccttgagtaaatgagctgaagtgtaaagcaaagaatagcagaagcagcttggtaggatggaaggcacgcagtggcatggcctggctccttccctgagtggccttgttgccttgggcgtgtgttcagcacctcccatcccatggatacagtggagattccatacaggccttacttagctccttgcgatactgtgagccagagagaaagtaaaagcacttcacaaaaaaatgaaaattctaaggacatacaagagccattgttacgagcagcaccgcccagcccttccttgcctactgtcagtggctttgccaagatgggaggaggccagtgcccacttgcccaccgacctgagcctgagtaagtggctgtcacctgagcctgttctttctgtcctggtgtggtgctgctccctcacctccaaaagagcaaaagtactttcaccacagtcaacccaaaagggaaagaatttctgtaattgccaacccactttgtagaagaggcatgagcccttgaatttcaggcaccttttatctaatgagagtttttacagctcatcattcaaataacgcacaaaaaacaaaagccgctatgaccggcgttgcctctcactttgaaagaaagactccgtaatcttaaacagatgcaaatccaattaggcggccaagtaggtggagacgaagcaccttcctttccccatctctgtctgtgtagactccacttacatcttgtggttattctgggttgtggaaggaaaatgtgaatgaaagtagtgctggatgcaattactcctgaaccccacctaggatttaacatccctcattgagccactgggaagctatggttgagtaactaaaggtctggcaagaccctgggcacacagggagctgcctagcatctggcctggagtgtactagccacattcccaaggtcccaaggagaaggaagagctgaaattcatctcctagtgacagtgccccggccctgtcaagaatcacatactcagcattttgacagttaatgtcttctctttatttgtgtagtttttaggtggttttatataacattttaattacttgtgatttagatgtatccatcctttttctattaagaatacaaatgctgggctgggcacagtggctcacgcctgtaatcccaacaccttgggaggccaaggcaggcagatcacgacatcaggagatcgagaccatcctggctaacacggtgaaaccccgtctctactaaaaatacaaaaaaaattagtcggatgtggtggcaggtgcctgtagtcccagctactctggaggctgaggcaggagaatggcgtgaacccaggaggcggagcttgcagtgagcagagatcacgccactgcactccagcctggatgacagagcgagactccgcctcaaaaaaagaatacaaatgctccaacattattttttataactctggattaccgatgctgagatgtgtgcaggaatacttccaaataaatttttaacattgtaagccagtagattctttggctgggtggcaaattttgagtcttcttgcatatttggctcatgggttcataaattgaggccagagactcattgtatatccttgatcaattttctaattaaaggaaatagcttattgtttagtaaaatggcccttggttgtgggaagaaagagaattatttttaactgaacgtttttgttgttttttaaataaagtagccatatgtaacgggattttaaaaatatatacattttacaacatggactagaaaaggaccattagatcaggggttggcaaactatggcccacgaatcaaacctggcctgccacctgtttttatacaacctgtgagctaagaatggtttatatgttttcaaatgattgggcagaaaatcaaaagaagaacaatatttcatgacacctgaaaattctatgaaattcagatttcagtgtccataaacaaaatgttattagagcatagccacacccattcatttatggtattgtctgggactgctttcttggcagagttgaatagttgggacagggacagtatagcctgcaaagcctaaaagatttactacttgtctccttaaagaaaaagtttgccagctcctgatctagaccaagagggagatattgaccttacttgcatttatccggcattatttcaacacctcctgtgaagaaagtacttttctggcatagctaccgtgagttctcagcaggaacttcccagcgatgataatgtacatgaaattagccacgtaacaagagtctatttgccttgaaaaaacaattatccttgaacttcctccagctatgcagggattctcattaaagagctgatctgcatctgtttatccattttagtagcttttaaatatgattttatgtgaagtgccatttctttattctactaaagagagacagcagaaataaagatcagaagcaaatgtgagcaaatctgttttactgttaacttcaattatgaacttgaaattgtgccacatgactttttcctctaaaaactggatcctagtgttttaattacctgtgtgcagctattttaaatagcattttacttgaataatatgtatgttgtcattgtttcatgctatactttgtgggataaaacttgggaatgagtgtggtaagaaatttataaagttttgcttttaaaacgtggacataactcatttttctagtttttgacaattgtgtgttttagtgtctagtctgcagagagctgtgtgattaataaacgtggaattaacagaatttcctctccctgt

SEQ ID NO: 13764 - DNA, 97 bp, Homo sapiens
gagaacagcagaatgacctaaagaaacccaacaatgaatatcaagtatagatttgactcaaacaattgtaatttttgaaataaactagcaaaaccag

SEQ ID NO: 13765 - DNA, 249 bp, Homo sapiens
aatgcattaatatttgactgttgagaattttactgccgaagtttacctccactagttctttgtagcagagtacataactacataatgccaactctggaatcaaatttccttgtttgaatcctgggaccctattgcattaaagtacaaatactatgtatttttaatctatgatggtttatgtgaataggattttctcagttgtcagccatgacttatgtttattactaaataaacttcaaactcctgttg

SEQ ID NO: 13766 - DNA, 947 bp, Homo sapiens
aggtcacccacgcagaagtcttcctgtgcagggtgctttggtagccatcagagaggaaccaagggcaacatcttttcttcccaggcgttcttctctgggtgctttattctcttctttttctttatttcgcccccacccccatcccctgccttttttttttttttttttttttttttttgtatagaaacagatccatttcttggtaatcaaagcacatttgtttggtcttcctccaaccctttgcatttgatttctaaacattccttcatatgcctttaatgaaagccagcaattatcccatgggccctacttgaatttatctgaggcagctacagattgccctgcaagatgagtttttggagataaatgaaataactggacacacactcacacaagtaacaccacagcagacctcggagtactgctaagtgtacctgtgtcaaatccgcacaggactcaatatagcaatttattcttgatgtatgcaattgcacattgtaattatattaacagagcacactaataatttgtatagattatatatattagatcttgggtatggtttttaccttctcccatggggaacttcttccttcctgatgtggaattgtacatttaaagcttggtcggtgacctttgcataccatcaacgagcacagctaagaacagagtgagagaggcccatggctgattttaccatgtgcccagattaatgtatatagttgattggaatgaggttttatgaatattcatgtttttgaaggcctttaatttctgtctgcatattagcttttaatgtgtgattttaagagagaatactttgacacctgtaaaaatcaaaatactactctttataagacatttcacaaatattcacttacattacaggctggaagtattttattcatatgtatatttataccaataaaatgattttacaagtggaa

SEQ ID NO: 13767 - DNA, 443 bp, Homo sapiens
tcccagactgctttgccttttgctcttactatgtttctgtgatcttgctggtagaattgtatctgtgcattgatgttgggaacacagtgggcaaactcacaaatggtgtgctattcttgggcaagaacagggacgctagggccttccttccaccggcgtgatctatccctgtctcactgaaagcccctgtgtagtgtctgtgttgttttcccttgaccctgggctttcctatcctcccaaagactcagctcccctgttagatggctctgcctgtccttccccagtcaccagggtgggggggacaggggcagctgagtgcattcattttgtgcttttcttgtgggctttctgcttagtctgaaaggtgtgtggcattcatggcaatcctgtaacttcaacatagatttttttgtgtgtgtggaaataaatctgcaattggaaac

SEQ ID NO: 13768 - DNA, 52 bp, Homo sapiens
gcctgctaagtaaacgtcatttctaacccaaaggctcttttcagagccactt

SEQ ID NO: 13769 - DNA, 1024 bp, Homo sapiens
gcaaaccgagagatgtgctagatcctggtgcttagttcatcattgttttccctcacagacatttctctttcatgcctgcttgactgataagccattagctagaccctgactatgtaacgctaaagattttaccatgcctggaaattttacaggggaagaaaacacgctagttatttaactgcaagctactaaaagcataggtgtgttgagatttctgtgttctccactcttccactgttatcctagtaaaagcatcaggggctggggacaatttctttccaaagcaaaagaggaagccagaccttgggaccgagaactgagaatcacaagggagttgcgcccaacatgcagaacatgaatcctctgagctgtcctcaaaagaaagccccaaacaacagaaagcatagtgttttccattgttggtgaaaaatgtcaaggaggaaagaacaataatgattccatcatgataagaggaatgaacgtgtctgcaactaatgggagcaagatagtacactttaactctttcagacaacttgcattctgtggatgccagctttggaatcagagccgcctctggaatacctgtgcttccagagttagcttttggacagttaccttctttctggccatcttgacttctgccccacatctgctttttggctttgtgcagatctttaacatgttagtgaacagacattgcccagtgtctcttctagcccctccaacagttcttcatgtagcactgcttttggacagtgacccatgatatctgccttcgtttgcccctctgactgttggaatcccacgcaccattcagtaggattcaattcaatgtggaaccattcaacattcacctcattaacctaaaatgtctcccaaagatgtatgtaagacacacactgccctaacctcactccaaatgtctggagaaatgtgtgtagtgcttttgttaaagcccctatatgggcagcatggaggatcataagatagcaaaaccatttcaacactaaatgaatattaatgt

SEQ ID NO: 13770 - DNA, 1435 bp, Homo sapiens
ggaaaagagcagaagctccttggtttaaccagcacagagaaaataatataaatcccataagggcagacgtttggtctgttttcttcgctgtcatttccttagtagttagactagtgctgagattttagtggatatataattgatttatgttgaatatatggacttagcaactaaaaataccacagatggttaacctggactggggcaaagcaagataatagtgatgatcgtatgttgctgtctccatccgtctttaatgggtcagggctttgatttccaagggtcttcaggtgatgagtaggggtacccacaagtcagaaggtctgcgttctcctagtttgtttgctgccatttgaactcatgtagggaatgaaagaaagctgcaattatccgccaactgcatttaaaacaaaacaaaacagaaaaatcaaaataacattgactcttccaaccactgacatgttgtttaataatctaagcggcagtcctggaggctaccagacttactgagttctacctgagaaacagccaagcaaagtgtgagagaagggttaagactggcttacaatgagatgcttcaaatgaaaagggaattatgagtaaaattgaactttgatgggggattcagttctggaaaagaatttggtattttccagtctgctaggaccaattaccttgaaatattttaaaatctcagtaaatagttattgctgaaatggctgttggcagttcttattatgattcagagaagagcaaatagaccttaacttcattttgaaaaagaccaaattaccatacccgagtgagtaatgacaggactacaactaaaacataaacaacattaatgatgaccataaaaagtcacaaaattgctaaatgttataatttagagttgacataaaaattgatggccaggcatggtggctcacgcctgtaatcccagaactatgtgaggctgaggcaggtggatcacttgaggtcaggagttcaacaccagcctggccaacatggtgaaaccctgtctctactaaaaatacaaaaattagccgggcatggtggtaggggcctgtaacccagctactcgtgaggccaaggcaggagaattgcttgagcctgcagcagctgcagtaagccaagatcatgctgtgcctcaaggaaaaaaaaaattaatgtttactgatatttgttgaagtcctacaacatcacctctgagaataggagaaatgaagcaacagttgtgtctagatgtcagaggcatggctgggcctccatctctgcctaagggagatataaaagagttcaaactattgcccatgttccccagggtcagaagttctaattatgatgatagaggctgggttgtaagtagtaagtgaagggtagcagaatatgccatctttggcataagaagtattttgagttgaagacaattgag

SEQ ID NO: 13771 - DNA, 58 bp, Homo sapiens
ttactgtggtctctctgacggtccaagcaaaggctcttttcagagccaccaccttttc

SEQ ID NO: 13772 - DNA, 59 bp, Homo sapiens
ggttgctgatttctccacagcttgcatttctgaaccaaaggcccttttcagggccgccc

SEQ ID NO: 13773 - DNA, 47 bp, Homo sapiens
gtctgcccgtttcttcctcattgaaaaggctcttttcagagccactc

SEQ ID NO: 13774 - DNA, 1015 bp, Homo sapiens
cacgcagcctgcagactcactgtgggaaggagacaaaactagagactcaaagagggagtgcatttatgagctcttcatgtttcaggagagagttgaacctaaacatagaaattgcctgacgaactccttgattttagccttctctgttcatttcctcaaaaagatttccccatttaggtttctgagttcctgcatgccggtgatccctagctgtgacctctcccctggaactgtctctcatgaacctcaagctgcatctagaggcttccttcatttcctccgtcacctcagagacatacacctatgtcatttcatttcctatttttggaagaggactccttaaatttgggggacttacatgattcattttaacatctgagaaaagctttgaaccctgggacgtggctagtcataaccttaccagatttttacacatgtatctatgcattttctggacccgttcaacttttcctttgaatcctctctctgtgttacccagtaactcatctgtcaccaagccttggggattcttccatctgattgtgatgtgagttgcacagctatgaaggctgtacactgcacgaatggaagaggcacctgtcccagaaaaagcatcatggctatctgtgggtagtatgatgggtgtttttagcaggtaggaggcaaatatcttgaaaggggttgtgaagaggtgttttttctaattggcatgaaggtgtcatacagatttgcaaagtttaatggtgccttcatttgggatgctactctagtattccagacctgaagaatcacaataattttctacctggtctctccttgttctgataatgaaaattatgataaggatgataaaagcacttacttcgtgtccgactcttctgagcacctacttacatgcattactgcatgcacttcttacaataattctatgagataggtactattatccccatttcttttttaaatgaagaaagtgaagtaggccgggcacggtggctcacgcctgtaatcccag

SEQ ID NO: 13775 - DNA, 77 bp, Homo sapiens
atctaagaatacgcggtctcctgagaacttcaaaaaacaaaaacaaaaaaacccaaaggcccttttcagggccgctc

SEQ ID NO: 13776 - DNA, 64 bp, Homo sapiens
tttgacaggtatctgagctcccggaaacgctatcaaacccaaaggctcttttcagagcccccct

SEQ ID NO: 13777 - DNA, 64 bp, Homo sapiens
aaagttcctttggccaactgcttagaagcccaacacaacccaaaggctcttttcagagccaccc

SEQ ID NO: 13778 - DNA, 372 bp, Homo sapiens
gggagagacatgaagacagaggagaaatgaatgcataaaataactgataatatgaatctatacatagaacttaggaagtctcatctgcctgaaaatgactgtgtggatcccacccaaatccaactcatcctggtttgctgcacactggttcatcaaaagaaggttaccgaggggaaggaactaaaggtgtttgcacttcatgttactttttgagtttataaacataaaaacagaatttacttctgttacagacctagttactgggaattcattacttgccatggactacctttgctaagaaaagtctgaatgagaagatggcaggacgtctgaaaaaaaaagttataattaataaaatctgcggagaattgt

SEQ ID NO: 13779 - DNA, 91 bp, Homo sapiens
ctttgccaagtaagcatctttacacctaatcccaaaggctcttttaagagccacgcatgttttcaataaatgagttgtaatcatttcattc

SEQ ID NO: 13780 - DNA, 53 bp, Homo sapiens
acttgtccctgcaactgccttagtaaacccaaaggctcttttcagagccactc

SEQ ID NO: 13781 - DNA, 48 bp, Homo sapiens
ttctaacgtcttcatacccaatcccaaaggctcttttaagagccaccc

SEQ ID NO: 13782 - DNA, 64 bp, Homo sapiens
tgctaccgcttaaacgactcagcatctcgacttcccaaatcaaaggcccttttcagggccgccc

SEQ ID NO: 13783 - DNA, 116 bp, Homo sapiens
aatgattactagtcaaatccgtcagtgatcccgagtcccagaaaccaaaggctcttttcagagccacccaccttttctgtaaagtgctggaatacacatacgatgcctgaaatctc

SEQ ID NO: 13784 - DNA, 50 bp, Homo sapiens
attgttttgagtacaaaccttaaatccaaaggctcttctcagagccaacc

SEQ ID NO: 13785 - DNA, 56 bp, Homo sapiens
gcctcaccccggctttttatttaacagctcacccataaaaggcccttttcagggcc

SEQ ID NO: 13786 - DNA, 43 bp, Homo sapiens
atggacgcatgttcaaacccaaaggctcttttcagagccactt

SEQ ID NO: 13787 - DNA, 55 bp, Homo sapiens
actagttacctgggtaaaagcgctaacgacccaaaggctcttctaagagccaccc

SEQ ID NO: 13788 - DNA, 2522 bp, Homo sapiens
gtgaggaaatgcttcagatgaggctccaccttgttaaataaattggatgtatggaaaaatagactgcagaaaaggggaactcatttagctcacgagtggtcgagtgaagattgaaaattaacctctgagggccagcacagcagctcatgcctgtaatcctagcactttggaaggctgaggagggcggatcacaaggtcaggagatcaagaccatcctggctaacacggtgaaaccccgtctctactaaaaatacaaaaaataaaaaattagccgggcatggtgacgggcacctgtagtcccagctactcgggaggctgaggcaggagaatggcatgaacccggaaggcagagcttgcagtgagccgagatcacgccactgcactccagcctgggagacagagcgagactctgtctcaagaaaaaaaaaaaaaaaaaaaaagaaaagaaaattaacctctgagtataaagcatcagtgggcagaatcaatgtggggagggaaacaacaaaaatgtagaaagaggatccttgttgcttcttggggccgcatcagggtattgggttaggcagatactgaccttactttcatttcccctctggtcactagacccctggggctttcaccaatgacattgatgagagaatcacattcagggcaggctagggacacggggttctggaaggacctcctcagcatggcccaagccttgcatgctgtggctcttaaatccaggaaaaatggctgaccccatggacacctcctcaaactctctgcagcagatgtaattctgtatccagacatggcaaatgccatcctccttgtttctgaggaccagaggagtgtacagcgtgctgaggagccccatgacctaccagacaaccctgagagatttgaatggcgttactgtgtgcttggctgtgaaagcttcatgtcagagagacactactgggaggtggaagtgggggacagaaaagagtggcatattggggtatgtagtaagaacgtggagaggaaaaaagtttgggtcaaaatgacaccggagaacggatactggactatgggcctgactgatgggaataagtatcgggctctcactgagcccagaaccaacctgaaacttcctgagcctcctaggaaagtgggggtcatcctggactatgagactggacatatctcgttctacaatgccacggatggatctcatatctacacatttctgcacgcctcttcctctgagcctctgtatcctgtattcagaattttgaccttggagcccactgccctgaccgtttgcccaataccaaaagtagagagttcccccgatcccgacctagtgcctgatcattccctggagataccactgaccccaggcttagctaatgaaagtggggagcctcaggctgaagtaacatctctgcttctccctgcccagcctggagctaagggtctcaccctccacaacagccagtcagaaccataaagctacaggcacacactgaagcactttactgatattcattcaattattccataggacagttgtttgagtttggtgccaccttattggcccctttatacagataaggaaactggggtgtagaaaagtgtattgactttacaaagcagacaggaatagtgaacaacagagctgggatctgaacaacaatgactaacattaatggagaatttaaaacgttctgagtgctgtgttatgagctttggtgggtgtcactcctttaatcctcacaacaccctgtcaggtagtctcatttggcaagtatggaagcagaggcagggcaacattaagtagcttacataactcacacggtaatttgtgcagttgggagatgttcagcttcagtccctggccaattgcccgttcttttccagcctgatttttcctgcatgggaagagcccacatgtagccctgaggttcccttcccaggacagctccaggatcgagatcactgtgagtggttgtggagttaagacccctatggactccttcccagctgattatcagagccttagacccagcactccttggattggctctgcagagtgtcttggttgagagaataacgttgcagttcccacagggcatgtgactttgaaagagactagaggccacactcagttaataatggggcacagatgtgttcccacccaacaaatgtgataagtgatcgtgcagccagagccagccttccttcagtcaaggtttccaggcagagcaaataccctagagattctctgtaatattggtaatttggatgaaggaagctagaagaattacagggatgtttttaatcccactatggactcagtctcctggaaaaggatctgtccactcctggtcattggtggatgttaaacccatattcctttcaactgctgcctgctagggaaaactgctcctcattatcatcactattattgctcaccactgtatcccctctactgggcaagtgcttgtcaagttctagttgttcaataaatttgttaataatgctgactcttc

SEQ ID NO: 13789 - DNA, 1903 bp, Homo sapiens
aatcaattccttggactcacagccatgcagataagccctggccatctcagcagccaccgcacaacccccctaatgaaagacacgccctcctcccctctggtcacgtaagagaacatcttccagctgcctttttcacacccactccagccctctgccccagttttctcctcctcactagtctgtggctttagtagttcctttgcttgtaattatgggatgggatccaggcatagggaactagttgtttcatagctcccagtcaaaaagaaagtgagagaagctgttgggcagcgaacctactgtttaaaatcaggataaccacattaagcccaatatgccagttggcaccagatgctgtggacttggaatgaggccaacagggttcaccaggatgagagaggagagaggaatccacaggaccaccagaagggagagggaaccagatatgcagatcagagatagaggaagtggaaccagagagctgggagggaccaaggttgtaaggatggctaagtcccaccataagagctaaagggtcctgggagatgatggctcatttccacccaaccccaggatttccacagcacacacccacaggcctggacctgggatgaagatgaatgaagaacatggactcatgtggatgtggtttggctcagatgtccctgcaataaacaaggggtcagtacttagtccctgagtgtggttgaggtttgaggtcctggtcgagcagggcagtactggaccaggtctacgtcagcattcaggttcaatggggacaccagtggcttcaaacttcctgatctaattatgtttttagacacttagaagttattgaggactttaaagagcttttgtttatttgggttaatatttatgacatttgacattgaaacaaaaatttaaaatgttatcttttaatttatgttaaaatagcattaataaatcagttataggttaatgtagataggatgttttgtgaaaaagcaatctattgtgtccaaataaaaaaacaaaaagtgtgacactggttaactttttccagatctcatgtctggcttaataagagatatttgtattatcatatctgcctttgtattaaacctattggtatatcataggtcatgttagctcaaaaaaactttactgcacactactgagagaatgagatgaaaaacgattaatgtttcattattattattgtgaaaatattattaacactggggactccttaagagtacatcagagttctctctaggaatcccaaaaccacattttgaaactagaatagtggatcctggaagttaatccatgtgctggttaattttagatgtcaacctgactggattaaggaatacctagacagctggtacaacattatttctgggtgtgtctgtgagtgtgtttccagaagagattggcaagtgagtcagtgggaaattctctccttctgttggctgggtgcccaatacaacaaaaaggcagaggaaaggcaaattcttctctcctctggagctgagacactcttcttcttctgcccttggacatcagaactcctggctctccggcctttgaacttcaggacttgtaccaggaggccctgggttctcaggcctttggctttggactgagagttacacaatcagcttccctggttctgaggctttcagacttaaactgagccatgctaccagcatcccagggtctccagcctacagatgagctgttgtgcgatttcttagcctccataatcacatgagccaatctccttaataaatgcctgctcatagatctgtatctacatctatatctgtatgtgcatctatatctatgcctatatctatatctatatcatattgattttgtctctctggagaaccctgactaataaaatgaggcatct

SEQ ID NO: 13790 - DNA, 1522 bp, Homo sapiens
aaagaagaagagagttcctccaattctgaccgagtgctgatcattccctagagacaccagtaaccccgggcttagctaacgaaagtggggagcctcaggctgaagtaacttttctctgcttctccctgcccagctcagagctgagggcctccccctccacagcaaccaatcacaaccataaagctacaagcacgcactgaagcactttactgatactcattcaattattcatatgacagttgtttgagtttggtaccatcttattttccccttatacagataaggaaactggggtgcagaaaagtgaattgactacaaagtagacatgactagttaacaacacagctgggatctaaacagcaataactaacattaatggagaacttaaaatgctctgagtgctgtgttatgagctttggtggatgtcactcctttaatcctcgcaacaccctgtcgggtagtctcatttagcaagtatggaagttgaggcagggcaacattaagcaacttacataactcatgcagtaatttctgcagttgggagatgttcagcttcagtccccggccctatggccgttcttttccaccctgtttcttcccccataggaagaacccacctgtagccctgaggttcttttcccaggatggctccaggataaggatcactgtaggtggttgtggagttgacacccctgttgactccttcccagctgattgtcagagccttagacccagcacgccttggattagctctgcagagtgtcttggttgagagaataacctcaccgtacccacatgacacgtgatttggaaagagactagaggccacacttgataaatcatggggaacagatgtgttccacccaacaaatgtgataagtgatcatgcagccagagccagccttccttcaatcaaggtttccaggcagagcaaataccctagagattctctgtgatataggaaatttggatgaagggagctagaagaaatacagggatttttttttttttttaagatggagtcttactctgttgctaggctggagtgcagtggtgcgatctcagctccctgcaacctccacctcctgggttcaaacaattctcctgcctcagcctcccgagtactgggaatataggtgcacgccaccacacccaacaaatttttgtacttttagtacagatgagggttcactatgttggccaggatggtctcgatctcttgacctcatgatccacccacctcggtctcccaaagtgctgggattacaggcttgagccaccgggtgaccggcttacagggatatttttaatcccgttatggactctgtctccaggagaggggtctatccacccctgctcattggtggatgttaaaccaatattcctttcaactgctgcctgctagggaaaaactactcctcattatcatcattattattgctctccactgtatcccctctacctggcatgtgcttgtcaagttctagttgttcaataaatttgttaataatgctgactcttc

SEQ ID NO: 13791 - DNA, 1003 bp, Homo sapiens
tattcattccattattccatatgacagttgttttgagtttcgtaccaccttattgtccccttatacagataaggaaactggggtgcagaaaggtgaattaactttacaaagtagacatgacaagtgaacagcagagctgggatctaaacagcaataactaacattaacagagaatttaaaatgttcttagtgctgtgttataagctttggtggatgtcactcctttaatcctcacaacaccctgtcgggtagtcatattttgcaagtatggaagctgaggcagggcaacatgaagtaacttacataactcatacagtaatttgtgcagttgggagatgttcagccttagtccctggctaattgcctgttcttttccagcctgattttttttcccacaggaagagcccacatgtagccctgaggtttccttcccaggacagctgcagggtagagatcattttaagtgcttgtggagttgacatccctattgactctttcccagctgatatcagagacttagacccagcactccttggattagctctgcagagtgtcttggttgagagaataacctcatagtaccaacatgacatgtgacttggaaagagactagaggccacacttgataaatcatggggcacagatatgttcccacccaacaaatgtgataagtgattgtgcagccagagccagccttccttcaatcaaggtttccaggcagagcaaataccctagagattctctgtgatataggaaatttggatcaaggaagctaaaagaattacagggatgtttttaatcccactatggactcagtctcctggaaataggtctgtccactcctggtcattggtggatgttaaacccatattcctttcaactgctgcctgctagggaaaactgctcctcattatcatcactattattgctcaccactgtatcccctctacttggcaagtggttgtcaagttctagttgttcaataaatgtgttaataatgctt

SEQ ID NO: 13792 - DNA, 1896 bp, Homo sapiens
gagaactgcttctgtctctggagagacagaagtgcagcttcagtaattctcagtgtgtgagctgcctaggatcagagagccttcatggaagtggccactacgtggggatcccttcagagatatctgagacctctctggggatcaggaaccacacaatccccagggttcctgagaccccaggcctaaacctgagacttcctctgcagttgatgtggtcctggatccagacaccgctcatcccgatctcttcctgtcagaggaccggagaagtgtgagaaggtgccccttcaggcacctaggggagagcgtgcctgacaacccagagagattcgacagtcagccttgtgtcctaggccgggagagcttcgcttcagggaaacattactgggaggtggaggtggaaaacgtgattgagtggactgtgggggtctgtagagacagtgttgagaggaaaggggaggtcctgctgattcctcagaatggcttctggaccttggagatgcataaagggcaataccgggccgtgtcctcccctgataggattctccctttgaaggagtccctttgccgggtgggcgtcttcctggactatgaagctggagatgtctccttctacaacatgagggacagatcgcacatctacacatgtccccgttcagccttttccgtgcctgtgaggcccttcttcaggttggggtgtgaggacagccccatcttcatctgccctgcactcacaggagccaatggggtcacggtgcctgaagagggcctgacacttcacagagtggggacccaccagagcctatagaatcaattccttggtctcacagccatgtagacaagccctggtcatctcagcagccaccgcacaacacccctggtggaagacacgccctcctcccctctggtcacacaagagaacatcttccagctgcctctttcacacccactacagacctcagccccagttttctcctcctcactaggctgtgtttttagtagttcctttgcttgtaactatgggatgggatccaggcatagggaactagttgttacacagctcccagccaagaagaaagtgtgagaagttgatgggcagcaaacctgctgtttaacatcagggtgaccacattaagcccagtattccagttggcaccagaagatatggacttggaatgaggcctacagggttcaccaggatgtaagaggagagaggaatccacaggaccaccagagaggagagggaaccagatatgcagatcagagatagaggaagtggaaccagagagctgggagggaccaaggttgtaagggtggctaagtcccaccataacagctaaggggacctgggagatgatggctcatttccacccagccccaggatttccagagcgcacatccacaggcctggacctgggatgaagatgaatgaagaacatggatgcacgtggatgtagtttggctcaggtgtccctgcagttggcaaggagtcagtactcagtccctgagtgtggctgaaatttgaggtcctggctgagccaaggagtaatggaccagatctacctcagtattcaagttcagtggggacaccagtggcttcaaacttcctggtttcatgatatcttgagacgccttacaaatgatggaggattccaaagagtttttgtttatttgggttaatatttgttggtatttatggcatttgagattgaaactaagaaatgttttaatttattacctttacaacatttatttacattacatacatacatttacaacatttattaatttatattaaaatagcatgaataagccaattataggttaatataagtagaatgtttgtgaaaaataagtatggtatccaaagcaaaataaattttattgtgaagtgtg

SEQ ID NO: 13793 - DNA, 1248 bp, Homo sapiens
ggaatatctcagctcatctgttttcctttcctctaacccctctcctccatagccttctgaggcttcacctgctagctttacccagtctgtttcttcctgttgggtggcaattaattaatcctgtgaaggttacattgctgctgctagagagggtggggattgcaccttccaaatctgtttctgtaccaatatttgggggatggaggggtgactcaaactgcttctagtgttctcctaatcccttaagactagaacctataggaaactacttggagcaaactcaaaggacagattagggatcgagattgggtcaggttagcatggggttgtggttgaaatatcttggtatccaggataagggtatgtggaaaaacaggctttaggcaagtggaaaattcaaaatgtgctgtgaaaggacaatctcaggctgaaatcccataaaggaacttggagggaatattatgatggagggaagtgaggtgaatccaggcacatgatgaacacctggctcatccatagagttttcacagcctatatcgcaaattttctaagccacgtcctataggacagaggagactggccccacttctatgggtctgagctgtggaaaagggagagcagagaggaactgagatgagcagggatgaagggtcaggcagaaagcgtgatagaggagagaatttttgacaaaactcaaaagttgtttgcacagctgttctttgtaccctgttcctttctctgcgccctcctgtttctcccttgcctggaagtcattccaccctcaatttgttgatccacaagtttccagttgtcctcttctttttgttatagcatctctctatttcaaagacattcctagaagtcatccttcagtgatatcaccacttgctcagtcaccatctcaaccttatgtcacctcagccctcatctcaatgcccaaaccccttacacacaccttcagttagcttcaactgcctccgtttccacactgtgcacctttcactttccctacccagctttcctacatgctgcctctcctcagggtcccctgaatgctgcatcattgtgttcagtgcagctggactgattgcacctgtgtatttgcccctgagcactttcctttacacatgtggcttgtcttgccaatagactccaggcttataccttccatttccatcgtattctccagtttccaggatagacgttgctcatcgtctttacctaataaataagtttgtctgattgctg

SEQ ID NO: 13794 - DNA, 1455 bp, Homo sapiens
aatgtacatttttgagagctctgtacttatagtgactctactgtttgaaatactatttttttaaatcaagttttataaaagtgtagaattttggcttttttaagttatgttgttagcacacaggacacttccttgttgtcttttgtggaaagggcaagtaccactaatagggtgtatctcagaaactgaattgaaataagggaaaataggattttctgtcctggtttttgaagattgttcttgattcccttgattcccaggagagattctctgacattcacgtgtcagccactttggcacggaagccttacagtgtggggaaccaaaacttcgtgtctcccctttccccgatgccatcagcatagacttgacttccttaaaccgagagttttgatgtggccttggcaaccctaaaatcagctgtgttaggtaacaaaactcaggctttctgttgatgacatcgagatggtgtcacttaaaagagccaagattcctgttttcagtttgtggattcatcctgctggttttactttagtccctccatgtcaaagtgggcctgagaaaagctcatacatgcctcatgtgaagtgtccaccctctctgaaaatctttcttgttcaaaacagcaacgacatatcttgttaacttttacggtgacttttggaggaggggagtttggaaattgtaaaatgttatagattgttgcctatttcctgctgaaagtaaatgtttttaaaaagtatcatataaagctgaatacaaattggtttggggggagatcctttcctacccaaagtcataaatatattctttactgccttgtggaaattttatagttttgcctttcacatttgtctttagtctgtcctgaactgatttttgtgaaaattatgagttagaaattcaacttaacatttttcatattcgaagtggttgtctctgcactatttactgaaaagttcatcctttccccagtgatttgtaacactgcctctttcataaattaaatttttgtgtatgtgtgtgggtcttttgatggtttctattctgactgacatcaatttgtctaatcttgtagcagtacagtacagtcctgattattgcaactttaggaaaaggtctgataaaaaccaagatgcctccacattttgtcataattgtaaccaatttcacctctgtctccagtatcaccacaaaattgttcttccttggagtgtcttggctattcttagccaactgttcctccatattacttctagaattagaccaacaatttataaatcaaacaaacccaagagcattgaaattttgattggatttgtattgaatttatagattaatctggtaaaccatgtcatctttacaatgttgtcttccaatacatgaatatggtacagctcttcatttacttaggcctttgaaatatctttcaataaagtttataattttctccat

SEQ ID NO: 13795 - DNA, 1402 bp, Homo sapiens
gggcctgggtggccccttccatttcctggccctgctctgcttcctgtctacctcatactagaatgatcgtgactacccgggcagacattttactgtgtttctcagaccaagtgtctactgatggcccaaacatggagttttgtgggcttccactgtccccactccgaactcctgtatgtgcctggctgagtcacctaattcatactgtcatactagcataattatgactattgcatatgcttgttttgtttgactcttggctgcctacgtctgtagggtcccctgaaaatcccacttcctgcccccagaaagggcctttatttccaactaggaggataatgcctagtccaggcaatctttctctgtttagcagtcacaggtgagggtggtattagcatcttttttatgtagaaaaaattgagttaatggggtggactgggttgggaagaaatacatttcctaatgtatttatagaaaataaaaatatttttatgtgcctttttatttttgttggtggggaggtcattggacaagttccaactttcatcttgtgttcccttcaccttcatatcctgatcttagagcccccctccccctgccacccaccttactgtttaacctggatttttttttctatttaatttttgtctaatatcttagcccagtttatcaatcagttatcttaagtcagcattttctaagccattgtttgaggaaacagtgacaataggtaataacacatcttagtattaagagttttacaggccactagtataagataggcatcgtggtagatgcatataaagggtggaatgggagccatggcaggtcatagagtcctctcaatgggaacctgattgatgatcacagtcttcagtggtgagtcagtcctcaccaagttttccagatcattcctacaaagtaaactgggagaataataagtctgaaagagtgtggagtgctcccacaattacaaagaatgcttcctgggtggagtgttgagttggaaccattgtaaaggtgggcaaagcctagtagagaaccagtgcacctcaggtgcacttacatatggtggggctgaggcaaagcagccctgtaggcttcaaagaatcagtgtaagccactaaaaggaactgaaaacctaggtgtcacaataaacagtctacacagtctcacgtagaccaaaattctgatcattttccaggctgttgcatgaagtgatagagtatgattataatttctgtttgcttgtgctgtttgtttttgtttttcatctgtcaatgtgatgatctgtgttttatagggtagagtggatttgtctactttggctgtaaaataccctaatcacattatgatcttgacaggtgcactttactggggagaataaaaaggaccatacggt

SEQ ID NO: 13796 - DNA, 1827 bp, Homo sapiens
ctatctgtactagtttgtggcagctcaagtaaaatcgagtccaaaccaacggctcttttcagggccacccacgtcttctctaaaagaacttaacatttattccatgtgaaagaaagtgagacatggacaagactctagtcataaattacccatctttttgaaaacagtgtagcgaacaccgcagatttaaaagaaaaactagagggaaggtggtccagattttaccacgcttaaaagttaagatgtgaacaaatctcttaggccattacttaattttaaacttaatcagtgtgtgtccacagagcaccagtggcttcgtgagttcttgaagcactttggcccaaaagagttatcgcccgggctagaatttagcagacagctgttccacgcgggccagggcggcatgaagaagtcccgccgctacgtgcccggcacagtggccctgcgcgacgttcggcgctaccagaactccgagctgctgatcagcaagctgccgctcctgcgagagctcggcggtgacgccgctgcacgagagcgaggctgaagaactttgtgacacaatagtccacctccctgcaaaggctctgtcagagactcacatctttcctgatggatagctgtgaagcattctcttacccaccctactgcatgttgcaaagtattcctttaaaatgaagtgagtaaaatactgggatgacgttatctggagcccaagaaagatggctcatttggaaaggcctaatatcccaagttgcttacctagaagaacttgacaggatagttaataataaaccttaaaacccatgaagaaatctgaggtaaagtgttagcacacagactgttaaaatgtctgcctcacagataggagggaaaatatatagaggattataatatggttcaacaaatgttgatgagtattagaaatgtacattagaaatattagaaatgtttatgactattagaaaagtacagggtattgggcgttcctgacacaaactgaggcctcctagcaagactggcagttttctgtaaaggagggttatttactacggtagtgcaaataacttttggtgttgtagctaaataaggaatactcatgccaagattgcacaattgtgcctcctccctctgttcactgaactctgatgtaattttttttttttttttgagacggagtctcgctctgtcgcccaggctggagtgcagtggcgctatctcggctcactgcaagctccgcctcccgggttcacgccattctcctgcctcagcctcctgagtagctggggctacaggcgtctgccaccatgcccagctacttttttgtatttttagtagatacggggtttcaccgtgttagccaggatggtcttgatgtcctgacctcgtgatccaccggcctcggcctcccaaagtgctgggattaccggcgtaagccaccacgcccggcccactctgaagtaatcttaagaagacgttaactcatttttcttgtgtattgtagacacttttggctgtctggtaacatggaaaatctcagaatgatgttttaagtatataaaatgccaaacaaagttaaattacagttatcaaagtatttttaaaacttcatagtgataaatgagactatatagttatattgttaatatagttaacacattacatgatttggtgagcctaattgctgttactaattagaggagtaaaaatgtttcacgataactcagcaattgtaatgagaaatgaaacatctaatgtcttttgggttacaaagtaacaggtactgagatttgtggcctaaattcataataaagtgaaatgttcaagttc

SEQ ID NO: 13797 - DNA, 58 bp, Homo sapiens
atggcattttgaagcccagtcattctctaaaaaggccctttttagggcccctaagctt

SEQ ID NO: 13798 - DNA, 51 bp, Homo sapiens
ggagcgaggttgtgaaaactggaaaacaaaggctcttttcagagccattct

SEQ ID NO: 13799 - DNA, 1155 bp, Homo sapiens
atctcataccctttccactccctgcatggtcacctcagtcctggacatacttgttcactgaacaaaagaaagcagcttgttttgaaagaagaaactcccaggaattggaattcagcacctgttccgcacgtaattggcatgtgtctgcaaacatccttattcccaacttaaagtgctttattgcagagagttatggaaatataagtggatgattattctcattgtaaatattggtattttgaatgttaaatgtcaaacaaatgtgacttatgctggtgccctcgccctgctgatcagattctggttcaaattctgccactccagctcctgggttaggggctttgctgtaagtttctttttctggactttagatcctgaacctgtccttgcttctcagtttctctcactgtacccctttccctcagtctcttcctctctctttcccctgtcactatttgtctttctaatctccttctgtttctctgaatatcttcatttctatctctgtgtttctgtctatttctctgtttatctttctgtccttcaatctgtgtttttgtttctggctctccgtcagtgtctttttctctcctctctctcttgctctgccatggctatttccactgctctatttctgactctcatttttggtctctgtgtgtctcctagtcactttctttctcactctgtctctgtctctatttctgtctctcctctgctgtgtcctcaatctctctgtctccctgaggctctatttctgtctctcctctgctgtgtcctcaatctctctgtctccctgaggctctatttctgtctctgatgctcttcttctgtgtctctatttctcttcctgtcacttaatcttttccttctctatctctcttatttagtcttccttccacacccttcactcaccatcttttcccacaatcaaatatcactccctggtacttccagcttccaactctagggattcatgattctggtggagattccttcttccagggcctgggaggatagggctaatcccaagggtgcctgcttaggctatgttagctgtgacaggaacctgccatagatttgcactgttctttcctaaagatcaattattttcagcaataaatacttctcagctttttgtatgtctttgtatgc

SEQ ID NO: 13800 - DNA, 64 bp, Homo sapiens
aagcctggattagtttgcagcaactcaatcccaaaggaaccaaaggctcttttcagagccacct

SEQ ID NO: 13801 - DNA, 51 bp, Homo sapiens
gtctcaaggactcactgattacatacccaaaggctcttttcagagccaccc

SEQ ID NO: 13802 - DNA, 64 bp, Homo sapiens
gcctctcgctgcagtaacagttccgccgtgacccacaccccaaaggctcttttcagagccgtcc

SEQ ID NO: 13803 - DNA, 43 bp, Homo sapiens
gcgtccctttctatcaataaaaggcccttttcagggccaccct

SEQ ID NO: 13804 - DNA, 67 bp, Homo sapiens
gcccgcccaccgcggaacgttcggtcagtctcggcccacaccccaaaggctcttttcagagccactc

SEQ ID NO: 13805 - DNA, 50 bp, Homo sapiens
tgtctccatagaatcactttccaatacaacggctcttttcagagccacct

SEQ ID NO: 13806 - DNA, 48 bp, Homo sapiens
gctctcgcagctgccagcaatccaaaggctcttttcagagccactcac

SEQ ID NO: 13807 - DNA, 90 bp, Homo sapiens
ggaacttaaatttgtaagtaaatgctgaggaaatggcacaatatgaaaaatattaaataaaaaataaatattgggcaagatggaagactg

SEQ ID NO: 13808 - DNA, 126 bp, Homo sapiens
tatagcagtaatatcaaaagttctttggacactcaggcctaactagttatcaaagaatctattttagaaaccttgagtttcctcaatgtggtcaaagcttcagtcatcattaaacttctctggacc

SEQ ID NO: 13809 - DNA, 3441 bp, Homo sapiens
gaacaacatcagttagagtttgagcattattcagcattagggaaaccacacactggtgagaggtctttcagtgtactaaaaggcagaaaggtcatcacaactttagtgtcagaatctatagtggtggcaaagttaggatagctctttagtaatttgggcccagtgccttggtgaaggttgattagcttgactgtctttgaaagtatctgatggagctcctgatgacctaatgtatcctttagaaatttaaaatagcattagagcaagttgcttgtcatggcttgaagagcttaactttgtcttttgggtgagtagctataggtttgagagaggctggctactcctagttcctgtgcttcttcccatctcctgtgatccccctctcccatttattcccttgaaggtgcccttgtattcctaatctgatctaagaagctgctgtagagtcagaagtagcttctgtgtgaaacttatatttgtatgtagctttctaggaaaattttacagacacttaaagtatttatgcttaagtgtgcatttttttattctaatattccttctagtcagtggaaatttgtattcccatacaaactcagaatgctatatttttaacagcactccagcatttttcttcatgtatcaccttcactgactccattgagtcattgagcatctgtacatatccttcaccacccccagtcccagcacctgtgtcagtaaagaaagtggacacattagtaatggttatgggagtaatacagagaaagaggtgagtggagactcagcccagctgctcttgagcttggatagttatacattttggtgacttctgactctccttccacctccccactgtacactgtggtacagatagttggcactatcctagttatggcatcaggtaggagaaggagacgaagatgctttaggaagataaaaaccttacaaagaatgtatactcatcttttttggcccattacaatactgctttctcaggttcttaacagcctgtgcaaactccctgactagatggtctgtcactcctatcattaccttgcacccatctctttagatggcctcagcacctcactcgttattctccatctgtttcttgccattagtttatatgactttaatatccacagtggtaatctaataccttacctcacaggttttcattcttttgaactctggtgcactccatctgtaatccatgtctataatctaccaacaaagatgtactcttaaactcagtatcaccaggcactatatttcatctttgaggcttttgttataccaaggaatactatataaagtaatgagactggtttaaagtaacatgccagaacttacgcatccaatgtgggttgtcacttgttattcccaagtactattattccatactactatattcttccaaatatttggaacactcttagaattcccatttaataaaccatatgagaaaaccctctattactcttacactttagttttaccatttgagtagccacttattcaccagagttggaattgagaaattttgggctttccaaaattaacctttaaacttaaaattgattacattgagcctattcagaaaaaaaattatataggttctgatgaaagcttcataatttcaccctgtgactatcctgaaaagaaataataatcattttatgattgatgggccaaaaaaagcaatcaaagtcttacgtcatagaggaccaccttttggatcataaattctttccctataacattccttctctgcctctctatggcccactttgaccactaacaacatcagaattatctacatcaatttcattgagccattggtgaatgaagacacccatcacttgtcatgttggtttccaacagtcctttcgattatcctttattttcttatcctcccttctcttgtttcttttatttataagttaccattcctagtttctttgtacttgaaattttaagaaaccagaaacaagtaaatctggttgtatctagatctttgctctgtgtttcagttgtgccttaccctctgtaagatactgattcttcctggggccagtattaccttgtatgcaaatattacatatgatgggtgcattgtcagagggaaaatatatgtgtatgtacacatgtgtatgtacacacacacacacacctgccatacactttagaagaacgcttctcttctattccaataaaaagtccttttagcaatgcaacatattaacaaaattgggtgcattcagggtggtatggccatagaccagagcaacacattgaaatgtatacagatgtactagctaaagtctctttatgtgtcagtattaagagtaatatgtagccagattacttaaatctcagaattactaagcatgtggcataaatttggagaaaataatatgactagaaaaattagtgttatattgggtgtgagaaaagactgtgtcttgaaagaattatcaaagctgatacagcacatatacagaattagccaaatggtataagacaatagaaaaaggctgtggattctttgaggacatcactagaaatcattctttgtctcaagttcacactcttagcatagaatattattgactaggctgtatgacattttgagctcttaactgtgaatggcattcattaagctcctttatcctatagattctatctttatgttcatctgaaatgaactattcatcagtactttctcctcccatcctaagcttctcattttaggaactgacatgataaggtggttctttcataactctaatgccatccaacatagccctgggagaggcatgttaggtttcagagattttctccatggagcaaggtgcagtgctagaatatggtggttgattcccaaacagagcagttaactttactcttggttctgagtctccaaataataatagccgacgtttattgagcacttactatgtgcccaaccctgttatgcctttctcaggctcatgataaatgtattagtctgttctcatgctgctattaaagacatacctgacactgggtaatttataaaggaaagaggtttaatggactcagttccacatggctggggacgcctcacaatcatggtggaaggcaaggaggagcaaatcatgtcttatacatggatggcagcaggcaaagagagaacttgtgcaggggaactctttataaaaccgtccgatcttgtgagacttattcactatcacaagaacagcacaggaaagttctgcccccgtgattcaattacctcccacttggtcccacccacgacacgtgggaattgtgggagctacaattcaagatgagatttggatgggacacagccaaaccatatcaataggtattattttatcccccattttataaatgaggaaacggaggcttagttgagtgagctgaccaatatcaccc

SEQ ID NO: 13810 - DNA, 304 bp, Homo sapiens
ggcttggctatgagcaagttttccagatcaccacccaagttgtgtggggcaggttgagactagaaaatgcctctttcttcctttctccatgaaatgtgtttgaaacaaatcctgacttaaggcccagggacttccttaaaggaaagttgggtgtttgaagctactgttttctcttttgttcattttacctctttcttactcttactagctgtgtccctcttatttataatttatttatttttttgagatggctgctaaacccttctaataatataataaatggcactgccacagccaacatgcc

SEQ ID NO: 13811 - DNA, 377 bp, Homo sapiens
ggacttacttgttgcacagcaggaattttaacaacaaaaattttatgtgaccaaaagtgttaaaaggctttacagtgctactgtacttaccatattagtaagtccctcaggaaaaagcttcttttgagatatctttagcagcttattttttgttattttaactttaaaaagtaatatgtgcacatggttttaaaaatattcaaccattataggaggagagttagtaaaaagtgaatctttcactttagcccctgacacctttcccccaaaaatatatattttggtgtcttatatacagaatatacattctgtgcatatacaagagtatatgttgcagcataaagattaaaagctattaaagttttttttcgctcgtt

SEQ ID NO: 13812 - DNA, 1105 bp, Homo sapiens
tgaggtgttctctccttgtagaacatcagagaaggcacattgactagcaaacagcactttaggaaaagtcaccgtagcccactgtggcatcagaaaattcttgggggctgagttggaggctccctgcctctattctctctcctttgctttccttgaagtcagctttggaccacaataatttcactgtagatgatatgctaggatcaaagttaaacagcattcttcactgcaggacatctcagagcatgtaacataactgcatgattatatactctaagcaatagagagcttcatgactgagtaagagttttgaagtcagcagtgaatcaagtgcccacagatttgcaggcttaagcagaacaagggaagattgatatttttggatatgctatagcagctttctcctatgaaataaaactgatgatgtttggaagtatactactctcaaaggtgtctttaaagtacaggttaatggtgaacattttcccccagtggcttcacctcattcctcccactggccttaccccttccttccccagtggaagcattttcaaaagcaaagataattttcgctggtgaacttcagaacttgccttcagggttagcttcatgtaattttaccatttcccatccccattccccaccacattatgtcaagattcaagttataaattaacgttttacttagactttgaaagagatttcatgagtaatttgaatgaaccttgctgaattaatctgaatagcaactgtctgacttgataactccagtgccagtatagtggctgctgcatagacactattcagtaaatgtctgatgaaagaaattggactttttccctttaatactgatgatgcaattttgaaatgttgcttgttctggaatacttcggaagttaaacaataaagtcagcttggagaggagatcatgatctttatactgtgaatagcagaatgtcacagatgaagaatattaaaattaggggcgtccactccaaaacatatcaccagagtgacaacttcagccctcagcctctgcaatccatatatatcctggtcttgggagtccatagaatactgtttccttctaataaaggtttcaaac

SEQ ID NO: 13813 - DNA, 264 bp, Homo sapiens
ggtacataaaatggacatagtgcagacattaataagacatagaaaaataataattatacatgctgttgtaccctcccaaagtaaatctgatatatgtaatgaagttattaaataatacttttaaaaatcagacatttatatagagtttcaaagactattgtaacaagtaatgttaaaaattgtctgtgagaatgttgaactgtagtacctttctctatgtcaagttttgtgtcagacatgggaaatcatgtatttgttcaattg

SEQ ID NO: 13814 - DNA, 461 bp, Homo sapiens
cccatgccatacatgccagagttggtgctcatttgtcactgatctgaagccactccccctggagtctcaactatagaaattgtgggctgggctttatttaccactacacattatcaggtgttagaaaatgtagactgggttagacaaattatcttctaagttctagaaggggtttgtaatcaaaacatatttgataggaggctacgggagagttgtctagaagaggtaagacctgaaactgtttgttctctcccactagaattaaatggatgtttagactggctacttgccctaaaccagcacttggtgatgtctactgggtggatggttgtgatttgggggctgcttctctgaccattctttttgactgtaatgaatcctccacagttggtcagattcataaagtcttatatccccctctgtgccttttctgcaggtgctaataaatgtttattgaatgt

SEQ ID NO: 13815 - DNA, 207 bp, Homo sapiens
cactcctgtcctcatccctctgagattttgggcacattcaaatctatatcctgggaccctgtaaaggtccatgacatccgttggaactttgaaaagttcctggtggggcctgatggaatccctgtcatgcgctggtcccaccgggctacggtcagctcagtcaagacagacatcctggcgtacttgaagcaattcaaaaccaaatag

SEQ ID NO: 13816 - DNA, 1600 bp, Homo sapiens
tatactttcgaaagtaagaagagtttcttcaagatttatgaacatgttaagttttccagactactacccttcccacatacacctgagccactgtggtgggtcacagtgtggctatgttatctatgagagggagaatgagaaagagagggacagagagataaaagaaattgggtgagaggagataggtagctccataaggcacacaaattcaaatattatcattcctatcactgtccattcttaatatttctatcctccattctgttctttttactgtcatcacttctatagatttcctaactccaccatgcctatttctggttatataattgctctccaattgtcatgtcagtgtaggggaactactccatcatagcattctggacaccttgcatgtatctacgtaggtcatgtaagcaaaggcttgaagaacagctaatctgagatttagaagaatgctttttgatcctcctggaatatgagaggatgggaggccctttagaacctgcctcaatgccatctctcactctccttcttatatccctgggagtatgtcatgtgacaagtctttactgtctcccaggttttggatggagcatggggttttctgccccacaccctttaggatatagctgaagaatataatgaggaatagctggattctagaactgactcctcaccagtggtatattccacaacagtgtcacagtcgtctggcccctttggtttccgtgtcatcctttttggtgtgtaggacaaggagccagggaattggcacgtttggcttttacttcttttttatatgtaaataataagccatctaagtgtaaaagtggctcatatcttctccagccaaatcagctaggccatggccttgccttgcttctcatgagtgtgcttgacagtcatcaccgtcactctatcttcatttctggttcttaccgtgttagcttagttcattcaagctactatcacaagctacacataaattgggtggtttataaataacaaacatttctttcttacagttctggaggctggaaactccaagattaaggcagatttcatgcctattgagggcctgctttctgattatagaaggtgacttcttgctgtgcccacacatggtgaaagggactaccaactctctggagtctcttttatgagggcactaattccaattatgaagcctcttccctcatgacctaatcactgcccaaaggccccatgttctaatgccatcatcttggtggtttaggatttcaacatatgaattttggaaggacataagcattcaaccccctgcacatgtcttctttcctacttcctcaaggttctttctgtccagttgctccttcttctattgacccttttttgccttctctttctccttcactgcctcaagttacagccagaggaaaggaggaactaaaacttagcaaatctataatcacatgcaaatacacagaatggattgttacaaccaaaatgcaggctctattgttttcaatttagcagcctttcaaatgtatatggttctggccacattaaagttgcaaataacactttttttgagactgaaataaaggtgaaatattgg

SEQ ID NO: 13817 - DNA, 85 bp, Homo sapiens
gggagagctgcttaatgtgctttaaaagagaggagattctatgtgcttttatcagaaagtttgagttccctgcccctctgccttc

SEQ ID NO: 13818 - DNA, 1185 bp, Homo sapiens
gtgatgtcacatcttggcaggggtggaggagagcctggttgcccagggatttgtccttggggacatctcatccatcaagttgcacactcactggcatctttgctatggggacattccaatttgcactttcaggaacactctgaattccaagtagaattgatttcccttcttctgtcatctaccttttctcttcattttcccatttttattacccttctttccatttctctctccagtcttccacctggaagccctctctggctaaggacaggcaggtgcccctctctccatcagaggacacctgtactggagagcaacacaggatggtctctgccatgaactggaggccaggaatctcctcactgaaaattacagtatggtaactttgcaaatggtggttgtttcttccaagactccagccctgattgcgcaaaactgaaaggcatgtgaagggaaggaagaggaagagtgcaaaacattgaagagagagctgagtgagctgaagagtgaggatatgagtagccccaacccaaacctggagatggggagaaacctacagaatactagccagagctcctccttgtcttggcagcctactagggacctggggaagcaaaaacgaaagctgggcaacatgcctgctttagaatgttttccttctacttacacatcttccacaggtctcagaatctttccttcctctcatccttttctcctatcttcatatctatcagagtatccactgtttattcaacaactactacttgatggtcagacacaaacaaacaagctaggtgctaattaataaagatacgagttttggccgggtgcggtggctcacgcctgtaatcccagcactttgggaggccgaggcgggcgaatcacgaggtcaggagttcaagaccagcctggccaacatggtgaaaccccatctctactaaaaatacaaacaattaactgagcatagtggtgggcacctataataccagctactccggaggctgaggcaggagaatcgcttgaacccaggaggcagaggttgcagtgagctgagatcgtgccactgcactctagccggagtgacagagtaagactctgtctcaaaaataaataaataaataaataaataaataaataaataaataaataaaaaataataatacaagttttcataagcacacttct

SEQ ID NO: 13819 - DNA, 718 bp, Homo sapiens
aaaggagggagctactctcaggctgcaagtaagtatgaaggaggctgatccctgagatccttgggatcttgtgtttgggagcccatgggggagctcacccaccccacaattcctcctctggccacatctcctgtggtctctgaccaggtgctgtttttgttctactctaggcagtgacagtgcccagggctctaatgtgtctctcacggcttgtaaatgtgacaccccggggggcctgatgtgtgtgggttgttgaggggaacaggggacatagctgtgctatgaggtttctttgacttcaatgtattgagcatgtgatgggctgtttaaagtgtcacccctcactgtgactgatatgaatttgttcatgaatatttttctgtagtgtgaaacagctgccctgtgtgggactgagtggcaagtccctttgtgacttcaagaaccctgactcctctttgtgcagagaccagcccacccctgtgcccaccatgaccctcttcctcatgctgaactgcattccttccccaatcacctttcctgttccagaaaaggggctgggatgtctccgtctctgtctcaaatttgtggtccactgagctataacttacttctgtattaaaattagaatctgagtataaatttactttttcaaattatttccaagagagattgatgggttaattaaaggagaagattcctgaaatttgagagacaaaat

SEQ ID NO: 13820 - DNA, 421 bp, Homo sapiens
gacagctgccttgtgtgggactgagaggcaagagttgttcctgcccttccctttgtgacttgaagaaccctgactttgtttctgcaaaggcacctgcatgtgtctgtgttcgtgtaggcataatgtgaggaggtggggagaccaccccacccccatgtccaccatgaccctcttcccacgctgacctgtgctccctccccaatcatctttcctgttccagagaggtggggctgaggtgtctccatctctgtctcaacttcatggtgcactgagctgtaacttcttccttccctattaaaattagaaccttagtataaatttactttctcaaattcttgccatgagaggttgatgagttaattaaaggagaagattcctaaaatttgagagacaaaataaatggaagacatgagaaccttcc

SEQ ID NO: 13821 - DNA, 3524 bp, Homo sapiens
gagatgaattttcaagcccgtgcagcttttaccctatttccagggctctttcttggattgtattttctatcttttccccaacctttttaaaggaactagattctgaaattagcagagaagagggatgccacaagttctcatcttaggtaactttctagtggaactcctcttctgctcagctctcctacccactctcccttccctgagttgtagtaatcctagcactggctctaatgcaaactcatggatctataaagcaaagtctaacttagatttatatttgtttggaaattgggattcatagtcaaagattgttctttcctaagagggaaatataattgcatgctgcagtgtgcagagggttggtgtgaaggagggatgcagggaggaagggagggaggacacacaagcagcactgctgggaaaagcacaggcggcctggatgtcagtgtgaggggaccttgtgctgtcgttgctgcaaaaccgcatttggcctgaggctatgttaataaagatactgcctttagaataggaggtgctctacagtgatgattcattcagccgacatttgctgtctgccagacatatgacagaatgtttttgcatctggggaaagtcattgaagtaaaatcagaaaaatctctagccttgtggagcatgtgttccagtgggaagaggcagacggtacatacactctaatatatgcagagtaaatgaggaaagtgttagaaggtgataagtgctgtggaacaggtgatcagagtatgggttgtgggacagagaaggtagctattgtgccggggttgtcagcgtgggccttgttgggaaggtgacctttgatgaaatatttgaaggacataaaggaatttgtcatgagggtatctggaagaagttttttctagggagtaggaaccttcagtgtcagtgtaccagggcaggatcatgtctgtgtgttctgggaagaacacgggatcgggtatggctagagcagagagtcactgagataaggtcaggggtttggtcagatcatgtgggcatagggctcaagtatgtgggaaggattttgattttgaatgagatagttttaagcagaataaagacatgccacaacttctcttttaaaaggatcactgtagctgctctgctgagaacagaatccaaaggccggcgatgagcaaggcaggtgggaaaactgtaggaaatgagtgcagtatttcaggctggagatgtcggttacttcaactggggtgtgagcagtggaaatagtgggacgtgattggattcctactatttccaatcactttataccgcattttctaatggactaaatctggggtatgagaaagaagagtaaaggataccaaaaatgtcagactgtgactaaaaagagttgccatcagctgagaatgagaagactagcaggagcatatgagaggaggggacgtcgcaggcagtcactatgggagacgtgggatctgagatgccgctgagaaataccagtgaggtagtcgggttggcagttggacagatgaatctggagacatttaggagaaatagacttgggaggtgatgtcatataacagttatttaaagccttgagtctgaatgacgtctccaagggagtgattggctgtagaagagaacaggaacaaggactgaacactaggcctctgttgctaaaggatctgatcagacaacacacctagatcagactgcacagtcctgaccccacatctagaaggtacatagaccagggagttctagactttcctgtggacaggaatcacctggacatcaccttaagtctaagctgatctggaatcgagaatgagatttcctacttatataatgttgctgttggcgctgatgctgctggtcttcagatcccacttttggtagcaagaacacagaccaggattcctaggctatgcatcagcctcgcctgtgaggcttgttaataagcaattcctgcactccatgcgcaacattctgacacaggggcatctgtggagaggcctgagtattctacaacaagcccacagcaaacctggtgctcagccagatttgatatcactgagatcagtagttggagaatgcccaggatggggaggggtctcagacccacatttaagtgttgctttattctgggttttttatttatttatttatttatttttaaggaggatgtgtttctttaattataagacaggatgctgagagataaatgtcattttctctatcatggggtatagccagatggaagattgagaagtggctcacagctcagcagaatgaaaaaatatctgaatgctgctttctgaaactactctccagaatgatttcacactcactccttggagcaaacaatgacttgcaaatttttctaatttaaacataaaggagtgtacatattggtattagtattcattttattttggggaagggcactgtattagtccatagtccgttttcacactgccgataaagacatacccaacattgggaagaaaaagaggtttaattggacttacagttccatttggctggggaggcctcagaatcatggtgggaggcgaaaggcacttcttacatggtggtggcaagagaaaatgaggaagaagcaaatgccaaaacccctgataaacacattggatctcaggagacttattcattatcatgagaatagcatgggaaagactggcccccatgattcaattacctccccctgggtccctcccacaacatgtgggaattctgggagatacaattcaagttgagatttgggtggggacacagccaaaccacattggacacagaaccaggtttgaagctacacagccaggaacataatccacagccaccctaattcagatctctcataggaaccactgtccctgctcctgagcacagatgctactgcatatacctctgataccctgatggccgacactgggccctgtggcaaagactgctatcactgctgctcctgagaactgctccactactgctcctcagccatctttaccaaaatgcagtatttactgtcccagcctctctgtgtcatctcatcctgattagaagcccacatgtggttatctaaattgtgcagccaaagcctcttgcagtgtttaactgcaataatgttggggaaagtgaatttttctcctttgtagaaggaggtagtccctgccttctaataagactcttcaacataggaagagaattcagttgctggaggtagaggggtgagggatggaaaaagaatgacaaatttcaattcctagaatcatgttctgagactagaactttatctagtacattgcaggcacctgggtttggttgagtgtataataaatgacatagttcaacttattcccttgacagtttgttttggggtccagcttttgtctaccccagttttcacacacagatacgtggagaagcattgtgtgatggtaaaatgtttacttgaaagcctttttccctatctttgtctcttgctaggattaaaaacccgtatctgt

SEQ ID NO: 13822 - DNA, 560 bp, Homo sapiens
cctgagacagctgccttgtgtgcgactgagatgcacagctgccttgtgtgcgactgagatgcaggatttcctcacgcctcccctatgtgtcttaggggactctggcttctctttttgcaagggcctctgaatctgtctgtgtccctgttagcacaatgtgaggaggtagagaaacagtccacctctgtgtctaccatgacccccttcctcacactgacctgtgttccttccctgttctcttttctattaaaaataagaacctgggcagagtgcggcagctcatgcctgtaatcccagcacttagggaggccgaggagggcagatcacgaggtcaggagatcgaaaccatcctggctaacacggtgaaaccccgtctctactaaaaaatacaaaaaattagctgggcgcagaggcacgggcctgtagtcccagctactcaggaggcggaggcaggagaatggcgtcaacccgggaggcggaggttgcagtgagccaggattgtgcgactgcactccagcctgggtgacagggtgaaacgccatctcaaaaaataaaaattg

SEQ ID NO: 13823 - DNA, 829 bp, Homo sapiens
gctttccttcccagaagtctcccgagagacatatttgtgtggcctagaagtcctctgtggtctcccctcctctgaagactgcctctggcctgcagctgacctggcaaccattcaggcacatgaaggtggagtgtgaccttgatgtgaccgggatcccactctgattgcatccatttctctgaaagacttgtttgttctgcttctcttcatataactgagctggccttatccttggcatccccctaaacaaacaagaggtgaccaccttattgtgaggttccatccagccaagtttatgtggcctattgtctcaggactctcatcactcagaagcctgcctctgatttaccctacagcttcaggcccagctgccccccagtctttgggtggtgctgttcttttctggtggatttaatgctgactcactggtacaaacagctgttgaagctcagagctggaggtgagcttctgaggcctttgccattatccagcccaagatttggtgcctgcagcctcttgtctggttgaggacttggggcaggaaaggaatgctgctgaacttgaatttccctttacaaggggaagaaataaaggaaaggagttgctgccgacctgtcactgtttggagattgatgggagttggaactgttctcagtcttgatttgctttattcagttttctagcagcttttaatagtcccctcttccccactaaatggatcttgtttgcagtcttgctgacagtgtttgctgtttaaggatcataggattcctttcccccaacccttcacgcaaggaaaaagcaaagtgattcataccttctatcttgg

SEQ ID NO: 13824 - DNA, 119 bp, Homo sapiens
gacagcttccttgtgtgggactgagaagcaagatatcaatgtagcagaattgcacttgtgcctcacgaacatacataaattttaaaaataaagaataaaaatatatctttttatagata

SEQ ID NO: 13825 - DNA, 175 bp, Homo sapiens
aataaacttggattttggccaggcgcggtggctcaggcctgtaatcccagctctggaagctgaaggatagcttgagcccaggagttcgaggctgcagtgagctatgatctcaccactacactccagcctgggtgacagcaagagatcttgtctcagaaataaataaataaaattt

SEQ ID NO: 13826 - DNA, 212 bp, Homo sapiens
cctttttcctgggcaactctacagtccctccctcctttcggaaggtgaaggatactgggtttttagatgccttgtccatcctgtctggttgcaatgttttgctcccagaagagaatcagatcatcatgtggggattaccattgttcctggagtactcctacccttagttgaatttccttattaaagttatatttttctataagaccctgaca

SEQ ID NO: 13827 - DNA, 1023 bp, Homo sapiens
atccctctctcctccagcattcctgtgtctgtctggccctaaatgtatccatgtggctacttctccagccccctccttccctctcttctgcctgatagagggaagaggaagaggaggacgaacagagatcctgaaattctgacttgctgctattccagaacccagcctcctgggtttccccagtcctcatttttcctcccaatacccacccttctctctcgagggatctaggcaccttggtcccagtgtcttccttttgttctcactgccaaactgcctgtcctgggatctagttatcttggccctgcactctcaacatgagtagcgaacacttaaattgggttttcaacagtcccagctttcactgccagggtcccagtcagattccaggaatttgcgccctaactttgcttgctaatcctggtttagagctatcccactaaaatatttaatcctaattcttagtccttgcctgtgagatatgaggtcttacaggagacctcagagctcccagcccttctcctcctgctaacccttctcacaccctcaagaggagttagaaaagaggtccttgtcattctcacctcttatggaaaatggaataagaaataatcatatcctttcttcccacccttctcctgttatttaggatttctgacaaagctggcttgagattggtcacttagagccgactgtctcctctgccttttgtttttcagcttcagagacagatccaatatagtcccagggacctgggtctctgggagaggaaggaagagggagggagcaaagagattggggtatgtcccctgtagtacactcttacctcttacttcctagactttgatttctccggcagcccagatgttcagttctcttggcccctctctaccccttactgggatccggttttcattttccggtccttttgccatacacagttacagagatcagtcaaatccataccaccactgagatctcatttattgccacagatgcacaaaataaataacccaaaatcac

SEQ ID NO: 13828 - DNA, 347 bp, Homo sapiens
agtggggcgcgcgaagggcggcgaagcggagacggcggctctccgggatccagctccgcccctggccagtgtgcggcccgggggctccctgtgcccgcgtgaggcgagagaacaggggacttgagtctcgaacagcggttgtttttactttatttatcttaggccctcagctccctgacgtcctgagcctccctgtgacgctctggccttctctgtacctcagagtgcagaaccacagacggcttcggctgtgcctagggcaacagccaacctaggagccagcgggctttcggggaaaaaaaagaaaaagacatctaaaataaaatgtttaaactgtttcaaaataa

SEQ ID NO: 13829 - DNA, 1469 bp, Homo sapiens
caggttgggatgtgggaatgactggggtgaggcagggtcaagtgctacgggcctccttcccgtgtcctgctggaacgtcttcgtgtccacctgggtccagtcctgaatcatcttggagaaacaccttggtttctaggatggttttgtgtggagggggaggtaggactgggctggatgagagagcacagctgtgacttcctcctaactgtcagggtggggagctggttcccagaggattgtctaccctgaagtccatcaggttttctgttgcacaaggacgggtcaggaaggaaggagaggcttttccagaaacaaaaaatctgtgagggtctgacttgctcaaaccagaggaggaaacagaaacccctgcacatctttttagggggttctttgacccaggatagtcttgcttcttgaggtagatcacaggggtctgtgtacctctgaattcatgagagatgaatgacagatgctctcatgggtctagatattgaggagtttttctgagggcagagattggacatcaacaaggctagaagggtcagggaagtgggctaaaggaacagattcctagagattaatgaagaggagggaggtttctttggtcttctattccaagggtaaggttgcgattatgggtaagattggccagaggtaggaatgtggggagaaggagaggctgaaaagaaagcagaggagaacccaggtccctgcctcagccttcagcagagttggcttattgcctgcctctataccaataagtcagtcaccttgctcctctccagaggcaaagtggaagagatcctgcaagacacatctatcctttcacagtgttcccaagggaacttggaaaggagagtcaggtattagaggaaagagaagggtatttgtatacaaagccctggccttaaagaatgttacttagtagctactcccaaattgtcagccttcttacctggccaaggtgtccaagccagaaaggaaaaaaggttatggagtctttctcaccctaaggacagggtggaagagggtggtatatagggaagggccagataggcaacttcatttggcttgtgtgcatctggcctggaactggtgttaagccaggcttttgcttgtttgttgccatccctcaccctttgccatttcccttttcagagaatgtaaatgattttcatgttaggccaaaataaacaacttatagggtacatatgttgtcataaaaggtaaaagtgatgcatgccaaaccaaactaaaccaatttggattatctgctattcgggtaatcttcacagaaatgactgagagaagaatctgcagtttactgagggcatttcagttcctcctaccacctcaacaggactttgtccagactctcctcctcttacctttgtgccttgactgtggttctttgtggcaagatactttggttggttaaaataatatggaacaaaggatccactgaagtg

SEQ ID NO: 13830 - DNA, 45 bp, Homo sapiens
tggattcaccccatctcccaaataaagtttacttgttttacattc

SEQ ID NO: 13831 - DNA, 1908 bp, Homo sapiens
gactgtgccttcccatccaggctggaaggagctctctgtgacctagcggccatttatttctctgtagccctatgatggctactgtgaggctcttctaacaccctcagtcagtgacacacccatcccatccaccacttcccccgtgtggggtccagagtggtgttgcatcactggtgcgcggcatacgcgctttcttctgatccagcctgtagagactcgcctttgggacccatctttgcttcctttcagttgcctcctggatcttctttcccgtcatcaaatgactgctgaacaggaaacctctttggtgctgtttcttgtgcatctgtccacctgttccccagtattgccctcaattcctgagagccctggagcggtttcctaccattcccttcttttagctgcttgttttaagtcctttttatgtgacattccctacccccaatgttgtcagctgcttgtgaaactcagccaggttgtctaacctggggtcaagtttgggtgactggtgcagagttacttcctaaaaggccactctccctgcctttggatttcatagtttctctgtcagtagcatgatccccaccgctatggtctatctatgatcaccgtgctttgtgaaactgtgcatccccttgtagcctttctcagtgtccgtggcatttttgtgacttcccagcactagaataagttttcctgccaaaatgagtgaggcgcttggtgccctctggactttcccacttcccaacatgggagaattgtgaactttccatcagactgcctccctggccctccccattcttctcctgttggttattctgagtctgacacagacccatgacatgtcttataaagcctccaatggctttatcctacctagatcccttccagcccattttaattagactatgtcattgtgaggccaccagtccattcatttgaattctgtgaatctccaccttgcctatctttgggtagaagctggacagtactgttgccctcttccaatcctcttcccctacatccctggcactggttgttttctgtgaaaacagcagtgaacaggttcagttttgaactggccctgaggaaatgggtcaggagttgtattggcaagagggaggggtgagagctgttggagaactgagaatgaggttttttttttttttttctttttaactttttttatattagtaataaatgcagtggaaaccagcattttatttaatccctgtgttctagtcatctctggagttgcagatgaagctgttctcacctggtggagtcagcttattctttagttcatacacactagtgatggggaatgacaaagcttaaggttcttccaggctgaaaaaaaccaatggaggttccattagcctgtaggcatcaaccagaacaagctgccttatgttcaagggcaaagttttgtaagaaaaaggaaaggccaggtgtccgtggagttatttttaaatattttactttgcagagtttgtgtttatggagtggtaatgatgaaggagtctttcagcagcaatttgcagaatgcctgtgggccaggcaatataccaagcactagagataactgacagccaaagccaatggatttaaaatgtacagggaagacaggtttctcataatcacaaatagcatgtaaagttaaacctgtcaaaagtgctgggaagaagacagggaagaaaagagggtgaaagagagttgtgtaataaagggagtcagggtaggagatgcaactgagacaagctccaaaggataaacaggaggtggggtgggagagggaagtcaaggcaaaggtcttcgctaaaagacctaggggaagaggagctaagaaacctagggacagtgggagatgatgcagaagaaagaggagttagaccactcagggccttg

SEQ ID NO: 13832 - DNA, 593 bp, Homo sapiens
gagctgtagactgggaagagaggccaggcgtggtggctcactcctgtaatcccagcactttgggaagccaaggtgggctgatcacttgatcccaggagtttgagaccagcctgggcaccatggtgaaacctcgtctttaccaaaaaatacaaaaattagctgggtgtggtggtgcacacctgtagtctcaactattggggaggctaaggtaggatcacttgatcccaggaggcggaggttgcagtgagttgcagtcacacccctgcactccagcctgggtgacagctagaccctgtctcaaaaaaaaaaaaaaagactgggaagagagctagagggactaggagataatgtgtatgtaggtttatgtgatgggatatcaccctgaagagttgtgtcttttgtggccagtgacaaatccaggaaatgaatgttgctgatagggataaatcttgaggctgagggcgggtggtacagatgtgtatgggaaaccccaacccctatatattgtaaatagatgggctgggctaaacattgttgccgtttcatacttctaccaactcagcttttacacaataaagctctactgtctctgg

SEQ ID NO: 13833 - DNA, 1654 bp, Homo sapiens
taggagttgaagggctaaggagcctcacagctataaaagaggatgttagaaatggcaaagggcaatttgaatccatcagagagatggatcaataagatgggtggcttggggggggtcctgaaacctttcaagaaaaatatttgtgcaagtgatctgggaaaaaaatgcagtgaaggagcagaataggaccttatatggagcctagggaccctggctttaatgtgagagttatgtggaatggtaggaagaacaccgagatccatcgagttgggggaacagagccttctaagattgggaaaatcttcgcttaatacttgctggggaaggggcagtgtctgacagagagtgggaagccactggcttgtgtgccaagagtccatcgcagcaggcagggagtgggcatttcctttatttctctccctttctcttcacctctgacttctctgtttttctctcccccgccccccgccatttcccatctcccttcctcccatccataacatccttccacagctcccttccccgctctgaggagagtcgatactaacagctaccctctccctgccctgggagacctggggtgggcagggaacccctccctgagaacctcagacccactcttccattgcatcctgtaggacccagtggaacctgacagagcccataggattccctcttctactttcttagacagcagggatgtcagggtctcaaactgcctaacactttgtagcttttcttaacacaaaagcaccccttctctcctaacttgggctctgaatactttcccaacaggaagtctgatctgttgccagacttcttggttagatggctcatacatttatctagagaagcacactcttgcttgctgtcaaactttagaccaccatggaaggtctaagggcatcctgtgccagggaaactttttaaggaattttatctatgggataaaccccatattccctctagtgtctactggtggctctaatactgctttgtgctgcctgccacacttgccctttgagcctgcgaatggccgctagtgagcaagctctgcttcagagcagtctagttaggtagaacagggacttaccagcttcccaaagggatctactcaccattgccaaactcttcatttccacattttgtgtaggtgtcagggaaccccaaactggtgttgctttggggtctctaaaggagattggctgacaccaccatttcccccagatccagattctctgagggaggttgtttcttgagagtagatccagagtgtcaaggatctgttagatcctggaatcccttcttgcatccatccctccctggtagctaggtcccgatatactcctgtcttgtgagattgtcgagatgagatgggggaccactcttcctctgtccttcctctctcctttcctccatagcaaggacgaccttccctgctccatgcccagagtatagctagatcccttcccctccctaccctctgaatgtgtgctagatcaggtgccccactgtgtttcctgaaatccttgggagccggatctccccatctcccctactcactcttcccttttcttctctcagtgttgtctgaataaagtgtgaaatcttttgtgttttctaaattgacattttcaatgaaaaaaagaatcac

SEQ ID NO: 13834 - DNA, 176 bp, Homo sapiens
ccgcagccccgtcaaacatcttcaaagtattatttctccctcactacaggaaagagccaaagcccaaccctcataatagatggatacattcattcattcattcattcagcaggcttatcagattcaagtcatttgtatcttttaaccagaccaataaaagtatttatttttatcac

SEQ ID NO: 13835 - DNA, 186 bp, Homo sapiens
tccttgaccttggagtggaggcagcactgaagactgctacgcccaagagaaggaggtggaggcagccaagaatctcaggagccagcttcctctcctcgtttctctccttccttcctttccatctcatgctgtgtaaagctgctgtgtaatttaacttgtaaataataaagtttaactgactatatg

SEQ ID NO: 13836 - DNA, 1019 bp, Homo sapiens
ggcagagcccccatcacctcaggcttctcagttcccttagccgtcttactcaactgcccctttcctctccctcagaatttgtgtttgctgcctctatcttgttttttgttttttcttctggggggggtctagaacagtgcctggcacatagtaggcgctcaataaatacttgtttgttgaatgtctcctctctctttccactctgggaaacctaggtttctgccattctgggtgaccctgtatttctttctggtgcccattccatttgtccagttaatacttcctcttaaaaatctccaagaagctgggtctccagatcccatttagaaccaaccaggtgctgaaaacacatgtagataatggccatcatcctaagcccaaagtagaaaatggtagaaggtagtgggtagaagtcactatataaggaaggggatgggattttccattctaaaagttttggagagggaaatccaggctattaaagtcactaaatttctaagtatgtccatttcccatctcagcttcaagggaggtgtcagcagtattatctccactttcaatctccctccaagctctactctggaggagtctgtcccactctgtcaagtggaatccttccctttccaactctacctccctcactcagctcctttcccctgatcagagaaagggatcaagggggttgggaggggggaaagagaccagccttggtccctaagcctccagaaacgtcttcttaatccccaccttttcttactcccaaaaaagaatgaacacccctgactctggagtggtgtatactgccacatcagtgtttgagtcagtccccagaggagaggggaaccctcctccatcttttttgcaacatctcatttcttccttttgctgttgcttcccccctcacacacttggttttgttctatcctacatttgagatttctattttatgttgaacttgctgctttttttcatattgaaaagatgacatcgccccaagagccaaaaataaatgggaattg

SEQ ID NO: 13837 - DNA, 1104 bp, Homo sapiens
tcttggagtaggcgcccagccctggctcttccatgctctgcccctttcctggatgaggaaccggactcacaatttctatttccgggactacaggaagggcagagaatactgacggttaccagtattaacccttcatctgttcttgaaactggttggggaatgaggtgataagcaaggagggtgtaagtttaggggacaaagaagaaagaatgaataatacgagcagacattctctgtagaaggtaatggtctgagaatgaaaaggtgtttgatggacatgttgtgggggcaccaatgcagaacactgcactgagtcctaaaggaaggacaggagccttataggcaatgccccagactgacttgtgagtggggtttatggggaaagggagggactgagggcagagtctctgggtttcaggacagcattatgttatttccattcactattacttaagagtttgtgtgtaaacaggctcatctctgagttctcaggacccttgcccccacccccatttttttaatgaaaaaaaaaaacaaaaaaaacggatccaagaagaaaagagaatttatttccttctccactctctccatgccctggagaaaaaaaagtccagaagaaatcataaatatctctcatctacatggttgcttcctcttcctcccaaatcccttagttttcctaaatgtctacagtggacgccctgttggtttggcttgctgggttgtgggtggacacgcaaggaggggatttttatttggccagcagtctcacccactgatctccaccccagaccttccctgattggtgtctcagcatttattttcctgtctcttccaccaaaagccagctgtagctttatctcgtaaaagttacccatcttctctactgtccccattctctctcctcccaccttcaccccagattcaagttttcctccttgtaggcatttcatctgtgtgtgttttctggattttctctctctcttcttatggccatttcaccttattactgattgggtagagggggaaaaggagaatgatgatgatagtttccttctgtctattgaccttttttataataaagtataacatgtttataaaggg

SEQ ID NO: 13838 - DNA, 858 bp, Homo sapiens
atcacacatccagctgcccctccctcagggagcgatccaggggaagccagtgacactaaaacaagaggacacaatggcacctctgcccttcccctcccgacagcccatcacctctaatagaggcagtgagactgcaggtgggctgggcccacccagggagctgatgccccttctccccttcctggacacactctcatgtccccttcctgttcttccttcctagaagcccctgtcgcccacccagctggtcctgtggatgggatcctctccaccctcctctagccatcccttggggaagggtggggagaaatataggatagacactggacatggcccattggagcacctgggccccactggacaacactgattcctggagaggtggctgcgcccccagcttctctctccctgtcacacactggaccccactggctgagaatctgggggtgaggaggacaagaaggagaggaaaatgtttccttgtgcctgctcctgtacttgtcctcagcttgggcttcttcctcctccatcacctgaaacactggacctgggggtagccccgccccagccctcagtcacccccacttcccacttgcagtcttgtagctagaacttctctaagcctatacgtttctgtggagtaaatattgggattggggggaaagagggagcaacggcccatagccttggggttggacatctctagtgtagctgccacattgatttttctataatcacttggggtttgtacatttttggggggagagacacagatttttacactaatatatggacctagcttgaggcaattttaatcccctgcactaggcaggtaataataaaggttgagttttccac

SEQ ID NO: 13839 - DNA, 119 bp, Homo sapiens
gagcgcgggacttggacacggacctcggcgggcgggactgggcggggcggggcatcagaactcaggtgttttttatttacgcgtcagggcttttcttgtttaataaagttatgatagct

SEQ ID NO: 13840 - DNA, 246 bp, Homo sapiens
ctcatcatccccatcagttttcctccctctcagacctgtctttgaggacaaacagatttgtcagctgtcagggtgcagtgggacgtcagagactatgtggtccatcgccttcattgtgtaaatgaggacacagactggcttggtcgcagtgactgtggtgtccttgagatgctcacattactgcccggcctgcctcccacctggaagtctgggaatgaggagattgagataaacttttgaaatccc

SEQ ID NO: 13841 - DNA, 1704 bp, Homo sapiens
gcagccccggaagcaagtgccgcattcttcaggaaggaagagacctgggcacccaagacctggtttcctttcattcatcccaggagacccctcccagctttgtttgagatcctgaaaatcttgaagaaggtattcctcacctttcttgcctttaccagacactggaaagagaatactatattgctcatttagctaagaaataaatacatctcatctaacacacacgacaaagagaagctgtgcgtgccccggggtgggtatctagctctgagatgaactcagttataggagaaaacctccatgctggactccatctggcattcaaaatctccacagtaaaatccaaagacctcattcttatctgtgtgtctgcattttctaatcctttttgccccaggcaaggtccctgtatctctgagacaccccgattggctggagaattgacttgggagagataaggagggagggcgggtgccagcatgctatgggctcctgcgtgaggcctgtggtacacagagattaggttgtgatacatgaagagccaagagcaggatgaggtggaggcgttacaactacctgctctgtgtgtggggggggaggggggaggggggtacgcatattcacttgaagtcgaggttcccagggcatttccatgtgctccaggcctgactacccatcagggtggaggagctggtgacactcatctccctgagtgctccctggtttcccaagggaaagactttctggcctgctgaggtcgaatcttccaagaggctcttgcaaagacccgagattctcataaatccccgcccagaagagctgcacgtatccctttcatgagtccagggaagagggtcctccaggtcttggaagacagaggggagctgctttagaggctaagttgctttgagcccacaaggtaatggagggctcctacttgggacagagccctcagcagagaattagcagtctgttggtgggttcaccccaactcacagcagtagaaactgctccatcttccaccacttattgggtttctccagtgtcagcaaaccaaagaattggatcttaccaatgcggctataggaaaacagcctgttgcatggtaagagtgataccatcttgaagtgaaaccaccacaatggccattttttttttagatggagttttgcagtggtgcaatcatagctcattgcagccttcaattcctgggctcaggcaatcctcctgcctcagcctcctgagtagctgggactacagtttcgtgtgccaccatgcctggctaatttttagaattttttgtagggacagggcctcactctgttgcacaagctggtcttgaactcctggcctccttgaactcctcctgccttggcctcccaaaatgctgagattacaggtgtgagccactgcacctcgccagatgtccaatgtctgactcctgcataccaaggtgttctgtatcaagggctttaaaacaatgcctgtagcgtaattaacctctcacaaagatgcttatctaacctccccagcagtcatgggtttcagcaagaaagtctgtgatgtgaccagttgcacatgttttcccctaaaagcttactctagaaaggatattttttggagagggagtgtgggaatccaccatcttgtggccacctcagacatcacttctctttggaagactccattaaatatttctctgtg

SEQ ID NO: 13842 - DNA, 128 bp, Homo sapiens
gcctcccagagagacccctagaacgtttccctcaaggacctttctgcctggaagtctgttagcctttcagaagtaacatgtccaaaataaaatttgattcctcccaggttgttccctgcctggtccgc

SEQ ID NO: 13843 - DNA, 1497 bp, Homo sapiens
ggtccactgccaaggcaccatcggacacacctgcccatgagtagacacagcagcgagcaaataggtctgataaataccccccttcccttccctccccaggagggaatgactacagggaagaaggatggattgatgtggactcattcagggcctggagcagaccctggtggccaagacagaagagatggtttcctgccaaagatattgccacctccaggaaattgccagtgagctggaagttcccactattacaagccataaggccatgttgccatggacaccagaatatctgtagtcagagcacctatcagttgcaaaagccatgcctgcaaccgatggaaaatgtaagagggagttcttaaggttcttggtggcatcacccaaggcattctgggaaaacctagggcctggccccaaaacttccctactctgtggctagtcctgctgccaacaaaatcgtagcgacctggcttttcacagctttgcttttatttccaagtcaaggacaagccgcttcattcactcctgggcatttactcttcttgtgggtctgtgatattccttgctttccagggagaatgtgcttggcaaggtctggagaactaattcagaatcttaggggaaggggagagatggaaatacaaacctgcttactggaaaggtgcaaatatatgggttgagctggaggtaggaatacaggtaattaaggtttctagtttaagggaaaacagatctattgccatttaaataaggtaactgggatttggttaagttcacaaagatagcagaagatttatttacaggcttcacctgtactgtcagggcaagagaaagcctggtaaaccagctacagcagtttaccagtgtgatggctgtgacacagctccactccacgggtggacacagcagagggcaactgggctggcctggttcagtgtgaatcaaaccgcttaacccacacatggtacatgtgattttcttttgtgagccttacaccaagccaaactattgtcaaagcatcatttctatagaaataaagccttatcttgacctgttctattaaaacctgccacacccgccctttcctacctagatttaatgagcccaagtttttaaaatggaagaaatgactctggggcaaagacccctaatgaactagtggcagagccaggaataaaacttgagtaactaatgagtcacttatgggcagagtatgcaaaaaccttaagtggaaaccaaatagaccctggtatcaagaaagcacaaagtattaatagaagtttctggttggggtgatctaggttcaacagaaataagatgatttctaagtataaagccatttaagaattccagagtagggtgggaaagcaaaaagccagctctgaacaggtaacagctacatggtgactgagtctatgggcaaaagttcttgcatcacaggcttttgggaactagcctatcacagggccctgtacaaataaacttggctgcaatccc

SEQ ID NO: 13844 - DNA, 191 bp, Homo sapiens
gggagttcctcttgccccctacccccggggcttgtatatagattataaatatataagggggaaaggggtgggcggggaggggttctggggctggggcctcacttcccctcctcccccttcccctggtcccctgtccctggggctgtttgttaaaaaagagtaataaaaggatttaaaaaaaaaaacttcta

SEQ ID NO: 13845 - DNA, 1150 bp, Homo sapiens
ccttccttcctgccgcaccttctgccccatccccaggctctggcctctctctctcctcttctaccctttagcaggtaatgactcagttcccactgaggagccagctgtaggtgagagtttgggctctcggtgaggttgggagaaggaaaaggcttatgggccagggggtgggagggagaatgggcacagccagagcagagtggaagggttgggggaggcgataaagacagatgtttccgtattaccatttttctttcatggtccgagggagctgcccttcccccaagcccaggaaagtgaaaagagaagcaggaacagtaaaatactccacaggaaagaaaaatcttagtgatccctcctgctgtctctttccttttgcctattctggcaaattttgtaagtgaaatttgttaccaagatgtgaaaatcttataagaaagtctctaaatatttgagaataaaattatcaatgtctcagctctgcaggctgaaaaaacggaggctttacaaaataaaatcatgcttggaaaacttctcctctgagggatgtcaaaggctgcactgaataagctctaaggtggtgctgaaatgagtcatttatttgcctgtgtaagctcaggcaggtgttggaattgaggaagtataggtaatgaaaaaagtaaacatgtcctcgggacatagcgactggtgatgaccacacaatcaacacaataaactctagcattcacattgtagtccagctcattcaagcaaagctatctccaatagggagtttaccctgtacagaacacgtgcatttccacctgttctcagactgaccctttgctcatcacaatagtgaaaaaaaacacagccctgggtggagatttaagatgctaatgagtcatgagatgtatgaacaagcatgtacagctactgcacacgtgcacccagaagaccgcccagaacatgcttgctagtaacacctcttcccacccacctcctgtgaataatcatgtaagactcccataaagggagtttctccagcagtgatcaatgctgtctcatccttaggagcagcccaccctgaatcctctcagggtgtacagtttattttgcacttaactttcaaaataatatttttcctttgtaataaattgctttgtacttc

SEQ ID NO: 13846 - DNA, 174 bp, Homo sapiens
actctacagccaggcggctggaattgaattccctgcctggatctcacaagcactttccctcttggtgcctcagtttcctgacctatgaaacagagaaaataaaagcacttatttattgttgttggaggctgcaaaatgttagtagatatgaggcatttgcagctgtgccatatt

SEQ ID NO: 13847 - DNA, 1637 bp, Homo sapiens
aatccaggaccttctaccctgcagagtgtggttttgggagagaagtgcaaaatcccacgacaggtgagttgaaggaatgggatatggagccacatccacttccaccccttggtatctggacccacgtgttcttcctactgagattacagaactgtagagatgtctttgatttttaaaatgcaccatgtcctgaaagatggcaccctcccacccgcagagtgcttcctgcaagctggcgttgagctgtgcctatagaagctcttttcaacattctttatggccagcagcccttggttggtgcagatggtgataggaccagtgggtcccacagcatggccacactgcacctccttcgctgtcaagtgggtcccccacgaagatactgcacggagagcagtgccaagcctgtggatcaggaatatcaacagcccccagagagtggtgctggctgagggtctgagagcaggacaggaaaacccacctatggaataggtgcctatccctgtgaagatgaacctctggcccttccaggatggaaggagtgcaatgtagtcaactcctcacttagggtctggttggtcacctaaagaaatagagccctaccagggaagatcattgggttcaaatgctgatgagtaggacatttagaggtggcagtgtctggatctaccttggtaggagggagtcagtactgttggacccataggtagcctcatccctgccactgtgtttgctccatttatgtacccatcctacccggcctgggctgacccatggggaaggctggctaatttcagtgcttctgcttggttgttcagggccatttcaggtttgggtgttttctggggatgttaacatgggattcaggctcaactcacaagaaacttttccatctcatgatggatgctgttgggcatgtccaatgtatgacttcatgagttacacagatgctaattcgtaggggcacttggaatcacatggttgttttgtgtcccatggtcaagcattctatcttatcagggcctacagtaacatgccaaaagttgcttccaacatatttctctgctttggatggggcatatttctgtgctgtggatgacatggccttactccagaatcccaggccctccactgtgactctcctactggtgcttggttcagctccaccccaaatcttaccccaccactggcactttcagcaccagggggtctgaaggatggtgactgcgccatggcctggatctgctgcagtgtcctttcctgtggaggctccactcaaagctggcatcctcctatgtcacctagagtgtgggtcaaagcaatacacctacatgtagaatgtgatgtcagaactcaaacaggctcaccaggcagtgtgcttccttccttgcatgaggatgcaagatgcaacagtttgtctttcacattggaagggacacccctggatgcccctaaccactagacctgtaaaacttcactgcagtggccacttctgaatctctgtaaggtttatttatcttcaccctctggagagaagatgttttaccaaagcctctagtgtaccttcctcctcttactcatccatcccagtcaacatgatgttgtcaatgaaataaaggaatttaatattctatagt

SEQ ID NO: 13848 - DNA, 1212 bp, Homo sapiens
actctacagccaggcggccaggattcaactccctgcctggatctcaccagcactttccctctgtttcctgacctatgaaacagagaaaataacatcacttatttattgttgttggatgctgcaaagtgttagtaggtatgaggtgtttgctgctctgccacgtagagagccagcaaagggatcatgaccaactcaacattccattggaggctatatgatcaaacagcaaattgtttatcatgaatgcaggatgtgggcaaactcacgactgctcctgccaacagaaggtttgctgagggcattcactccatggtgctcattggagttatctactgggtcatctagagcctattgtttgaggaatgcagtcttacaagcctactctggacccagcagctgactccttcttccacccctcttcttgctatctcctataccaataaatacgaagggctgtggaagatcagagcccttgttcacgagaagcaagaagccccctgaccccttgttccaaatatactcttttgtctttctctttattcccacgttcgccctttgttcagtccaatacagggttgtggggcccttaacagtgccatattaattggtatcattatttctgttgtttttgtttttgtttttgtttttgtttttgagacagagtctcactctgtcacccaggctgcagttcactggtgtgatctcagctcactgcaacctctgcctcccaggttcaagcacttctcgtacctcagactcccgaatagctgggattacagacaggcaccaccacacccagctaatttttgtattttttgtagagacggggtttcgccaagttgaccagcccagtttcaaactcctgacctcaggtgatctgcctgccttggcatcccaaagtgctgggattacaagaatgagccaccgtgcctggcctattttattatattgtaatatattttattatattagccaccatgcctgtcctattttcttatgttttaatatattttaatatattacatgtgcagtaattagattatcatgggtgaactttatgagtgagtatcttggtgatgactcctcctgaccagcccaggaccagctttcttgtcaccttgaggtcccctcgccccgtcacaccgttatgcattactctgtgtctactattatgtgtgcataatttataccgtaaatgtttactctttaaat

SEQ ID NO: 13849 - DNA, 296 bp, Homo sapiens
gtttcccccagtgcccacagcaccctccggcgctgaaaatacacgcaccacccaccaggagccttgggatcataaacaccccagcgtcttcccaggccagagaaagtggaagagaccacaaagcgcaggcaattggcaggcagtgggggagccagggctctgcagtcttagtcccattcccctttgatctcacagcaggcagggcacccaggccttataggaattcaccctggaccatgccctaaaataacctcaccccaaatacaataaagggacgaagcacttatagataccac

SEQ ID NO: 13850 - DNA, 217 bp, Homo sapiens
ccctagggaagaagcaagaaacttcggggctgcagcctcaggatgaggcagaaggaagggtaagggaaaggatggggaccacaaggaagagccaggtgctgctcagcagaggatatgggtgggagcgaaagttgtaacaagtgggggtggggggtgcgggccgccaccactgctccttgactctgccgtttcctaataagacctggttccacatctc

SEQ ID NO: 13851 - DNA, 628 bp, Homo sapiens
aacttggaaaaatccagaaagaaaaaataattgatttcaagaccttctccccattctgcctccattctgaccatttcaggggtcgtcaccacctctcctttggccattccaacagctcaagtcttccctgatcaagtcaccggagctttcaaagaaggaattctaggcatcccaggggaccacacctccctgaaccatccctgatgtctgtctggctgaggatttcaagcctgcctaggaattcccagcccaaagctgttggtctgtcccaccagctaggtggggcctagatccacacacagaggaagagcaggcacatggaggagcttgggggatgactagaggcagggaggggactatttatgaaggcaaaaaaattaaattatttatttatggaggatggagagaggggaataatagaagaacatccaaggagaaacagagacaggcccaagagatgaagagtgagagggcatgcgcacaaggctgaccaagagagaaagaagtaggcatgagggatcacagggccccagaaggcagggaaaggctctgaaagccagctgccgaccagagccccacacggaggcatctgcaccctcgatgaagcccaataaacctcttttctctg

SEQ ID NO: 13852 - DNA, 796 bp, Homo sapiens
ggaggacgaacatccaaccttcccaaacgcctcccctgccccaatccctttattaccccctccttcagacaccctcaacctcttctggctcaaaaagagaattgggggcttagggtcggaacccaagcttagaactttaagcaacaagaccaccacttcgaaacctgggattcaggaatgtgtggcctgcacagtgaagtgctggcaaccactaagaattcaaactggggcctccagaactcactggggcctacagctttgatccctgacatctggaatctggagaccagggagcctttggttctggccagaatgctgcaggacttgagaagacctcacctagaaattgacacaagtggaccttaggccttcctctctccagatgtttccagacttccttgagacacggagcccagccctccccatggagccagctccctctatttatgtttgcacttgtgattatttattatttatttattatttatttatttacagatgaatgtatttatttgggagaccggggtatcctgggggacccaatgtaggagctgccttggctcagacatgttttccgtgaaaacggagctgaacaataggctgttcccatgtagccccctggcctctgtgccttcttttgattatgttttttaaaatatttatctgattaagttgtctaaacaatgctgatttggtgaccaactgtcactcattgctgagcctctgctccccaggggagttgtgtctgtaatcgccctactattcagtggcgagaaataaagtttgcttagaaaag

SEQ ID NO: 13853 - DNA, 232 bp, Homo sapiens
gcaccccagacaccttcctcaacccaggcgggtggacagggtccccctgtggtccagccagtaaaaaccatggtccccccacttctgtgtctcagtcctctcagtccatctcgagcctccgttcaaattgatcatcatcaaaacttatgtggctttttgacctttgaatagggaattttttaaattttttaaaaattaaaataaaaaaaacacatggctcacccttccaccc

SEQ ID NO: 13854 - DNA, 119 bp, Homo sapiens
tttgaagggaaaagggatgatgggattgaaggggcttctaatgacccagatatggaaacagaagacaaaattgtaagccagagtcaacaaattaaataaattaccccctcctccagatc

SEQ ID NO: 13855 - DNA, 120 bp, Homo sapiens
cctgtaacttcatctaagtccccagatgggtacaatgggagctgagttgttggagggagaagctggagacttccagctccagctcccactcaagataataaagataatttttcaatcctc

SEQ ID NO: 13856 - DNA, 140 bp, Homo sapiens
ttccctcccccacctgtcctgcagtctttgacttttcctttcttttttgccaccctttcaggaaccctgtatggtttttagtttaaattaaaggagtcgttatcgtggtgggaatatgaaataaagtagaagaaaaggcc

SEQ ID NO: 13857 - DNA, 168 bp, Homo sapiens
attccacagtgcaaatatctttctgtaacaccctcagcatcctgcactgccctctctgaaaacacccacattctttggtcactgtgatttcttaggcctccgtctgttgtaccactagcatctatatgacttttgtgtaattttctctcttgaactctggtgctgttt

SEQ ID NO: 13858 - DNA, 200 bp, Homo sapiens
ccagaatctctgaggaaaatggaccaaaaaaaaaaaggcctgaaccccaaggaagactgtggagaccatcttgtcttcctccccttcctcctccagagcctgctctatgcggatctggaccatctagccctcagcaggccccgccggctgtccacagcggaccctgctgatgcctccaccatctatgcagttgtagtttg

SEQ ID NO: 13859 - DNA, 142 bp, Homo sapiens
gagtccttccagtgtcctccccagcctcctgagactccggtgggctgccatgccctctttgtttccttatctccctcagacgcagagtttttagtttctctagaaattttgtttcatattaggaataaagtttattttgaag

SEQ ID NO: 13860 - DNA, 258 bp, Homo sapiens
gggcctttccaagattgctgtttttgttttggagcttcaagactttgcatttcctagtatttctgtttgtcagttctcaatttcctgtgtttgcaatgttgaaattttttggtgaagtactgaacttgctttttttccggtttctacatgcagagatgaatttatactgccatcttacgactatttcttctttttaatacacttaactcaggccattttttaagttggttacttcaaagtaaataaactttaaaattc

SEQ ID NO: 13861 - DNA, 378 bp, Homo sapiens
gggcctttgttctttagtatgtttgtctttgaggtggactgttgggactcaaggactttgctgctgttttcctatgtcatttctgcttcagctctttgctgcttcacttctttgtaaagttgtaacctgatggtaattagctggcttcattatttttgtagtacaaccgatatgttcattagaattctttgcatttaatgttgatactgtaagggtgtttcgttccctttaaatgaatcaacactgccaccttctgtacgagtttgtttgttttttttttttttttttttttttgcttggcgaaaacactacaaaggctgggaatgtatgtttttataatttgtttatttaaatatgaaaaataaaatgttaaacttt

SEQ ID NO: 13862 - DNA, 314 bp, Homo sapiens
ccatggccactgagccctctgctgccctgccagaatctgccgcccctccatcttctacctctgaatggccacccttagaccctgtgatccatcctctctcctagctgagtaaatccgggtctctaggatgccagaggcagcgcacacaagctgggaaatcctcagggctcctaccagcaggactgcctcgctgccccacctcccgctccttggcctgtccccagattccttccctggttgacttgactcatgcttgtttcactttcacatggaatttcccagttatgaaattaataaaaatcaatggtttccac

SEQ ID NO: 13863 - DNA, 53 bp, Homo sapiens
ggggtttcctgctggacaggggcgtgggattgaattaaaacagctgcgacaac

SEQ ID NO: 13864 - DNA, 40 bp, Homo sapiens
atgccccatgtaaaaacatgatgataaaacagcaaagcac

SEQ ID NO: 13865 - DNA, 396 bp, Homo sapiens
agattctgctcatcattgctcagctcctcagagtgggccgggaggggactagaagagctgcatgatggtggctgagacagggtcaccttgggaaggcttgggagccaggatgagtgtcgggctctcgtgtgtgcaaaaggtcagatgtgactgctgctgtttgcctggtttctgacccagtggtggggtttgagcaatgcttctctgcccttccatggaaagtggaaccagaaatggtgccaaggctgtggctgttccctttcgtgtaaaatggtgctgttattactctgtcttgaaataggaaggtgggatttctggggaggctggtgaaggagggcagggttcttttctctacgtgtcatgttaaaattgccaaataaagtacctctgcctgtg

SEQ ID NO: 13866 - DNA, 140 bp, Homo sapiens
gggctgccctcccacctccgctgggaggaacctgaacctgggaaccatgaagctggaagcactgctgtgtccgctttcatgaacacagcctgggaccagggcatattaaaggcttttggcagcaaagtgtcagtgttggc

SEQ ID NO: 13867 - DNA, 508 bp, Homo sapiens
tggggcaggaccgatgccagccgggtacctcagtttctcctttattgctcccgtacgaacccctcccctcccccctgtaaacacagtgctgcgagatcgctggcagagaaggcttcctccagcggctgggtggtgaaggaccctggctcttctctcggggcgacccctcagtgctcggcagtcatactggggtgcgagagaggtgggcagcagctcagcctccccccgctggggagcgaaagtttcttggtctcagcttcatttccgtgaagggcaccgagaactcgaagcccttccagtggtaccagctcactccctgggaaaggggttgtcaagagagagtcaaagccggatgtcccatctgctcttcccgttccccttaaggaggtagctcccagcactcaaccaacctccccgcagagctcccttcctgaccctccgctgcagaggattgaggcttaattctgagctggccctttccagccaataaatcaactccagctccctc

SEQ ID NO: 13868 - DNA, 140 bp, Homo sapiens; identical to SEQ ID NO: 13866

SEQ ID NO: 13869 - DNA, 724 bp, Homo sapiens
ggatatattcaggggtccccaggaactcctcggtccagagaccaagtggtggccttggaaagcagatgtcaggctttggtgtgcctgtgaccacctcattgctcccatattatcccccatttttagtagagacggggttttagtagagacttggcctcccagaacccccttcctctgctcctccatgaatgacaattccaggcctcccctacctcatgtcctctcatttgggggattgctccgtgctgtccctttctctcaaggccgaagttgggaagtgagaaaccatgtttttaacttgtggctgcttttgctgctgctgctcctccgtatctggctgtatgggtggagaacccaccccctgcccaccacaggggtctccttccaggccactcaggacatttttagcttctctcctccccatgttcccttttttctctaaagtcccctgacatcagccctcccaactcctaagagggactacccatgagagtggggttctgaggctcccctatggggacagttccgttcttgaagtgtcagtgttggggaatatctgtggcctatgaggcccatctcaggtttggggatcccccagtccctatgatcagtgttggagtacccccctgggagagcctagtttctttgaggccccaggccctcttttaactacctttgaataggtgttatccctgtatttatggaaataaagttccatttcctc

SEQ ID NO: 13870 - DNA, 329 bp, Homo sapiens
gaagcctctacagcacccctgccccctaatttatacagaaaccggacccactaatcctctgggattggccgactgtgagctgcagataaggctatcagccaccaaagagcaatgaacaatggaaacttcagagagctgaagaaagggggaggcctgtgttcttggcctgcccctgagtcttctggctgggggcaggttgcctgggcaagaactgcttcttcaattccttaacaaatgcaaccaccaacacccagatctctctctctctttattttcagtttttttgctgttatccagataattaataaaaaccaaccacgcaaaactgg

SEQ ID NO: 13871 - DNA, 464 bp, Homo sapiens
gctatgtctgcttcctgcccacctccagccagagaagaatcagtattgagggtccctgctgacccttccgtactcctggacccccttgacccctctatttctgttggctaaggccagccctggacattgtccaggaaggcctggggaggaggagtgaagtctgtgcatagatgggagagccttctgctcagaggctcactcagtaacgttgtttaattctctgccctggggaaggaggatggattgagagaatgtctttctcctctcctaagtctttgctttccctgatttcttgatttgatcttcaaaggtgggcaaagttccctctgactcttcccccactccccatcttactgatttaatttaatttttcactccccagagtctaatatggattctgactcttaagtgcttccgccccctcactacctcctttaatacaaattcaataaaaaaggtgaaat

SEQ ID NO: 13872 - DNA, 393 bp, Homo sapiens
gtgatggtgtttcttagagagaagatcactgaagaaacttctgctttaatggctttacaaagctggcaatattacaatccttgacctcagtgaaagcagtcatcttcagcattttccagccctatagccaccccaagtgtggatatgcctcttcgattgctccgtactctaacatctagctggcttccctgtctattgccttttcctgtatctattttcctctatttcctatcattttattatcaccatgcaatgcctctggaataaaacatacaggagtctgtctctgctatggaatgccccatggggcatctcttgtgtacttattgtttaaggtttcctcaaactgtgatttttctgaacacaataaactattttgatgatcttgggtgg

SEQ ID NO: 13873 - DNA, 700 bp, Homo sapiens
gtgcatcgccatctacaggagcagaagaatggacttgctaaatgacctagcactattctctggcccgatttatcatatcccttttctcctccaaatatttctcctctcaccttttctctgggacttaagctgctatatcccctcagagctcacaaatgcctttacattctttccctgacctcctgattttttttttcttttctcaaatgttacctacaaagacatgcctggggtaagccacccggctacctaattcctcagtaacctccatctaaaatctccaaggaagcaataaattccttttatgagatctatgtcaaatttttccatctttcatccagggctgactgaaactatggctaataattggggtactcttatgtttcaatccaatttaacctcatttcccagatcatttttcatgtccagtaacacagaagccaccaagtacagtatagcctgataatatgttgatttcttagctgacattaatatttcttgcttccttgtgttcccacccttggcactgccacccacccctcaattcaggcaacaatgaaattaatggataccgtctgcccttggcccagaattgttatagcaaaaattttagaaccaaaaaataagtctgtactaatttcaatgtggcttttaaaagtatgacagagaaataagttaggataaaggaaatttgaatctc

SEQ ID NO: 13874 - DNA, 861 bp, Homo sapiens
gtgcatcaccatctacaggagaagaagaatggacttgctaaatgacctagcactattctctggcctgatttatcatatcccttttctcctccaaatgtttcttctctcacctcttctctgggacttaaggtgctatattccctcagagctcacaaatgcctttcaattctttccctgacctcctttcctgaatttttttattttctcaaatgttacctactaagggatgcctgggtaagccactcagctacctaattcctcaatgacctttatctaaaatctccatggaagcaataaattcccttttgatgcctctattgaatttttcccatctttcatctcagggctgactgagagcataacttagaatgggcgactcttatgttttaggccaatttcatatcattccccagatcatatttcaagtccagtaacacaggagcaaccaagtacagtgtatcctgataatttgttgatttcttaactggtgttaatatttctttcttccttttgttcctacccttggccactgccagccacccctcaattcaggtaccaacgaaccctctgcccttggctcagaatggttatagcagaaatacaaaaaaaaaaaaaaagtctgtactaatttcaatatggctcttaaaaggaatgacagagaaataggatacaagaattttgaatctcaaaagttatcaaaagtaaaaaattttgttaccaaaagtcaaactgcattctcaaaactttaaatttgtgaagaatgacaacagtagaagctttcctctccccttctcaccttgaggagataaaaattctctaggcaggaaaagaaatggaagccagttagaaaaacattgaaat

SEQ ID NO: 13875 - DNA, 317 bp, Homo sapiens
accttccccagacttctctttcttattttgtaataaactctctagggccaaaacctggtatggtcattgggaaatgagtgctcagggagatggagcttaggggaggtgggtgcttccctcctagatgtcagcatacactctttcttcttttgtcccaggtctaaaacatctttcctagagaaaacaaaagggactaaactagaaatataaagagccctatacatgacaggtgatcacgtactgaatgattttgaagtagtacaaacaataaaaattctcattccgcatcatcatgcggtccatgatgatgaggccgc

SEQ ID NO: 13876 - DNA, 586 bp, Homo sapiens
ggggtcaggccagatggggcaggaaggctccgcaggaccggacccctagaccaccctgccccacctgccccttccccctttgctgtgacacttcttcatctcacccccccccgcccccctctaggagagctggctctgcagtgggggagggatgcagggacatttactgaaggagggacatggacaaaacaacattgaattcccagccccattggggagtgatctcttggacacagagcccccattcaaaatggggcagggcaagggtgggagtgtgcaaagccctgatctggagttacctgaggccacagctgccctattcacttctaagggccctgttttgagattgtttgttctaatttattttaagctaggtaaggctggggggagggtggggccgtggtcccctcagcctccatggggagggaagaagggggagctctttttttacgttgatttttttttttctactctgttttccctttttccttccgctccatttggggccctgggggtttcagtcatctccccatttggtcccctggactgtctttgttgattctaacttgtaaataaagaaaatatt

SEQ ID NO: 13877 - DNA, 661 bp, Homo sapiens
ggttcctgagctcactgaaaagactattgtgccttaggaaaagcatttgctgtgtttcgttagcatctggctccaggacagaccttcaacttccaaattggatactgctgccaagaagttgctctgaagtcagtttctatcattctgctctttgattcaaagcactgtttctctcactgggcctccaaccatgttcccttcttcttagcaccacaaataatcaaaacccaacatgactgtttgttttcctttaaaaatatgcaccaaatcatctctcatcacttttctctgagggttttagtagacagtaggagttaataaagaagttcattttggtttaaacataggaaagaagagaaccatgaaaatggggatatgttaactattgtataatggggcctgttacacatgacactcttctgaattgactgtatttcagtgagctgcccccaaatcaagtttagtgccctcatccatttatgtctcagaccactattcttaactattcaatggtgagcagactgcaaatctgcctgataggacccatattcccacagcactaattcaacatataccttactgagagcatgttttatcattaccattaagaagttaaatgaacatcagaatttaaaatcataaatataatctaatacacttt

SEQ ID NO: 13878 - DNA, 623 bp, Homo sapiens
ggggtggataaactacccctgccccaaacctctacccctaactccaggtcaggggtgcgtagaggttgggggccctggccagggacatctgccaaaggaaggaactgtagcctgggagaatggttactttggcattagggccttcaagggctggcagtcttacagaggctggagcggtgagaatgagaggccagagggaccatagtgttgggcactgtctgaccatgttgcatttggaaggctaaatggggccatgaagaaggctggaagggacagggggtgatggcagcctacctggtgtcccctaccccacctgttctcggagaaccaagttgctacacaggaagttctccaaggtccagtttcctttctcccaccagttggtggaggcttcagggaagaccagagtcctggacagagagggtaacaggaggagtcggggataaacatcaaacatcaatcgtgtgtcctgatttgggagtgattggggggatggggtgggagagggttagttggtattctcatggcctgattttttttgtttctattccttttatatcactgtgtttgaatcgagggggaggggtggtaaccggaaataaagacctccgatcttccgcccc

SEQ ID NO: 13879 - DNA, 176 bp, Homo sapiens
ctgcctcaaggaccctggactctgctcacccccccaccactctgcctggcctcctgctgatgaggactctaagttcccaggatacaaaaggggtggcagtgtatggttcaggaatgctgaatatgggaagcaggggtgcttgtgaccctaataaattccaagtcctcttccctgcc

SEQ ID NO: 13880 - DNA, 322 bp, Homo sapiens
ccccaccaggggacagccagaggaaggggaccatggggtatccctgtgtcctggtctatcaccccagcttctttgtcccccagtacccccagcccagccagccaataagaggacacaaatgaggacacgtggcttttatacaaagtatctatatgagattcttctatattgtacagagtggggcaaaacacgcccccatctgctgccttttctattgccctgcaacgtcccatctatacgaggtgttggagaaggtgaagaaccctcccattcacgcccgcctaccaacaacaaacgtgcttttttcctctttgaaacctgc

SEQ ID NO: 13881 - DNA, 38 bp, Homo sapiens
gtctgtaggccttgtctgttaataaatagtttatatac

SEQ ID NO: 13882 - DNA, 269 bp, Homo sapiens
gagtgcctggggccacaggaaaggcaggaacaggaccttctctctcccaggcccaacgcaggggccctcactggctgcagctgatctgtttccttataccagatcctcagtctcactaaagacagcgatatgggagacacccaggggcctggcccgccagcccaaaagatggtcatcgggaagagaaaaagaaaaaaatgctgcagttgttctctcaagctagggcagaagaggggtgtcaagctcctcaataaacttgtctccacttc

SEQ ID NO: 13883 - DNA, 89 bp, Homo sapiens
ccccatggtggggggaggggaggggaggggagggaatgaggcagctctaggatctatactgtagctaataaaatgtaaaaacacctggc

SEQ ID NO: 13884 - DNA, 177 bp, Homo sapiens
agacggatccagatctgtgtgtgtgtgtgtgtgtgtgtgtgtgtgtgtgtgtgtgtgtgtgtgtccctatgtctatgtatcgggtgaggggtgggagggttgctggagggtgctttattgggtggagggcaccatgtcccagggctatcaaataaagaatagtttggtttttttttt

SEQ ID NO: 13885 - DNA, 562 bp, Homo sapiens
ctgcctcatcttcctcagtttcatccccatccccaggtcttcctagacgctcagcacccccttctcccctgtgccgtagtttgtctcctgggactgggggaggagtccgaggtggggttggttacctgtcccgaggggaccctgtccgggtccttgctcggagagtacggcctgatggctctgtgcagtacctggttgagtggggaggagggggcatcttctgaacagcctgcctctgcccagctccccattcacacacaccggcactttcataccctgacctctgacctcacctacagctgggatgtacctggagagatagggggtagttctccctactgcccaggctggaatccaagagtggggagtggggaagaggccctcttctctaccctccttcatgattcctgacccctcccatccttcccatttcctttgatgttattttgttacagctttttaaatattttttaaaattatttaacccctgggggcagagactgaggagggaggatgataagggatcccggactctgtatgattgaaataaagagaaataaac

SEQ ID NO: 13886 - DNA, 1782 bp, Homo sapiens
cccacccagcatcagagaccttctcttcctttcctgtgcaccccaccctgtaacagcaccaaccaccaggattggacatcaccgaggaacagcgggattgcctccccgaatgcctccctgggaggcacactgattgcccacccccaccactgcaccatttccaggagggagagtggggaccctcagccgcccccttttccttcccattggggtgctgccctctctttgacccccagggacccttgccccaggacaccgcctaccccgtacagaccccttcactccggggtgctatccccatcctctgcctcatcgttcccctgagcactgggggacagaccctcacccccaccctgggggtgtggcacctccaaactttcaacttcagggtgatttttttagcagtaaccagagctgacaatctaactcccctccaccgccccattttggcctcccctgccccccttgttatggggaggggaccccgggtgagggggccctattaccccttgatttctcaggagcgtctgggggggctcagcacgcacaaactccttctccttctaccactcttaaatttactccctccccacccagaacccagatggggtggagggggccaccggggcagggagggggcggcaaggggggaatgggagttgtctccccttctccccacacctgatctgctctcggctggtcccagagcggggtgagggggcttatgcccccccctcccccagtgtgttgggtggggtggaattgaggttagggtgaggggtcagggtttaggagggtgtgtatgttgggaggacaggctagttgatctgtcctactctgacacacagtcccctctgccccttccttctctcttcttggtctctactcccagggggaggggggaacttactctaggaaaagccatgtctctctcccccagggtggggggacctgtgttggaggaggggtgttggggggcccccttccatgactctgtcccctgggggaggtaggacagggctgggcttccctctcatcctccccctcccaatctccttccacctccctccctcccgccagctccacgatttttcggtgtttctctgtacatagttttctggcgggataggggaggtaggatggatggggtttggggtgggtaggccatgggaggggagaagcccctccttggcaccccctcttccctgactgctgtcccctacccagccttgcccccttcatccttttgcgtttggtattgagactctcctagactctactcctctttcttttgtatggacagttccccttcagtcccatccccctacacatacacccagccggggccaaatttatacttatataaaagttgtaaatatgtgaaattttatccctgtgccctttccccacctcaggccctacccctggaccctccccaaccttccttctctcttctttggctgttgtaattatctggggtttgtactgtacatatccggggtgtgtgtgtgtgggctgggggcaacccttctgtacagagcttcctggccccctccccccccgcccctctgcttccctccccacccaccacctcaagggtagggagttgctcttcctacctgttttattttgttttctcgttctccctccccaccccactcccagccttatctatcccccctcactgtccccttttctccactcccagccccatttcctttttttctggagtgtgtggtgaaacagaaaaaaacatgtttaataaacggagattgttctttt

SEQ ID NO: 13887 - DNA, 1019 bp, Homo sapiens
ctgctgaggctatacactagcttctagaacaagataaccactgctgctgatggatacttttccctcactgccatggcacaccagtcatggatcttgtaatcatgccaagagaatagatacattatggacctcttgttcttagatatgggcctctcagcctggcagatgtggaaactcaaatttctcgtcccactccaggttttggctagccaaccctgcaggaaagtggtttataggccattcatacttaagttgatcacttgcccatggtggacatttttgtggtggtgatgtccattaaggaaaccagattttcaattatttagtgagagaagagttagagcaaaagacagtggtaaatgttttattccgtctccatgaggaattgaaggagttggtctccacctagagatacatttgatttacagcttaagtaattcagaggctaagctctaagcttttttctctcattgctggaatgatttaagcagaagtccttttgtgtacttttaaaattgtatctttccaggagcccctcagattgtaccttgctttctcaccaatagacaccttcccgacacttttttaatgttgtagctgagcactttaacaagttgagcattccatgtttcattcttagaaccttctttaatagagggtcttccctcaacagcctgtgcctctggtctacctttgaccaccactgataactaatatattggtcacaatgactggaatgtgactagtgatctcaggagatggcactgtcctaaagtgctgtcagggtggcaccactgctctctgaacaacttaccttggtcagagggactcaggtttgggacagcacaagctgaaggctggagagtaacttgcatagtaggaccatacctcttcctttcccatcccacccacatatgatagacagcccctctgttgagatatggaggggacagatactggaatcgggggtgggacttgcagttacttaaaattttttaataaactgtgccctgaaacct

SEQ ID NO: 13888 - DNA, 791 bp, Homo sapiens
ggagagccaccgaaggccccaacaggggatgctcatcactggagactgcgactgggaagaacactgccccctccctcgggttgggtggcccagccagctggccagcctccactcccactctgccagacaccctgacacccacccaggctttgaagagcatggagggggagcctcagagctgacagtcctgcttagagcccttaaaaagacttgaaagttcactgggactcagtttaccttaatgccttagcagaagataaatcctacctagagacctttgttccttaaagcaataactgacaactctttgtagtcctccttgtgggtagttaagagtggggtcacccctttaactccaagcactacattttggcggctgccggcctctgggggaggtggcagttatgctgttactagtgattttagggctttgttatttaacttatttcaagggtgctgtgctcagccctgcccatggctgtgcagctccctccgtgcctcagatctgctgtagccagtgcagacctcactgtcgtgtccatgccacccccggcatggctccaggtggcctggtgactccatgatggacgatcttgctcccaggacctgcctcttcccaggcttcctggggaagagttgtacgcccaggcaacaagggctgagctgcgcttgcgtggctgtttcatgaccgcttgtttttctccttttggtgtaatgttttacaaatcctttggcctgagaactaatatgttaattgccttaaataaattaatagaaatctagtccgttaa

SEQ ID NO: 13889 - DNA, 1346 bp, Homo sapiens
cccatgcgtgccgcctgctcctcactggaggagcagcttccttctgggactggacagctttgctccgctcccaccgcccccaccccttccccaggcccaccatcaccaccgcctctggccgccacccccatcttccacctgtgccctcaccaccacactacacagcacaccagccgctgcagggctcccatgggctgagtggggagcagttttcccctggcctcagttcccagctccccccgcccacccacgcatacacacatgccctcctggacaaggctaacatcccacttagccgcaccctgcacctgctgcgtccccactcccttggtggtggggacattgctctctgggcttttggtttgggggcgccctctctgctccttcactgttccctctggcttcccatagtggggcctgggagggttcccctggccttaaaaggggcccaagccccatctcatcctggcacgccctactccactgccctggcagcagcaggtgtggccaatggaggggggtgctggcccccaggattcccccagccaaactgtctttgtcaccacgtggggctcacttttcatccttccccaacttccctagtccccgtactaggttggacagcccccttcggttacaggaaggcaggaggggtgagtcccctactccctcttcactgtggccacagcccccttgccctccgcctgggatctgagtacatattgtggtgatggagatgcagtcacttattgtccaggtgaggcccaagagccctgtggccgccacctgaggtgggctggggctgctcccctaaccctactttgcttccgccactcagccatttccccctcctcagatggggcaccaataacaaggagctcaccctgcccgctcccaacccccctcctgctcctccctgccccccaaggttctggttccatttttcctctgttcacaaactacctctggacagttgtgttgttttttgttcaatgttccattcttcgacatccgtcattgctgctgctaccagcgccaaatgttcatcctcattgcctcctgttctgcccacgatcccctcccccaagatactctttgtggggaagaggggctggggcatggcaggctgggtgaccgactaccccagtcccagggaaggtggggccctgcccctaggatgctgcagcagagtgagcaagggggcccaaatcgaccataaagggtgtaggggccacctcctccccctgttctgttggggaggggtagccatgatttgtcccagcctggggctccctctctggtttcctatttgcagttacttgaataaaaaaaatatccttttctgg

SEQ ID NO: 13890 - DNA, 2691 bp, Homo sapiens
aggccccctccctccatactcccgtcactcctccccactgccgcccctcccctcccactctcgtctccttcccctcgccatagagttccagacatattttccgatcaagcttttatttttttaaaagtcaaaacagaacaaaacaaagtatgcagagacagagcatttgcagggccacctggaggctggggtgctggggcttggggtggccccagggtaggtaacagtcttaggacttagcccaacatcacaacatctgctcttcgggttccaccaaagagtctcctgagccctgagggatggatgtctcctgacccttccaccccgcctcactccctccgtcccactccactccaggctgccggcacctgccccattccctggcctggtttcctaacctcttcttcctcccctgccctgcttcccttcctccaccaccctgctctcaaaggcctcctctccagacccctggaagggaggcttccccatctttagttttccactctgccccggggagcacccttctactcctagccacgtcccttgggaccggtgggactggaggaggaacggtcaccctcctcccccatggaggtttccaggggtcccccagacatgaaagaggggtgagctggaggaagtcatggtgtcactggggtacaggagggtgaatgaagggcatgcaggccctcagcccgggctgtgccagccctcccagccccaggcccatctgagggaccaagacgctgttacgcaggcccttctttccagctatcagcactttcagcatcggctcttcagcagatccaaaccccctcagcaacttgcagaggacctgtcccctctcaaaagtcccctggcctagggtggggacccccaaacctacggcaaagccagcaacagtagcagcctgctcccatttgctggggaggagatcatcttgttcccctggccccccactctccctccatgtccatccaaaaaccataaaatcactgggttccacatcagcctccatgaggccaagccttgtacctgcaaggctcttggcctaaccattcctctgtcctcttctctggcctgcctggggagcccgtgaaggccgcacgggtgcctccagcctgagacatcaggggagagcctgcagctgagttcagcagaaaggaggaatcctggccctcaggaagaagatagtcacatgtttttcttccttgtccccacggcccccagaacaacattctccctgctggcagcccttccatgtctccaaacctgggtcagagtgaaaggacctttgggggtgggtgggagcaaagggcccacctgctggttggtgaaagcagtggtgccggagtgctaggtaccgcacgagagggtgcgggggcttgggaagcagaccagggttggacaaaaccccatgagggcggggagctggaagaaaagtctcttggggacctctggggcaaggagctgagaagtcctgcagcaccaggtgagacttgcttacagtggatgccacttctaggcctctggaccgcagatgccctcctccctcctgcacacctggcctcctgggcctccaggtaaagagagagagccagcccagccctgtttcccctcagtcctcctttgctcctgctgcttctcccaacagcccactgttaggaggtagtagaccccagcctcaaggctctgaccttcttcatgtgggcacagagggtcctgacactctggcagggcctgagctggggcaggcctccctcagggccaggggcgatggcaccccggggacaggcagacctccttcctgccgtcagcacccccttccttatcactgtctggtctccgagcttcggctgcagcctgaggtgtgtcctgggctcctcagagcctgaagcaagcttttggaagcctgcagtcctcccagctccagtgcagaagcctctctctccagcctttccccaggcaggagttggggttgggggcctctgtccctcatcgcttaccttggaaaggtgggaagctggcaatctgcaccttggggcctgggctccccctctctgtgccagcggcttcccagcacctgggaggggctgcagccccagctggactccagcctgtccctcttagcactctagctgcccactccagggcagggactcgaaaccccctccgtcctgagcagccacctccagggccctgtttgggaccactctctcagtccccaggtcctcagggccccagagcgggagggtctcctacctggaagtccccctgagctccagggcccagccctacctgccagtgctggtgtcagggcactcaacaccgagtgtgggggccacgccccttgccatgcccacggcctcctcctgtagctcctgcctgcacccacgatgctgcacgggcccgccctggtggggctcggcgagtaatgtgttttgtccccagttaaccaccattctgcggcctggttctgcaaggaaccagggctgccccaccgcccgccgtctgccgccctaggcttcctgactccattagttccgacacttgtgaaactccgagaagtgctgtggtctcagcaatgcacctgttttgtacatgattgtgtaatttaaaggtatataaatacaaatatatatatatatcagttgtgattgtatgactgtggataaaatccagaactgtgtc

SEQ ID NO: 13891 - DNA, 224 bp, Homo sapiens
ggatagaggggaggccttattgtatcggttttatattacctgttctgcttcaccaggagatcatgctgctgtgatactgagttttctaaacagcataaggaagacttgctcccctgtcctatgaaagagaatagttttggaggggagaagtgggacaaaaaagatgcagttttcctttgtattgggaaatgtgaaaataaaattgtcaactctttcagttaaaa

SEQ ID NO: 13892 - DNA, 5076 bp, Homo sapiens
aaccagtggctcagccatctgtgccaaggagagaggctatcaccagcaatagcaccacctaggacagagggcactgtccagtgctgaataagtcactacggatgccagagggactggggagcactcacttcacttgtgtgggtgtgctttccactagctgttcttacttggactgaggacaagggcaaagcatgattgtatcccaggaaactggggcttgccctgtgtgtggcacaagcatcatgtcttgcctgtataaagccttttggtcctctgtgtactaggtggaatcttctcaacactgtagggccatttcacctcatggtttcatggcagggacatttgcttccttcacaggcctgtgtgaacaagcaaaagtacccacctcctcggtcacccacagagccaccaaagattccatgtcccagagcttcccatagcagacctgaaaagtccatgacctgagctttggccatggtagtggagtggaacaggaaatagtccagcagaggagtgtgggggaagggggcaggagaggcacaagaataagggagacctggactctgcctttttgggaaaaggaaccaagctcatagcaatttggctgataacacaatcagatttttccaggttaagcttcctttctgttatactttcatcattgtgatgctgtggtagaaagtaaataacagtagtggctcagtcatttaatctttcccctctataatacaacttacttgaaatttaaatcaagaaaaaatttctgacgctgagctaggttggtggcatgatatgccaggggtcagtgggggagcttgcttctgagccccctgttgtccgcctggagtcctgcttgtctttcccagctgtgctgagtggctcttctgtctccctggggtccctggcacatctgctttcccagctctgtgaccttaccagttctctcctcagcccttggtggtttgggagctgaatatatgttttaaacttttacataaacaactcaacctgttgcctctcacttccctccatcactgtggcttttaaaactcatgtattttgactcaagtgaaaaaaacacaaaaatccctcatcccagctaggttttgccccctgccctataagagagctatttccccctttctttcctttgaattcttctccaacaccatcccttcattcatactgccctgtgatacacttgaagctgtgttgattggacagacgttcatcagctaacttacctttacttggcaagatggtaaaatagtaacttagtgatgttactaaagtctcgaccattcacctttccatactgaaggaaaggtaaaaaggtttcttctatgggaaattatgcttgacttgcatactctagtttgatgaggataaaaagaaacatgtaattgcagtggtgtttacaactaattgatcacaaccaatcatagatttctttgttccttctccactctcaacacttcatttgactagaaaaaaaaaatgtattcaccaaggaacaggacccaatttgttcagacttttgttaagtttctttactaaggcaatttttgaaacaccagttactatgggatggtgggaatttttcatgcttaagaaatagagacttaggaacaaagaaacatctttctggagaagatgctaatgggaagttacctaaggcttgatgcttggttcaaccttatttaaaatttttataaatgacctgaaagtaggattttacagtgaaatcaaatgtcactacttccaggcagtgaaaggtaatctagaagaggtttaaaaaacacaaaaccggtcgggcacagcggctcacgcctgtaatcccagcactttgggaggccgaggcggggagatcacgagttcaggagatcgagaccatcctggccaacatggtgaaactttgtttccactaaaaatacaaaaattagctgggtgtggtggtgggtgcctgtagttccagccactcgggaggctgaagcaggagaatcgcttgaacccgggaggcagaggttgcagtgagccgagatagcgccattgcactccagcctgtcaacagagtgagactccgtctcacaacaaacaaacaaacacaaaaccacagaagggttactaataagcagggctgagaatactcagaaaactgacaggtgaggttcaacataatataaggaaatgtatttatggaagaattatcaactgatatgcctgaacactgttagaactcaggaaagaaacaagcattgctgagggggaggagagatcaatgtgctgctgtggccaaaagcctaattgccctgtgggcatcatcaggaagggcttttggagataacagagaacagcactttatacaaaaccatggatatgtcttgatcggattatctgtgtttctagtgaccttatttacaagatatatgataaagggaggaaaggtccagagaacagccaaaattatcaggggatggaggtatatccatatgaggacacatttttaaaatatagactctatcctgcaaagatgaaagcagaggggagttagatcaaatatccaatcaagagcaaggacccggtcctgtactactagctctagggctctatctcatagccttagtaaagaaagcacttctcatagcaaatcagaaatgtaaggagctcattgtctaagaagggatgccaccagaaactatacatgggtgcaggtttatgaggaatccttgcatgacggccttctacaaggaattatagaaaagtagggctacttggtaatatacaactgagagggtaactgtgtccctcaacaaactactccttagtgcctctttcaaaggcagaatgttgatctgaatggatcactggtcaagtatggcatctctaatgttcttgaagggggaggaaggagatctggtagctggaaaatataattattccacgttaggctcacctgaattggtttaaaatcatattctgattctcttctcatcccttcctcccctcacccaccatatacctctggcatccctccatgcaaagaaatgtcgaataggcatttcttggtataatttacctacacttgtgcttgtggggtgggagtaaaaacatatccagtaagtaccaaggctaacctcctaatggctggagctcagttaggtctctgggctctctaaaggagtccagagctcttgtccatgtcacaaatggagccttagaatttctgtctttccttatgtggcagctttggccattgtgtcttgaaattctccctcaggaaatgtgataggggatattatcccatgggattttagtaaaaatcagcttgcctaatttcatattcgtgttcataatgaagaaatgcgaagtggtggtagtcctcaggattaagtgtaaaggaaaatatgcaaggaaaaagtagcagtgtcagcccttttggactgcttatgatttctgccttagagctacaagacttggaacaagaaataacaatacctcaagaaaatgtctggagagatagcaccactgtccctcaaagacttcagccactgcacattaccaattcagctgtgaagcatttacaactgtattatctgtgattgtctgcatttcctgtttacatgcatgtgctggggatatgctttagtgtgtatggactagagtttaaatcctgtctttaactgggctgcaaggatggctatcaatcccaaattctgttttcaactcactggaataattaatctggtgttcctgatataaaacaggtgggttctattcacatgatggctgctctttaccatatatttcacctgaccctcattttgccatgggcctcaacctttatgtgtgctttttatggctctgaaaggactggctcccgtgtgtggaatatacaaggtataaacaccacccctcacatacccctgtaacttaaatgcttccatttaactcacttagattactttccccttagtggtaaacgggttgggggatgggtggtagtgcaaagaaggtagtttgaaatattgccatagtaatatgggaactttttattccaaccctttaccctggcttttttttctctcaatatttgcctaaaattctaaaatgagttatagtaaaatcataaaactatggaaacaactgaactttggtacacaagttagttcgatgacatcttgttatttgagaacagtaaaaggtgtgtcattgcctcatgatttatcatagtcattactaagggtttcagagagaatctggtgtgaagcactatcctttcagacactaaggcctttacctagttgctcccctaccttctgtcggaataggattattcccatgcacctctgggtaggtataggtagtagctattgaacggggattattttccccatggcacaaggggaaacactcttggataaccttcaacaatgaggctttgctaagtggccagacttgggatttgatcttcctcacttgttatttattaagtttaagccttattcagtatctctaattgcaatagatatagttcctgtgacttctaaaaaaaattcctgttaatgctgagacagtatcttttttgtcagtttattaatttttggtcaagatttagcctgagtcttaaagcatttatttgtggaatgccccactgaagtgtcttctccattggctaagtacatgtttaaagccatgggttttaatgtaagatactttcagtatctaattctgtttcccccactgagggtgctaaagagaattagaatctttactaagacatgctcaggaaagcttcacgagagaacagcttcaaaatcctccctatgacactgaatggtagtgaggaaagaattcttggggatgccagttacatacaatagccttattactgctaatcactgtcaataaaaggtcacttcattcacctctatttgaggaaaacaatgagaatgtatctgatgaactagaatccttgtcagtattgggaaattttaatgttgcaatatctagtcaaactttgagtgtactggttctgtgaaccacctgaaaaaacaaattaaatgtattaaaccataa

SEQ ID NO: 13893 - DNA, 2804 bp, Homo sapiens
gccactgaggaaccacactgtgctgcggaaacatagacgtgggggcataggctcccactgccaccaccgccatcgcctcacctgcagctctgaagacccaggcctcacctccgcctgcaggacctcctcttggccacttggcctgggcctgccaccaccacgtcctgcagaacgagccctgccttggctgtggagaagcactccaggccgctagcagatgggactggcattccagagggtcaagaagtgacttgttcagaacacattgtttttaacagaaaaaaaatctttttataaaatgaacttttaacacttggctcaaacctctaggtcatactgccaatctttagacaaatggccatggggcagaggacaggggagctgaggttggttcagaggccagcctgcatagcctctgtcctcaggacggaacttgggtgcagctcagtgggtcggaagagaaggcggtggcctgtgggtgaggggaacggagcaggctcaggcagaattgagtacggtgcgtctgcttttcaaacccaaccatatcagctgctgctctttatgaactgcccaacttcctgtccctttcaggggctagacacaggcttctcgtaagaacacagccttagaggcacctgagcaactcaaaggtttccggtccatttctggggttcccgatgggaaggttcagtggccaaatgaagataagtgtgcagtttctagtgctgggaagtcttagccagcaccagagcgccaggcctctccctggcctcttacctgtcagtgatcggagcactgccctgggctggccggcgccgtactgcctgcgttgtgtcagagaataggaaaagcagctttgtttggggcattaatgcttggagtggggtcagctaaggttgctacttgccaatttgtgatttgtctaatcagcctgtgtgattggggctcattttgattctctgaattatcggtttgacggttacacttggctgctgggcccatccctggcccccggtgtggaaaaggctaaataaggtgacagtgcatcgatgctcccccgcgtggcctttggggcaggctggcatcccggtgcgcctctgcttcttaagctttcctgctgctcgctttgtttttaaaagtaacttgggttgcattcttccctctggactagagtagaaatgcaggggaaactgctgtggatttgagaggcaaagttggctcagctgtgtgcccagttcctcctgtgggcactttagcaggctccgagctttcctggcataggtcaatcaggtcccaggatgaataatccaggcttcagcaacactcctctttcccagccagcaaaggctgtgaatttgaattctttgttggtatgtatgtgcagggagtactgttaggcacattcttaacccatgtggttggccagaaatcagaagtggggctgtgtctctgactggctagaggccaggccttgtgggtttctatctgctaagcacccagcaggttggggcctgggactcagctctctctgcggtagaggcaggccctcctccacttcttggtactaaacgaagatctcgacaccttgcagttttacttcatttcctgcccctttcagggcctgtgaggatgcccatgagctaccgctgtacagttctcggccccggctttcttccaagagttgaccaggaaccctaaagcatccagagtagactgcgctgccactgcgcacatgctggtgcccgtcttcctcctaaggggccaggccacatccaagtgggcctctgtcgggggcggggcggtaggtccgaaagaaaccgcagacactacgatgcactcctcaagctgtcttttgtgcttagatcatccataggtgtttcttctgcttgaagctgctatatcatctttatttattcagggtattttcatattggaagccttggctagtctgctctagctctgggttctgtttagagattggtttatttctgaatattcaagaaaggaaaatgactgggcctttctttcttttcttctcctctgggatgggtagtctccctttcctagaaaggttattataactttaaggacaggcttcaagtgggaaggcccctacttttgcacttctccaagtgcaggtcacaccaggggcagaccctgtcgctgcgtttctgaactgtgaaggagcccattcgggtgggagacttcagatgggctcagtacctgtcccagccacaggcttcttgtccacctcttctcccctgcccaccagctgctcagcgcataagaccttcccgacaggctctgcgtgtgcagctctctgcgtccctcctgggccctccagcgtcagacactaatgggagttcccgagatgctcgggtttgagcagggagcaggcagagctgcagtcagagacattagaaaaccagtctgaattgggtctgtctttgagatgcccaggccagcagaaagcagctcagaagtattgttgctcatggtgtggcaatggactgaactgtaatgaaaatgttatttaatctttgtctctgtattttgatacttgaatgactttcccttttgttttactgtatataaaattgttaatctgtctgattttgtctgaattataaacactttgaggtaccaaacataaccaatctgtgcaacaacatagactgacctcagtacccaagagagtgtaaatatttctgggcttccagctttggttttgttattttcataactgtacacaacttagaacagactgaattaataaatgagaagcgacatgaacgcagccttaa

SEQ ID NO: 13894 - DNA, 2127 bp, Homo sapiens
taaccctaggctcagagacccaattttttaagcccccagactccttagccctcagagccggcagccccctaccctcagacaaggaactctctcctctctttttggagggaaaaaaaaaatatcactacacaaaccaggcactctccctttctgtctttctagtttcctttccttgtctctctctgcctgcctctctactgttcccccttttctaacacactacctagaaaagccattcagtactggctctagtccccgtgagatgtaaagaaacagtacagccccttccactgcccattttaccagctcacattcccgaccccatcagcttggaagggtgctagaggcccatcaaggaagtgggtctggtgggaaacggggaggggaaagaagggcttctgccattatagggttgtgccttgctagtcaggggccaaaatgtcccctggctctgctccctagggtgattctaacagcccagggtcctgccaaagaagcctttgatttacaggcttaatgccagcaccagtcctctggggcacatggtttgagctctggacttcccacatggccagctttcttgtctatacagatcctctctttctttccctacgtctgcctggggtctactccataagggtttacaaatggcccacaacactgagttagtggacaccggctaaatgaggaagagcagcaggcattgtcatggtgaatgccccgctgtagctccctgagagaaagactgtaactctgcaggacagaaacaaggttttaaagcattgccaaaaaaaagaaaacagaaagaaaaaatgtatcatctaaaggactagacacagaacaattggaagtcaacttcaaacactaatcccttttcttgtcttccctggcccagccacctcctcagccccatgtgatgctccctgggggagccctactccccttgctacatgttgtccttaaacatggttattgacctgaagccagcctaggccttgccctacagttgtttttcccttgtagccccagctggcttgtgggcttcaccaaagaggaccccactctgaagccagcctggagccacctacctctggcctcaggctgtgggcagcaaaaggaatgtgtgtgcacttggcgagcctcctgcccaccctgtccacacctaataagtgcaatcattttgagtctttctatgttgtctagacggaggggtttttgttttctgggtttgttttttgtttttgtttcttcttcctctattagcaaaaccctatttatagctgcccaagagaaaagagtgtatgtttggagtggaagaaaatcggttttgaatctcatgaaccttgagtgctggagcatctgatctgtctctatgccaccactggccacctagagcccttggctgtggtaatccagggtaattgcgcagaggcatctgatgtgtaggaaagtaattctggggatttgatggagcagaaaggagagagacctatgtttgctaaaccaatcttgctatccctatgcctctccatggagtcagtgtggacctcatgattatagaggccaatggaactggtcagtgattctctaccccaagtagggaaaacctccatcttttccctgtcttcatcctgttatcccctggtgtacacatggaagaggaccaggacataccacctggggatgggctgactcagggtcccgaggccagagacaaagctgtgggagccaagaataagacagaaggcatcagatatttgcctggctctggtcacttccctttgaagttgacttcaagcttagcttcctcaactactgtttttcagaaggaagaaagaatcaaatggaagaagaatcaagtccatgcccaagcccaaagcctgcacacattctgcccttaatccaagtgttgcctataaaattattttctgttttctcactctagttcccccaaagctgtagtcccaatcaatcaaaggctaccaactgagtcctcaggttcatttcttttttttttttttttctttttaactctcctggtaactcacagaacagctcaggttcatttctaggtgactgtcctaggctactgctcccccaggagactcaacactaaataaaggagtc

SEQ ID NO: 13895 - DNA, 735 bp, Homo sapiens
gtccaagagggctgggtcccacaccatgctggaggaagtgccatctgcatggccactcttgcccccaagggcccaggctgtggctgacacatagaaggtggccacataggtctctggggtgagaagacagcaagaaaactgcctaactgaagggaatgggggccctgctcaagaagggggccaggcagctggaatcaggggagtgcatcatcctcgggagctgacaacagccaggctacaccagggcacccgcctctcaaaatcagctgggcgcccactctcctcctaaagaacacccttctggccctcagtctgttccccttctcaggtagagattggggctgctatggggactggccctgtagggttgagccacagacagctcttcagcccagtagcagtggagcaggccctgtcctgccctcccagcaataaccacctccctggaggccagctgagatgcctggctacttggcaccagggacttcctgacaccacagtcaattaattcctcaggggcctgtggctgaagaaaaggtgcccagcccccaccactcctcagctgccccccaacctctctatggcagagaggcagggagtggccctgtacatagactgctggggattgggtttgatttgttttgttttttttaattccattttgataatttttttcctgctctgggtggtggtggcacatggatgaatgagtatttaataaaagttccaaatttc

SEQ ID NO: 13896 - DNA, 361 bp, Homo sapiens
cctctcttagccccttgttcttcccaatgtcatatccaccaggacctggccacagctggcctgtgggtgatcccagctcttactaggagagggagctgaggtcctggtgccaggggcccaggccctccaaccataaacagtccaggatggaacctggttcacccttcataccagctccaagccccagaccatgggagctgtctgggatgttgatccttgagaacttggccctgtgctttagacccaaggacccgattcttgggctaggaaagagagaacaagcaagccggggctacctgcccccaggtggccaccaagttgtggaagcacatttctaaataaaaactgctcttagaatgaa

SEQ ID NO: 13897 - DNA, 2097 bp, Homo sapiens
cggcggcacccaggcctccctgcagactccaatggggccagcactggaggggcccacccacatgacttttccattgaccagcccttgagcacccggcctggagcagcagagtcccacgatcgccctcagacacatgacacccacggcctctggctccctgtgccctctctcccgcttcctccagccagctctcttcctgtctttgttgtctccctctttctcagttcctctttcttttctaattcctgttgctctgtttcttcctttctgtaggtttctctcttcccttctcccttgccctccctttctctctccaccccccacgtctgtcctcctttcttattctgtgagatgttttgtattatttcaccagcagcatagaacaggacctctgcttttgcacaccttttccccaggagcagaagagagtggggcctgccctctgccccatcattgcacctgcaggcttaggtcctcacttctgtctcctgtcttcagagcaaaagacttgagccatccaaagaaacactaagctctctgggcctgggttccagggaaggctaagcatggcctggactgactgcagccccctatagtcatggggtccctgctgcaaaggacagtgggcaggaggccccaggctgagagccagatgcctccccaagactgtcattgcccctccgatgctgaggccacccactgacccaactgatcctgctccagcagcacacctcagccccactgacacccagtgtccttccatcttcacactggtttgccaggccaatgttgctgatggccccctgcactggccgctggacggcactctcccagcttggaagtaggcagggttccctccaggtgggcccccacctcactgaagaggagcaagtctcaagagaaggaggggggattggtggttggaggaagcagcacacccaattctgcccctaggactcggggtctgagtcctggggtcaggccagggagagctcggggcaggccttccgccagcactcccactgcccccctgcccagtagcagccgcccacattgtgtcagcatccagggccagggcctggcctcacatccccctgctcctttctctagctggctccacgggagttcaggccccactccccctgaagctgcccctccagcacacacacataagcactgaaatcactttacctgcaggctccatgcacctcccttccctccctgaggcaggtgagaacccagagagaggggcctgcaggtgagcaggcagggctgggccaggtctccggggaggcaggggtcctgcaggtcctggtgggtcagcccagcacctgctcccagtgggagcttcccgggataaactgagcctgttcattctgatgtccatttgtcccaatagctctactgccctccccttcccctttactcagcccagctggccacctagaagtctccctgcacagcctctagtgtccggggaccttgtgggaccagtcccacaccgctggtccctgccctcccctgctcccaggttgaggtgcgctcacctcagagcagggccaaagcacagctgggcatgccatgtctgagcggcgcagagccctccaggcctgcaggggcaaggggctggctggagtctcagagcacagaggtaggagaactggggttcaagcccaggcttcctgggtcctgcctggtcctccctcccaaggagccattctgtgtgtgactctgggtggaagtgcccagcccctgcccctacgggcgctgcagcctcccttccatgccccaggatcactctctgctggcaggattcttcccgctccccacctacccagctgatgggggttggggtgcttcctttcaggccaaggctatgaagggacagctgctgggacccacctccccctccccggccacatgccgcgtccctgccccgacccgggtctggtgctgaggatacagctcttctcagtgtctgaacaatctccaaaattgaaatgtatatttttgctaggagccccagcttcctgtgtttttaatataaatagtgtacacagactgacgaaactttaaataaatgggaattaaatattt

SEQ ID NO: 13898 - DNA, 759 bp, Homo sapiens
ccatccaccaagggaccaccctcttggtgctccatcaccagcttcctgaagggcatttctttcttcaccaccttgtcttgagccctagcctgaggataaaggctgagcctggccatcccagattgcaactgcctccctgttacaggctgcatagggaatattggcttcccagccagcagggaggctcctgggctaagggagctcagctatattttctttttcatttcttttgtttttgagagaaggtattgctctgtcatccaggctggagtgcagtgatgcgattgatcatggctcactgtaacctctgcctcccaggctcgatcctcccatgtcagcctcccaagtagctgggactacatgcacatgacactatgcccagctaattttttattttgtagataatatgctggtcagggctggtcttgaactcctgagctcaagtgatcttcctgccttggcacccaaagtgttgagatttacaggtgtgagccaccacaccaggccagagctatatttccaaaggctgctggccccaggcacactcctcatcaattctcaggctgcagggacaaactttccgatagggctcagtaggatcaagccgacccagagtgggcatgggatgctccaggaggtctggggtaccagtgggctcagatgaagctcttgtgctcatgtatattatgaccttctgtgtttttgtttctgacttgaataatttatcaatggtgttgaataaaagcaagttcaataatg

SEQ ID NO: 13899 - DNA, 31 bp, Homo sapiens
ggcacatttgaataaattctattaccagttc

SEQ ID NO: 13900 - DNA, 34 bp, Homo sapiens
aattaaggagagccaataaatgagtataggagag

SEQ ID NO: 13901 - DNA, 102 bp, Homo sapiens
aggaagatgcaggctggtcactgctcccttggggccataggccctggttgccaccaacttgctccaaatccagctcctgagacattaaagtcacttcctgtc

SEQ ID NO: 13902 - DNA, 1094 bp, Homo sapiens
gtcatctatttcccagacacaggaaaactagggaatcaaattcttcagagataagaacttgttcttccaagtttccttgttcctggctactataggcctgaagcctgaagccttttattataacactaaaactggacagtctcctgagacaagacctcctactgtactctttctggggaagcagaactgcagtgacccacttcaaagatattcagaggctgagcggtgcagggagtgctcagttgctggggatgggatccaagtccatttcttagttccacacagcagcaaatcgcttcaccttcttgaagcctctcctctgtaaagcgagagggctaaatgggtccatctctaggggccttccctcccaggtctgtgtctgatagcatacacacacacatatatatacacacacacacacacacacacacacacacacacacatacatacacacacacatatatatacacacacacacacacacacacacacacactctctctctctctcaaacacacacaaatgcccaaccagctctaagagggcactgaagaggtggctggacatgtgctgggtcatttttagggtgaggtgtagggggtcttttgcttctcccttctcatattttgttttcttattgctgctcagaggggggtaaggaatggaggggccatcagaacttgaatcctttaacatccaccaggaagttttatgaagagtgggtgataggatctaaaatctctgcagacttttttcctcccgggagccaaatatcacatttccttatggtgcccacactgactcaaccagaactggctaccagcttcagaaatgtgttacttatgttcaagtaatttgttataggaatagatgacatttttttttttcaaaaactttggatttggcatatagtcatctatagggggattggttccaggatcccctgcagatgccaaaatacatggatgcccaagtcctcagctaaaaatagcgtagtatttgcatataacctatgcacatcctcctgtatactttaaatcatctctagattacttataatacctaatacaatgtaaatgctatgtaaatactc

SEQ ID NO: 13903 - DNA, 2379 bp, Homo sapiens
gcctgacctatgatgaagtcatcagctttgtgccaccaccccttgaccaagaagagatggagtcctgagcacctggtttctgttctgttgatcccacttcactgtgaggggaaggccttttcacgggaactctccaaatattattcaagtgcctcttgttgcagagatttcctccatggtggaagggggtgtgcgtgcgtgtgcgtgcgtgttagtgtgtgtgcatgtgtgtgtctgtctttgtgggagggtaagacaatatgaacaaactatgatcacagtgactttacaggaggttgtggatgctccagggcagcctccaccttgctcttctttctgagagttggctcaggcagacaagagctgctgtccttttaggaatatgttcaatgcaaagtaaaaaaatatgaattgtccccaatcccggtcatgcttttgccactttggcttctcctgtgaccccaccttgacggtggggcgtagacttgacaacatcccacagtggcacggagagaaggcccataccttctggttgcttcagacctgacaccgtccctcagtgatacgtacagccaaaaaggaccaactggcttctgtgcactagcctgtgattaacttgcttagtatggttctcagatcttgacagtatatttgaaactgtaaatatgtttgtgccttaaaaggagagaagaaagtgtagatagttaaaagactgcagctgctgaagttctgagccgggcaagtcgagagggctgttggacagctgcttgtgggcccggagtaatcaggcagccttcataggcggtcatgtgtgcatgtgagcacatgcgtatatgtgcgtctctctttctccctcacccccaggtgttgccatttctctgcttacccttcacctttggtgcagaggtttcttgaatatctgccccagtagtcagaagcaggttcttgatgtcatgtacttcctgtgtactctttatttctagcagagtgaggatgtgttttgcacgtcttgctatttgagcatgcacagctgcttgtcctgctctcttcaggaggccctggtgtcaggcaggtttgccagtgaagacttcttgggtagtttagatcccatgtcacctcagctgatattatggcaagtgatatcacctctcttcagcccctagtgctattctgtgttgaacacaattgatacttcaggtgcttttgatgtgaaaatcatgaaaagaggaacaggtggatgtatagcatttttattcatgccatctgttttcaaccaactatttttgaggaattatcatgggaaaagaccagggcttttcccaggaatatcccaaacttcggaaacaagttattctcttcactcccaataactaatgctaagaaatgctgaaaatcaaagtaaaaaattaaagcccataaggccagaaactccttttgctgtctttctctaaatatgattactttaaaataaaaaagtaacaaggtgtcttttccactcctatggaaaagggtcttcttggcagcttaacattgacttcttggtttggggagaaataaattttgtttcagaattttgtatattgtaggaatcctttgagaatgtgattccttttgatggggagaaagggcaaattattttaatattttgtattttcaactttataaagataaaatatcctcaggggtggagaagtgtcgttttcataacttgctgaatttcaggcattttgttctacatgaggactcatatatttaagccttttgtgtaataagaaagtataaagtcacttccagtgttggctgtgtgacagaatcttgtatttgggccaaggtgtttccatttctcaatcagtgcagtgatacatgtactccagagggacagggtggaccccctgagtcaactggagcaagaaggaaggaggcagactgatggcgattccctctcacccgggactctccccctttcaaggaaagtgaacctttaaagtaaaggcctcatctcctttattgcagttcaaatcctcaccatccacagcaagatgaattttatcagccatgtttggttgtaaatgctcgtgtgatttcctacagaaatactgctctgaatattttgtaataaaggtctttgcacatgtgaccacatacgtgttaggaggctgcatgctctggaagcctggactctaagctggagctcttggaagagctcttcggtttctgagcataatgctcccatctcctgatttctctgaacagaaaacaaaagagagaatgagggaaattgctattttatttgtattcatgaacttggctgtaatcagttatgccgtataggatgtcagacaataccactggttaaaataaagcctatttttcaaattt

SEQ ID NO: 13904 - DNA, 55 bp, Homo sapiens
attggggatttgaagaagagtttctccttttgaccaaataaagtaccattagttg

SEQ ID NO: 13905 - DNA, 691 bp, Homo sapiens
ggactcatcttgcatggcaccgccggccagacactgcccaaggaccagtatttgtcactaccaaactcagcccttcttggaatacagcctttcaagcagaggacagaagggtccttctccttatgtgggaaatgggcctagtagatgcagaattcaaagatgtcggttgggagaaactagctctgatcctaacaggccacgttaaactgcccatctggagaatcgcctgcaggtggggccctttccttcccgccagagtggggctgagtgggcgctgagccaggccgggggcctatggcagtgatgctgtgttggtttcctagggatgctctaacgaattaccacaaacctggtggattgaaacagcagaacttgattcccttacagttctggaggctggaaatctgggatggaggtgttggcagggctgtggtccctttgaaggctctggggaagaatccttccttggctctttttagcttgtggcggcagtgggcagtccgtggcattccccagcttattgctgcatcactccagtctctgtctcttctgttctctcctcttttaacaacagtcattggatttagggcccaccctaatcctgtgtgatcttatcttgatccttattaattaaacctgcaaatactctagttccaaataaagtcacattctcaggttccaggtggacatg

SEQ ID NO: 13906 - DNA, 2181 bp, Homo sapiens
gggcagggctgggcctgcatccgcttgccctgcctccatcccgcagggcacagagaagcctcttctgcccctgccagatgtatggccggcagcttccccctctcatggtaggccagggactgggctttctccccactaagggcaaggccccagttttgaccaatcgcatggttctcctggcaggcctgctgtgtgccaaaaactcccacccaaggtccctcaggggatatttcactgaagaaccagttagaagtagaaacagctgtggggcttgggcccagcttaggagattgcccagatggcaagaggtcctgggctccttcttgaggggctgcctggcccgctccatcctactcccactaactacacctcagggcgggtgaggttccgacactgatcccagagatgccgtggatacgccagggtcccagggggaatctccccaagctcacactctctcccgcttatcgcctattctcacacctcttctcggtcccatcttctgcacccattgcccagtcttgctttctctttcccatattccttttctttttctcttgtgccaaactgacagaaaccgtcaccacactggtctttttctttaatgtctcattccccttgaggccagctgctatgccaggtggtgtctctgccaggctcctcaggcccagacagaggccagcccacaacctatgaccccctcccccaggacaccacctcccacccacagaccttccctttagctgttgacacaacttcccagctctgcaagtgtgccccctggatcaaggcgggtcccctcttgtttttttctttgctgccacgaggtggtccaagccttcagggtgggctcctatcaggctgggtgtgcgagtgtccatctgtccacatggatgtcgagggtggtttgtgtggagctgtgctcgtcagctgggtctgccctcttcccccttttctccttcttctctcctcatggactttttctgcaattgcagtcttaagcttcactctccaccacctggatggcatggcgcctgccaccaaacatcttcctggcctgcgctctgccctgccctgcctagcctctgctactcccacttcccaactccagggaatgcattacttttatttcaaaccctctgcctccttccttctttctcttcaaccccctccccaccttcaccttctcaaaaatggaaggaaaaaaaaactgtgaatggggaatgctgactgacaaaccaacacaactttcagaggcttcagtgtctgttctctggacatttcttttcacctcctgagcaccaaagtcgcagggccagttgcaggccgctgattgccatgttgatttttaacctgatattctttttaattgttttaaatttttcataggggagttttggacaaaacagtcactggggagatcactgccatttttacacacttgactttttaaaaatacaaccaaccaaccaccacaacttcttatacatttgggacatgagccagagtttaaaagggaaccaacaaaacactataacttaaaaggatggggttttggattttgtataataataaaaacaatacagcatatggctagggaaggacatggtgtatataattgtaaaatactgttctaaattattcaggcctatagtttccattactggagtcctccattgtgtggccacacagtgtcgttgatttaaaggagccagtgcttcccctctccccaggtagttggtcagctgtggactctgtgacctttgtctaaacctgtgttgtaagatcttgggacttcctctctttctatgtctatctcttccccccaacactttctcttcttagtctctctctttatttttcaatctctgaatattttagtctctctctgagtctcattttttaaaatgctcttttagaacgggaaacggctcagatcctgctgtggcacggggcctatgtgtctctgtcgcgtctgctgtgaagcacatgatgctctatttattgtagagagtgactttatttgctttctagaattgtttataacagatggtataagagaggtaataaacagagaaaaatctatgcttgtaaagaatacaaaagttaattttacctactataatatgactgtctgaaacttattttctctctgagaaataaatgttctaatgggcagta

SEQ ID NO: 13907 - DNA, 879 bp, Homo sapiens
gcatgtctaatgttccttaaatcccacggagaggagcagctttgggaactgtgttcagagagattccgaggaatagaggagagtgtaagggagtagggggtgcagtgggagattgggctttggaacagacacatccgacataaaattcctgctctgccacagctccactcagggatcatggttgggacacttgctctccctgagcctccatttcctgtaaaatggggatgataccacttcataaagttgtgagagttaaatgtgatcgatgatgtaaattgcttcatagaatgcagaatgtgtaatagctcacaataagtaggtattatgtttacatattatgtttgtatttatgctacttaaatacaaaactggacaggccaggcatggtggctcatgcctgtaatcccagcactttgggaggctgaggtaggtggaaaacctgaggtcaggagttcaagaacagcctgaccaacatggtgaaactccatctctactaaaaatacaaaaattaaccaggcttgatggtgtgcacctgtaatctcagctactcgggaggctgaggcaagagaatcgcttgaacccaggaggcagaggttgcagtgcaccaagactgcgccattgcactccagcccgggcaacaagagcgaaaccccatctcgaaaaaaaacaaaacaaaactagacaagtgagtgcctacgtgacactcaaatgttgccagcatacagttaagggccctagtcaatgtaggcctgcttcttatagctttttgactatattatgctgtctttgacttagtcagtcaacacttattgagcacctactaagtgccaaacactctcctggactctggcaaaataaaaaatgaattaaaactct

SEQ ID NO: 13908 - DNA, 3361 bp, Homo sapiens
ggccagctgtgggtctactccttgttggagcccatctcacctgggatgcctgcagccagccctccctcgtgatttgtctcaccttgagtaggagacatgcttctcccctaaccttttcctttctgccataattaacatatgtccttttcagtaagtccatgcctctggcaggggatgaagaagtactcactggtaattagctaccatctttgcagcagccctggtaacttgaaaaatttgggtctggtgctgttcattgagtctttgtgtaactgcaaaagcaggaaaggaagtcaagactcctgttgcctcgtgcttagcaaagcagtccttatcctttatactctgttcttgggttttgtttttgtcttgttttataccaggcaaattgcttagtagcaaagggaccaaactgaaaaggtgacaatctctaacttctaaaagcagacaccaatcggatgctcattagaggttaatgaagatgccattcttggtggcctctgcacccaaattgcatctggaaagaactagggtctcattcagaatgtccaaaaggaaattcttaagagcttaaattcagatttgtgtctcattaatgcagtgaacaattcaaaaccacacagattccttggcaggaaggataatggaataacagtgttgatgagacctttttagcttcaaggtttcggagtctaaacaaatggatgattcatttggaatgaaactcacaatgcaagtagaaggacctctccaaatcaggccagttgggttatcctggcttggaatctggtgtgaaaccataggtcttaacactctggagcagcacattgctgtggatatgtccaggagaccttagatatggcttaaaggctttcaagatgaggacagaaattgcttacaattgctcagtttctcaacagaaagactcataagagtgccagcatggggtacatggagtgaagctgggtgggaagcatcatctgcacagtccctgtcctagtgcaggacttttctctgtatgttttcataccatgggatttttggatatcagtgtattttggttcttgaaatagcctaatagctgctcacacattgggtaggaatattataccaatgtcatccccaaaggaagggtgagctgaatggaaattaagcccagtcattttatttgatctattagctctgttatcagtgcatgatcacccagatcaccctcctcagcccacacagtgctgaaccatcttccctcctgttctccatggctattaatagtatagctaaatttagagtgcagagccagatataagtattttggaattatctcccagtttgtggtagaagctgactggaatacaggttgagtatctcttatccaaaatgctagggaccagaaaggtttcagattttttcagattttggaatacttaacagttgagcaccccaaatctgaaaggcttctgaacgtcatgtcagcactcaaaaaagtggattttggagcacttcaaatttcggatttttggatttgggatgctcatcctgtgtaggagaggctactcgattccatttaatgactgtcctagtcataatcatccaaagataaaagccaggtagatgttgaaagctctttccagggctgaaaaagtgttcttacgttctctgcatgtgactagcatcactgtggaaattaatgctctgttcttcactagaatgtagtaagtggttaaactgagctatcccccacctgatgactattggcatccatttgcaaggccaatggcctggattaagggttaggattatttgtagctagaaggtaattttatttctgtgaaactaattggctcatatttgaggttaggtgtggccttgaccttaccagtacatttatacccactaccagttgactagcccagataattgttaaatggtgcttcttttctgcttctcagtagacttccatgccattacaaaggaaatttgaattacctagtgtttgtatattccatgataactatgtataacttctgttacacagcttatgtattgttaacatttaagtgtaaaccatgccacagctaacacttaaaaatgaaaactaattagttcttgcttagggaaaatgccaggtatgaagtatggcatatacttgacactgtcctgtgtaaccctttactttgctcaggctttcaagattgagtcttttttcccccaaattaggttaacatgcatttgaccccaacctgtggggtttgagtaagctggaaatctgtgacggtaggctttctagtgtcacgaggtggtggtgactgaaggaaaagctgggatcacaggttccttctgatggagaggaaggtttatttctatgcccctcccaccaccctccacctagagctcacccaagcctgctccagtcccaggggcaggccattctgcaaaagcaggacctcacagaaacaagggctgggttgaggtcacccccttcagagttggttcctggccagatgggtaagaggcatttgtaattttaaaaatgtgaaacttgggtttggtgttttcttctaagtgcctaaataagcaagccaggctgttgatattttagccagagaaatcggcaagccaagattaacccgaatctgaagtttagaatcttgagtttgcatctgcatcatatcatgctgttttgatgaggaaacatttgccactgaggagttggagggagggcaagacgacagtgttaagtcagatcatttaatggtttcccctaagccctggaaaaatatttgaaagaatggcagcaaaaaggttaagaaagcaagccagatttactgcacaatatgcagtacccagtactactttaaatcccaagagaacagtgtgatgtctaatatatacaggtctatgaaaatactgtggaataagcccaggaaggttagatgtgtttgcaaataagttgcccaaagggtccccctctaagtaaaacaaatattcagaccacaggctttaatgtaaactgtcaaaaagtgggatgtggaggatttttgttaagtgtcaatcgaagttaaaaagcaagggtttttggccaggcgtggtggctcacgcctgtaatcccagcactttgggaggccgaggccggcaaatcacctaaggtcaggagttcgagaccagcctggccaacatggtgaaaccccgtctctactaaaaatacaaaaaaattagcccggtgtggtggcaagtgcctgtagtcccagctacttgggaggctgaggcaggagaactgcttgaacccgggaggtagaggttgcagtgagccacgatcatgccactgcactccagcctgggcaacagagcaagactccatctc

SEQ ID NO: 13909 - DNA, 1443 bp, Homo sapiens
aagacagtttgcaagagaagtggtgtacaggaaattacttcatttgacaggagtatgtacagaaaattcaagttttgtttgagacttcataagcttggtgcatttttaagatgttttagctgttcaaatctgtttgtctcttgaaacagtgacacaaaggtgtaattctctatggtttgaaatggatcatacgaggcatgtaataccaagaattgttactttacaatgttcccttaagcaaaattgaatttgctttgaacttttagttatgcacagactgataataaacctctaaacctgcccagcggaagtgtgtttttttttaaatttaaatacagaaacaactggcaaaaattgaactaagatttacttttttttccatagctgggatataggctgcagctatagttgaacaagcagtctttaaaaactgctgtgaaacacaggccatcagggaaaacgaaatgctgcactattaaattagaggtttttgaaaaatccaactctcatcctgggcagaggttgcctagttggtatagaatgttaagtttcaagaaagtttacctttgctttaggtcataagttccttatttgattgctgtatatggatacatggctgttcgtgacattctttatgtgcaaatttgtgatttcaaaaatgtcctgccagtttaagggtacattgtagagccgaactttgagttactgtgcaagatttttttttcatgctgtcatttgtaatatgttttgtgagaatccttgggattaaagttttggttacaaattgttctttaacttgaaagcctgtttttccttgcaaactcaaatctgtgagcttggtaccaagtccaggtataacattcctattggaagccatacttatattttcttgtaaagtgcttttgaattaataaaatattagcataattgtgtatagtcagttgaacccactgttaccattgttcttatcccatgggaagcagttggttacacgattcttattttataagaaacagctgagaggcactatggattagtcttctgaagtgaaggaaatatagatgtcacctaagtgatagttaacccattttttttttttttaggcatagaagccagttcagggtccataatatttagtgaccaacattttaaagtatagcagcaacctggttcttaaacacaaagtaagttgcccattaacaaatggcttttatctttagcatgaaaactttccacaggtctaaaaattgcttccattttataatttgaggtgttgcatgggaattctaagctgatccatcatgatgtaaaagttcacaatatggttcaaatgtaacagtgcagaattgaatatggaggcatgcataaccttcctcttagaaaatggcaggtgttgtaatttcaaatttttgtgcaattagattaaatcataatgcaacagtc

SEQ ID NO: 13910 - DNA, 1531 bp, Homo sapiens
tccgcccacaggaagcctgcagtcctggaagcgcgagggcctcaaaggcccgctctacatcttctgccttagtctcagtttgtgtgtcttaattattatttgtgttttaatttaaacacctcctcatgtacataccctggccgccccctgccccccagcctctggcattagaattatttaaacaaaaactaggcggttgaatgagaggttcctaagagtgctgggcatttttattttatgaaatactatttaaagcctcctcatcccgtgttctccttttcctctctcccggaggttgggtgggccggcttcatgccagctacttcctcctccccacttgtccgctgggtggtaccctctggaggggtgtggctccttcccatcgctgtcacaggcggttatgaaattcaccccctttcctggacactcagacctgaattctttttcatttgagaagtaaacagatggcactttgaaggggcctcaccgagtgggggcatcatcaaaaactttggagtcccctcacctcctctaaggttgggcagggtgaccctgaagtgagcacagcctagggctgagctggggacctggtaccctcctggctcttgatacccccctctgtcttgtgaaggcagggggaaggtggggtcctggagcagaccaccccgcctgccctcatggcccctctgacctgcactggggagcccgtctcagtgttgagccttttccctctttggctcccctgtaccttttgaggagccccagctaccctttttctccagctgggctctgcaattcccctctgctgctgtccctcccccttgtcctttcccttcagtaccctctcagctccaggtggctctgaggtgcctgtcccacccccacccccagctcaatggactggaaggggaagggacacacaagaagaagggcaccctagttctacctcaggcagctcaagcagcgaccgccccctcctctagctgtgggggtgagggtcccatgtggtggcacaggcccccttgagtggggttatctctgtgttaggggtatatgatgggggagtagatctttctaggagggagacactggcccctcaaatcgtccagcgaccttcctcatccaccccatccctccccagttcattgcactttgattagcagcggaacaaggagtcagacattttaagatggtggcagtagaggctatggacagggcatgccacgtgggctcatatggggctgggagtagttgtctttcctggcactaacgttgagcccctggaggcactgaagtgcttagtgtacttggagtattggggtctgaccccaaacaccttccagctcctgtaacatactggcctggactgttttctctcggctccccatgtgtcctggttcccgtttctccacctagactgtaaacctctcgagggcagggaccacaccctgtactgttctgtgtctttcacagctcctcccacaatgctgaatatacagcaggtgctcaataaatgattcttagtgacttt

SEQ ID NO: 13911 - DNA, 5521 bp, Homo sapiens
gaaatagaactgtgcacaggaacagcttccagagccgaaaaccaggttgaaaggggaaaaataaaaacaaaaacgatgaaactgctttctgggggttggttacttagttacctgccctttgcatgcatgtgtgaaccagctgtgagctgcaaggcagtggccagagcctcgccctcctgactcttcctgcaggtggctcaggaaggattcagcctggccacttggctaggactctgccagcacccatctgagactgacctcttccgggcctttggacactatgaccttgatgctgcccttcaggcaggaaacagggctggtgcctttcttcacctgcatggccagcttccttccctggcagtggagagggcagccaacaggttctaatgtcagagccatcctttaccaggtgggcctgcttgtccctgtcttgcctgccacatcactctactttttggaaggccatggctgattaaagaagttcttgtagtttcccaagcaaagtggaatctagaaacagtgaaaaaagttcagataactttgaattgcattcaagaagtacacttctttcccattgtccgtggctcttggagtctccgtgatgccaggctagagtctgattatataataattcaaaatggtaactcccaaggtaatgctttcttccatttcatcaggttcttttatccccactgcaccccctccccttctcccttgcctatctggatggcttctcagaagctcggccctagtcctccctgccttggcggggccagagcccactactgctgaggcagcactgctctcgtcagctgtgttgcctttaccaagtgtcttcagagggttatgagttagagtagctggcctggggagagggtgcctccctgggtttgatctttagggtctgactttctgcagagaagatgttttacagatgtgtcaaagctgatgtaatgtggttgggggaggaaatccagacccaaagtgtttgtcagctgggtgtacaactgcctatgtgatcctctgtcttaaaatgatttctgtctgtgctgcgaaacaaagacaaggtgaggtgtttttcttttttgtaataatataaagctgtgtgtttctgattggatgattcactatgtgcattgttttctcctaagtgcttttagtaggtagcaatcaaatggtgtaaataaggatgttcttttcctgttccttttatttttttctctctttattattcttttattgacaccactagatagctggccactggtcatgccattgccaagatgaagaaaaagcaaactacactttggcctctggttctgaattgcagaaatcaaaggatgcagtaggtgtctatgtcagaattatggatcagaggcagacaatgacgagtgaagatggttgtgaagccctcttcattcctggaggagcctgcatctcatctctcaggccctctttctctgtgggtctcatgaacagcagtggggaccattgagcacttgaatggcctgtttgtctatgggcttgcaaaggacaagcagagttcacagagctcaggatagaaacatcagagcctcctccacgggcttcagtgaaactccgatgaactgtacctgagggaattttttcttaatcaaccccttgtgtggatgaatacaggaacaacaaaacttgtgtacgtatgaaagtcatgttgttaagcagttatgatttaagaggttttaagtcagagggatcatctggaggccggctttgtgcaagcttttacagccttctgcagtgtccttaccctggctgtacatggggaagggctatgtgtaaacaagtgctttagaggcctctgagagtttttaaaaatcagacccattaacaaaagagagggtttcttaggaacaaagcaactattttgattactgagatctctgttttgtttctgtgagttactctgtattcctttccccatttcactcttgcccttcacatcttaaatgtccataagaaacccttgcatgtgttggtattctgaggcatcccgtgggaaagtcccctaagtcccattttgtacttcaacaaaaaatgactgtagcagaagataagtggagacttttatggatatactactcattttacttaaaatctacccagttcagacttgaatgtaaacttgtattaggggaaaattctccaaagagggttttctacatacacagaagcagttcaacttctcaagttaattttgataagcagaatctactactggccagagcgacaggagtggctaggggttgccagccagtccctttctgatgatcaaggccctgcacagcaggatgccacaggatgcccctgccatctagctggaagcatcaaaagtccctctgtatgacccggtgtgggaaagagggttgtcaggatgagaaagtggggctgcagggtgacgataagaccacctaaccaactccccacctccaccaccacaataagaacaaaactgtagggctctaaagagagggggtggtttacaagtttattgagcatttactaggaagtgacatggcgatgacctctgtacatgagttaggttcactttcatgtggcctcccactacagagatgcgtatgcccagaagtcagctctctgaggagacaggctactttggccccagtttgaagcattctgtccaaatgtcctgagctctccagcagtcaagtagtgaatggataccatacttattatggttgatgaaaaaaggcagagcttatcctcaattttttttagggaagagaaggaataaaataaaagtggttcaagctgggcatggtggctcacacctgtaattgcagcactttgggaggctgaggcaggcagatcacttgaggtcaggagttcaagaccagcctggccaacagggtgaaaccccatctctactaaaaatacaaaaattacccaggcgtgatggtgggcgcctgtaatcccagctacacaggaagctgaggcaggaaaattgcttgaaccggggaggcggagattgcagtgagccaagattgtgccacttcattccagcctgggcgacagagcgaaactctgtcaaaggaaaggaaagaaaagaaaaaaaaaaagagagagagaaaagaagaggggaggggagggaaagggaagggaggggaggggaggagaggagagcagattgggggggctcatgttctgagagaaaggaataatagcatttgtctagtacattccagtttacaaagtgcctgatatacatgatctcctttaatcttcacccaatcctgtaaagtaggtgttagatccccattttgcaagtaaataagtggaggcttagagcagttaaccgctggcaggtaggtagctggttccatagcacatcattttcctgcggcatcacggcatggtgccgaagaagacagctgtggatgtcgttgactcagatgtgcctccgttggggtgggagaacccagggatgggggtcagcaagccaggaactccgcagggtttgtttttaaaactctgctggacagaagtggaggaggaaagaatctaaccatatgacttttataaaaatcctttcacttttcccctccccatttgaaaactctttttaagagtgaatgtagctgaaacacaactgtgtccagccattttcctgtctccacattcttccagatgtgtgacagaggagggactctgctcaattccagttgtgggtccccttggagtttacatcacttgtttttcaattcttggttttctgttcccttctaccaaaacccagcataggactcagtgtacacttactttaaaacaaaaactcacatttcttagctgcaggtgatggcctcagtcattttaatacagcctggaatgagtttgcttattacccagtcactttcgtagtgaatgttcaaaccccaaagcaaatgtttgcatctccttgtccataaaggagaaagccaggttataggagaaagagagagaaaggcgcatgtctgtttgcacagagagaggcaattttgtctacctttcgagaatcagttataaacagaagggcctcttaggattttgagctctcctgacaatgaaggaaaagctctcttgagtatacaagttccacactcattacctttcagtggtgacccatcacccactacaatttgttgaaggaagggagtgtcagagatatgctttaaagttgtactttaggctgaaattctctctgtatttggacctgcagatgttgtgtacagaaccgatgcatggcagggtcaggaagctaggagagtgaaggcgcttgtggagacagctctgtagcaaatgaaacacggaagcctccgggaatgtgtttgtgtcaccagcagcaggcatttccctgtcctccccacccccagtctccacatccccagcagcctcttccagaagcatgtcagggagacggacaggtgctctccttctcgtgcaccacatccaagtccacccaccgtggacgcagtgtgactaaatgctggccttgaagagaaaccctcagccagcttgtctgttgtccaggtccctcagtgtctctggtttccctgccctgcataatttaagcattagtgccaaatacatctgtcatattcctctccctggagactgcgaaatgtccagactttttcagactagtggagggaaggaatgttacataactaagtggaggcctggaactgtcaggatttgacagggctggaccagagacccttccgcctctgcctagtgtgtctgtcaggcaggcagcagccatcaatccaagaatgagccatggcggcaagcactgtgtggagaaaggaacccagccgaggtctgagtttcagacagaaactggggagttgggacatcttctctgtgccaggcttcattgacaccatcgctccccacagcagctccttggggcagggggctcacctgtgcagccacccttactcacagtagcatcccattcttcacactgcaaccccccagcactgtggacccttccagggaggtgacaggagccagcagacacatgacattcccagaaagccccatcttatccagacaggcttccctccatacttctttccacagttttaccctcagaaaaatgttggctgcagtcttcccttccttcacctccaccctggggaagggtcagtaaccaatgccgagggtcggggaaggaggagtcacaggcaagacagggactcagcgcagtgctcccgccatcatcggggacaggtgccagggtcagctgcagctctccttccgggagcagggtgtggtggccctggatggtcccagggagcagagggaggcaggcagctgtcacagccacagcggctctgaatggcttgagcttttagtatgtgttcaagtgcaggatactacaaactggtaaagacttccaccatgtgaagaatgtatgtaaattaaagtttattgtaatgaaggtttttactttttgcaattaaaagtgttggttgataag

SEQ ID NO: 13912 - DNA, 450 bp, Homo sapiens
ggtgaagaggtcagctgtcctcctgtcatcttccccaccctgtccccagcccctaaacaagatacttcttggttaaggccctccggaagggaaaggctacggggcatgtgcctcatcacaccatccatcctggaggcacaaggcctggctggctgcgagctcaggaggccgcctgaggactgcacaccgggcccacacctctcctgcccctccctcctgagtcctgggggtgggaggatttgagggagctcactgcctacctggcctggggctgtctgcccacacagcatgtgcgctctccctgagtgcctgtgtagctggggatggggattcctaggggcagatgaaggacaagccccactggagtggggttctttgagtgggggaggcagggacgagggaaggaaagtaactcctgactctccaataaaaacctgtccaacctgtggc

SEQ ID NO: 13913 - DNA, 905 bp, Homo sapiens
gccactgccagccgctctcctgcccacctctccccaccctgaacccagctcctgccacagactgaccctgtggcctcagtgacccactgccccaagtggtgctttcagagaattgattcagccatctgcgcccaggccacgtgtcccgatctgggattagaaaatatgggtccattcctttctagaaaggggacaaccaagtgtctcagtttgccttgcggggagggggctcctgggccatgggacttccagtgctaaaactgggaaagccccaggtaaccccggactggtggtcaccatagtatggtttttcatttgtatctcctggggagcttttaaagagtactggtgaaaaacacatagtaaattaattttaaaaatgtaaaaaacaatgcctgtactgaagtaccaccaccgatttaaatgggctgagttgggggaggcatggggtctttttttttttttttttgagacagagtcttactctgtttcccaggctggagtgcacaaacatggctcactacagcctcgctctcccgggctccagtgatcctcccgcctcagcctcccaagtagctgggattataggtgtgtgccactgtgccaagctaatttttttattttttgtagagatgggatttcaccatgttactcaggctggtctcaaactcccagcctcaagcgatgctcccacctccacctcccaaagtgctgggattacaggcgtgagccaccatacctggcgcatgcatattttttaagagtacccactggagtctaatatatagcctgggttacctgggatgaagaataaagagagcaaactaccacaaccaatggttgagcccctgtcaagtgccagtcatgatagtagtaataataataataaacatctattggaccag

SEQ ID NO: 13914 - DNA, 1335 bp, Homo sapiens
cagcctttctggcaggtcctcccctctcttgtcagatgcccgagggaggggaagcttctgtctccagcttcccgagtaccagtgacacgtctcgccaagcaggacagtgcttgatacaggaacaacatttacaactcattccagatcccaggcccctggaggctgcctcccaacagtggggaagagtgactctccaggggtcctaggcctcaactcctcccatagatactctcttcttctcataggtgtccagcattgctggactctgaaatatcccgggggtggggggtgggggtgggtcagaaccctgccatggaactgtttccttcatcatgagttctgctgaatgccgcgatgggtcaggtaggggggaaacaggttgggatgggataggactagcaccattttaagtccctgtcacctcttccgactctttctgagtgccttctgtggggactccggctgtgctgggagaaatacttgaacttgcctcttttacctgctgcttctccaaaaatctgcctgggttttgttccctatttttctctcctgtcctccctcaccccctccttcatatgaaaggtgccatggaagaggctacagggccaaacgctgagccacctgcccttttttctgcctcctttagtaaaactccgagtgaactggtcttcctttttggtttttacttaactgtttcaaagccaagacctcacacacacaaaaaatgcacaaacaatgcaatcaacagaaaagctgtaaatgtgtgtacagttggcatggtagtatacaaaaagattgtagtggatctaatttttaagaaattttgcctttaagttattttacctgtttttgtttcttgttttgaaagatgcgcattctaacctggaggtcaatgttatgtatttatttatttatttatttggttcccttcctattccaagcttccatagctgctgccctagttttctttcctcctttcctcctctgacttggggaccttttgggggagggctgcgacgcttgctctgtttgtggggtgacgggactcaggcgggacagtgctgcagctccctggcttctgtggggcccctcacctacttacccaggtgggtcccggctctgtgggtgatggggaggggcattgctgactgtgtatataggataattatgaaaagcagttctggatggtgtgccttccagatcctctctggggctgtgttttgagcagcaggtagcctgctggttttatctgagtgaaatactgtacaggggaataaaagagatcttatttttttttttatacttggcgttttttgaataaaaaccttttgtctt

SEQ ID NO: 13915 - DNA, 1797 bp, Homo sapiens
gtgctgtctcctccggggacccagactgccttcatctctgatggcagtctgatcactgtggccactgtgcgagccgtggaccccggccaggaaccactcctgttgtacaaagctcacacccaccgcccaggtcttaactttctggcatccaccactccatgtctctggatgtgtcacttggaccactgtcagtattccatgccgcgtggatgggcccagttctgggagaggacagaaaaggtggtacagggttgtctgcccctttaaaagaaactggacaaagaaggggaaggctcagggtctcacctcacattgtccctacaaggacaggccccaactgataaccgttgcttttttttttttgtgaacatagtttgatttgatcacaggtcaaaaacgccttatattttcgaaagactcctggcccctcttccctcttcctggtttcctagccgttccccttctgccccagtctgagccagtgaggggtagctttttaaaaccattattctagatggaggaggcactgatgcttgtaactctggaaagaggcctacacccaagggctaggaattttatttttccttttctcaccaggtgtctgcatgtgtgtgtgggtgtgaatgtgtatacatgcccatcagcatttagtcacatgtctgaatttctgtgtccagacgagccccatcaaactagttgggaagggccccagtgaccaagtgtataagcatcccttgaagagggattggggcaggggaggcagaaggggctctccagaccccttttccatgatgacccactccaagatattatgtgtaaattgtgttattatgtatatgggtaaagatgtacaaatatatgtcctctttgtagcagatatgattttatatttataatgtgcatcaacatgtgaaagcaatctaggtcactagcacagaggaagttgccaggaaggtggcttcagcacctccaggttggttctgggtgtcctgctgtgaggggtagaacgggaggctgctgaagtgagtagctgagcagctggagccatcccaagcatcagtgtctcagagtcctcctcgcccctttcttcaccccgccccccaacccccagactttcctggagcatctgccctttgctcctagcagcctccccaggaagggactgcagaggcgggcaagccctctctatgtgtttttatccccaccttccccggaatctggggagggcttttgtttttacgttttcaagttcagcattgtattcggacagaagctgtgactgaagactcagtgccaaggaaaggggcttcttgtgtgtccctcgggtttggggctcttctcagagagcagcactccatatcccttactgtcaccttcactccccacacagctcatgagatgtgtgacccctgtttgagttttggtatttggtagtggagggtggggggatgggggccagcagctgtcatcctcctgggaagccgagcagtgtccctggtgggtaacaccctcaagtctctttgccagtgaggccccaccacatcggtgtgagttaggtttctcatctggagctgtttctcaggcattcttcccaaccctcttccttttccccttcggtgtgcctcagtggtctccttcatagagtgagagggcttgagaccctccctcaaccggactaattaaagaaagacacttgtgttcccaagtggtggttttatttttttagtttttatgtttgtatgggaaattgtggataaagtgaaaagaattgtaaataaatggtgtatttcctcctcc

SEQ ID NO: 13916 - DNA, 3979 bp, Homo sapiens
agaccgtgctctaagggcatttgaaagactgccaggtagtgcgagcctgagatggtctggaggattctctctagccgtgactccgctgctctgaaggtcaactgagaagtcttgtgggacagagacttgagttaggaagccctcagtcacttgccttccacggtggccagccctgctgccatcattggctgaagcaccaccaggattcacggcacccaactgcttcagggtacttcgtagactctgcctcactacatgtcgaaagagttatttgagttctcttctgtttttttttaatttgttgttgttgttactgttttgatacctcggaaacacctccgttgacagttgttttggataggttgggtgtaccccatggctgcctctgaaggcagtgtctattttgagaggatggcttacctcttctttgtgaaaatactatctcatttcctggaaataaaatgtaaaacctgtcagttgctcagctgggctttggtgtatttaccttccttcccttcctgctcccagacagtctcacaagtaaacaccagcagctcatagattacaaccaagaaagtgactgtatcagatgatagacttcaagtgaatgtcagcctaagaggccaagctgcagatcgtggcaacagatgagctctgttaacctcctgactgtcgtgtttcctttttattacagaggtgggtcactgtttaccttgtttcaggggtgggagaaactcctttccttcagctggcatttgaatgtttccaaatctattttatctgacgtcatgaacacacaggcaatgattttatgacaacttgatgtgcttttttctttatttttcttttacattagaagttttctctcttttctccacctctcctttatttttaattttaattttaatttttgaaacaagatctgactctgttgcccaagctggagtacagtagtgcaatctcagctcactgcaacctccacctcccagactcaagccatcctcccacctcaacctcccaagtagctgggactacaggcatatgccatcacacccagctaatttttgtttttctgtagagacagggtttcaccatgttggccaggctggtctcaaattcctgaccttaagtgatccacctgcctaggcctctaaaatgctgggattacaggcgtgagccaccacgcccagcctataccccatgtattttcataaagggttggaaactattgattgccaactttttaaggatggtagggattttttctttgttgaatatactgtgaattttgggattctggagtccttagtcttcatttccattcttctgcccatgattactgatcaaaatactggtagagtcatggaggaagtaagttaaatgtggaaaaaatgctttaaaagtacttactataaccacatcataagaattctggaaaaatagagaacaaaaggaaaagattgttaccaccttgatttaataacttcttgtttccccatacatgtgttttgtttatagattgcatgggtatatgtcaatttttatatgttctgtgtttagtttacatattgtaattcatttttaagagagtacagacatacactttttgagtaggcaatatgttcacatagtttgaaattaaaggtacaaaatggcgtagaatgaaatgcctctcaccctttccccacagcgactacttcccactcagaggcaacaagtattacagttgcttgtatattcttccagagatctctgtctatacaagcaaaaacacatgtggtctttttccttgctttgcacaaatggtaaactgtacgctattctgaaccttgcttttttcagatatatgttggcaacagttccatgtcagtacatagtttcctttctttattacagctgcctgttttttcattgtgtatttgcaccatcatttacttttctggcttacttttgatagaaatctaggttggttcaaacctttttactcttaaaacaatgctgcagttaacacccttgtacatatatctttagagagaagatattttaaaaagaaatacctttttaaaaattattttattattttttaatagagactatgttgcctaggctggtcttgaaattctgggctaaagcaatcctaccaccttggcctcccaaagtgctgagattacaggcatgagccattgcacctggccaagaagagacatcttgacttgagcctgaagactatgtacagagactgacctcacagactgaccattccatcccacagctgctggacatagagtgatttgcagcccctcctttcagagtaccacatccctctcaagtgttccacaacatctaggaaagtgagctcttaaagacagactaaaaagagtaataaatcaatacaacaacattaaaagccagactagcggagtttgaatcttggccctgctgttagtaactgtgtgagccttgggcaagttactcagcctccttgtgtcttggttttggtttcttcatctctaagtaattatatctgtcattattgccctgatcacaaacaaaagcctgaatgtactatgtttaaaagacaaaccaaaaattaacccaaacttgcattatttgtctgagctacagaatgttctttccttggagagatatctgatattaaacatcatctgcattttacttgcctagaaaatacacggtaacttttctgccttgcagcatcaaactatagtacagctgagccccagtgctgtgcagtctgactctaattaaaggcaccttctttacagcagggctctggggaactggaaaagggggtttgtttcattatctggttttattaagcagatgaatgcagccagctatatgaagcactttgcagtgaatggcaggtgtcccatatctggttatgttaacctagaaagggctcactctacctctaggcatgtttcatcccaacaatcagactgtgccaaagcaggggactttgtcctttgtggattgcatagctggatacccatcatctgtttctctgattggaagctgctgttgtacagaaagacctgcatttcccccttgtctccagttctctcactactttttcctcctctgtgagtgaccatccaggcagtcaccataactgctggagtgtctgggattggtagctctctccaactgcctgcttgctctttacagcctctctctgtgactggaatctctccacctcatcgtatctaaggataacccagaaacatggggtgtcctaggtatgtttatctcgacactgaaccccctaggcttctgatgaatccagtgattagctaaatttgacatagaaagtaagaaggaatgtctactttgtattgtggtcctaatctaagatcaggagaatcctggaattgttatctgtctcttgctctgagatacagacttgttcataggtgtggggcctgattggaacaggatctgccattggtcacaataggtcaagggcttgttctgaaccctagttagcttcattcagagaaagaaacttcctacctggtcagctttttcagcttctccaacaaatgggagttgaggcagtaggagtgtggggttcttgggaagacgatggggccttgtattaaggagaaataatgaactatcttcttgattcttccattgagaaaagcatatgaatcctaggaaagggctcagcctgtgataggcattcaataaatactccaatgctgtcattcctttgtctacagcatccccaaacaatgtaccagtgatgggctacctgagctcatctagtcgccaagcagtatctcctgcttgctgctgctttactacattccagatgcccacctcatccaatttccagagccactatctctgctgtccactttccttcaggctctgtgaatacttcaacctgctgtgatttggggccgtttgtactctgcatgtattcaataaattcaattcagcaatagtt

SEQ ID NO: 13917 - DNA, 1361 bp, Homo sapiens
gagcctcagaatgtgccacccctgcagaatgccctgtcattcctgagatggggccacctggggcccacagtgctggcttcttccccctcttgaaaagggactggggagcattgcacctggcatgaggagtgggtggcctcctctccatcccctgaagagctcaggcagggccctgcagagaacactcatgttccttctgggacacctgcctgggaactttcccctgccaggactcagcctgaaggaagctgctcctgaggcaggtatgaggtcagtgcctagggcacgtgggactgatggaggacatatcagagtggcagagctgtgggctctgctgttctctcctgcatcctgtagactcacttttctgagttccatgcactgccctgagggtagccatgcccttgctttgcccaactttttattgggccatccctgagtgggtggagacctgctgtcatgagctggccaggagaacctgctataaaaaaatcaaggttttgtttctttgaacttactctgttttgatgccaaattggagaccattttcttgtctccttcccccactcatcctggccttccctggagttcttcctagcccagagctctgacagtccagcagggtgggaaggagggagtttgggcaaactctcatccctgataccacattgagatcctgggagccctcttttcgtactgagtatggagttgtagagccatcctaggtgccatccccttttggtccaaacattgggcagcgctagatggcaggaagcagccttgaagacccgtctttcccccacagcagcaggggccccagcagtaacaaagggtacctccaggggtttgggtagcgctgccctctggcagtcatgcaccgctgtctgccatagccgctctagggtcttggcagaattctgagcttgaagtgcagctcccttactaccctttcccttcctttttcttccctaataggaggtacaatctgcttttgtttgtcgttaagtggtcactcccatttcctttatcttggccgacaacacagagaggagggggagctgggcagtagcttggggtgggggtgggcacctgtggttgtttttaatgggaaatacctctcagagatgttcatgcaggctccctagggccccatcccagtgccaggctggtttccatggagatagggcactgaggctcccgtgaggttggaatcgacttcaccatgggggtccttcagccagcatccagctccccacccccaggctggcagtagcactgctgagatgctgtatttccacccaattctgggtatatcagtgtgtcttgcagaatcttggatcattaaagataaacatattttt

SEQ ID NO: 13918 - DNA, 2232 bp, Homo sapiens
aggccaggcatggccaccacgtgacgctgttcttagttcactaatgttagccttatttaggacaaagtcagccagacaccttgtactgggcacgcgtcagactgcagccagtccgtttcctttctttagccagccatcctggtactgtagtttaggggttgatggtggttgaaattgatttctggctggttactaaggtgcctgctagccattgtataaaattaaaacatgaagaatattttttttttgagcatggctagtggatttaaaacaacacatacctgtcactgctggagtcaaacttataaaaagccttaagtggaaagtgttccagacggagactctgagttaatagaggagtagaagctggtgttaaagttcccacgacgcacatggctttgccagaaactctgtttaatgatcggcctttcacctcttcacttatccttagtcccagtagccaggatacctgatggccacgtgtgccttggccacgggaggctgctgagattggccacgtggctgggctgggtggtggcctcactctcccacagagctggaaatggggggtgggggacagattcttacggaaatttttttacctgacttgctatgaaaaaactcatcacacaagaagagaaacagtaacctcactttgaaaattagctccactcaagactagtccacgaacgagacccgccttttctacacaggatccaaggtcacgagaagcagccagagtgccccgcctccgccggctctggtctgccattcgccagtgcagggatctggcacggaccagatgtggcgaatggcagcacagcgcggtggctgggtctgcacactggcctctgcagccagatttctatattgggagttttttaaaaagacatttcatagccaacaagaatcagtagaagtgctgggagcagcagctggggaagctgccgcccacgggctctgccccttccagctggagccgcccgtgcctccaggggccaagaggatgatgtcgtggcctccattctcgtttctatgcagccccatagtccaaggacacccagtccacatctaccatatagcaagtttagtaagggaaggcagcatacgtcccagggacagtgggtttggatctgtctagaacagcggtttgtggctgtggcccagctccgagagtgatatttgctctggtaggtgagggcctgagggtacatttctccacctgtgccccctcatgttcacagaggatttcagcagctgcaactgcgcacgccaggtggggaagggtgggggtgggcctggttgccccatgttaggaaatcactaccagtcaggtggggctggggctgggtggacaggatcaggattcccttgaaagcccaggcagggtgagcagtcccagtggtcctagtgccgcatcagatccaggtgggtgagggcaggaggcccctgcggaggcagcgtggatctgcccacacataggctactggaatagtttaacccagcaactttcctttttataaaacaacaaatggttcaactctgtctgcaaattaacagctgaacacctgcaactgcaaatgttttttgatccgacgtactgaaataggaagtcatgctcttcccaccctccacccaccagagtggaacccgctgcaaaatccccagccttaattcttgcttcaggacccagaccggtgtcttgctctagggcaacccagggcagaggggccaggtctgcccagcgtttaccactgctgtcaagccacagcccttggccaccatacgggccatcctcagtgaggcagccccccataggcttccgccaagctctggtcccgaagaggctgtgcgagcccttcccggccctccccagggccccccgccccctcctctgcctgctgcgtggaggcagccatgggaaggagcccaggggagctggcctgggggagcgaagcccatgttcgcttcctgacttagagctggggggggtggggggtggggcttgttcccctgcagtatctgttctgtgaagtttgttaaatgtaaggaaagcttaaattcttgtatctttaaaagagaaaatcttatttaacccttttgtgttctagatttacttacacacatagcctagagctcagttttagttttaacattgtgaaaatattaaaagaatcttgtaactttattcttttttctcctgctgaaaaaaaaaattaaaccaatcgtatg

SEQ ID NO: 13919 - DNA, 399 bp, Homo sapiens
gttcatttccatctgctcagggcaccagaacccacatagacagcctgtgctattgagggactcagtgatgtgtgtgtcttttctccccagtaattccttaattactctttctacattaaaaagttgatgttctaaaattgctagtgcgtgtgtgttttcctcacatatcaatattcaaaaagataactctaaatgaatgttttttattctgggaaatcatatttcactataattactttttaaagataaaaccctgtttggatgttagaacactttggaagctctgaattttaaaaatttgaaagtgttgatatgtgacatcctaaaaagagcctagtagttgtaaacttttccctcaagtaggtaccaatttcccttgaataaaatctagccatgtct

SEQ ID NO: 13920 - DNA, 1670 bp, Homo sapiens
gactccagcgcctgccctccctggggtccttgctgcaggccgggtggccaatccaggtgggagagacactcccagggacaagggaaggaagggacacacacacacacacacacacacacacacacacacacatacatcctgctttccctccccaaacccatcagacaggtaaatgggcagtgcctcctgggaccatggacacattttctcctaggagaagcagcctcctaatttgatcacagtggcgagaggagaggaaaaacgatcgctgtgaaaatgaggaggattgcttcttgtgaaaccacaggcccttggggttcccccagacagagccgcaaatcaaccccagactcaaactcaaggtcaacggcttattagtgaaactggggcttgcaagaggaggtggttctgaaagtggctcttctaacctcagccaaacacagagcgggagtgacgggagcctcctctgcttgcatcacttggggtcaccaccctcccctgtcttctctcaaagggaagctgtttgtgtgtctgggttgcttatttccctcatcttgccccctcatctcactgcccagtttctttttgaggggctttgtttgggccactgccagcagctgtttctggaaatggctgtaggtggtgttgagaaagaatgagcattgagacggtgctcgcttctcctccaggtatttgagttgttttggtgcctgcctctgccatgcccagagaatcagggcaggcttgccaccggggaacccagccctggggtatgagctgccaagtctattttaaagacgctcaagaatcctctggggttcatctagggacacgttaggaatgtccagactgtgggtgtagattacctgccacttccaggagcccagagggccaagagagacattgcctccacctctccttggaaatactttatctgtgaccacacgctgtctcttgagaatttggatacactctctagctttaggggaccatgaagagactctcttagggaaaccaatagtccccatcagcaccatggaggcaggctccccctgcctttgaaattcccccacttgggagcttgtatatacttcactcacttttctttattgctgtgaatagtctgtgtgcacaatgggcaattctgacttctcccatctagtggaaatgagcgaaatcatggttgtagtgatgttgtttgggagagtgcagtagtaattgatttgacccactcacacttggagctaattaaggtttgccctgcctgcagcctcccccacaaataatgaacagcagaaagactggacggggaaacctatcaatcctgcccccagccatggtgaggaagccccaagccatggtgacacacagcagcactgcagatagccagacacatggctatcctagagaggctggcaaggagttcgtggctgcaaaagaagtttctggagcaagagagagctcgctcttgggagtcaggacctccggggagagcagagggttccgacggattcctttatgagtcagtctctctctcccttttaaatggtgggaaccctccccaaaacctttccccagacacattctcctgtgcccctcagagaggcatgtgatgtgcaaggaaaataataggatataaaacacatcaagtagaaaatttcttatacttc

SEQ ID NO: 13921 - DNA, 2827 bp, Homo sapiens
cctggggaactagccacacaggaggccgggagacagggactggtgagaatggggctgagtggaggaggtggtgatatttaaaccatttggtgcttggtttagagccttgggctgggtcctgggatggggggctgtgtgtggctggaccaggtgtctccccacgcttaccttaaggggctcctcttatctccccttcacatgattccttctgtgccctggccccaggtattattctgaggctgccttggatggcctcaggccaggtaaccccaggctgaaggggccctgctccccatcccctaccatgggcacccatgtgctggcacagaacagttccagatctagactggagaggtccacagccttgtccagagttcctgtgtagcacggggagcaatgatggagggagcccctgagagggaatctggtgagggaatccagactcccttctctcaaggggaggctcaacagaacattgacctgggggcaaactttcctcttgaatgggaacagaggaggcattatatattctagttagatcagctctggtaggttccagagaacagtcaatgttggaaggatgatgcagggaccaaagccatcaggacagagtagcagtgtctgtttcccatgtcacaagtcctctggcctctccctgcatgtcttaagtatctttcccttccttctctaccctcacctccatcctgtctactaatccacagtcctagaagactcaccttgggtttccacagctatggctcactaccaggtgcttgatgaatctggcgaggggctcaagacagacctcatgcatcaccacacctcatgccttttgggcatctcccatgtccccatctcctggacacctggccattgttgtgaagccagacagtgacctcaaatgttgccttggagtcccctacagcccctcagcagagggcagcacttgaatgcttagctccatcccatagttctctacttcatataaattgctcaggccctcccaccccttctctaacactagcttcaaggcagaagccacagcagcctctgtccagcctgcaggtggccacttggaaccatgtgtccactggcgttggggagttggttcctgagaggtctgagggccagagctgccctctacattaacatgctgtctctaagggtggcccctcctctcaggcgttcagatggtgcgaacagcagagcaggcaagggaaactggggagatggggatggaggaggaaggctgatatcctctggggagcacatcacctgaaggtgccaaggaggaaggctgagaggggggccaccccatttctggtacccaatttggttcttcagcccaacttgcaaggggttccttctggtcctcccatccactgccaccttccattttgtccatctcatgctggccttggtggatgggatggctgtatctagacaaaatttttctaaaactccatcaaggctcttattcaataccacgttccgagttggcctttcatcttctttgagactggccctgcctaacctctaccatcaatgagctcttggcccttctgcccttccctgtgtttctcactttccaacctaatccctggctcagggttattgccagtggagactggtgagctgggcctactctcagctgcctatcttctgcctttcacttgcatccaactcctggggctgggaccgtagtagctgcgggggggaagaaacacagggtcggtgagcccagcatgtgcgttggtttgagggggcgggcggtgtgtgtgtgttctggtgggagggatctgagcaagtgcaagcctggctgacacaggtgtgaagaggccatcctggaacccaggtgagggcaagatgaaggcttccaggcagaacagctgcagagagtttggctatatgcatctgcagccccaagagctcccactgcaagacaagtgttggggaagatgggaggttgtgggtgaggcctctaaaggtcctctcccaaactgaccaggctgatgtcaacctaaccccctcaggggcagggaacaggggagggctccacaagcgtgtctggcattcccacccaccatggaagactggatacgcacctggaaacaaaaggactatggaagctgttcaagatacatttgatcttcagaaaagcagaatttggttcaactgttgacagaggacacaaatacgttgttccagagctcagccttctcactctaaaagaaagatatttttctatttattttctacatctggccagtggctctggtgctagatgccactgtagccagatctccaacagtgccttggaccatggactcatactcaactgagtaagaaggggctggtgcccagtcggggtggctgagctggtccttaataggttgtttcttggtcttgctttcttcatgccctccccactgctcctgccacctttagataagtttctctagctaattttgtggccaatgtaaaattcgtcatcaacctaacaaacacaaccttctcagcagcatttctcccctgtgatggaaataaagtgtttagggcagtgggaggagaaaattctccaggtgaatggggaagggtctgttccagcctctccctactcccatcccatttccaccaactggggaactgtgactatctatctcccccgacttctaccagggatgccttcacgccaaggctgttctcaccagctgcctcagatgacaaatgaggctaatggacataatctacagtgtcctttttcacttgcaccttttttataagaatatattgtaatactaaaaaatattaaattcataccatccct

SEQ ID NO: 13922 - DNA, 198 bp, Homo sapiens
ggccctagggcatgggagaggagggacgcccagggtggggaggaagagtctgcaagcagggctgtggagttagggttcaccccaatgggaccaccctcctgggtcccctggtgccgtttttccttagaaatcagagaaatgggaaagggggggaaactgattttacacttaaataataaaatcctattagtaactctg

SEQ ID NO: 13923 - DNA, 416 bp, Homo sapiens
gtattcctgctgccaccaagagacagcaatgacatgtacagccatctgggacatgcctgtcttcctaataccatttggagctggacaacatttgacaccaaccaatcatactggacaaggcccttagaggacttgaaatatacttctcatgctgtagtttatttaggctgtgactctctctctaatgctgctctcgggaaggacgaaagtgacctgcaaggagagaaatgcaaccatacatgggctccagtcaactatgggactgaaggtcctaattgctcacccaagggggctgcttaacacaaacagcctcagacccgaggtttagatttctgaaatatgcattttatgttaagttgggtatttttttaaaaaaagaaaaacagcaacattaataaaagaagtggtgtgttttt

SEQ ID NO: 13924 - DNA, 1586 bp, Homo sapiens
ccccacgccatgtgatggagctgatcaaggtcatgtttctcactgttccaggaaattgatcaactcttccaatgggacattgatgatcacattctgccctttactacaggacagaaaccacttagtttttaataagtggctcagtattacaattgcagcgatgcctggcaaattgaagttgcaagcctttgtcttactctttcagtcaggacctatttcagactgttgatgacattgacatttcatggattcggatgatgcaaggagacacatgccaccccagcagtacacaaagcacttaccttgactggtgaagtcagccagccatctcagcagggaagaacaaccttctcaaccaaaactgcaatcaggaaagcagcagcccactccttcccatggaatctagacagcatttatccctctggtgggggaatctcacactgactaactgaatggacgctttgtattcagagatggcttccaggcaaggaagttctatcttgtgatacggaaacaataaattcctgagatacattcttccaatctgtggtaataataagaattcctctctgcccagatggtaggttgatatttctggactctagccaagaaaaagctaattctggggatagaatgataaaagactcaagcactaaaaatatacattgccgaatctctttttctagctttgaaaagttgtggcctgcttgtccctctgttgactggtcatctggaccatcgtacttgctgtggctacttctaagacaatgtagagggttattaaaccttgaaactgcctttcctaagtagagaacaagactattcaacaacttctttgctgaagcactgaggagatttgtaatactcctaaaggaagggccaaactagagattttcaatcatagactttgtgacagcatttggggaactaaaagattcatgtgtttcagcctagtgggagagagtgggggagaggaagagagagagagagcatgtatacccgtatgttatcatagagcacgattctccagtggatggatacctggaatggatcattaagatgaagagagtaattcacatttactctagaacctttaacaagcactgaaaggaagaagcctgagatttgatccttgacaatttctggaaagcactggtcagtcacactgtcctggacagagtccaagttacccactaaagcttgaggtggatgttggcttcactcctgcagcacaatgctggccctagaaagcgagcattttcattcttcccatggcagctgattctttggtgccagttttcatgttttctccataggccttgtgcagaaaggttttctcattgcatccatactgtgagaataaactgcagactgaaagaaacatgcctgcagggtcaggaactgggccactgttcccagaacgggttgtgcctcagaaatctatttctcttttagatgttgaaccctgagagaactaagatgatatttcagaagagttggctgccttctctggaaacaaggaaaacccaataattccgaggaacattgggggttaaataccaagaataaaaattggttcttctttg

SEQ ID NO: 13925 - DNA, 1327 bp, Homo sapiens
gacagcagtgacgaggtttctgattgtcccagcacagccttgtcccaggacccttgggtgcatgagccacaacatggatcctggatgaatcccagttcttcccctgcccagctattgggagctggcctaagtattgctccccacctccttgtgaggaaaggctagcgctaagcctattggagagaactttcagcccctgaactccccggtggtgacccctcacccctgcactgagcccccttagatctactgcccctgccctgactttcgccattgggaagacctggggtgggggtttctgcatccgggtcaatgcccagctcagcatcttcagctgtgcccaggctcctctccagcactctgtcgttctctgagccccacctcagcaggtctccaggatccctcacatttcccctgtttgttgcctgtggtctgccctagagtcctatgaatttcctcttgtgcttaattaaattcaacctctgaactgaaatgtgtcaggggcagctgagcaagacagcagttgtatcccctcaccttcctcccgtcccaccccagatatcctaaatgagagagaaatgacttaaaaataaatgataaaattgaaactaagaaaggctgtaatcagcagactggaagctgaggaagatctagaagtaaaagaaaaaattagatgcgttaaaatgacatgagcaggcgactcagtggcccaaaacaggacccagaacattcatccgtaaatggaatctgataatctggggcccaaattctgtttacttaacatgtgagaagattcacagcctaaaagagaaaatcaagttgaactaacaataaatgatggtgggtgaaagataaatgttttagggaacagaagaggagcacatatttatgaagcaagaataggtacagtcattttccaactaacatctagtgagactgggattcaccactcagaatgggggtccaccatgagcaacagatttgaggtaccagtgcatagcagctgaatgccagccctgtaaaagaccaccataaagagagctccatgttcttttgctcttttggggatgggacatcaaacaaaagtctcttcgtgtatatctcagctcctgccacatgatcatcacctatctgtgagaggcatcgcttttgctttgtttatttatttttttaatcctcattccctatgtccacttgccttcctctccgaggcaactactctaatgcatttggtatgtaactttaaatttgaatgtattcttgtaaaacatccagtatttttttttctgtgactatgttttcacttacataaaagaaattgtgatag

SEQ ID NO: 13926 - DNA, 23 bp, Homo sapiens
ataataaaattatctgaatgttt

SEQ ID NO: 13927 - DNA, 3447 bp, Homo sapiens
gggcctgtagtgaccggcagggctggggtgagacccctcccttccagaatccaggccccatctcccccaactccacagcccctcccgagcctcaaggcaagtccaggactcagaccggggaggcccgggccagcagctcccagtgtgacctgacaaaaacacgtaggggcagggacggtccccacccccagggacacaacccctggtcttggaccagtagaggacacggagggttcagacccctcctcagaccctccccacatctgaaactgcctccccccaaccaccagcagcagcagggccctcctcccccaccagctctccccacagggcccctcagcatcatggagacccgcaggcggggcttagccacccctcaaacccagggccccctggcacctggctctggccgtgttttctggccagaggcccccactttcctaactcgtgctcccttccgccttcttttccgtactgtgaagaaagaactctccaccccagctcccaccctgccctggcctgggtggaggaactgtgcctccatccccagaagaaacagccccctctgctgctggggtgggactgtctgtgtgccctgtgggggtccgtgtgagcaggcccacctggctccagacccgcccccaacctgagacagaaccaggctgagccaggcctccacccccacccccgtttgctgggggctcctccagccgcccccatgggaagaggcctggtaccgcctcacccacagaggtctgtgccaggtgcgcttctgcaggtggagccaagctctccctgaggccagaggcggggcctgggccgggagcccaggggaaggccaggctggaccccggctccacacccacatccagcctgcaggcctctctgcagtcctctcaccctccctcagctccccttcctctgcagtcaccctcagctccccttccttgcccgcctctccccccgccgccccaccagttaaacggatgaccaaagacctttcttatgccggaagcaaaaaccaaaactttttgttggctttttcctttgtcgcctccccagcacctgccctcccagtctcccaccccggccccaggctggaagccctccctccacttaagttattgttttaaaccaaagtttacagtgtctgttggtggccaagaccttctctctccacccctcctccatccaccctgaggaccctggggctcagtggaggcagggccctgcccccctcccttccgctcctgcccagcctgggggaaggagaaaggaggggagaaagcgggctctcaccccctcaggagtgggcacgggagcccttctccctgaccctgggctgcttcctgggggctctccagacccctctctaggaccaagtcacccgtcgtgctgggagtgtggattctagcaaaagagctggaaaaaagtcagactctccacagaccccctatgggggacccccaactcaaggccaaggactgggcgtatcggatgctcataacacccctggcctggcccctttactgagaagactccttggatatttcccaagaaccccccacatacacccctcacaagccacccctcctgagaggcagggggccctccgccccctccccatgtattccccacctgtgttccgtttgaccagcacagaaatattaaacgtcctctattcaccgggccctgtgtgtgtcaccgaggtgcgggaggggaggagcattaaagctgaaagatcgctctgctcggggagcctgggcagagcagcagcaacgtgagggtcgctgtggtggtggtttctgtgagtggatggaatgagcagccctgcaggggcgctgggcatgtgccctcactgtggacagggcccacccacctccggttcccctgtgcctcctgtcccttccacgcttaaacagggttctctgtcattttcctgttttcttccagagtcccaatcctttgccctagttctttcactagtttgaaatccaagttcttgccagagtgttggagcaaggcagctgatttgctgcagggatggagaggaccaccgccgcagggttcttttacctgtgccaccagctctggagacatccacacccattcccaggtgtccttccaggcccattgtccacgtcttcaagggggctgcctggataggcgtgtgtgtgtgtagtgcccaggtgtggtggtggcatcctgaagcagtaggaccattagtgtgcgtgcacacccacgtggcacactgtgtggtgaccatggtcatcatagtgggctcacggcggaaacgggatcattcaacctatacaaaggggaccctggataggctgcaaggaaagaggccaagggccaagctgctaagccaaagatggcccctgacacctcccccagccccagcacaccagcctgcacctcttatcccgtgttaagtcctggttccccacctgctgcccctcctcaacacagagcccctcccgccgcctcagacccctgtgcacatccccagggcctcagccgtctcattggtctttattttttattttttttaagatggagtttcgctcttattgcccagactggagtgcagtgatgctatctcggctcactgcaacctttgcctcccaggttcaagtgattctcctgcctcagcctcccaagtagctgggattacaggcgtgcaccaccacgccgggctaaatttttttgtatttttagtagagacggggtttctctatgttggtcaggctgatctcgaactcccgacctcaggtgatccgccagcctcagcctcccaaagtgctgggattacaggcgtgagccactgcacccggctctcactggtcttacgccaccttctggacactccctccttgagggcagaaaggagtcccaggcctgtccctagggacaaggcccagggaagagtgtatttggggagcaggggaggggagggtgttgagaaagctgaactggagtcaatcacccttcccacaaatcaccaaactgctggaactctccagccaaatgctgggagaaggacctggagggtgagtctttgctgacctctctctactctcaggcatgtcttttgtccttttcgtccatctatttctgtctgtcgctcactcgccccgctttctctgtctcaccttcatccactctgcaggcctgctccaccacagccctaatcctctggacgcttgtgtagggcctggggtgaattccctgtcccccatggtacctcgagaggggctggggagctcagcttggtctcagagtctccccaccagatactgtttaaaaaagtagcactgatgtgttttgtaatctgcccctcccagccctccgtggaggctgccagggccttgtacggtaaacctagctgcatgtaatctgtggacaatggcattctctacaatgcaataaaaacaattacccatg

SEQ ID NO: 13928 - DNA, 668 bp, Homo sapiens
gcctctgtcgggggctaagccagcctggcgcccctgcagattccagcagggtccctctgagtggggccaggcccaggactgtcacacaaggcttgagaagccccctctccctggtcctctcctacccacccatgtcctctcagaaccccagccttgaaaatagtggggggcactcagaggggccacctcctcagccgtgggtggtgggcccatggcagagaagcctgaactctttactgggttaccaggttcatacattgctgaggacctgacaggacaacctaggggcagggctggggtggggaccgcagggggcagccagggctggggaacactgtgaaagttacttggggagggtgggccggtggggccgtagctctctacctctccctgctcctggtgcctgcctctctcctccaccccaggcttagaggacagaaaaatgtgaagagacgccccacccaccctcagccagccctctccagtctcctttcctaggcttttttgggggcctaacccacgcagtgaccccagagggcagggctaggcgagagcctggggtggggcgggagggggaacagtatggaaaagactggaaggggaaaggaagggaagggagggagggtctgttctatctgttgctgtaaataaagatatttgtccatctc

SEQ ID NO: 13929 - DNA, 327 bp, Homo sapiens
acaaatggaatcctgtgctgaacccgaatcttccaaaaaacagcctacaatctgtgaccaccacaagatgtgccctgatggcagctgaagtttgattcagatgggcacttttcttccccttccctgcctagtttccttttgttccttgagtccacgcagaattccattctctggtcagcagacaggcttaagctaaagtattgcctctattctgtaaagttctgtacatagttcccaagcttctgcagggggtgatttttgctcttgtcctgagaaataacagtgctgttttaaaaaacatttgaaataaataccgcacacaaaggc

SEQ ID NO: 13930 - DNA, 338 bp, Homo sapiens
ggaaaacagtcagctgtcctggccaaaggggtttggaaggacaccaagacccccgttggtgactgaagatgacactgagctttaatggctgaagacccagatcagggcagtgacagatcacagggacatctgtggctcccagtccaggacaggaaggactgagggtctggctggttccctcttccattctaggcccttatccctgtttagttctgagagccaacttgagataccatatgctagcattcccagtccccagctggggcttggtgtgagtactttttctatggctattgtgtcaggtcactgtggataaaggcaaagacagatatttattg

SEQ ID NO: 13931 - DNA, 3360 bp, Homo sapiens
gctgagaaggaaacctggcttgtacaggggcgcagattccaccctcccggggagttaaagccactcaagggaagaagagggtgacctcctcatggccaagccgaggctgcagggtgtgatcggacatgattttcatggcaaaccgtcttattaagatgacctattttcactggatgtttgggttgaggaagatatgaacagaataatgagaatttttttttttattttgagatggagtcttactctatcacccaggctggaatgcagtggtgtgatctcagctcactgcagtctcagcaaccctgggtccaagtgattctcctgccttggcctcccgagtagctgggactagaggcaagcgccaccatgctggctaatttttgtattttgagtagagatagggtttcgccatgttggccaggctggtcttgaactcctgacctcaagtgatccacccgcattggcctcccaaagagttgcgattacaggtgtgagccaccacgcccagctaatttttgtatttttaatagagataaggtttcgccatgttggccaggctggtcttgaactcctgacctcaagtgataacccgcctcggcctcccaaagtgctgagattacaggcgtgagccaccgcaccccaccagagactttcttaatcaatcaggctatgtggtggggcatagcagcagccagtgacttcgttcattatcacaggatttgattcctttgaaactcaagagaccagggaaagtgacaggaaggaaagggctctttgctgctgtgcttattacaaggaagactgtttgtccagcgtgtatttcaggatatctggatcccttttattgactcacaatttgtggcaccactttctcatcccagaacttcattcttatttctctcctcatctggcctcccaagtgctccgttgagctgatgaaaagttctttgtactccctcaacgtgtcggaaacaggaggccacacagcacagctttgtttggggtgggcaggagtcaggagtcttgagcagatgcatcactgtgaagaagaacgacatgtcggggctgcacctgtcctcccgtcggcatttgacgaaagctccctgaagcggggcagcactctcctcctgagagatttaccatttattgcccctgtgaggaatgtgtgcttgggaactgccaagtcttaccccttctggaagaagaggttttctctgacaagagcctagagcgtcggctctattatgctgggacttgacagaggagccatggggtttaaacagtaggaaagaggggctacgcgcagtggctcacgcctgtaatcccagcacttcgggaggcgaaggcaggtggatcacttgaggtcaggagttcgagaccagcctggccaacatagtgaaaccccgtctctactaaaaatacaaaaattagccgggtgtggttactcatgcctgtaatcccagctactcgggaggctgaggcaggagaatcacttgaacctgggaggcggaggttgcagtgagccgagatcgtgccactgcactccagcctgggtgacagagcgagactccatttcaaaaaaataaaaaaaggataaagtaaacaataggaaaggatttggtggggtgagggtggggtgttgagggctgggcctcatcttgtattctgaaagctgagaaacggctggtcagctggaaggctggtggatgggcaggagtgagccaagctgaggcgttctgcaagaagcaggtctgagtctgtccaaccaatttgtatcctgtggggagaacaacttcattcttaacataccctacaaaccagaaaacaagtttttaaggaagatgctgggcatgctgatagcttttctggtctcctaaggaagagtttttaaaactaaatccaaggaagaaaaatgtaacaacacgtggaagtgaacactggatgaataagcttgtttcccaaattagaatcctaacgtccatatttagcttcatgtattcccctttggcttccacagttcaactccttttattttgagacagggtctcgctgtgtcgccccagctggagtatagtggcactacctcggctcactgcaacctccactccccgggttcaagcaattctcagagtagctgggattacagatgcccgccaccacatctggctaattttttttttttttttttagtagacacgggattttgctatgttgcccaggctggtcttgaactcctggcctcaagtgatccacccgccttggccttccaaagtgttgagattacaggcgtgagccacggtgcccagcccatctcttagtcttccattcccttggtgaatttggaaacttgaaaaacttggggacttgacagcaggctccatgttcttctggcctcactgtactgtgtaaggaaagagctgcttgtcaggaacggaagaggggacgctagtaaaaaaaaaaaaattggattccccaactggactaaataggagtttttcaggtttgtagtaacgtgaaactctcctagatcgaagcagttagactggcctatgtggccttctcagggtttgtgattcagttcttagcgattcttggcctgataagtttatgaacacagccccacattcaagccgtggccaatcccagctgttctcactgctcttgggaggtgttgtcccagtcagtgtttctgcagcttccatttgttgttgttatccagtgtaagcacctgttgaatgcagatgtgctgagttagaggtgggatttggaaaagggctgctatttctgctgttgagatttcagaggctatactctttttttttcttttcttttttttttttttttgagacggcatctcactcttatcgcccaggctggagtgcaatggcgtgatctcggctcactgcaacctccacctcctgggttcaagggattctcctgcctcagcctcctgagtagctgggattacaggcacctaccacaattctcggctaattttttttgtatttttggtagagacggggtttcaccaggttggccagggtggtctcgaacacctgacctcagatgatccacccacctcggcctcccagtgtgggtgggattacaggcatgagccaccgcgcctggcctcagaggctatactcttataattttgttctgaggggagacagggaaagggttagacaacttgaaacattgaccctgtataaaaatgcaaaattctcaatgtgtatttataaatttctattttttataactttatgggacttcttagaggccaaaagtagtaaacatgcagattaaaaatgtttatgaaaatctcaataaaaattcataataaaaactttgtaaataaat

SEQ ID NO: 13932 - DNA, 651 bp, Homo sapiens
gtgcaccgcccggctgcttctgcactagcgggtggggtggtatggtggtgcctgttggtggtgttcttgtcttaaccctagatagaatctaatgaactcagaggcttagctcgcctctttagggtccatggtggcagcagagaggcagaagtgggagtccagagccaggaacagtgaaggatggttcctggcccctctgagtgacagctggtggcagcactccttgctggggggcactgttcaacatccctctgccgtcgggtgaccccctagcccttctgactcctctcccagcttttcccagctttccccactgagcttctccagtccatgctcttctggacgtggactctctgaggcagaactgagcttttccaggcctcttatggaatcctgcagatccagtggctgcagcttcaatcccagtgctgcaatcacacatccattctgccctgggggaccctggagcctacttgtgcgctttgcatttcattgattgacgcctcccttcaacaagcatttactgagcgcctactatgtactaatgctagatgttagatgtacaaagaagacagttttcatcctctaggaactcataggctaatggtgagacacacagacaaacatcattataataaaatatgctaagag

SEQ ID NO: 13933 - DNA, 3112 bp, Homo sapiens
tagcagcagtcctccccctaccccgccccgagaccccaccccgagaccccaccccggaccagttacattcgttcctggcaaaagcaaatggaaatggtctcctgtctccagcctgcttgatctttcatcacaggttattctttctaatctcaatcctgttctttgtttaagagcaatacttgtcgtgattacagggagatcctttagtaaaattaatccttggcagaaagcagtctgataggccccactcatttcaagtgttatgaaagtgcttataggcattttgtttatttgttttgttttttaaaaacactgtaactcaatgagaccacagtatacttggcccttggtaaaattttgacaatcataagtcatttgaaaagaacagacttactaaaatcaaacgagacggatagaagctactttttaaagaatatcccactgcatctgcaaatttagttttgggtttttttattattattattttgagtttttttgtgtgtgttttgttgttattgttgaggggaagaccacatggttcttccccctcagccatctttgagcagtaaattgctggctgtgctgccagggacccgcagccctggtggaaaagccagtagcacatacgcagggcattgcagggcttccctattgatggttcaagtgcttttctgatgcttccggagcaaaacctcatgcttttaggcatatctatgttgaatttcacctagggaatgttctgttcttagttacagcagcaaaatttgaaataatttcaccaggctaaataaaggaaaatggaaaccagttaagaggcacagtgtacagaggaggccgggatagagccatgagggttataatattaatatgtatatatgtaaaagcatatatatgttaactattgagaaaaaacaagttttgcattttataattggatatagtcaacatataatgtatgtttttgtttgttgctggattttgtttcatttaacctctctttgcaccctctcccacaacaaataccaagcatcaaaagcactttcatttgaaaattattatgttgtaatttttcagtttaaactttaaggagactctggccttgtttatgcttcttgtctgagaacagtagtgacccctggcagcaattcattaccaaaacacagacaaaccaaaggtaaccagctagcccaccactgaaaggaaagatctgagacatgggattcccatttgagagccaaaggatatgccctgtcatggtttctgtttggcctgtgttcatattagtgagcatggcttactgctttatttatttttatttcttgtcagggagtattctccgttttcctttctcgtatacctgccccaggttatcccatttctgttgttacctttattcttaatgtcattgtaaccatcacttatctcctctcattgggaaagctacatgatagtatttttatgcactcttctcccacacatacacacacgtgcatgtatctgagctgctcggatccagaggtcatttttgttacagtgtgtgcacactcactctccttcttagtgtgcatactctctcatttattctgtttatctccctggctctggaggtgcagccactggtcttcactttaatgtgttgccagaatctgcttctggctgtcgccaacatggggatgacccccattgtcatcatgttgggcatttcttttccagattggcctgtgatggaaaggaaggcttctaattagaaaacacagcaacagaagacctataccccggtgcccctgtgtcccactacacacagaaaaccctgtgagatggccagtcttcataatagcaacgtaccttcaccccagccacatgccccagccaatacaaattggaaaatctggcccattttagggttaccattttttccttatttgtgccaatgtccaagttgcagatttcccctttttcctgtattgtaacatattagataagttggtgtcgccagttggtactttctgtttgggtagtcctagggtaacaccctgccctaaactccatgatttcataggcttttcttcccttggggctcatgctcccctaattcctagcaagatgatccttcctaatcaaattcttctcattgcagaactttatccctggaagccttcatgtgggctgctagtgagttacattaattactgcaaatcagtggaattctcaagagacaagataagcttcatgtacatttgtcacctctctttcttccctatcctgccctgctgtcccaatcctagcttttctatataccatcctaaagggtttttaagccctaacacttgtctagcaaatggagagcctaatttaccaaaatgaaacttgtaaatttttgtgtcattgtatgtaagtttactttttatggaggaaggattctagataatgacaaatgaagattatgacatgtatttcactcctgtgattaggttctacgcacatgggtcataactcgcatgtcgagccccctctagtgaagggtaggagagctcagcctcggatggccaacattcagttgttcaggttcattcgtcaaagttaagttttagaactatttgtactcagtaacaaaaatcattttctttttttttttttttttctgttgtggaaaagcgtgaatttgttattaagcatttgattttctgtgtccttaagtacttcctgaagatgaagcaaaattttaatctggcaattatgaaaaagaaatattttagctctgaaggatttagtagattctgttagattagggaggccttacagactgactttacttaaagaggacgcgtcactcgctgtcagtgtggtgtgggctttatttgcttaaataccttcatttgtatagtacgtctcacttgaaattgctttgtatacattttgtaaaaatatttataaaatgttttgtaaaaaaaaaaaaactataacaaattgcagtttattttgttatgttggataaatactgttaaaagaaaccagtcagtaactatattgttaatccatggttaggaaatgtttagttggagattacaaattgaaacaaccattgcaatacagccaaagatttgggaaaatg

SEQ ID NO: 13934 - DNA, 529 bp, Homo sapiens
acccaggtgaggcagggctgaaaactgcccttgggctgacttttgataggccatgccttgccactttacaagttctttttgcatttactagtatttaagagtaaccttgagattgggaggaatagaggaggctggtacaaatagatggagacctgctgggatcagtgaatgcctgattaggacatggggctatgcatagcctaagagttataggcttaaagatgtcgagtaactaaaaactgtattgctggccgggcgcggtggctcacgcctgtaatcccagcactttgggaggccaaggcgggcagaccatgaggtcaggagattgagaccatcctggccaacatggtgaaaccctgtctctactaaaaatacaaaaatgagctgggtgtggtggcgcgtgcctgtagtcccagctactcgagaggctaaggcaggaaaatcgcttgaacccaggaggcagagattgcagtgagccaagattgcaccagtgcactccagctgggcgacagagcgagactccatctcg

SEQ ID NO: 13935 - DNA, 153 bp, Homo sapiens
gggcagggctctacctcccctgcgtcacactgtgtgaggctgtgtctctgccatccaaaagggggccccttgagaatggtgatccacccagttacaggggcatttagggagcagatgactgagaacattaaaaaagaacttaaatgacacagc

SEQ ID NO: 13936 - DNA, 479 bp, Homo sapiens
gcccacccagcatcctctgtcctgagacccctgattttgaagctgaggagtcaggggcatggctctggcaggccgggatggccccgcagccttcagcccctccttgccttggctgtgccctcttctgccaaggaaagacacaagccccaggaagaactcagagccgtcatgggtagcccacgccgtcctttcccctccccaagtgtttctctcctgacccagggttcaggcaggccttgtggtttcaggactgcaaggactccagtgtgaactcaggaggggcaggtgtcagaactgggcaccaggactggagccccctccggagaccaaactcaccatccctcagtcctccccaacagggtactaggactgcagccccctgtagctcctctctgcttacccctcctgtggacaccttgcactctgcctggcccttcccagagcccaaagagtaaaaatgttctggttctgatttctga

SEQ ID NO: 13937 - DNA, 173 bp, Homo sapiens
gtgtggcctcagctcccacaagcctctgcccaggcactgctaggctctgtctggaagatggggaccagcagccccacaccagggccagcctctagagcagactacagctggggtgcagggatgtgggttccacagacggaagggtaaacaatatagtctttttcagttcctgc

SEQ ID NO: 13938 - DNA, 1054 bp, Homo sapiens
cccctcacgttcctaccacagggccacagcccacacagccctgggacactgccctggccctccatactctgctccctactggctgtcttgggggaaggcagcgcctctctagctactcaagggagggggatgtgggcacttgaagcagggacacccacagaatggtccctcttctccccaaaaggtgttcatgcctccctgtggctagtacaggctgagcactaagatgcttagtgctcagacaacctggggatgcctgtcccctacctgctcctcacccacagctacctgaggctgctctgagaagtacacacaggaatacatacgctcctctattcttcccttcatcctcatttgaacgccaggtatctcccctcctctctctcccctgcagaggcatgtagggaacagcaggagattattctcaccaaagttatgtcaagccccattggtcccagagtagctgaagggaagccaacccccctgcagcacaaataggccccccagtcccagccgtgtgctggcagatagggttgtattatttcttcttaccccatgcctgaccaagggaggtcaaaaggagaaaagtataggctgtggacaataactgatgaatatagggcccagatggaccaagtggggccggggagggatgaataaacaccctaccccgtgccctgtctttggtgagcagcagccctggggtcacagacatggaagggaccaccctggggctgactgcttttctgtgctgttggttcccaaaactagaaagaaggaagcagggagcggtgccccaagcatggctcctgccaacacctatttatttccttgtttgtgctatgctgggcaggccttctcttgtcccttataggtaccttggaggggccaggggctgaggaaggccggacccaggttccaggggcgcaggcagtgcggcttttggctgtgtacatagggtgctttattctccacagagtgatacatgctaaggtgggttgggcttggaccgatgtccccatatgtacagaactgaataaagtgggtctctgag

SEQ ID NO: 13939 - DNA, 558 bp, Homo sapiens
gaggaagtttctgccacctcccctcctgagcctgctgtcatcttcactgcccctgcccatctgtcacccacctgctcctttgacccctggacttggtatacctccatgtggagttgttgggcgagaggtgttctctgtgctgtgaattcagtggggagctgtagcggggtgggggctaggttcctccccccttgggccgagggccccttccccttggtgctctgtccccatccacctcctttcagctgctcctgggcctcagctctgcccagggccagccaggttctgctgggaagggaagggaatggggagaagggagaagcaagcagtgtctgagcctcaggagcttccccctccccctttgcctatcccctcccctctgcttgagccttgagccttgactgggagctgaaaggagttgcagctgttggcatgagacctccttctccccgtcttggggaggtggggaccagcagataaatcccacccttccttgagctgtcgctgtactctgaagttcagccagctcagattttataaaaattaattaaaatctcc

SEQ ID NO: 13940 - DNA, 371 bp, Homo sapiens
taaggaactatcctctgctctgccactgccccagggagacatggatctgtgaggacagatttggccacggctggtttccgttcaagggcaaggatcacagctgcccttgaatctcattgcctcagagaagactagagggctcttggactatccctagggctacacaagaatagttcagccttctgccatgccacacagcctcagcttgaatctggttcattgcgtcctcgtgttcttctctcatccttgccttaaaccagggattctgataccgaagaagaggggccaatgaaaaccatggagtctgttcgtgactcccagggctgggacattatgtaggagccacttcataaacattctctttactcatc

SEQ ID NO: 13941 - DNA, 423 bp, Homo sapiens
cattcaacccggcccccaggtctgctgggtccccccacccccacagccctcacagcattccccattgctcctggctcttccccacccctaggtgggacagtgaaggggagcagtttaaccagaagattgctgctgcccttagggtctcagctccctcctcaggaatccctcttaggaaggaccctcaggacaccctctctgcaccctgtggtcctctagagtagctagctctgaggccccaaggtgggtacaaagcaggtatggccctcagagatgcagcctgctgctggcttttcagtcagagggttgggggctggccagccaagctgccttgccctggccgctcttactccctccctctgctgtctcacttcaggtccatgtatttcacttttcttaaataaaagaatcaggtaacctttc

SEQ ID NO: 13942 - DNA, 232 bp, Homo sapiens
ctcatccatctgctgccctcagtccactcactaagggtgctgaggaaggaggcataagaagtcctttcttccaggcactgtccagtgatcctaatgattctcaattctctgagactcagtgactcctttttataacaaatattttgcttgaatttaattaatagataagtcataggtaaatccacatatgatttctacaaaacttaatatgctactctaataaatataaaag

SEQ ID NO: 13943 - DNA, 838 bp, Homo sapiens
ggagggagcccgctcaggatggcctgggcaggggaggacatctctagagggaagctcacagcatgatgggcaagatccctgtcctcctgggccctgaggcccctgccctagtgcaacaggcattgctgaggtctgagcagggcctggcctttcctcctcttcctcaccctcatcctttgggaggctgacttggacccaaactgggcgactagggctttgagctgggcagttttccctgccacctcttcctctatcagggacagtgtgggtgccacaggtaaccccaatttctggccttcaacttctccccttgaccgggtccaactctgccactcatctgccaactttgcctggggagggctaggcttgggatgagctgggtttgtggggagttccttaatattctcaagttctgggcacacagggttaatgagtctcttggcccactggtcccacttgggggtctagaccaggattatagaggacacagcaagtgagtcctccccactctgggcttgtgcacactgacccagacccacgtcttccccacccttctctcctttcctcatcctaagtgcctggcagatgaaggagttttcaggagcttttgacactatataaaccgccctttttgtatgcaccacgggcggcttttatatgtaattgcagcgtggggtgggtgggcatgggaggtaggggtgggccctggagatgaggagggtgggccatccttaccccacacttttattgttgtcgttttttgtttgttttgtttttttgtttttgtttttgtttttacactcgctgctctcaataaataagccttttttacaacctg

SEQ ID NO: 13944 - DNA, 2315 bp, Homo sapiens
tccgcccgccgccctggacagatggcccaagggatggcaccacttatttattgttgccttttcacgttttctttacacacacgttgacgggccgcaggagggaggcggggaggaggaacgggcagccacaggactgagccctctcactccagccaaagaaatgggcctgcctgcctccacccgtcctccctcagcctccccttcttcccgccccacctcccatttctgttgctggaggggctgtcctccttcctgggaccccctcgccagcttggctcgatgtttgccatgagtattagcttacccaatgggaccgtgccccacctccccacacacaggccttctgtggggctgggcaccgtgtcctcctctgaggaagcagttggggccctcttgccagcctccttgctgaccccaggtcagccctgtgtctgtcacaggctgggtcaaaagagccctggctctgcccctcagggggccagctggggagatgggggcttcttcctcacactgctgtcctctcccccttcagctcctgagtagctgggcctgtgcactgggcaggttcctggggccgcctgccctgccttgccgctccccttggacctccaggggctcctgggttggagggaaccaccagcgttcccttctcccccttgtcttcccccctctcctcccagctgctttacttaaagttgattttgaactttttatttgaggagacgaagtgaaaacaaatctataaatatatatttttaaaatatttaacttttttttatggcgtttttctcgtccccctccctgcccaaactccccttccctggggagccctcaggctccccagaactggctgggcccctggggacagagccaccccatgagctcggggtccaccagtgtgtgggggagattctgggtttgcccagtcctgggttgtttccaggagaaagccgggggaggggccctcaggccattccccaacggggtggggagggtgacccacagctctgggcctctttttgccctttagggctgttgctagggagagggaagagggagaccaaatgtcggggttggggtgggagggcgtcaggcagaggcaactgacttcatttgtgccacacgcatgggcattgcagccttgcgctgtcccaggcatgcagctgcctggggcccaagttgcagtgagcagggtggggtctgggagggggtgagaggcaggaatgggggtcagaagaagtgggagcagcttcttgggctgagtgcagccaaaggggagccagaaatgggcagttctcccagggagtgagcagctactgtaacttttttaaattaagacaaaaagccttgaagaaaatgactttatttttctaagtgtaacctcagtatttatgtaatttgtacaggggccatgccccacccccctcctccccctttggggtagaccttgagggtgggccagcataggggggagggtcttttaccctgtgtcagagcctaccttcaccacctatatccagaaggggagctttttcagaaacagggcagcagtggggtgaaattttcttaacccctaagactgccttcagtaggaacaagctggcttctgtgattaggtgaagggatgggggaagattttatgcacagcctagttatcaaggggatgatttgccgacatgtttgagaaccccctaacctctaaccctcattgctgtcttgccccagtttggggtgccaagatggaagtcacctttctgggctttctcctggagatagctggggcttatgggtggctttcaaggctggggcatggcaaatcaggggccagagagcaggggagcttgggactcaggtctgtaactgcccagccccttttctctgctcttgtttcactccaccatcactcactcactccccactcccccacccatggggaggagacctttgatgaattcttcctctccttcccacaaaagacagacccagtgagtgaatcaggcaaagtgcttataatgtgtgttgtgtgagcgtggccttgggaggacatgcgtgtgtcagggatgagttgaggtgatatttttatgtgcagcgacccttggtgtttcccttcctcggtggctctggggtatgtgtgtgtgggtgtgtgcgcctgagtgagtgtgtgtgcttgaatgtgagtgtgtatgtcagtggtttctacttcccctgggatgctgacccaggaatagtggacatggtcacagtcctatgtacagagctttcttttgtattaaaaaaaaatactctttcaataaatgtatcatttttgtgcacag

SEQ ID NO: 13945 - DNA, 141 bp, Homo sapiens
gggggcagatgcaggaaacacctagagcagccccagagtcacggggctgagggggcgggagctgcccctgtcatagggagggggattcccagcgtctgtagtgcttcctgtttgctgaataaaggtctctttctcacacac

SEQ ID NO: 13946 - DNA, 2883 bp, Homo sapiens
tgacgcccgctgctctccgcggtcccccaccctcaccccggccccccacccgcagccggccacactggagcagctcccagcacagccttacgcgcccgacgcgcgccacccgcggccccagctttccgcctgcacccgcgaggacgcgcgcgagcacacgcggcgccccgccaggccttagggcccgtgggggacgcggccccgcgccgcggggagggtctgcctccccttcctcgccctgtgtcctctcatcctcccgccgcccgtcaggccggccagcctcacatcagtctctccgccccggggaaggctcagccacttttcatcgaggactccacttctggggacgcctggttcgttcgcccaccaggcctaggctacgctccatgctcccccagcaatctctgcctacacctcctgcggcgccttgccctcctccgacccctttccagccaaagtccccccaccccttcagagaagcagcctcaaattccagaagtggaggctccagcctccccgcgagggtccagccccacagtcttctgggagccattgtggccagggacggcctctggactgccaggctgggttggggacccagggaacatcggtctactcaggtgtgagggggcaggtctgacctgccccaaagttggctccatcctggacaactcggtgagaggcagtgggcaagtgatcttggagatgggtgggcaggtgattctgtgggcaggggatgtgctcccctgcacctctggggtgcagaaacctcttgcctccagatttgggtggagcctctgtgggaaccataggaagtgtgtgggctgccttcctgggcaagtatttcccagtgggaagttggagggggctttaacaaagttttactccctcccctgttcccctgatctagtgctcaggacccttcaccatcaggaattccttcctgtcatctaacctcagtcctgcctactgcagttccagccaacctgctctttcctgagttcaaagcaggtggagactggctggttaccatctttgcactggcccttcggagattcggggactcagttctggtggggtcaccctccctgtcctcccgcctgtgggagggagggagggctggctcaggcatcgtctcccgcaatgggcagagagagcagagacaggtggaccaacagacagctggcccctggaggcagaaaggcccttctaacttccagattgtatgcttgagtgatgggtccccagcccaagcccactcttccctcagctcacccttcagcctgttccttcttgccctgaccccagcccgtgcagctgctctactccaggaatggatgtggggactcttcctgggttctggctcctgcatagctcaccccacctcatcatgagcctcaactgcctacatctggggcaagcagcacaccggctgcagatgggacagccagccctgcctatctggacaggcccctgcagcctctgtcccctggcctagcctctctgtccttccctgagtcacagagagcaagccaagacatccagggaaagaggaagaaaggccttagtgtgccccagcagtctggctgcgtccagccaccatcacccggaaggatgcccacaaggcagctgaccctgaaagcagcctccccctcatggagagtcagcagcttgggcagccacttccaggccagggtggtggcttctctgcagaccagctgaggggaggactcctgggtggacagcctttgacgtccaccccacgctgatgcagaagctcccagaacactcaggaaacttctccggacagagccctccttgtcaacttgaggccctcccaaggccctctactgccctctgggtccagcagagggagtggaggaagggccactgcctcccacctagagcttctccgaatgacaatcagctcgtgccaggtggggaccaggatatgactcctggtgcccaggccctgggcctgctccttgccaccaaccgaaccgtgaatgtagggcccccagcctcacctctgccccaggaccaacaacaccctggtttggagctgggaggaagaagggggcctgagagagccccaggtccattctacccccagcttcactcagcactggagctggcagagacgcaaaacccagtctgcccttgggattccaaacctccctagggctcccaactgacctcaggcctctgagtcactgaatgtcaccaggagaggtgggggagggaaagtgggccagtggggagggggtcacctaggggactgcctctgtgcctctccccaggaagcatccagggcagaggaagccacatctcccggtgcccccaaccccagctgcagcctcctccccctgagcattcattctctccaccaggcctccaggtcctgagcccttcctctgtaaaagtgtcacaccacctccctcagcacttccccatcacaacaacctatgtcactgactcagatgcagggtctgctcaccccaacacatgccttccctccccagccacaccgtgcacgaagggggcacaggagaggagaggggctgtgccccaggctccccatttcccagctcctcacagaggcctggtttgctcagtcttctgaactccagggaccagccctggtgggcatggggtggggagcagggagttgcccttcccctccctcgggaagccacctaagaatgtttacatgccaaacagaatgtaacacccctccccaagcccttcccagtcactgcatggcctctgcccatcctgcacctgtccaccccaccccaacaccctggaagccactgtcaatgattagatcgggtctcggaagggaagtagccatcacaccattaaaaagcctgtggacctttt

SEQ ID NO: 13947 - DNA, 812 bp, Homo sapiens
gtgggagtggaggcaggccctccacagaagctctgcagcaggggctgggagagcagaagggcaggccctgcaactcaggctgggagtatcgaaccctctgcctagggccggagttgctgccagtacccgctccctctgctcatccatccttgattatttggcttctaggaacagttgacttcccagaatgcagtgggctgctgggcacccctctcacggttggggaggattctgtaaataaaggtgccccttgggttggggcagtggtgacgagctgtgggaagagccctggataggaagccactgagtctgccctgggctctgataaaaccttcaccattaacttgctgtgtgaccttgggcatgtggctttccctctctgggcctcagtctgttcatctcccaaatggataatgaagcctcttgggaggccctaccataggatctgttgccatgctcaaatgagttactgaataaggtgcttctgcttcttctagagatggtgctaaagaaaggactagcatatgagacttctggtaccaatggggctggtgggcatgctgtccactgtgtggtgctaggactgccaatgccaggcccaagggacaaaaagaacagagctttttgttctcatggctggccctgctacctccgaggcaccctgcagggcaatgcatgtcatcccaacccccacactccccatcctccaacccactggtctcatgcccaaagaagagttgaaggcatgggagccaacattttattgaagaagccacagaggctgaaattcaataaacacaagttttatgagt

SEQ ID NO: 13948 - DNA, 334 bp, Homo sapiens
gcccaatcccacaccctgcagagttctcccctctctctgatccaggccgggcctatacagaggtgctggctgcttgtttacattctcctctggggctctacctctccacacttccccagaagggaaaagggcaccctggattactctttggaaatcactccttggtgggcagcatcctgaggcttccccagaaccaggcctctgctctggccctcttgcatctggaacgccaggtgggtttttctggcataggagcccacttgcattttcatagttttatttgataaaattccatcttacattctgtgtattaaaaaaataatatttctggtgt

SEQ ID NO: 13949 - DNA, 698 bp, Homo sapiens
ggcccctgctggccttcctgccattgctgcaccaggactgcaaggagtccccacaccttggcagctcagggtccccagtccaagcccttgacctctcctctatccagacccgcacagctgtttcctgtgtggatggggtcaggttgtgggccatgccaggcctgtcagctgcgttgactgactgcagcagcttgcctcatggttttccctttttcttagaatatttattcttcagaggtaacatgcagttgggtctcaagacctttcctccaatcagcccaacccagcccagactgggcttttctggggagctgaggagtttatcagtattcatcttccatcctttcatagtcacaagttttgttattttgtttttttttgggggtgatggtgtaattgttaacctcatttccgtttcctacctgtttgcttccccccccagtcctccgcatgagctgttgccctccaggggcctggcacagctggccttggggacgagggagaggactgattcagggccccctcagctgtctcctccctccctctggaaaggagggtggggctcaggggcctcaagctgggctctgtgtgaggcctggcccccactcccaaccttggctctagactgttactcttaagctttgagaaattttcacattgatgactattttaaaatcaaataaaactattttactggt

SEQ ID NO: 13950 - DNA, 206 bp, Homo sapiens
gcttggatgcttctgaggcaagctgaagctttgggttctgactgacccaccctacaggactgctgaacagagagcccagtgtgactagggatcctgagttttctgggacaattccagctttaatcaatacattttgttaaatgtgccataaaatgagactttttacgcctttataaggccttagatgtaaataaactcacccaaac

SEQ ID NO: 13951 - DNA, 21 bp, Homo sapiens
catggtgaaaccccgtctcta

SEQ ID NO: 13952 - DNA, 1085 bp, Homo sapiens
tgctgccctcaggcttgcctgtaggatttaatattttttatctttacagatctttatctttaatattttatctttacagatttccctgagaaagggaattatgaaatttttaatacaaaaaataatccatttaggtgctgagttacggtcccatctcttcacaggcatggattctaatcccactgctgacagagatgtaaaaattcatcctaccagagtttttaatctttagcatttagggaggcagtgtcataaagtaaaaagtgtgtgggccttggagtctaagagacgtggttgcaaacttagctctggttattgcaatgagggccttgaacaagtcattttcttcacattctcatctgtaaaatggagataataccttacagattattgcagattaataacaatgtattcaaattatgtaactcggccgggtacaatggctcacgcctgtaatcctaacactttgggaggccgaggcagacagatcacctgaggtcaggagtttgagaccagcctggccaacatggcaaaaccatctctactaaaaatagaaaaattagccaggcacgttccaggcacctgtgatcccagctacttagaggctgaggcagaagaattgctttaaccttggaggcggaggttgcattgagctgagatcatgctagtgcgctccagcctgggcaacagagcgagacttcatctcagaaaataaaaaataggggccaggcacagtggctcatacctgtaatgccagcactttgggaggccaaggcgggcagatcacgaggtcaggagtttcagaccaatatggtgaaaccccatctctactaaaattacaaaaaaaattatccaggcgtggtggtgcacgcctgtaatcccagctactcaggaggctaaggcaggagaatcacttgaacccaggaggcagaggttggagtgagctgagatcgcgccaccgcactccagcctgggcaacagagcgagactccatctcaaacaaaaacaagaacaaaaacaaacataaagttggcacagaaaagggaccaagtttaaaaaagggttttaaatgtaatgagacttgc

SEQ ID NO: 13953 - DNA, 416 bp, Homo sapiens
atgagtgcttcttaatcctaaaaacacaatggctgaattatctttctccatgtggcgctgaatcacccatctggtttggagctagagttgcttcctggtgagagaggaagcaactctccttctggttgtctgcctcccctcagatttcctgataggctgatggcatgtggctgtgactgtgactgtaatcattgctgaacaacatctctttgaatcaaaggttgattttcccagagggtgctgggtcaggcatttctattaggagttggaaagcaaaaatgggtccatagacactctatggaggtgtccctttctgctctttgctgtgtcctttcagaatttttaccaggaacataatgtggatgtgacttatgaacttaaatataaaataaatagattcttattatattttcctg

SEQ ID NO: 13954 - DNA, 58 bp, Homo sapiens
aatgggagccagcctggatgtttttaaacagagtctaaacatgattttcttaagcttc

SEQ ID NO: 13955 - DNA, 1938 bp, Homo sapiens
caagccgaggcggtgagccgggcaggaggaaggagcctccctcagggtttcgggaaccagatctctcaccaggaaagactgatacagaacgatcgatacagaaaccacgctgccgccaccacaccatcaccatcgacagaacagtccttaatccagaaacctgaaatgaaggaagaggagactctgcgcagagcactttgggtccggagggcgagactccggcggaagcattcccgggcgggtgacccagcacggtccctcttggaattggattcgccattttatttttcttgctgctaaatcaccgagcccggaagattagagagttttatttctgggattcctgtagacacacccacccacatacatacatttatatatatatatattatatatatataaaaataaatatctctattttatatatataaaatatatatattctttttttaaattaacagtgctaatgttattggtgtcttcactggatgtatttgactgctgtggacttgagttgggaggggaatgttcccactcagatcctgacagggaagaggaggagatgagagactctggcatgatcttttttttgtcccacttggtggggccagggtcctctcccctgcccaggaatgtgcaaggccagggcatgggggcaaatatgacccagttttgggaacaccgacaaacccagccctggcgctgagcctctctaccccaggtcagacggacagaaagacagatcacaggtacagggatgaggacaccggctctgaccaggagtttggggagcttcaggacattgctgtgctttggggattccctccacatgctgcacgcgcatctcgcccccaggggcactgcctggaagattcaggagcctgggcggccttcgcttactctcacctgcttctgagttgcccaggagaccactggcagatgtcccggcgaagagaagagacacattgttggaagaagcagcccatgacagctccccttcctgggactcgccctcatcctcttcctgctccccttcctggggtgcagcctaaaaggacctatgtcctcacaccattgaaaccactagttctgtccccccaggagacctggttgtgtgtgtgtgagtggttgaccttcctccatcccctggtccttcccttcccttcccgaggcacagagagacagggcaggatccacgtgcccattgtggaggcagagaaaagagaaagtgttttatatacggtacttatttaatatccctttttaattagaaattaaaacagttaatttaattaaagagtagggttttttttcagtattcttggttaatatttaatttcaactatttatgagatgtatcttttgctctctcttgctctcttatttgtaccggtttttgtatataaaattcatgtttccaatctctctctccctgatcggtgacagtcactagcttatcttgaacagatatttaattttgctaacactcagctctgccctccccgatcccctggctccccagcacacattcctttgaaataaggtttcaatatacatctacatactatatatatatttggcaacttgtatttgtgtgtatatatatatatatatgtttatgtatatatgtgattctgataaaatagacattgctattctgttttttatatgtaaaaacaaaacaagaaaaaatagagaattctacatactaaatctctctccttttttaattttaatatttgttatcatttatttattggtgctactgtttatccgtaataattgtggggaaaagatattaacatcacgtctttgtctctagtgcagtttttcgagatattccgtagtacatatttatttttaaacaacgacaaagaaatacagatatatcttaaaaaaaaaaaagcattttgtattaaagaatttaattctgatctc

SEQ ID NO: 13956 - DNA, 2024 bp, Homo sapiens
gacgccgctccccggtcccggaaccctcccttcgccaccctccacccacccacctcgcggtccccaggaccactggctgccaactcctgccgccctctgggactgcccctcagtcccaggagagctatgaggcctcactgggggcagaacttggggagaccgaagccggcccttccactcccctaaacctacagtcctggaaggtctctgctggaagagactgggagagtggggaggggccagggacctatttcgttgacagaaacagtgaggtctattggaaagttagccttcagtgggaggagtggcaaaggcacgcagggcagcagtacccccgtttggcacttgaggcacggagaagggaagggaagtccgcccagccagaactcccagacccgctcgtttaacagtggctttatgagcagcacgacggactccctcccctggcggggaaattaccttcctgcgaagaaaggtgacatccccgccacagacacggaggccccgcctgctggccagctgtggccgccataggggagctggtgaggagtgaggtggctctggcctcccatgtcaggtagggtgagagaggccctgaagatagaagccaggcccgaaggccagaattaaaggggtagcttggccatcagctccttcccccaaaaccaggctcagagctctcctctatcagcaattctttcctgaggtccagggtgttgcaaactcatggccttgggccacgttttaccttcagtgaggttttgtttggcttgcaatgagtacatgggttttaggttgaatgtgagagtctgcagacaatgtgggttctccgactgccctcccagtgaaggtggacctctgatttagaccggcccgctgggcccgtgcctacatccttttcctcagcgtcaggatcttagtccccatgattgctgcccctttgtggtctgcatgtttcttggtaagggtgcccagtcaagtgtctctgggagccccctcttctctgtcatcgtcaggctccccacttgcagtggccgtggtggctgcacatgctcccggatacccctccagcactcccttttgtcatcttgagtttcagtccgtgacttgggtggcaccctatcttctccatcagggatggtagctatttttctgccatgagactagaggttgcttgagaacaggaaattggatctctcccttcaggctgggatttcactaagggctggagaaggggggaatatgggaggattatctcctatcacagggagcgctctgagggcaaggctgtgtctccgattcagactgacggttccctgaggatggggctgtttctcccctccgactggggctccctgaggatggggctgtttctcccctccgactggggctccctgaggacagggctgtgtctcccctcagcctggggctccctgagtcagggctgtgtctcccctcagactggggctccctgaggacggggctgtgtctgcctcagactgggaatccctgaagatggggccgtgtctccctcaaagtggggctccctcaggacagcgttgtgtctcccctcagactgcggctccctgaggacggggctgtgtctccctcagactggggctccctgaagaaagggctgcttctccctcagactggagctccctgaagatggggctgtgtccccctcagactggggctgcctgaggatgaggctgcatctcccctcagactggagctccctgagggcagggctgtctccccccttcagactggggcctcccccaaaggacagggactgtgtctcccctgggactaggttctttgtgtcttctgcatcagacagattcccatgaggacagggctgtctccccctccatctggagctccctgaaggcaatggcctctcccctcaaatgggacatttgcaccccaccccaccctctggctccccatggcgcccaggcattcctcccaggacaccatttgtcacgctttgatgaatgaaacttactaagaataactca

SEQ ID NO: 13957 - DNA, 635 bp, Homo sapiens
ggggagggaggggccctggaggccacatcctgccccaccccacccccactcccacggacactaaaacgctaataatttattagatctaaagccccttcctccccagcccctgctttcattaaggtatttaaacttgggggtttcactgctctcccccatgatggagggagggagccccccaacctcagtgaggagagccccgagccggccccggggcaaagaggggtgcagagggagttcccccagatcagtaccccccacccctccccagctagtagcatgaccaggagagggttaatgagagccaagaggagtacctggtgcacctggtgccggtggctggagacctggggggcaggtggatctggggctgttcccccccctccgttttttccaccccacagttcctcctgggatctggccctccagggaagtggagcctccagcccctaggggatgcatgaggggggagggggtgctgagtgggaggaagagtcaggctcacagctggggtggcctgggggtgggggtgggcaaggctgacactggaaaatgggtttttgcactgttttttttttggtttttttgttcttttttgtttttttcctttaaaataaaaacaaagaaaagctctg

SEQ ID NO: 13958 - DNA, 470 bp, Homo sapiens
aggcgctgtaggagcctggtcatctctaccagcagcagcagcagcgaggttctagcccaggagggtggggtgcttcttgtagccctcagctctccggtctctgctgatgaaatgggctccaggtggcagtgcccgggtcccaggtgccgtgtttactgcagcagtgggacctccgtgcccactcccccagctcagaggctttctcttttttccccaacccggcttctgatggctggctttcccccaccatcgctctctcagagtatattttactaaagagtagttgatgcttccccagggtccccctggctggggaggccaagaatagggaagggacttgtagcccgtttcttaccctccatgcttgctgtcctgctcacacctacctgctgaccacccatcctggcacagcctctgttttcctccccatctgtggatactattctaataaatagcacatgccattggct

SEQ ID NO: 13959 - DNA, 623 bp, Homo sapiens
caaaggatggacagaaggactgcctgcctccctccctgtctgcctcctgccccttccttctgccaggggtgatcctgagtggtctggcggttttttcttctaactgacttctgctttccacggcgtgtgctgggcccggatctccaggccctggggagggagcctctggacggacagtggggacattgtgggtttggggctcagagtcgagggacggggtgtagcctcggcatttgcttgagtttctccactcttggctctgactgatccctgcttgtgcaggccagtggaggctcttgggcttggagaacacgtgtgtctctgtgtatgtgtctgtgtgtctgcgtccgtgtctgtcagactgtctgcctgtcctggggtggctaggagctgggtctgaccgttgtatggtttgacctgatatactccattctcccctgcgcctcctcctctgtgttctctccatgtccccctcccaactccccatgcccagttcttacccatcatgcaccctgtacagttgccacgttactgccttttttaaaaatatatttgacagaaaccaggtgccttcagaggctctctgatttaaataaacctttcttgtttttttctccatggct

SEQ ID NO: 13960 - DNA, 279 bp, Homo sapiens
gttaggagttcatagttggaaaacttgtgcccttgtatagtgtccccatgggctcccactgcagcctcgagtgcccctgtcccacctggctccccctgctggtgtctagtgtttttttccctctcctgtccttgtgttgaaggcagtaaactaagggtgtcaagccccattccctctctactcttgacagcaggattggatgttgtgtattgtggtttattttattttcttcattttgttctgaaattaaagtatgcaaaataaagaatatgccgtttt

SEQ ID NO: 13961 - DNA, 103 bp, Homo sapiens
gcataaacaggcccacaaaacatgtgctgactgcactctggcgacccttttccagttgatgttttttgtcatgtgactgttctaaatccagtgtttgaccctt

SEQ ID NO: 13962 - DNA, 331 bp, Homo sapiens
agtacagtttatattctgtcacaggattaattaattgccggttttcatactctagaaggctgaaactgatgtttatcttcattgacaaatttacccaccatctgtggtttttcagttgtttattttaaatgatatcgatcttacacattctgtgtataaagaccttaactccacaggacggacattttagagtttaaattattaaggctatcattcttttagtaatgtcatatttgcaaacttttttagttttggcctttaatttaaaaagcctaattttaaagtgctgcctgtgagtaactcttgaataaaaacaaaatataaaaaattg

SEQ ID NO: 13963 - DNA, 3776 bp, Homo sapiens
aattcctcagcagtggcccagtggtatctgggggccacatcccacacgtatcaatatatacatatatagagagagtgcatatatatgtatatcgattagctatctacaaagtgcctattttttagaagatttttcattcactcactcagtcatgatcttgcagccataagagggtagatattgagaagcagaaggctcaagagagacaattgcaatcgagcttcagattgtttactatttaagatgtacttttacaaaggaacaaagaagggaaaaggtatttttgtttttgttgtttggtctgttatcatcaataacctgttcatatgccaattcagagaggtggactccaggttcaggagggagaagagcaaagccgcttcctctctgtgctttgaaacttcacaccctcacggtggcagctgtgtatggaccagtgccctccgcagacagctcacaaaaccagttgaggtgcactaaagggacatgaggtagaatggatgcttccatcacagtaccatcattcagaataactcttccaatttctgctttcagacatgctgcaggtcctcatctgaactgttgggttcgtttttttttttttttttcctgctccaagaaagtgacttcaaaaataactgatcaggatagattattttattttactttttaacactccttctccccttttcccactgaaccaaaaagaaatcccatccctaaaacctgccttctccttttatgcaaaactgaaaatggcaatacattattatagccataatggtatagatagtgattgcgtttggctatgtgttgttttctttttttttaaattatgaatatgtgtaaaatctgaggtaacttgctaacgtgaatggtcatataactttaaagatatatttataattatttaatgacatttggacccttgaaacatttcttagtgtattgatatgttgacttcggtctctaaaagtgctctttattaaataacaaatttcttcagtggtctagagccatatctgaaatattgctaagcaatttcagttcatccaggcacaatgtgattttaaaaaatacttccatctccaaatattttagatatagattgtttttgtgatgtatgaaggaaatgttatgtttagttctttcagatctttgaatgcctctaacacagctttgccttctaaagcggtaattagggatttaaaaaacaacctttagccctttatcagcatgaaatgctggagtgatgtggttttctaatttctttggggtaattatgactcttgtcatattaaaaagacaagcacaagtaaatcattgaactacagaaaaatgttctgtggtttcatagttaagcaaaactctaaatcgccaggcttcatagcaaagacatagtcagctaaaagccgcacatgtggatagagggttcaattatgagacacctagtacaggagagcaaaattgcaccagagattcttaaccaaccagccttaccaaacaacacaacaggggaaccccaatctgccttacccaaggccccactggcagctttccacagaatttgcatttagaggagcagaatgacatcactgtcctttgggagtaggtcctctgaaaaggcagcaggttccagcaggtagctgagctgagaggacatatggcccacggggacctacagacagcctttgacatttgtatttcttacaatggagggccaaggagggcaaggggctgtggagtttggtgtctactagtgtgtatgaatttgagctagagtccttctgtggcatgcactttgaccactcctggcagtcacatggcagatttccaagtgcaaatccttaatccaaacaaggatcatctaatgacaccaccaggccaatccctgctctcctccccgaaaagtcagggtcccttcattggaatcctccacccacccaagcagaatttagcagagatttgccttcaaaccctaacggcccccttgttctctggtccttctcaaacccacctttgtaggccacccagcattgcaggacagcgtgtggggcagctggacctgtgcttcctgcctgggagtctcccttggaattcatcctgactccttctaataaaaatggatgggaaagcaaaacactttgccttctaaaggccgtataccaagtatgcttagataaataagccacttttctattacttaagtaagaaggaagtagtaattgatactatttattgtttgtgtgtggtagcttgaagcacaccactgtccatttatttgtaagtgtaaaatatgtgtgtttgtttcagcagcacttaaaaaagccagtgtctggttacacatttcaattttaattaattgacataaaaatgctaccgccagtgccagctgcatcctatttaattaaaaaggtactatatttgtacattattttttaatgttaaaagggcttttttaagtttacagtacacataccgagtgactttagggatgcttttgtgttgaaatgttactatagtggctgcaggcagcaacccagaaacactttagaagctttttttccttgggaaaaattcaagcacttcttccctccaccctcactccaaccaccccaatgggggtaattcacatttcttagaacaaattctgcccttttttggtctagggattaaaattttgtttttctttctttctttttttttttttttcactgaacccttaatttgcactgggtcatgtgtttgatttgtgatttcaagaccaaagcaaagtcttactactactgtggaaccatgtactagttcctgggaattaaaatagcgtggttctctttgtagcacaaacattgctggaatttgcagtcttttcaatgcagccacatttttatccatttcagttgtctcacaaattttaacccatatcagagttccagaacaggtaccacagctttggttttagattagtggaataacattcagcccagaactgagaaactcaacagattaactatcgtttgctctttagacggtctcactgcctctcacttgccagagccctttcaaaatgagcagagaagtccacaccattagggaccatctgtgataaattcagaagggaggagatgtgtgtacagctttaaggattccctcaattccgaggaaagggactggcccagaatccaggttaatacatggaaacacgaagcattagcaaaagtaataattatacctatggtatttgaaagaacaataataaaagacacttcttccaaaccttgaatttgttgtttttagaaaacgaatgcatttaaaaatattttctatgtgagaattttttagatgtgtgtttacttcatgtttacaaataactgtttgctttttaatgcagtactttgaaatatatcagccaaaaccataacttacaataatttcttaggtattctgaataaaattccatttcttttggatatgctttaccattcttaggtttctgtggaacaaaaatatttgtagcattttgtgtaaatacaagctttcatttttattttttccaattgctattgcccaagaattgctttccatgcacatattgtaaaaattccgctttgtgccacaggtcatgattgtggatgagtttactcttaacttcaaagggactatttgtattgtatgttgcaactgtaaattgaattatttggcatttttctcatgattgtaatattaatttgaagtttgaatttaattttcaataaaatggcttttttggttttgtt

SEQ ID NO: 13964 - DNA, 2901 bp, Homo sapiens
catgtgctagggcttatacaaagtgtctttgattaatcacaaaactaagaatacatccaaagaatagtgttgtaactatgaaaaagaatactttgaaagacaaagaacttagactaagcatgttaaaattattactttgttttccttgtgttttgtttcggtgcatttgctaataagataacgctgaccatagtaaaattgttagtaaatcattaggtaacatcttgtggtaggaaatcattaggtaacatcaatcctaactagaaatactaaaaatggcttttgagaaaaatacttcctctgcttgtattttgcgatgaagatgtgatacatctttaaatgaaaatataccaaaatttagtaggcatgtttttctaataaatttatatatttgtaaagaaaacaacagaaatctttatgcaatttgtgaattttgtatattagggaggaaaagcttcctatatttttatatttacctttaattagtttgtatctcaagtaccctcttgaggtaggaaatgctctgtgatggtaaataaaattggagcagacagaaaagatatagcaaatgaagaaatattttaaggaaacctatttgaaaaaaaaagcaaagaccatttgataaaagcctgagttgtcaccattatgtcttaagctgttagtcttaaagattattgttaaaaaattcagaagaaaagagagacaagtgctcttctctctatctatgcttaatgcctttatgtaagttacttagttgtttgcgtgtgcctgtgcaagtgtgtttgtgtgtggttgtgtggacattatgtgatttactatataaggaggtcagagatggactgtggccaggcttccacattcctgaagcacacagatctcaggaaaggttatttttgcacttcatatttgtttactttctcctaactcacaagttaaaatcataacttaatttcattaacttttatcatttaactctctcatgtttgttgtaacctgaggtatccaaatgctacagaaaaatttatgacccaaatacaaatctcaatttgactgggacagaatgaggaatggagatttttgtatttatctttgggactttatgccttactttttaggctatagaatagttaagaaattttaaacaaaatttagtatcttttggtctttcacaccattcatatgttaagtggcagaatagccttagtgctacctccacttttttctccagtatttgcatcacagaaataatccctctgtttaacatgtttgttcagagccaagggtttattgtgaagaactgtcatcctgcctttgctagctggtaccttctagtaatcaaaattaatatgaagaaactaggttgtgacagactagattatatttagtaggggaaaaattgggctcaagaaccattcatcagtacgtgagacaagcagttaatagtatgatctttaaagttttgacaatataaaataaacttggtaactgttttacaaatataaaagtataataaatatgcagcccagttaaatattgattatctgtgatggtaaagaacaacagtggtgccagtcatcaaacatacagtgcgtcctattgagtcactgctaatttcttgagcctggtatttgctgcctattgtatttgtggttgttgagaggcattttcaaaccctgtataaataatccatgctgttggtcataagttaactgtattaagaacagtaaaataaataaaaaccaatagtactaattttgctttaaaaaaatttctaatttttttcacataaaacaattatcctaaaggttaatagttgatcgaaacagaataatagaaaaattctactttaatttccattaaaaagcaaatagcattgacacatttaaagcttttcatttaaagtagtggatgtttttgaagtatctaaaatagtagcagaatattttatacttggtccttgcaatggtgtgagttttaatgattgcattatcgtgattggtggttatgagtttcagaaatctatacttggcatccaactcatgagtggattttatataggatggaacaggaaggtatgtcctgtcagtatcttaaccctttcaacaagacatttacctatttgtctttccttacgttctcaaaatattaactcgaattgtaaattaagcaaaaatttaaaaagtatatgttgatgggacaagaagaatagtatttatttaataaaacatatattatattgaactatgtgttaattcatttgtatcttttaaaaaattatcactgttaaagccattgactcctttagtacactgagaaaaatcttatagtaaaactagcctttcacattaaggttttggtgtgtattttgttaaataactaacatgctgctctattttctgggtgtagaaagtatttggctctaggaaacatttacttgtttgtgaaaacaataccccaaggtaataggaaaagtttgagttaagtgtttttaattcagtcagtgaattcagaataagtacattcatgtataacatagggacagttctgctgctgttatttatatgcaattcttctggtaaatagcaatagaataaaacatatttcaatgtttgtgtataggttttatattattattccactaggaatggcataagaatttatagataaattcttgtaacattaaaggattaaaatgtttttacattgtttttgggtgtctccttcttgtgcccatatctgataagctttatggattattgcatttaattccttttatttggagggttttacttccttgttaacatataaagttataaatgaaggacaaggaggagatggaaaatgtgtatttattgttaattcttaaaatagtgtgtaaataaaataacatcagtgtgcttt

SEQ ID NO: 13965 - DNA, 1734 bp, Homo sapiens
acccctaaagatgcaacccttaaagatacagtgttcagtattattgaaatatgggcatctgcaacacataccccctattatttctacctctttaggaagacacctattccacagagactgatttatagggggcagcactttatttttttctggaaacccaagttctctttgactcctctttttgtccaaaagtgatctggtcggatctcacaaggccatccaatgagaccccgcacagcattttctaaagaagaatcgaagcctgaccactttcaccttgggcaagaaggtttggcctttgagttgctattctatgctgaagagcctgcttagaggaggagtaccaggagggagccagcatttcagatctgaagtagacgataggaatgtggaagaacacatacatagtgcttaagaaatacatttaacctgttatgtcagtatttatcaatgaagtttgataattcacttttctgtcattgttaaagcgtacatactgtaaattaaagggaggtgaatggaaattaatgaataaacattttgagtttccctagtgttgaaggaaggtgtactttttcttgtcagaaagataaaaaaaatcaagttgagatgatgtttgaatttcaagaaaagaggctgctttctgtcagtgccctctcattagatctgtgttaattagttagcactccactgcacatgctaatgacttcctctgacagccacacaccgaatcttgatgaaaaaagagaagagcatttgccttgttacatagtctgttacaagccagatatgttgctagctctcaagagttgtaatatattaagaactacaacttatttgattaaaactcagctgtatagatccttttataaagcaccttttgttaaacatcagcctttcattggtattttaaaagcaaggcagatagatatgaagtcagccaactctgacatgcgtcctttcttatctcccttacctgacactaggggctctagagaggcagagagagcactcacaaatcacactaaaactgccagcggcctgactcttactcagtttagcaaaaattcttgcctaaaaagtgataagtaaaaatctgtttatggtatacagttatgtctcgaatctttgaatcaaatccatgttcttattttagaaaggtaagagttcttcaaattcagctacataccaccggctctcccaacctcagacggtgggcatttctggatggatggctgcggttatggataaaggctgtaactgttaacacagaaaaacatgaaaagctcaggcccaagaaaggccttggagccagccaaacagaatttgttctaatggacatggatgatgttgaacagaaaaaagtttacaagtgctttgtggttgcactaatgtatactcactgccattttaagagggggaagtacattttaaaatatatttgaatgtcatgtactgatatgcagtagcttattgtttttctagttgcagagaatgtgaagtttaatctcttaaaatatttagatggtctactttttcattgaatttgtcaatatgtaattgcgttgtaaaatattatatatatatatatatatatatatatatatatatgcttaacttcccaagtgttctgcattgaaccacttagggaaaattttgtttgtttttatgttttgtaatttttaaaattaagtaaagactggatcaaaataattgcatccaacctggaccgtg

SEQ ID NO: 13966 - DNA, 525 bp, Homo sapiens
ccgtggatctatagctgtggccaatcagtcagaagctgcccttgaacaagtggcatcttacgcagaccaacagagtatttgagaaaattgaaaacatgtaaccacaagaagttgtcattttcaaaaacttctatataggtggaaaacaaattaggtctcaggttgatggtggggtgtgtttatagtgatcctgttatatatacagatctgggatctttcgtctttattgtcttacgtttctaattagttgggaggatttattttgctaaacagtttactaacacattacatttcaaaaactattttggtacctttcaaatacagtgtttaaattaaaatagaaaaataagggctcatgacaagtacattatttgattctacttaggatagctttttagcaggatctccttcagaatttttgtcttgactttgaatctttgcctgtttgtctaaacatttgactaacattctgtttgaatttggaagtattctaatacaagatttgaataaagtttatccttaaat

SEQ ID NO: 13967 - DNA, 646 bp, Homo sapiens
cctgcctgctggcattggccagaccacagcagcacctcctccatgcaggccttaactttcccatggtcaatgcagtttttatcagccttgctttggataggacctccaaggactaaggcctccagccccatgtgtgacccttgtcatctctctgccccacataattctgttactttgctatgtgctcctaatgtatctagtgtgtcctgtgacaacactcatcacacttcattgtaaatcacttgttttattgactgtctttcctatagactgtaagctccatgagggcaggcacatgttgttctcattgaccgtgctggccccagtgcctagatgcatggctggcacattgttggcactcaacaatggttgaatgaataaaacaataaatgaatgaataactaagatatagaaactctcatttatattgcagattgaatatatatgatgaaattcttatgttgaatatgttagaatcaaatactcatttttcattagatacagtagtgtcatcactcttttaagatcttgttaaagatttcaaataaaggtacttctgggcagccaggctgcacagcatttgctttcctctgagattctaagagaaggcctttaataaatttaataaatattgagttagcacctt

SEQ ID NO: 13968 - DNA, 3033 bp, Homo sapiens
gtggtgtggacctggtgttcataatgttccagggattcagaagcaacgctatgaacttcagctgacttgttacttaaaaattgtgaattctgttgttgtgataaatatgagcaaatgaagtgtaatatctatagaaaagtagagtgagggtgaatttatatatatattttgttttgccaatatgaagaaaaagaggccttatttcttaactgtgctgggattgcaaacactttttaaaaaattgtttgcttgaaaatactactgaatataaataagaatgtgcacagtagtttttttattgaaacttgtattatttttaaagagatctatactataaatatggtgatatatttacaagtaatctgttaagatatactatttgagagggacagattagccttttagtaactatagtcactactttttccataatgcataagggatataaactctgtgtgtgtgtgtgtgtgtgtgtgtgtgtgtgtgtgtgtgtgtatatatatatatatatttttacttttatcctcttaccgaaggttacactgttgtgcctgtttgtctgcaatgctgtttatattttgggtgatgaaataggagtttcctagctatataaaccagattactcacccatgcatatagtaagaactaatgaataatcaaaataatttcatcaacttttagaatattttatgttgcttgcactataggagtcataaaaggaacttagttaaaatatgttggattgttaaacatttggggaaatatgaactgtattttaaatttgttaggtctgaagaatctaaaactgttaatttaacccttaacttgtgcctagaaactacagcacatataaaatatgtaaacaccagcctgttgctgtacttttctgcttattttacagcctcaaatatttctcattatcttgtcacttagttcttcatgtttctccttctgacttttaataatggtaataggaaaacaaaacccaaagcttttcagaacttcagtgtgaggtttcctattttgacaagttaacttgtaaatactcaggttttacgatgtataatttacctaatagaccaaactaactcatggagatattttgaactattatttaggtacaaactttataaagaatgttagtatgtcataaaatataacattacagcttatttaaaaccaaatatagttgaacatatttaaaatacattttcacagaatggatgaattagttgtttcttcagagttacttatgaacagttgaatgctttaaaatgttctgtctgtaggtaacatctaaaacacaagtgggtttatttaaatttttaaaatttgaaattttttatttgcaaaaaattgttttatgctttattatatcgcaaatgagtgtcagatttttgagtaccaatgatcatgcttccattttttttagttttaaaccaccaaaccaatatttttcctttaaattttaatcttataatatagaaatcttatgtaaatgaaattttgtcatgtttcaaataaagagaactgaagtagaaaatagaaatgccagtaaacaacataatgtttaatttacaacttacattaggggtttgggggaatgctaattatatattgagaatatacattagaactcttcaaaatgggctcttctaatgaggtcactactgaacaaaattgttccctcttctgttaaatagaataggtttaaatgactagtcaaatgaattattttcttcttgttaaataaattaaatcttactttcttttaatgaccaaccttaggtaaaacaaaaatattgtaatcctagaaattatcctccagctttctcacctgaaaatctattgaagtgatccctggtcatcctaataatgggatgagggaagtttccagcagatttcaggctgttcttaaagtttttgttggtcattttctcaatagtacatgaaatcaagatgcttatgagcatggaaatgtatttaaagtttttgcttgtgtcctcctcagtcagaatagaaaagtaactgaaatacttttacctttctgtccttgataaaatagtaaagaaaaccaaacaaacccaggcctgatgggaaaaatgattcctttattctagcaacttactttctgttggtatgggaaatgttattaatttctattactaaagttcatatcacaaaatgatatttaataataaccttggggtaaatcatgaattttttttctacgtgtgagtataaaagacaaaagttgaacagcatggaatctcattgccaaattattagtgaatgtatagttcaggtattctttgagacacacagtatcattaatttctgaattgtatttcagtgttattttttgtttgtgaccactaagcttctgtcttaatacaaagctgttaccttctacagaatttaagtctgaagatgtaaagagagaacaggccttgtgtaacagaagatactcttttttatgctccttactgtgatcacagaaaaattaaaaatccaagtgctctctagatttgttgataaacattttatgcttgcatttaaacttgaaatgtatgagcagaatgagacaatcagttaaatcagaaatgagaagtattataatgtaaaggccttgttttgctgtagcaataaaatgaccaagtgcaatgacttgatttaataaaatcatattttaaaagttgctgctatgaatatttttggctataaaattttaccctgacttgctttcaataactgttacgtaatgcagttgatgttgtaacctaacattccaaaaaaaaaattgagagggggaatctcaaaatagtatatacttcactaacttgtttacaggtgctgtatttaaaagcatgcttctctctcaaaaagaaaaattaaaggattttattgccagtcgtgtcagtctttattggttattttttgttaactttagcatttgtgtatttcagagtatgatgaaaattatattacttcaatttccaaatacaagaataaatagtaaaccaaaaacattaa

SEQ ID NO: 13969 - DNA, 36 bp, Homo sapiens
gtagcctctgcaaaaaggagctccagaatatcagag

SEQ ID NO: 13970 - DNA, 813 bp, Homo sapiens
gctgccccatttctcatggatgtcctgagaccaagaggggagatccaggagaaagaggccatggaaagcaggctggagtgaggaggaatggtcatgcttccttggaagactttctcttcttgtcaggagtgactcccaagctcttggtcggccgaagaaaaactgaggataacatttgctgactgggctttaaggagcatgatttatggaccccttaacctacccgtgccctgcaagaggctggcttcttggtcaatcttgactagattaagagtcaatctgcaagccattttatggtctccctggccagctgggggctgtagggccctgctgggcttggtcgtctttcactcctgaggcctgctctgtggctccatagctcagtcctccatcactctgcgtggatcctgggtactttggacagtgagggttcgatccaattttaggggtagggttgggggtgggagtgggagtgtgggttggcaggaggaagaatgagtctactttggagacaattaagtcatggtacgtttcctaaagatagggaacggaagaaaagcaagagaactgtttaatatgctgattattttagtctattttagaccttgagtaaactaatttagcttctaggatccaagtttccttatttgtgaaacaggaaaaaaaaattcttgtaggtattactgtttgtgtgtttgagtttactgcacatgtttgtgtttgtgtatatgtgtcttttaaaaatactatatataaagaagattctggttgttattttagacataaacgaatatatgtacctttcacaacttg

SEQ ID NO: 13971 - DNA, 2387 bp, Homo sapiens
caaatgttctggttgtgaagagtgcatctgaagtgcttacacggcgtctggcatatgcagagaaattagcttacaaatgttatttttctgacttctcgcctccactccacttaccctgtcaggaaaaaataattcacaaggaatatcaaaacaatgatgcaccctaggagtatccaagtatcttaactgagttatctcattctggtatagtggcagagttataactaaagagtgccagaaacccacgctttaaacatcctgcagtgcacacctcggtctcgtcagtaaggacttcactttcttctgaactggggcttgtgaaagctggcctgaaaagcctgattcaaggagatcaggctgtgtctctgactggagcagctacactccccatctgtaatttgatttgttctattgcagatgatgtactgggcagaggtgagtgtggattggtgaaaatctgtttttatgactggcaaagcagtgcaggggggtctttcactgataagaagcatcatcagtagggtttgtccctgatgcctttacaacagcatctgagcacctctcaagtttttccaggccagctccagtttcagtgaggagagtgtgggctttctattccccaaatattcttactacagttaatatgtaggttactgccccagcccaactgcaggttcccagatgtgagttccatgtaggcagaaactgtccagttcttgaaattgaattacttccttgtgtatgtgtttttttcctacttaaagctcctcgggatgcttcctctcaaaagtctttgaagaataagaggttaagctaagacaacctgaatcaatttttttttttttgtcaaatgcgattgaaattatccccataattcaataaaatagctttttcccttctttctttttactttgttggaaactatgcaacagaaacaaagtaagaagactctaccttaattttaaaggtaactcttacataaagaagaaagtcattatgccaggccagggggagagtggaaaggggaaatttagagaatagaaacaaacttaagcatcttgtaaattttgagtgaattgtaaacacataatgaatgaatgagaagggccagccaggagtctgtgaaatggtccagttgggaaatgcctaatgcataaacacaaatcttggtgacaggtaggttagttatctgtgaactttctaaagattaaataaacaataataggattttgttaatgtgccaaagtgagtttaaaccatgaaagacacgatgcaaatatgcaagtacctttaattgggcataataaaaagtagtgaggtatggttaaaataacatttagaacaagagagaagttagggagaatttttgtctaaaaagccaaaaagtgatagttgattggtgattttgttgttatcaggagagagaattttcttaatgtaataagttaggtactttggcaagtgaaatgggttctaggccaattgcaagtccttaggattccctggcagctagaaaccttggcactcccaaaagacagcttcagttaaaatgacagatgaacatgagtcttcaagtcaaaactactgttgtaccacgtccattgaatgtttggtgattcaagtctctgttattcaagaactgattctgtttttcctcctgtcaaaaccttggttgattttgactgtagtagcacatctggcaggaatatgacagaaaaaaattaagttaaaaatataatttctattcccctattttttctgtaaaaggctttatggggaagaagggaagaaggttgacatgagtagagatgatacttgcctctggatgacccagttgggttctcctttgactgccattcaccacagttgacctcattaggctccgaagtatgagaagagcttcattgccaagttagtgaaagaagcagatgatttacttttgctcgagtgggtctgtagacctcgggaggttagccatttctcttagagtttggtgtatgtattaagatacagcatgtatgtaggtatatataatacatatatgtgtgtatacatatatatatatttctggtttgtttaatatcttttaaaaaattttaatggaattttttgaacatgtacaaaagagaaagaatcctacgatgaactcccatgtatccatcatccagcctcaatagtgatcaacccatagcatattgtggttcatgttgacactcatccacctctttccttccccatctctccccattattttgagacgaatgagatcctgggatttcgtgaaaatattatgaatatcttatttgtgagaacaagatttcccaaagcatgatccccagaaacctagtcctgcaaaactactgcaaaaataaagtgttctaatctcc

SEQ ID NO: 13972 - DNA, 832 bp, Homo sapiens
agagtgttttttttttagattgttccatattaatttaatgttcgtgaatttgtaaaactgttaacctatgattatatgtacagaggctaaggcttctgcaggatttattatctcctgatatgcactttaaaattagtctttgtagttctatcattagcatctaatgtagttctgaagactgtttttagcagttgccaaatctaggaaactaacatttatattgctgtatctataagtatttgcctaaaaccataaaataggaattgccttaaggatctagtagtttataatgcctgaatggaactcatttattggttaacagctcatatcaggagctgtgataagtaagtgtttacatacactgtctagtgcataaaaaccttagtgtttgctatcattcattctgtagccaatggcttacagtttctgtctggtcatctggaacttgaaaaatcctcaaatgccttcactcttttacctaactccctagtctttttgggaagtagttaagatatgcctgctatctttaactttggaggtagtatcaaaattttacttctttggttgtttagtgaattaatgttgaatattttctactgtcatcaaaacatattcccaaaaagtattaaaaaggaaccttagcacatttattttattaaaacaagaaaacccaaaatatataaaccttttcttattatgataataagcttatatatgtgaataagttataacctagtgtataaaaaattatttctaacaaactacagtatactgtcttgggtttttttttttttttttagtctgtaaaataaaatgactgcaattacttttt

SEQ ID NO: 13973 - DNA, 169 bp, Homo sapiens
ctacatcaaacagaatctatttccagagagtcttgctgctgatattttttctaatatatatatcattgagggtgactaatcttcagtggaccaaatctctacccttccccaaccctccataaaaaaacaaaaatggaaatgaaaaatgaaacaaaaaaggacaaaacca

SEQ ID NO: 13974 - DNA, 4220 bp, Homo sapiens
aaaatttttaaaaaaagaaggaaaaatgttttaaatacaaaaggaaaaacagacaaaaatttaattttagctttaaaatattggattggctttggaagaattatattaggtagaatacacatacaatcaaaattttaaaaaaaaaagctaaataacttaaaaaaaaactgaggcgtacaacggagcaacaatatcggttctcagtgtctatttcaagatacatttggagacaaccgtccggattttccacttcggttctttcgagtttagtaatactgataataaaagaaaaccatgatttccccttccctttggaaaataaacataagactaaacatgagaaaaacgctaacttattggaagaaaatcggagaaacgttggtgtcaatgctttgagagctggttgactgagacgcacgaactttttaattttaaatatatttttaggaaactctcgcagtccccgccctccatctcacctcacccgtctcccaaccacccttttccatgttaccctcccttcctcacattgttacgggaatcttctgggatgaaaatgagtgtggttggcccttttgcgttgtttcagtcctctcggtacctccccgcccagccctgcgatcttaactcaccgggcccggctccccggccgcttgcataattagggagggcgagggcggggcgggaggcctgtggagaccaggcggaggctgcaatttttggtgccggccggcagagcaggttctggcggctgaggaaaatccggaccaataagttgattcaaacatcatcagttcctttcagaaatgttactagctcccagccttgccagcatctgcatagagagaatctcacatttattatatttgtgtcatctactaattttatgaactatagtaaaaaaaaaaaaacacacacacacacaatatgaatacgttgattagtatgtaattccttcggaggggtatgtaccatttcattctcttctgttttccaaagctttgcccgcatggtttatgagcttcttcaaagaggacttgggcttcctacacaatctataaggtacagagaaaaaaaaatccgatccctttttaatcaaagcctgtgtgtcagaattctgcaggtgcacttctttaaagaagctcaaagggaataatttagaaagtggccaatatgatggaagcagctttgaatctacatgctaacattcctcaacactccaattccggtggaggtggcaggggagggggtctgcaaaatgaattttaagggaaaagagtaaggattcttagagccctatattctaatagtattgccctgcatttaaaattgatttgatttccctgggttctttggtgattgctgtttaagcaaggaaagaagcagctttacgagtggacgtggggaggagggcggcacaagcacccacatttctgtaacaattgctttcttacaagatgctttatgaatgaggcatttttccctcccagacgtgcacttgttttggcatataatggcaaaataatgcaaagtgaagggagatgtatttcagctttgatttttaccgtctggatacatcgggactattcccagtggataaagtttcatgcatttaatatttctcacttctggcagcccagctcctttcttgggctccatcttagcattatcatgaaataagatctggaatccattgtctgcacctccgcaaaagcagtgagaaattatcccgggataagggtgaatgagagaggtctctaaatatagtgttgatacactcacctatttaacaaagtagacgagatctttgcaataccccttaaagataacgacatagatgttgttctgcaggatttatagttaggacccactcaattctccaggactcccggttttgcccccctcccgctttgccttggtgggggtggggattgggggagtggggattgcgttggggttttaggaatctgctgagagctttgcccatttttattaaaagaggaaagggaagttaggaagctcgtctcaggtcaccaaaagggcccaagcaactgttagggccacactgcagcccatctccaacccctagcttcgtttagcacttctgatcttcatggcccagccctagaactgttgagaggaatgcaatggccaagagctagacgttacggagagtgtagtcactctcttttcccagctcagaggcctgcgccttcgtccgagagctcggccgatcgcattagatgtgttctgattgcacaaggccaggagagaccacactgaaaacgatcgtctcctttccttgcagggcaacgcgccccacgcgtgtgacgtgcgagagacgcgatggacgcgccttgctcttactgtgcaggtcctgagagcgtgtgggccacaggcgcccagtcgtgttgaggacatagaatcagccgctggaggggctgccgactgcgcgggcccttcccgctctcggtctcaccctaagggctaaggcgaccgagaaagccccattctccagtaggtaatggggcggcgcccggtgggctgcaggtggggagggctcccagcgccgccagcggccacccggggcgccggctcctggagggagagtggcctagaaatatccaaggaatccgaagcttcccctcctccacctctgccagtacggaaacaccccaccgtcacaatcctaaagcggggagatgggatgggaattgtcttacttggcaaggcagggtaccttcattgccagacgccctcatttgtgtgttcctccttgctccagcgagatagaaccttttgcgcccccaaccccgtttcgtggagtgagcccactaccccttctccctccctcacttctcctttcatgtaggacccccgcccccttgctttccttagccaggcccgctacatttatctgataattgagttattaaaagatttggtttccttgggcctataaatcaataaacagtaggattaacgcaatagtttgccttttaagtcaagggagacgtttaaggcaagcccctttgagctttgttttcaaaccaaacaggtgagttgcagctctccccccggcccctgcactcttcagacatttggtccctgcccactcctaaacgctcagtcccaaaacaaaatagcgaaagacaggaggagtcaggatgtggcagtgctgccttcacactttccacttcgcaagttcttttaaaggttccaaagatctccagaccattctctgccaaaccctgccgcctcctgcacgtattgcaggtctctggggagcaagaaatgtcctgtttgggtgaggattccgtcacctaaaaagatctttaacttctcccccaaagtgggaaggtaactttctcccccttttccccaccaccttcactcctacacccccaattaccttgcattttctttccttccttctggcctccacacccatagctttcctccatccccacttaaagaaccgaagaggcttttaaagacctggctgctttgttttccttggccaaggaagccactttctctcaagcaattatttcatatcctacgaaaactttggtcgaatggaaaactcgaaacctcgagcttatctacacactgttcctctgctacaatgctttcctagttaagagtgtttatagagaatttgtcatcacatctgatatcctgtacttgtaatacattatgtggaaaggaaataaccttaaaccgtctgatgttgcctcaagagcccaaacggcgtttccccacctttgacgatgtatgtgaaattactggcttaaaaaaaaaagtatcaatttttttttaacggaatgaacactatccttctttaaatgccaaaatcgactccacctttgagttggtctctaattctctaacattgtttttgccacacaatcaagaaatatcaatctattgactcttcacgagaagagctctggagggtattcatgttaagtttgtatatatttatttatgcttaatttaatgggaatgtgtaaatatggcgagcaagtagtttgggattatttatctgtgaatctatacctctgtgaatgggtggttaaaaaacctcttgaccctagatagaatcctatctgaatttttctgttctttataaacaagctgttatggtaatgggtagaaattggtttattgtccagtgttaatctgatttacataaataaaaagattgttgtgttttc

SEQ ID NO: 13975 - DNA, 1346 bp, Homo sapiens
gagctctggggagcccacactccccaaagcagttagactatggagagccgacccagcccctcaggaaccctcatccttcaaagacagcctcatttcggactaaactcattagagttcttaaggcagtttgtccaattaaagcttcagaggtaacacttggccaagatatgagatctgaattacctttccctctttccaagaaggaaggtttgactgagtaccaatttgcttcttgtttacttttttaagggctttaagttatttatgtatttaatatgccctgagataactttggggtataagattccattttaatgaattacctactttattttgtttgtctttttaaagaagataagattctgggcttgggaattttattatttaaaaggtaaaacctgtatttatttgagctatttaaggatctatttatgtttaagtatttagaaaaaggtgaaaaagcactattatcagttctgcctaggtaaatgtaagatagaattaaatggcagtgcaaaatttctgagtctttacaacatacggatatagtatttcctcctctttgtttttaaaagttataacatggctgaaaagaaagattaaacctactttcatatgtattaatttaaattttgcaatttgttgaggttttacaagagatacagcaagtctaactctctgttccattaaacccttataataaaatccttctgtaataataaagtttcaaaagaaaatgtttatttgttctcattaaatgtattttagcaaactcagctcttccctattgggaagagttatgcaaattctcctataagcaaaacaaagcatgtctttgagtaacaatgacctggaaatacccaaaattccaagttctcgatttcacatgccttcaagactgaacaccgactaaggttttcatactattagccaatgctgtagacagaagcattttgataggaatagagcaaataagataatggccctgaggaatggcatgtcattattaaagatcatatggggaaaatgaaaccctccccaaaatacaagaagttctgggaggagacattgtcttcagactacaatgtccagtttctcccctagactcaggcttcctttggagattaaggcccctcagagatcaacagaccaacatttttctcttcctcaagcaacactcctagggcctggcttctgtctgatcaaggcaccacacaacccagaaaggagctgatggggcagaacgaactttaagtatgagaaaagttcagcccaagtaaaataaaaactcaatcacattcaattccagagtagtttcaagtttcacatcgtaaccattttcgccc

SEQ ID NO: 13976 - DNA, 3398 bp, Homo sapiens
ggctggcaagtggggcaacgtgtggaggaagcccctcataatttggagaaaacttgatacaatagaagctgacttttaaggcattggcttttaaattaatacatatatccaaggatatgttatagctgcagtgtttgaaagccaaaggatttaagagttttgttgttgttaataaaaggaatactccttttccttttggatcatagcttaacaaggcacaggaagggaagggatcttgactaagattcatgagacattgaattaaggagaatcatcttcatgcctgaaaatttagcaaaattccgactatggcctccaggggcaattcctaaaagctgaatggataataaaattggactggaaagtaagtaggtggctggtcctcaccctgttggaatggctatcctactatgctgttctttggtaatggaataaattgacccaaggaccgaatttcatttggatttcaaattgtccagagtggaaaagccttcaagatgacatgatgaattactcagttcatctgatttctggtccctcctttctcgacaactataatactaacccttttctcaggataactgtctacacctggcagttttctctgacgtgctgttcactcacatccctaccttgcatggtaatataaaggactaggaagcagtcatacttccaggaaatgcttggattcatgtggacattcaggaagcttattctcatataatactaatctaaacagtactagaaattacagtgccaagagccaccaggaggcccagccaataagcatagatactatatggtatcatgggacccatctattttttaccagtggactacaggattacttgagagttatcagggctgcctaacagaccaggagatctgggggttgcaccagggaatcgccatatttgaccagcatgttttaaaagctcttggtaggattagttggttctaaggatccctctagggacctcattatttcaagaggaacccaaagtccagcctcctacatagatgctgccccacgaaggacccacaaaactaacctagttcagggttctcaggcaggcagttctgcttcagcttagagcagaacccataaaatactcaagtactgggataggcaagcatgtgtgtttactgtggattggtccctgaaggctcctttgggtgagaacatgtgaaccaggcaccctggtttgtttggagcattgctgcccagaagcttctatgggataggtggtgcttgggattgatgtgttgtggccatgcagccctccctgaggattgacttctgcactaatccagtgaaggaggctgtgtcaaaagaagggctcagaagccctcttttcagaggcaatgattcctgtcagtatgaggtcccttagttactaaaaagggacatgatttaactccagtttgatgaacctcctccgagtttactttattgtcttcaaatcttttgttttcttcctttttgtgagatttgtgggttttgtgccttataaatggaaatgtatgaacacaatatatgctcatgtagaattttctgttctgggttattgggataagaaaaaatatatattgctcttcaactagtgaatgaaagaaacttcagaaagctagaattgcttatcaatcaaaagactttctcaatctattttggccacaaacaaacatattcaactgaagctttccaataatctttatatcaagaaagcatgcgtcttgtcagctacattgttttcttagatggatttctcctgttaatcctcaaatatctgaacttctgtgttacccaagtgtcttatacaagcttctggtgtctaggacaaatttatggcaaataaaattagcaaaactgaactgggttgaactgaacaagaggatgggggaattgtgcaaatacgttgttagtagaaggtcaatttaaaatagggactagaaattatttgaagttttctttattacggattcaaagacttattttgaaagttggaaggagaagggagggaagagagcagaagggaagaaggtgtaagtcaagctcttgaatataactggtggtattgtgggcagagatctttagttcaaatccacgtattttttaaaagagagaaccggaggtagagcaatgatcagatgggtgcacagaccagtgccaatctgaacattgttaatggcctgtgacatgatgagcacaggaacaggcatgaagatattgccatacaattttaatttatacaagtattggcccctcaagtggttggaaattttttttttaatctctttttctgagacagggtcttactctgtcgcccaggctggagtgcagtgatgcaatcacggctcactgcagcctcgacctccccagctcaagcaatcctcccacctcagcctcctaagtacctggtactacaggcgcgtgccaccacacctggctaatttttgcattttttgtagagacagggttttgccacgttgcttaggctggtcttgaactcctgaactcaagtgatccgcccacctcagcctcccaaagtgttgggattacagacattagccatcacgcctgccctagaaacagttttttaataggagatatttgagaggcattgaggtaggagactctatgacatgccctcagaatatcagaatcttcttagaaataaactaggaaatgcagatgtttttaactactcagacttttgaggaattaatccttttaaaacatttttgttaaagttagtgtatcagtaagaaacagacctagtttaaaaggaataatcaacaattttataaaggagatggcttattcaaccatagcccctccaacatatctactggaaattctgctggttaactttatctctctctctcttaatttagactttcaacctatgaaaatgtaaatacctttgaaaaaactaaactatcagtcatttacatcctctcatgaatgaaatgcagtgtagggagaggagatggcaggacacagcaaacaggacacatttgcctgcttctctcttgcctaattcttcctgacctgtatttactgatgcttaataatacttgtaagactctaggggttcatttcccatttcagcggaaagtacttcactcaacaacaatattctcaagagtcttctactggaagctagaaagaaataggaatttaagtccatagaatgaaggtagttattcctgcctgtgttgcccacctgttcacaaaaagtacctttatgcttgaaaacattaggttctttggttactgcactgtagtttcaaatggatcctccagatggcattcatgtcttactcagaaagggcactgccattgtccccaaggcttctgtctactaattctattggtcttgtgttttgcttgcttg

SEQ ID NO: 13977 - DNA, 79 bp, Homo sapiens
cctgctgatgagaaaatgcaagacaatttttgatactggaactatgctttgaaatacaccttacactcttcatagaggc

SEQ ID NO: 13978 - DNA, 536 bp, Homo sapiens
gcatctggaggaacagaaaactaagttcatgtcatcctgctgtaatgggcagagcatattttttttgtatttaaaagataaacttcaatatggaatgctagaaacacaaatagcactgtcacctctaatatgaacattagtttgaggtagtttttttctaaagcaaaaattttaactgttttctaattgtcaagcactattttcattaaaagtgtctaatgaatcatgatatactcttccatttgttgtgtctattttttatatatttggtattttttgaaaattccaaatactcatgtctcaagtaagcttaaactacaacttgtcacataaaggaagtcttaagtggagttcacagaatgataatgtatctatttgtcatttgtgttatatttgaaattattagaaattatgctttttccattttaattgtattgctgccagtgctatttttttctttaaaaaattttattcttagcacactgttatgtcctaactgaatgtattcagtattcaaataaaagacattttggttc

SEQ ID NO: 13979 - DNA, 3040 bp, Homo sapiens
agcctcaagtccagtcctctatcacttttgcatgaattaaagtatatagcgcaaaagagcacctaagttataaatgtgtgtgtgtgcgtgtgtgtgtatatatatatatatatatatatatatatatatatatatatatatatatggaattggaacttattttaaattgttggagttcttttaagaagaatataaattgattattttttttatttaaagggatagttgattcctggggtgttttgaaattaagttggaattaagttgcttaagcatatttatgttgtgagaaaccttaatatgaggtttatcatgccctttttcaagcagatttatgagcagatttctgtcacataagtcgtcttctgcttgagtatcctaatatttcaatgcatcaggggagcgctccactggataagcattttatttcccgcatggcataatgtttttgcactaaaggctcaaagtgtgagaacctgttctggatttgtttgaaattatttcaccaataaagatcataaataaatgtttctttcaagaaaatatatttggatggcctttttaaagtaacaggatatttaataagagtcctagatagccagcggagactttaagaatcattgcctctagctgggtgtggtggcatgcacctgtagtcccagctatttgggaggctgatgcaggagaatagcttaagcccaggaatttgagtctgggagtttgagtccagcatgggcaacataacaagaccccatcccttattaaaagaaaaaaaaataattcctcatttcatcattggtctttatatgtagccacaaacactgacctcatgtaggcaccttaccaatatatgacattaagtgagagtgaatcccttaggactggaacacttcaagctcaaccaactgactcagttgtcattcttcacaaaagaatagtagaggatcatgtaaacctgagcctaactcttgttccagtatgaaagttgggggagagcaccagccacctaggaaaactgtatgttacctttttactcaaaggagtcccccctgcccagtaacagtcctattagtgtttaatttcagagtttgtgtctggtagacctctacctgattcagatttggttttgttgtttcaaccatagttagagacaaattctcatgtactttcagaaatcaatatctgcagccactgttacttttaattgacattaagagacacttcataggttcccacaattcagtatgggataggctttttaaaaagcacatacagaccaggcgtggtggctcatgcctataatcccagcactttgggaggctaagacaggcagatcacctgagctcaggagtccaagaccagcctgggcaacatggcaaaacaccgtctctacaaaaaaaaaaaaaaaaaaaattagccaagtacagtggggcacacctatagtcgcagctacttgggaggctggggcaggagaattgcctgagcctgggaagtggaagttgcagtgagccaagatcgtgccattccactccagcctgagcaacacagtgagaccctatctcaaaaaaataatgatgatagtacacgttatgttaaaggtgaaatgtgcatacagaaggaagagagttggccaggtgtggtgactcacacctataatcccaatactttgggaggccaaggcaggaggattgcttgaggtcaggagttttagaccagcctggacaacatagcaagacctcatctcttctaaaaattaaaaaaaaaaaaaataggcatggtggtacacacctgtggtcccagctagttgggaggctaaggcaggaggatcacttagccaggaggctgaggctacagtgagccaagattgcaccactgtgctccagcctgggtgagaaagcgagaccctgtctcaaaaaagaaaaaaaagagaggttggccttttgtagcaatctgagaagtgtgtttttcaagttggaaaggaaggagaaaagcaacttgcctaagataaggtagctcttcatgatatgactgttatttctgatatacaaataaatagaacatgattaggacatagtcaaatatagctagaaaaatatattcctaaggaaagtgagatttgaggagtccctgttgttctgcaacatccctagattgaatgatctgttgcagatggtggataccaagttcaaatttaaagatttctttgtaagcagtaaagtgactttcacttatttaacttagaactggaaaaagtaacttttttccagattacattttctgtatatttgtaaaatgcaaaagcaatatatatttgttgtgagaaaattagaatatacagataaaataaaatttaaaaaaacacccaaagataaccagaagaaaatttttgctatgtaacctttttcttctggtctttgcaaatcctgccgtagaaactttttaacttcaggagtgtccttcctttgctctattaggacattacagaaaccaatactatgaaaagctgacagcagtatctggattaactttttaaaaacaatgaaagcattttacagaaattacatttcagatcgtgctggaactgtgttcagaagatatcctcagagggaatctggcctgagcaccatcatgtttaattgcctcctcctgtcttgcattttcctcccagcccccttcctaccccttagcagagggccaggtgagggtgcttggggcccatgggggctgggagtgtagacttcagttacacccccagcccccaggggaaagcattagccttgaatcctcaatcccaggccctctactaaccactctcaacctatggtatttatcttttgattattctgtgcatctataaaaatgggattatattgtacagaatgctttgtaagctttctctccccacataagaatgccctgtaagcattttgttaaatatttttaatgactttagagtccaactttatactcctctttacgcattttggttttctaatttaatggtagtgtaaacgtttttggaataaacattcctgtggct

SEQ ID NO: 13980 - DNA, 1328 bp, Homo sapiens
agtttcacctccaagttttacctcctgtgtcttcctctgctgtcgagacgttcctgtctgcttcccgggagcctcacgtgctccttgtcctaaccagcccccgcgcgccatcttcccgtggagtgtggggaagctgctgtctcccaggaagtgccttactcatcccgcaaccagtcagcgcaccagtggtctcccggtgtgattttttttttttttaatttcagttgtttgtaataagtagaatacactactgtaaacatacgacctttgtttttgtcttatgttggggtaaaggaaagcaggaaggggaatttttatcctcctcccttccgtaaagtgctgggatattttgaatcccccaagttcccttggacctactgatgagagatagttttatgtatggggaaaaatggatactttttaaaccttttttggcagctcagatggtgtaaattttaaaattttgtataggtatttcataacaaaaatatgtatttcttttttgttattttatcttgaaaacggtacatattttagtatttgtgcagaaaaacaagtcctaaagtatttgtttttatttgtaccatccacttgtgccttactgtatcctgtgtcatgtccaatcagttgtaaacaatggcatctttgaacagtgtgatgagaataggaatgtggtgttttaaagcagtgttgcattttaatcagtaatctacctggtggatttgtttttaaccaaaaagatgaattatcaatgatttgtaattatatcagttgattttttttgaaaagatgaaccaaaggatttgactgctaatattttattccttacactttttttctgaataagtctctcataatgagtgcagtgtcagactgtgcctactctgatggtatgtgccatttgtaaaataaaatagagcagaaaaacacaaaaagagaacactggttcagacattcagtgggcaagtaaattatggactgcaaaataatgatttttattcaagaaagctttaaaagttttatatccagatatacaaccacaataaagcaaaataacctactatcaaaatagaaatgttgctatctttataagtgcaatttaatttgtaaatagagtttgaatcaaagtatcacaaaatactgcttcaagatttaattttaaatctgctaatttaagggatattgggaaaagttttggtgtgtttctgttgatttcttttttgtatgctgtgataaaagagaaatgaaaagtgccagtcactgtgtggtgtctaggaaaatcatatatatttttttctccaagaaataaattcatcctggacattggc

SEQ ID NO: 13981 - DNA, 325 bp, Homo sapiens
agttggagcagaggctgaaaacacaggctgctgaagttttttggaatgctggtgctaaccacttgctagatttaacttttttttttttttccagaatgagtgctccctttatgagctgcagtgcagcagaaccaaaaaaaaagtttgctgcaattatatagcatcacagtgctctgctaacagccagcatagaagagatttacctacagctttttgcaccactgttctagcctttaatgccttctacttaatattaagctgaccgcaatactaacgtgcccctatatttggcagccaaataaagaagaatcgtgggtaaatagaa

SEQ ID NO: 13982 - DNA, 188 bp, Homo sapiens
catatcattaaatttccataaggtcatgcctttaagtaaccccctaaattgaagtttagcaatatgacattcttggtgacagtggaatctttgtctcttcaccgtgttaacataatctatctattttcttattttcccctctggtctatgcttctgcttccttcatattactgagcattaacaacacc

SEQ ID NO: 13983 - DNA, 12 bp, Homo sapiens
ctattaaaatgc

SEQ ID NO: 13984 - DNA, 164 bp, Homo sapiens
aatatttattcatatgacaaggatacctgagtaaaactatcctttttaaaatcactgggaacagaaattttattatcctatgatgtgaagctaaaattacttgtggatcttttttttttttaatctattgctctttggaaataaaaaaaaagtcagtttaaaat

SEQ ID NO: 13985 - DNA, 640 bp, Homo sapiens
ttcattaggagtcatggacctataacaatcactcttttctctgcttttcttctttcctcttttcttctctcctctcctctcctctcttctcctctcctcccctcccctctctgtttctttttctttttcttttcttttttgtggcggagttttgctcttgttgcccaggctgcagtacaatggctcaatctcggttcactgcaacctctgcctccaaggttcaagtgattttcctgcctcagccttcccgagtagctgggattacaggtacccgccaccacgcccagctaatttttttgtatttttagtagagatggggttttgccaaattggccagggtggtctcaaactcctgacctcaggtgatccacccacctcggcctcccaaagtgctgggattacaggcgtgagcaaccacgtcaagacaacaatcactttctttaaagcaaatcctacagctggtcaacaccctattccatctgtcatcgagaaagaaaatgttaaaatagacttaaaaatattgctttgttacatataataatatggcatgatgatgttatttttttcttaatactcaagaaaaaatatatggtggtatcttttacaacactggaacagaaataaagtttcccttgaaggc

SEQ ID NO: 13986 - DNA, 1263 bp, Homo sapiens
gtattacaggtatctgaaacaaagcaccttcaattctaaatctagcactggattttgttggagaatctgcagccttcctggcagtgagaaagacagacatgtgcagtgacaggctgtaagacatatgtaacattgctgagctctcctaagggaccaacaagcttgctgaagaagctgcatgtagattccaccctcagtactagtgatgcatcaaaccagagaatttctgccagtcaaataagcatgcaatatggtttctttggaaataagcatttcccaatccccaaatacccctctgtacagttaatctaacaggatagtcagagctcttatcatagcagccaaaacttcagcccataggttagtcattgtcctaaccaatcattgtacattgattattaccagtgacttcccattatagtttttggatctttagcataagcacatgcttgcaaaagtaaacagtgaaataattaatgttggcaaatatgagaacaacaaagtcagcccaaaatctgataatcatgtctaaccaagtaataatgttttagcaataaaattacaggattattctgttatctaaaaatgtataaaatgggaatatgaaaaaaatgacaacagcaagatgttttattttaatgttaagcaattccaccacacttctgaagaataaacctaagtttttgtgattgttaaaacaatgcatcaattttcagggaaatctttttgtttgtttatttaccagacatgttctaactttgtattgcccaaagtatattaaatacagatgtgtaatataaagcatcaatatcacctaacacatcgtatataagatataacatgatagatagttggtcgattacattgctatactgcttagttttaactggtttatttttattgtagcagaaatgaactgaaaaaaaatatgggtttgataatcacacacatgaaagtaccattttgtaactcaacaaaagataaaacattcttcatcaaaaggcttctcgcttggtgtcaggttgtcacatgtgaccactgtgcaatgcgaagccatacttcttcagtgcacaaagtcatgtttaaacttggaaaagaggatgctacagtagtttcaaagttcagtgttgtggacccaggaaattttccataagtcttgcttgataacaatgtgattgtacaaaataaatgttcttaaggaaacaacttatgtaacatttgctacctttatgtaaacataaataaatcccatttaaaagataa

SEQ ID NO: 13987 - DNA, 1831 bp, Homo sapiens
ttaaagatattaccacacaacatcaagtggccttgaagagactgagataacgaattcttgagtttgttttctaaaggagaccagaaatccactattacaaatgtatttgaaaacatgtttttgctttcatatgttcaaaatctgatctttgttttgtatttttgtgctaatgtgcaaacatgtacagaagaaatagaatacatgttcatgcaaatataaattatgtattctaatataggtgtaacagtttcccagttaactttgaatttatatatttagatttaaaggattaaaaaaaaggaaagctcttgacagttgtttcccaaatagcattagttctttaattttatttgtactgtacaaatgatgctagtttatttttttagcagtgaaaatgaatataaaaaaggtgacataggtcaagttttccataaattctacttctcatgtggcactattatataatacctttgagatctttgtttatgtttattagaagagggtaatggaaactgatcatggaaacatttaaaattttatcagcaatgttctttgtgggtgccatgcatatgtaaattattgctttaattagagcagcacattgctaaaataaaaaatacaccttaatttttaagaaataatttaaatgaaacaatttccattccttttacctgcttagacttttatgtgacttgtatggtctcctggttaaagggaatggtgtcagaatatttgcataaaattatttttcataacagtccttttttatatattggtgtaaacataatattcttcaagaaataatgttgaaagcctactcaggaataatcttccttaactctttaaatttttatttcatgtgaagtgttttcagtttagttattcactgaattgtcagtttccttcatttggtattacatatttaattcttaaatattgaggccccattgtgagtaataaaaaatacgacataagtagaagactaagaagggcttgtcatattatctttgtgtatatgcttcatgttatttaaccagaaatgtcttatctctaaaaatttttagtagtaattatttaccaaacttaaaaacatttctataaatataaagcttttctttatatttaagacaaaatataaaggctagaatttggttccttctctgtaacactaaatattttagtgtgaaattgaatttttttattactatagtcttttcaatctataatttgtgtttttaatttcttgatatgtcacttctgttcctccctgcttgcattttttaaaaactagacattgtggcttgagaatttatcaatcatctttccgaaatgaccacattgtgcttttagtttgtatgtttaagtggtcaagcaaggctctaggaggtagtcactgagctggaccttaaacacatctgcaggagctcacaaaatgggagcaaaagaggcattccagaaagaagagtagttaagcagatgtgggggcagggcaagaggagacagcaccttgttgccagagattctacacaaaggtgtgatggacactgatgctctattaagaagcttttgtggtgtgtgtggtagagaataattaaggcttctgataagacaggaaagggatatttcatcatgactgttaagaaaaggtaactgggttgtttaatgttttaattgataattgtcactgatcgtatttctacttgttaaataattaaaaatcatcttaaaattcatactttgactttaatttagacacaaggagatgtaatcgctgtgtaacatcagagaaagctatatggattatcgtcagaagtaaatgtttctaacattg

SEQ ID NO: 13988 - DNA, 331 bp, Homo sapiens
aatattgtatacgttttttgtcatctgtaaattatgtactacacatcctttatatacataaaggtcttttttttttttggaaagccagttaaacttttatcagcatgttgctgtttaaaaggcgttctttaagaagataatcttgaagattggttttagaagctatagttttttagagattggcccatgtttgctagagtgggtcataatacatattccatgaagttctgtacagaacaaacaccgtttataattttgtactgttttactttaagtaaggatgcaaaaaatagcaggactcagctaagttctaagccctggaggttatatt

SEQ ID NO: 13989 - DNA, 745 bp, Homo sapiens
tcttcaaacctaagagcatttacacaatacacaaggtgtaaaaatgataaaatactattttaattgataactagttctttgttaggtataaccacttagttgacactgatagttgtttcagatgaggaaaatattccatcaagtatcttcagttttgtgaataacaaaactagcaatattttaattatctatctagagattttttagattgaattcttgtcttgtactaggatctagcatatttcactattctgtggatgaatacatagtttgtggggaaaacaaacgttcagctaggggcaaaaagcatgactgctttttcctgtctggcatggaatcacgcagtcaccttgggcatttagtttactagaaattctttaccttaagcagcacacacatttactacacacacagtgttaacaaagcactgtgcttagagggtaaaaaggaatcacaaaacaagaatctttccaaagttgtctcattcagcaatgttaaggcatctgtatcaaattattttggatgtaaagattcctgtgtctcataatatgaatgtattttttgatatacaagaaactgacataaaatgtgagaaaaccacctataatttaccactgtgaacaattatatatctatctgcttcatcttttctcaaatgcatcaattctctaaaattcctatattgtaacttgcctttttttaaaaaagttagatgctgatataaagtctgcttaattgtcaactt

SEQ ID NO: 13990 - DNA, 673 bp, Homo sapiens
gcagttttgtaaccctttttcctcaatagcctgtttcctgtttttaagattttgcctttgttgttgaaaaagtgttgcactctgttgtgtaattgtgacacaattacagctgattgcagcctcaaccttcccagctcaagtgatcctcctacctcagcctcccaagtagttgggaccacaggtgtgcaccccatatccagctattttttttcaattttttttgtagagggggggtctccctatgttgcccaggcagatctcagactgctgggctcaagcgatcctcacacctcagcctcccagagtgctgggattacagttgtgagccactgtgcctggcctttctttttttaacctttttgtttaacttctctcttcactgcatcccaatccatctacaggcatgcacacttattaggaaagcaggtttgaggtaacgagactttcactatattttgctttgacagaaggaaagaggaagagtttctattaaaatctgtcacttgagtgatgtcattcaagtcctattttaggagataaaaacacctttggggactggttaaagtcccccagaaactacaataaagaacaacttttgttttaactcttaatcattttgtaattttgactcaatccttttctggaccatttttgttaataaatatcaaagtgt

SEQ ID NO: 13991 - DNA, 3409 bp, Homo sapiens
aattggggtgcctaatgctactggaagtggaacttgagatagggcctaatttgttatacatattagccaacatgttggcttagtaagtctaatgaagcttccataggagtattgaaaggcagttttaccaggcctcaagctagacagatttggcaacctctgtatttgggttacagtcaacctatttggatacttggcaaaagattcttgctgtcagcatataaaatgtgcttgtcatttgtatcaattgacctttccccaaatcatgcagtattgagttatgacttgttaaatctattcccatgccagaatcttatcaatacataagaaatttaggaagattaggtgccaaaatacccagcacaatacttgtatatttttagtaccatacagaagtaaaatcccaggaactatgaacactagaccttatgtggtttattccttcaatcatttcaaacattgaaagtagggcctacatggttatttgcctgctcactttatgtttacatctcccacattcataccaatatacgtcaggtttgcttaaccattgatttttttttttttttaccaagtcttacagtgattattttacgtgtttccatgtatctcactttgtgctgtattaaaaaaacctccattttgaaaatctacgttgtacagaagcacatgtctttaatgtcttcagacaaaaaagccttacattaatttaatgtttgcactctgaggtgcaacttaacagggagggcctgagaaaagaatgggagggggctattaattatttttagcaaaatgttgcctttgtcttgtgcaaacatgtagaatatgctctttaatttagtaaaatatttttttaaaaggtagagatgctttgttattgtaatcataaacttcctgaaattcttgtaatttttttcccatacttatcagaagtgtgtttaccaacttatttttgtttgaaagtgtgattttttttttccttcccaacctctcttgcaaaaaaagaaatgggtttctgctaatgaattgagcagacatctaatattttatatgccttttgagctgtgtaacttaatatttggatacttgacaatttgttttattatgtaattgataaaatggtgatgtgtattaatgttagttcaaccatatatttatactgtctggggatgtgtggttatagttctgtgggagaaataattttgtcagtgttcaccagcttgtaaaaacttagtgcgagagctgaaacatctaaataaataatgacatgcatttatcatcattgagattggtttgcttaaaattaacttattttgtagaagacaaaatgaattgcacttcacttaatgtgtgtcctcatctttttacaaataaatgaaggattataaatgatgtcagcattttagtaaacttttagacaaaatttgttagggtcattcatgaaaactttaatactaaaagcactttccattatatactttttaaaggtctagataattttgaaccaatttattattgtgtactgaggagaaataatgtatagtagaggacagccttggtttgtaaagctcagttccactagttcatggttttgtgcaacttctgagcctcagttttctcctttgcaaattaataattacatacctttatagattttgaaattaatttaaatattagtatttggtacatgaaggcttaatgttaagtttcctttaatgatccacaataatccctttgatcacgttaatctaaatctagatgtctttgtctaattttttttgaatagcagttataaatgtaaaggactcaaagtttaagtaaaaagtgatactccaccttgtgtttcaaagaatttagttccacctcttcataccagtttaacacttaatatatttcattggattttagacagggcaaaaggaagaacaggggcctctggaggcccttggttatttaaatcttggattatttgtgatagtaatcacaaatttttggctaatttttaacctgaggttttgttttttttttaaaggaaatgcagcctagtcttgagaacataattttatataatcaattactaaatgttaaactattaccacacagcccataaaacagcatttgcgtttattgagagagaggatgtgccatcatgattaatgaaaactatcttttgagtttgaaaagaaattaatttgcagtgtttggattgtatatatggtgctaaaaataaattaatttactttataaaccttatctgtacattatacgatgtgatgaaatttgctttttatccaaatattttgtatcttgtaaatatggctaattataggaatgcctataatacatcttagattccttatatctaataagagttcaaagagttatgagttgaagtcttgaatgcaggaaactatctgatagtgttctaaaatttggttacttgggtttggatacccttagtgggatgatgtaaatagaggctagctacctaggcttgtctatagcaaccataatgttgatgtaagtaatgcggttactgaatcataagaaaatgccatctctttttagttgaaggaaaactctggaagtaggtgccattggtcattctgcagtgcactgcaaccattgtttcccctagtgccctcttttccctagggcattgctctcctattcccacgccttaacacagctctatacctagaagcagccagcccaggcatgcagtcacatttaatcacatcccccttctagagtgcttcaaaatgatgtagtccctcaacttggctaaagaatctcaatctcttgaaatttatttttttaatgtcatattcatctggtaaatatctactgtttgccaggcatttaagaatatggcaaagaacataaaagatggtgtcaccagattttggtcaccaatgagtacccgacccgttgccatgattaagagagaatgctttctattggagtttcaggaaatataatttgagaatactttaaagggaagtggaagtataagtgaatgatatttttcttttacatgtaaacaatgaagttatttcaaagttaagttttaaacaaaatacatgaagtagtgtctgccatacatgttaatattctacattcttgcttccttaaattaatatgtttgtgtgtatatatgtgcctcacacctgaattgaaaattaaagactggtttaaaagtggtttaaaagtgacatttaatgtttctccattacgtttggggtaaccagcctaagtggaatcttggaaggaaagtaagggaaaaacttgtatttgccttcaatgaattaaaccagtgatatgtgttaacgtatgaatgaaaggattgatggtgattttataattatatatattgccgcagtaaccagttaataaattgatagctacc

SEQ ID NO: 13992 - DNA, 801 bp, Homo sapiens
aatttgcaggctgcttcaggattacatttaaataactgttaaaatgttgtatcttgtaaacaaaagaaagattgcctgctaggattgtgccatctttaaaatttttactattggtcatttgcagaacagtaaattctgtgtgttggtacagagtgctctgtaccagtgctcatcatcccttcttcataccaacggtccctagttataggaatttaatatttttaaaagttttacattgctgtatattcaaagatttgttttattaatatgcaataaaggcttagaaattttagttttattccttaattggtaaatatggttaactatggaatatatttacttcctctagtgaatgtcctttatataatgactaatttgggagtaatgtgtgctctgtaagtttgttttaaattgcactgtttttaaagaaactgtagaggagcaacaaaaatccaagcaacttcataatcagattatgctaatcatttagttgagcagtttttgaccaagaatcagaagcccaaggggtacatttattgctttaatctgcactcattgaagtcatttattaccatatactacagctttgtggtaggccattattttcattttcatttttggctcttcagaaacttgaatacttaagcttgtacatgatcttgtgttttgctatcctttttactgtaaaatgtaaatattttaagggatattttgattctaaatatgataaaataatttctcacctattttgtgtgtgtgacttgaaattcagtagtaaaagaatttcttctttaaagcttt

SEQ ID NO: 13993 - DNA, 616 bp, Homo sapiens
aaaaatcaaaatggactaaggtagagacaaaactttattgcactgacacttaagacttgggaagcctgacatttctatctggacagtgtgactatcttatgtcaggaccttcatgtgccaaacgtcagtggtgttttcatatggtaacttctcactagtcaggctagtggagagatgaccaggtgtacagttctgaccatcctgtgttgtaagtacccgtggaatggatttgtaaggtaatctttatagataaacctcaagcaacgattcatgttgtaaccgcttcatatggtttagttttcaaaaaacttcaccatgaagcacaatgtatatatttatgcagtttttaaagtttataacagtctgtttggccattactacactttttactttataatataaaagcaaagtttttgtcattaaatgaatgtttgttgagctacattcttcattgctttaaatgcaataaagtaataatctcacttttatatgaataatatatttcacatctttattattgcagttttctctagaaagctctgagaagctttctctgctgcagctgtgtataaaatatttaaaatgttgtatggtgtaaataaacttttgtctacat

SEQ ID NO: 13994 - DNA, 5179 bp, Homo sapiens
acacacctgaagaagacttggttcctggtaacatttccttgccactggagctctcttaataccgtcaaaccctcatcatctgtgggttgctttttttttttttttttttttttgggagtaagccaggcattaaaagcaaccgtttgaatcctattcctatagcaattgcaaatcagcattttttgatttttcccaaattcattccatatgttttgctttacaattgctatgatttttactcagagttttatatgaaatatgcaagtaaatcttatcgttagttcttcttcaaaaggaaattgcatcttgtgacttagtagactgatgatgatatccattttgtagactcatcaacatgtggttggcctttgatttctgaattttaaagtttcagacttatcttttccttggtgtttaaatttactatcattgctaaacatctcgtcaacttttttgatatagtgcattgctcctgttgaatgttttttgactactttttataacttaagaatttttataccatctacatctatcctacttatgcagaaaaataggcaataagaacttcattttacaatttagttttcaaaaaaaaaatgcaggaaactgttttatcagggagcccaaacacccagcatagccaactactgaaatgattttgttaattctgtataatgagctcaattcaaagcaatcaccactggcatgaataagtactgcatgaaaagggagtatcaaattccagttttgtatgagttctgcaaaaaaagcctaatattctgtggtcccctcactcagtctctcatttggtaaacagaaagctgttttccctacaaggtgcttggtggtgaagccaccaagctgtctttggtactcttaaagcttcagtggcctagcaagatctttgggcccttgtatccattatccttatgacctcatcaccctcagactttaagacaagaagccaccatcaaaacaaaggatgggatacgtatagaatggactcacttgtcctagaagatgaatgtgtagtgtcagcaaatgcatgttaagaaggtgaagcccaaaagctcttaaggagaattgtatttctccagaagctgcagcaagaggtacagctcaacaaaggaaaaccacaggactggatatgcaactagtgctcagaccaaagagttcacacccactctaaaaccatgtcctctgaaaagaaacaaaaatacagtgatcatcaaatgcctaaacagtctttctgttggttagctgtacattcattgaggaactgttgattggcaggcactgattctctagaacactgggcatgaggatgttgcagaaatctagatggtgggtcccacagatgtgagaacatgctgcaagagcctgccagccacagcaatcaggactcacagctcttcaaggagcagtgcagatttcaatttggctaaaacaggatgattgcttttgtctgtttactgaaaaatgagtttagaaaggctagcccactgacattggaaaaagctgtgaacagagttgtgtctgaggaatgtgcctaatttaaggcagggtttgttccaatgcatccgtgatttgaaccggttttcattatagattaatgaactgctggtcaggtactgtctacaatggctgtgcatacctataacattttaggtatttcatattgaattatgctgtatatttcaattccaagtttatttattttccaaggttattttatttattgtaagcattttgacattgattttttttttttcgttttctttcttgtgcaatacctacaatggtgctgtgttttaaacttacacaattgggacatacgtatgtgttttcttagtaaaatggtaatttatcccgaaaaagtgtacatagatctaaaatttggtgctatgtgtatatcttgagcttttaatttgttgaattttctaaacgcttacaacttatctgccactcatattaatttacttgaatttgtcataaagctaaatattttatatgttttcaaagattattttttcatattaataggttgtttatctttttgcctgtttgctaatttaaaaatatttattttatcattttaatgttttcatggacttttttgctgatggtaatcaactttttttgttttttggtttttgagttgttcttgtcatagacataaaaagacaattcattttcttgttttattaactctgttcatttttattctacaaaatatgtcatgcattctttcttatgaattgtatatttagaaatctttctaaataccattaaggcttgactggttaattcctatttcaaggatttggatttattcaggtaatttgatgggatggggaaatataatattgtgtgatgcatattacaaagtggacttgtcacaatgacacaaactcattttttgtaactgggaaatatgactaaatttgacgtaactagagaaacaaggctgtatccacatggtacaagcctttctcaccctactctattatttaccttcagatactttttcctgcctcagctctgtacacatgatatgcaacaaagggcagcaagaaatgctgggtccacctaatttaacacaaaatgaagttgagattcggcagttgcccaattcctttaataaaaagaaactaaataatttgggccccaaagtagggtgggaagttttcctctaaatgacttgatggttgccaaatcccttgcaccattttattccattccaaaacatgtgtttatttccacatagatgttaatgatgttcaaagcaggggagaagaattattcaatttcatgaataactcttgtttgcactccagaaaacaacatacatgtttaaatacaaaataattatgggccatgacgacgattaatattaaaactgtgatttccatatacaagtatgtttgagttccaatcttacattttataccaagttcaaaacactttcagatagaagtctttctatgcaaagattaaagtatgacttcaattcatatttatggcctttggaatccaaagaaaaacagaagaataattcatggatttgttcattgttctttccaactgaaggcagtaaccattacttctaaccgtaacacaaacacagcaagttttaaccttttaaacttttcactttgtgagcaaagtaaccccataagtttatttccctatttcatggtattgtttaaactttaaaattttagtcacttaaagaacttaagcaattatattaaaatacgttgtctgtgaaaattatcatttgatatttggcttataaagtaatttttatgaatctgttttatgagttaggtaagatttagcctttctgcagtctgtctcatctgttgggaacctgtgatatacctccatttgtccacaagatggtgtttaaaacaatttgttcagaagaactgagcaaactaacagaaatacaaggctacgaacagtttagtggacaactaaatcagactcttgcctttgcacttttttttaacttttgtagataatttttgttaatttgttttgttaatttatgtttttcctaattttaagcatctttatgaaacaggcacagtaccctttggtttgttgactgttttgattttatttctttggtggatatatatgtacttatacacttagttaacatgcagattaactagtcataactgtttatacaccactctcatattttagtgatcaatatgaagacagctaaataattatcctactttttagacaggacagatactctcaacagacaagaaaaaagatttagcttatcacaagaagcagacaatttataaaactacacaatgtctaaactctatgttgctcagtgtacttaaaattttacagttatatttgtataacgtttatatttttctagaatacatcactatttacaaaagtacaattagaaacactgttttttttaagtaccgtttttattttcataacactaataatacactgggattgagaatttctgttaagtgttttgctgacgttgttttaatgaatactcaaaaaagctttgcagatttgtccattgctcttgttcttaaattatttttcatacttgtctgtatccaccttctgaagacacacaagtgtttactgtcgcagtttcccagcgttatttcttaatacttgagtgttgacacatttttgtaccatcccccttttgtaccatctctgctcacaaagattatatgcaggctttgaagaggaggagatgcagaagataattgaatttgtatcttgtatgcctatgtaattcaaagtgacttagtccattgaattgtgttcatttattagttggctggttaagatagcattaattatcttaaatttattcaactactaaaagtctcaggcaataggacagatgagtgtcatcatttttattgtgtggcatacttggagctataatccaaacgttttactcaacaaaataatgctagagtaactgatcaatttggttaaattgaatgaagaaccaagtgaacacagagaaaacttattcggacaagtagacccagcacagcaaaaatttgtctgaaagataagacaagcttataagaccaaagctaagtctaagaaaatctaaatggaaaaaaaattgcgtgttcagatccaatagtgagtgatgtggtacaactggaggagttagctacttgcttcatgaatttgtcaaaagtgaatactaataaagtgggaggcttcactaaatgagggggtaaataagatttaagtttatcagaagtgtgtgtattgtgtgaccatactaagcttctgggtgtaagtaaagatgctggctattttacaactttttattgtattgtgttatgcaaagtacattttggagataaatgtttttcagcacattaatgtctttaaattcaggttgtattgggtgtattttacaactatttatttttaaataacatttagggtgtgttttcccccattttgtttgttctctatcttacctcatcaaactctttacgatttaattgaatatactcatgttaagtgcaatggcattagttttattcaaaatcccacatgggcataatgctttgaggccttgattcctacatgttcattatgcataatgagcttgtcacctatctcagcaataaaggttctgacc

SEQ ID NO: 13995 - DNA, 1103 bp, Homo sapiens
tataaaagcattgttagcgactggacaattacctcattcaacaatgtttcaaataatgtattatattaaaatgtagatgctgataagttctaagaaatatttatacctttttatatggaagataatttatatcatccatgtttagtgctttttaaacatcaactttactttctaggtaatgtggctgtgcaatatttttttaattttatctttttacttttctattactttttcatatattttgctacctaagtatttcagtgaaactttaagcccatacctgtgtctgattgtttattattggctttccacaattcttacatcagactacattatattagagaccattattgctagaatagcatgggatttaaaattttctaatactgggggtattatttagttaattataaatttttcttttcacattttactgtgttttaactggaaataaaattatggctgctacaatatattttttgaaatcaacttctgtagttctaaaatacaactttatcatacaatcaaaccaggtagttcatataaaacagtgtaatacaagttttctataaagtcattactgttgcttaaacatatttcatgcctattaaaatatattttctactggtgatttcaacattatttctcatactgacttttattactggaaatgttcctgtacatgttggcagcagataaagatttttgaatgtttgaatgccctctgccttgatttggttggaatttttgctaaattggtaatgttgcttgaactttatgactacattttcttttaacttttttcatggacttccttatatgtacataataattaaatgttgaaatttatgaaatacttttatgaatttagataatttttaaatattgttaaaatttattgaactaaaaagtaatgtaaataaaataattcatgttaaagatggaacaaaataattaactttacatgtttggtgatacagatgcaaatgtttttgatatatggagatgttgagtcttttgactttactaaaggtgctgaatagcattaaattcactattttccttttctgttttacttgtgaaaataaaaatgcactaaggtt

SEQ ID NO: 13996 - DNA, 179 bp, Homo sapiens
gtcgcatattctttaacttcaatattgttttctgaatatgtacatctgaattaacttatttctgattattttctttctttatatcctttatgtcgtgtagtttgtataatgtgtttaaatatatatatatatgatggctttggaagaaaatatgctgctgtaaattaggaaagggagac

SEQ ID NO: 13997 - DNA, 1677 bp, Homo sapiens
aaactgcaatacaagtttcatccagaactaccacctgacattccttgctgaaacgcatctagttcccctgtttattcatatgcatattttttttctttttacccatttgttcatattaagaatgatctgattgaccgtgttggtctgtactgattcaatttgatgtggtgaaaagcaggttgataaatcattttatgtcaagggcagctttgctcatatttcccatgatttcatgtactgcattatttgagaagctgctcaacttgcaaaatcagttttcctctcaataaaattatagctctaatgtttgcatataagggaagtagttatcatgttagtaatacctctaatagtataaaccccaccccaaaattagccagtaatcctgtaggaaggtactgtatgatcaaatgtttaatcatataaatagaatgtaaatgtctcactgagcactgttttctagtgtatcaaaatgctcttatttcatcattcacttcactgtgctgttgttatgatgtgcttaacagggaacgtgattagtgaaaggaagataaacgtggatgttactccaaaacttcgtttaatgaatgcttaaagaattcaaattttatctgcctctcttgtaatttggatctcttcttaatgtacatagtgctaacatgaagacctttttctgcactatatgcaaacagggtaactaactaaaacaaagccactttcaatcttcaatccttgaaggtatatctaggtttatgacagtaattgtgtttacattttatggtgcctagtattgacaaaatgttatttccctacattaaacatgactccatagaccttttcatttgtgggtttttatttcctatgatgtatactgccactaaccttccaaaaattacttagtattgcaaagtcaggaatcatcaggaacgtttagctgacaaaatacttgtctgttttaaaaacctgttcaagtctaccaacctgttcaagtctaccaattataagggcaaattggagaaaaagaaaaaatatatactcaagagtggtatcttgcagtatcggcactgtacaaaaaaatcttccaatttagttgttgtagagaaaacatgcagaacaaatgaagacaaaacatacattttgtaccaaccatccaattagcttatgttaactgacaagctccatttaaacagatgtccatcagatgacaagaaaggctgctgtactgaagtaaaacaaacaatacctgaatgctctgtagcctaaactccaaacatcctcttccatatggatccactggctggacaaactgcaccagttgctgcttcaatttatacctcaattttcactgtgtccaggtggtactttggctcgttggctagattaaccttctctgtccgagtgtgccacacgagaacctgaaggggaaggaaatagcttgggtagcgcactcttcatggtgacactcgaggtcgggcagcacaagtgtaatgaataccttagtgcagttatttgctttcggttccagttcttcgactgttgttatctgtttgagaaagtcagattcttgcatccctggctgggatccacgacgcttaaatacagcttttggattggacaaaatgacttgaagacttacagcaaatcctttgtgaaaaataaaaaaaaaaaagagacttt

SEQ ID NO: 13998 - DNA, 219 bp, Homo sapiens
attatcagaaaacccagaagccagtttaggctagagaggaaaaaactactgtatcatttatcctaaagaacagagatgaggtcaatttcaaattttagccatctgtttgtgatttctgtcataagcattttgttgtttgtttttttattttggatgacaatgaattgaatatctaataaggagatttaagataagacccaataaatgaatgtattctgt

SEQ ID NO: 13999 - DNA, 2091 bp, Homo sapiens
tgaactcataccagagtcattccaataaaactctacttttcaggataataatctgaaccagatatttcatgatcgaaagcattgttggagacagacaatcaacttgtgttttgcctgtagtagtttttcaataatatgtcccaattgttatttaaaacatggcttcatatgacagaacaaggcaatctatcaaatttacaggaagaatcaacatgctggtgagagtcactgatgcttctaacaaatagaaaaagaggaaactttaaatccacgcatacacgtacacacacacatgcacacacacacacaccaaattgaacaaactggaaactctcactctgtgaaaagttgtattctacacatttctgcacagaccacaagcagtgttatttccctgatgtttgagttgttttgttcttttgtgtgttttgtttatttgtgtgttgtttgttggttttcgtttcttgagtttttgttttgttttcaccacatctgttatttccactagtttttttttggctgtgtcatgacaggcctcatgatgctaacagagattcttcccttcttttttccaaaagcaccaaaaaaaagggctgaagtagtctctgtagcatctccccaaagtgttaaacagctacataaggtgaagccaaggaagggtttcactagctttcattttataattatttaaagtcttatgtgtggatacccaagagacaaaaagttatcttccaaaataaataatcacagaagtacttttttaatgaagagcctatctgtttgcattctagaaaattaatttatggtttccattgttttgcatggaagacttttaaagaagtcaatctgcaactaatgctggggactaaaactaactgcataattgtactttgaaaacactccttgtaatgcctttttcttcctgatattaaaaaaatgctcatgtgtataaaccatactttgacttcccaaaaatggtgactaggaatggatttgagcctaagacactttgagctatgcccaggcttctcagccatacctcagtgtagacacatccatctgccctggaaagagcatggtatgagctgttcaatattccactggaaattccagttgaaatattctgcactaaactattgtttttattgaattttagtttacatttctttgagattgatgcaagcacaaagcttgattttttaatgcaaagtatcttactttttggggggaaaataaacaaaatgaactttcaatttgcattttcatttagtttctcttggccttgaatttcccttgtgacattctgtacatgtgctacaaactgcagtctctgcaggtgcattgatatgttctccctccttttatgagtcactccacttttgtgattacacaaatagagcagcatgacttggaactgttcagagctgcatgcacattttgtaaaaaaaaaaaattttaaaaagaaaagaaacaaaaggttatttaataatgtatgttagttccacataggccagcttgtatgttgcatgtacttgtacagtttgcttgttaattactataccgaaataaccaagaaatctaagccatccacttttgttatagacattttgcaggttttagccagactcagtctctgggtctgtggtgaaatgtctatagatggactttattttttaccctccggaaaacgtgatgtagtacggaccaaattccttctaataaatattttggtgtagattcctactgtggggctgtaacacatgtagacactgtgtacacactaggttttaattcatagacatactgcctgcaccaagtgaattatttattattatttacacatgccagaattatctgcccatcattccacagggcacagattgaccactgctcaccatgctgagtaggaggaactgaagcattggtgcacttctactagattccgttctgtcttagtggccaacaatcaactgattataattgggtagtatctttctattttgaccacttgtcttaacactcccctgtgcttttaaatgaaattccaattcatgtatgtaaacatgtttaataaaatttacttttcatgtc

SEQ ID NO: 14000 - DNA, 442 bp, Homo sapiens
gttcttcattttctttccaggcatagcagttctttagccatacatatcattgcatgaactatttcgaaagcccttctaaaaagttgaaattgcaagaatcgggaagaacatgaaaggcagtttataagcccgttaccttttaattgcatgaaaatgcatgtttagggatggctaaaattccaaggtgcatcgacattaacccactcatttagtaatgtaccttgagttaaaaagcctgagaaaccaaacacagctaatgctatggggtgtatgaatatgtcaagtttaggtcatttagaagatttgacactgtattttgaaattatgggagtaaacaccttcaaatttcaggcatttctgctttgtgactaaatacaaactacattttcaagattaggccataatgtatatttaaacacaatggctatcaacagctgctaat

SEQ ID NO: 14001 - DNA, 311 bp, Homo sapiens
aggcatctcaggccctggagccagagccagtcaggggttaaagtgaaagcccgtatttccgcccagaagctggggttggggagaggatgtggattttttgttttaccctttctgttgcatggttgcaaacacaaacttgagttctaataaagaattgcaaagtggaagcccgccccccgcctcccccccgcctcacttaagtccaggaagctggggtggcgaggaaggatgatgtggattgtttttgttttacaccttctgttgaatggttgccaacacaaacttgagttctaataaataattgcatttcc

SEQ ID NO: 14002 - DNA, 161 bp, Homo sapiens
aattcaagattttttagaaatatagtaagacggaagtattggacatgttggcagtatgaagagaccggactgatttgactgattcttaaaataatagtgtttgaaaatatagaatccagtgttttatactttctttaataaaaatagaagtatttaaactt

SEQ ID NO: 14003 - DNA, 717 bp, Homo sapiens
ctttcaattcataaaagatttttaaagagcatataaataatttgatcaatacaacagtatagataaaagaattatttagcacatgttaaaatagctttattaggttactatgggtttgccattaatttctgagtgggacagaaattataattgtgctttttcgtgtatatgaaaaaactagtcgtaaacaatttgtactctttctttaaggagctgtaatacaaataactttgtgcagtgttcatcaaagagagagacagtgaacctaaaactgaacctggaataaaactcaacatgcagatttgcctactcatagggactttgcctattaagtctaccaaattaaaagtcttatcattcagcgtgttttgagagttaataatcttttgcttggttatactaggctaggaagcaatatcaaagcccttaaattctcaagactaaagacttgagattatataaaattatccagaatcattcagctaatactattggaatatagtatgtagggtgaaagttgacagaaatctgtacttcttcaggaaatcctcactggtaattgttttgaacattaatgaaagccctataaaatagaaagattggaaatcaccattgtttcctattatccacagtgtggatggatacttatttggtgacctagttatgggagaattgagtaacgttagttattttatatcataccataaaaatattttc

SEQ ID NO: 14004 - DNA, 4683 bp, Homo sapiens
tttatttttaaaggactctgtgtaacactaacatttccagtagtcacatgtgattgttttgttttcgtagaagaatactgcttctattttgaaaaaagagttttttttctttctatggggttgcagggatggtgtacaacaggtcctagcatgtatagctgcatagatttcttcacctgatctttgtgtggaagatcagaatgaatgcagttgtgtgtctatattttcccctctcaaaatcttttagaatttttttggaggtgtttgttttctccagaataaaggtattactttagaataggtattctcctcattttgtgaaagaaatgaacctagattcttaagcattattacacatccatgtttgcttaaagatggatttccctgggaatgggagaaaacagccagcaggaggagcttcatctgttcccttcccacctccaacctagccctactgcccaccccaccccaacccaccccatgcccagtggtctcagtagatacttcttaactggaaattctttcttttcagaatctaggtggtgaattttttttaagtggcacggtctttttctgcttgaaatctgatcacaccccccagccattgccctccctctctttttcctctgtagagaaatgtgaggggcagtacatttactgtgcttttcacaccatctcagaggttgaggagcatactgaaaattgccctggggggtgctgggtgtgctgtctccttcccacatcctcagccccacaccagctctatttcaggggtgagagtcagagagcactgcaatatgtgcttcatgggatttcgattcgaagatcctagaccagggagacactgtgagccagggatacaacaaaatactaggtaagtcactgcagaccgacctccctgcagtttgggaaagaagctgggtttgtggagaatcagagcatcttgacatgactgctgacctaaagatccctggcattggccagggatcctgtggaacctcttctagttcaggggtgtgagcattagactgccagttgtctagtgacatctgatgcttgctgtgaacttttaagatccccgaatcctgagcacctcaatctttaattgccctgtattccgaagggtaatataatttatctggatggaaattttaaagatgaatcccccttttttcttttcttctctcttttctttccttctccctttcttctttgccttctaaatatactgaaatgatttagatatgtgtcaacaattaatgatcttttattcaatctaagaaatggtttagtttttctctttagctctatggcatttcactcaagtggacaggggaaaaagtaattgccatgggctccaaagaatttgctttatgtttttagctatttaaaaataaatccatcaaaaataaagtatgcaaatgtatcttttaaagttaatttttaaaaatgctcttattttagtgaattttcagaaattatagtggaatggatgctcatatattgcttatggatattttggataccaaagtaggaataactgacattcagtattttaaagctggcaaacctgtacatagaaaatagatccccagacagtggtctatgaagagggcagttaagtatcaaatacttaattttcttgcctttttttcttaagtggggaaaagtttctagatctcttacacctctgacacaatctgttctaaaacaggcacttgtaatgttggggcctccttgtaaacgtgtttttgccctttactctctgggagttctttaaaggtgaaatcatcttacaaagaaattgggggagggtcttggcaaaggactttcccctcctctttcctggcctgggaaccttatactgacaatcaatactttatattttaaagtatataatttatagttaacttctagtgtaatatattaggaaacactagaatggaaaggccattggaagacaggttgtatcttttttagaccatatttccttgtttaaaaactatcatttgaatacttttttggtgaagaactccatgttttcaagttaaaggtcacctcgtaggccaggcgcagtggctcatgcctgtaatcccagcactctgggaggctgaggcgggtgaatcacaaggttaggagtttgagaccagcctggccaatatggtgaaaccccgtccctactaaaaatacaaaatttagccaggcgtggtggcatgcacctgtagtcccacctactcgggaggctgaggcaggagaatcacttgaacctgagagacagaggttgcagtgagccgagatcacgccactgcactccagcctgggggacagagtgagattctgtctcaaaaaacaaaaaacaaaaaagtcaccttgtaactcatctctttttattgtaagtttattaaaaatgaagaggacaacaatgagaaggaacataaagggttagctagcactgtctcctggtgcatggggctgtgcagatgtcccggccacttcttccttcatacttcccttagagaacttgctctgctacaagcagtgggcttggactaaaagtgattaaaataccacaggcataaggagaaaaggagtatatgtagtagtaataattactagtataaattattttcttcacatgctatgagtaataatattaaaaaactcattttaccattaagattccttatgctgaagctcttccatttagaatactgtcaatgtcatttactggtatgaactaaagtcccccttcttttccactcactgggaaccttagtaaaacaccagcatatcttacctctctttctgactggccgatgcttccagagactgaatgttgggaaaacctagtagccaaacaattctaggacagaataacatttttatatttggttccaccatcttattacatttagttatagttttaaaaaagaaattcaagcccattaaaatatgtctggtcaatgaaatgcttccttttattgtgttgtgctattgtactttgtttttcaaaacattgtaaaaatagtatctttggtttagtattttggattatatattataatctgaggagtgttttgcttatgtagaatccagatatatttctgttacctaggagatgttacttacatatgtaatactgtatcctgcacgtggaaatattcagaattgtagatagcataactctccctgctcctattcttttgagcctaggtataattttttttttttttttagaaaaagacatatttagctttaatttctatttatgctaaacatatttataagtagtctgtcaatataataccaactatttttatttttacataattcaattatttcatttgacatgtctggcagactcaagacattaagtaaaaaattggaactatgatttttctttgtcattttttaaaaaagaattattttattaacctgctggcatataatctggagttcttttcacaaccttactttttctgatttgctttattgaatgattgaatactcatttctttctaaaaatatgttgtaaattctcccttggcaagatttctccctatgagggtagttattatttgagtctgccaagtggttaccatggggcaaggtgccatgatgtattcttgggtgcattggttttttgcgcattgtaaatttaagacacttatagtaagtggactcattcatagatgagtttcagaaccttttacgttctcggtagaggcttctgtcggacaggcagaagagtgtattcctcacttttttttttgtcttcaaattccagtaaggcatagcacttttaagaaattagaatttttctatcatctatgcaaatgatatttatgttaatattaaatatcttatgttacactgggagtaatttgaggtgcaattatttttattactactttgaatagaggaccattatccttctttcttcagaaaactaagaagtaagtgtaacttttaaagtaagtatatatcagtgagagtaggcttgttttacaactatttctagccagtgagttgtgttttcatgtctcatcaaaagacaataccacattgcatcattttacaaaatatgttgtcattttcatttcagttgtaacataggaaaatagatatttcctagatgatttctgagtttcttactgcaaagaacagttataaattggtatacatgtgtctctgtaatagggataatattgatatatctgttgctacatatttaagaatcattctatcttatgttgtcttgaggccaagatttaccacgtttgcccagtgtattgaattggtggtagaaggtagttccatgttccatttgtagatctttaagattttatctttgataactttaatagaatgtggctcagttctggtccttcaagcctgtatggtttggattttcagtaggggacagttgatgtggagtcaatctctttggtacacaggaagctttataaaatttcattcacgaatctcttattttgggaagctgttttgcatatgagaagaacactgttgaaataaggaactaaagctttatatattgatcaaggtgattctgaaagttttaatttttaatgttgtaatgttatgttattgttaattgtactttattatgtattcaatagaaaatcatgatttattaataaaagcttaaattctcatctattt

SEQ ID NO: 14005 - DNA, 2684 bp, Homo sapiens
ccatttctgttacttgtcatttctactttcagaaactaaatgactttcaaatttgggtatagacaataaagaactgaagtgctcactactcagtgatttggaaattttgatgcttgtataaatgtcagataattaatttccaaaggcgtatgtattaagtaaaagtctgtaaatatgttaatgaggccaatttttccagcatttataattatttttttcacttgttaggaagcttttgttatgtattttctgttaatagtacctaaaattgcaacttctaaacacaaataaaaagaaaatatttataggaggaaatgattaatttgatattctttagtgaacttgtttaattcctcagtgggtgtgacatatttcatgggaatattcaaatatctatggtaatattttgaccctttatatttgttctaaaataagtcaaaatgtgaaaataatattaaatctaagatattttgaactaagcatctttatatgcttgtgtaacaggaacaaagtaacagcctttcaattcatatactgccttgtgttcagtgaacccaagaaatgtaataaatatttgtaattttacacaaatatttaagaggaaagagtattaagagcaattcaaaaaaagtaaccttatactactaaaaaaaaaattcttgcatatattatcatcaaatgcatttttgaagacatcaaagactcaggttaaaactattttggtaagtgcagcttgaatttcaaatatcccgtgttacctttctctattacagcttaaagtatgctacaatctgtgtcatatagttaattgataagcatttttaatctgtgtaaacacaggaatttaaataggaatttactatttttttataaagcttttgctattttttcattgctcattttgttcttattattttgataaagtatcagactttttgcttgagttcttcagtgtaaattattttttacatgtaaaagtactgtattcaaccagttgcataatacagcaaaaatctttgaattcccctttaaaataactaaaatttgatggtttccatgacagatttatagcacatatagggatcttgcatgtatctgcagaaacttcattatttttcaaatgaaatggtgtatacttctttcaaatgaactttgagacttgaaacatattttagtcattttttgttaaatattgaatttttaaatacacatatatcaaaaatagttgagaataaaaagaaagcctaatcatcagcaattattttatttttaatttggccatctctgacattgcagtcaatatcttagggtattttcttgaatttaataaagtcccatgggtgggttcagggtgaatgggagtattaacaacaaccaaaaaatatctattgagacacagtagagtctcagtaagagaaatattaaaatgtaagaaaggtcaccattagtgatatcaactgtagtttgttactttgaactatatttctgattaactctttatagtaataacttagagctgttagctcagatatcttaattagctcatatgaaaaacaagtttaattttattatttactgaacatggcaaaatgcttttcaatctataataaaactgggataaaaaattgaagttgttttttttaaaacctaatagcaataagcaaaattggcatacataatttttttaatgaactatattttgtcagaatctgaaggtactgaaaaactattctaaaatgcctacttgtttttgcattaatttgtaatgcttacattttgcacccttagataatgtttgataagataaaaatataatttatcccttgtaccaactcaagtcaatcagattttaacatgaaaaatatagattaatgtatgtcagctttctagaggtagaatactcagctatttgatggcatttttcccaccccatgtgaaattttatttttggaagttatgctagtgacattgcaatatatattgaaatcttcggaggctgccaggttgagcttcaaaactagacttgagaatctttcgtgtatatgcacattcacttgataattgtgtattctatgtagtttaaagtgggatcaagccttttaaaatgtgttattagtacttagaagttgtaaaacagaacttatagaggtttgttactagacactgaaactgcatgacaagtatctggtgtcttaactaattagatagatctgttgtattggttttcttgttggatagaataacagttaatcatttttagaagagttttagattacttgccataaaatttgtatgtctcagctcttgttggtttaggagcagaagtggtgtttagtcccttcccgttaatgttgctgtgctacttcagacagctgaaaacttaatggtattatttcaagttcacataaccctaaaaaaggttttctttgtgtagtaacttgtgcttaaacttttagtcaattaaatgtaggaggttttatttgaaaacataaaatgattctctaaattacatcttgttttaagccaccaaaatgaatgcagtaatttttctttaaaaaaatgatctctgaaaactgtgagacaatgtaaaaagaataagttttaattcccccaaaatcaaaaattgtacttaaaatctcagacaattcactgaacaggaataataaagaacatattttaatata

SEQ ID NO: 14006 - DNA, 4525 bp, Homo sapiens
atgttgcacaccagccttacagctgggagcctttgccatggtacttaggtagggtgtgtgcccccagatttaaccattccataatcatgttagagttacttctataaagtgaacagattttattaatcacggcttttggtgaatttgtttaaggttaattatggtagcaaattttggacctaaacattatttttctgtatcccgctgtaattcccaaaactctcattattctctaactattacacatgggcatattctgatgtttctcatcctttgccagaagactaccttacatccatcgtaattgttctctaggaaaagagaacttttttcaaaattcaaaatactttttaaggatggcacagtaccatataactggagtaataaaacatgagcttacattcttacaataactaaaccacttaaaatgatcaaggcactaatgttttggtctgaaaagctgtgtactttatagacattttcagacatttttggaaatttccattaaaggtggaaaatctatttttttcctcctttgcagtgtcttagtttgaatgaaacacttcgaagttctagaattctagaaagagccttaatgtatttgatgtattctgtgataagaggtactaatagtatccagcacagatttgcttttctttgctagcacaatgtgtgttgctgtcagaatattctttttatattctgtggaaaaataaaggaaattcagattgtttaaatgcctaaaagttttgagataagttttgtttcaattagaaaaggaaataggttttaggtggcatagtggcttaactggactgaattcaaatattctttcaacttcatctcaatagtgatttttgtatcagaatcttgtccaagttgtttcattgatttagtaagtgttctgcttccaacatctttctttttaagaaattcctagtgtcttttttggcctttgaggttttggtaattgtagacctgtttcataagctttgtaattcagaaatccttgtatttagtaagtgcttgttttacataactgataattttaaaatgttttctttgtgtgctgttagtattgattcaaatgtcagcagctttaagcctaatatttatgactttcacatttggaatttaaagacaaaaatacatcaaggagttatgctgacataattctaaggagttttgttgtattttagaataaaattataaagtaaaatgattctctgtactgctttttcccccagtttttagagaccctaacctttgaaatgaaattccagtgatttcttttttccctagaaagattacctcagttagggaagtatttcccagctgactagtgtttgtgagccacagacactgtcttcagaattgcttctctcatgtcttagtagagaaatatttatttattatgatacattcaaatgattgtcaagttaaattaaatggttgtgtctgtgctattgagaatgcaaatgtgattatcttttgaaggctgtattactgcatagcttcacccaccctcgggtcatttcgtccctgtgattggggacagaaggtgtagctactgaagtaaatgacctattctctctcttccatctctcgcctttaactggtgtttttatttgtgtaggatagtgaatgataagcttttttcctaaccagtagtgagtaaagttcttgaacaaaatttagtagccaaattgttttttaatgacatgtctctttagtacaatagttttgtgtatcttttagatacattaataggcactagatggaaaattaaagagttaaacatatttaaatgagagaatctaatgtttcagaaatttgtaagaaatgtatcacagcaaagggttgttataagtccttagtttttgactctaatagttaatacaattatagttaatcttaagccataatgtttctaatcatgtcacacagctgtcctagaacttatctatttaaaatagtttcctgagttaattttggccagcagggcaactgccctaattcagatagatttacagtaacctacgtacagtagatgcacatacacacagacacccctttgctggagaaacttaggaccctgtcagccttttaaaggaaacagcaggagtggtgtcctaaatgatgttcatgcagctgctttaccatgttcacagtcaagcccatgcatgccaggttaaaactgtggaaatcaaaagtaaattcactcatattttaatcattttaactgagatttaaaattagaagtttaaaccactatatataaagaactaatcttttcttaataccagttctttccatagcatatgctttgcaaaggcagcatgcataaaatatttaaaatgagaggacagaatgttttcacatttgattcaattttaatataattcctaattgtggtaacacagttgagatatgtattatgagttatgggaactaattgagaaaaggaagttactctaatccacgtatgttaagagaatattgagttttcttagttgtaaagttggggagatggcaccttctcagaggattgtgaaaatatgaggaagaaacaaaacagtgcatgtaggagcacagggccacacaaaggcattctattgttatgctcattctgcttctgtaatgacttttcataggtcattcttgtgaaccattttgttttgcaagcaaccaaggaaagaacatcttaagtggaaaatcagtggtggttgtgaacacttagagaatagcaatccacaggcaagaataatggtattgtttgtagagctttattaattggatattttttaaaagacattttcattcacaggtcattactatggttctcagcgatccaaatatgtagatcattggtttttttttttacctgaagtagcttaagagtacttggatcagtagaataaatatttattgaatcaatcagtcagccaattaatatgatgttagtgatagacctgcctccttttatggaagaggtaacagatccagagaggtcaagtaatttagttgtagactgaaaaatatatcaaagcctttgctgcaatcatatgtaacaaaaagaaccaaaacaaacactttttagtggcacctgtggatttacaaagggttgcctctctgtcattccacaacttcagaaggtgtgacaggttttccctatttatcattaccaataataacaagtattgagagttttaaaatttctcccagaagataaactaacaaggatggaaggggagggcaaaggatatctaaacatgagaataaggacatgttagagggggggaaacagttgtaacaataaggaaagagaagagcaacagtggaagagacaggttgtgtgcccctaaagattctgcacccccagtttggaaacactgatacattttaggacacagagcactcctagatctctacgaaattttagaatgaataatgtgtaatttataggatcagaacgtatggttattaaaacttggatcaagatatgcccggtgtatacattcttagcacataggaatggcactgccatactggagaaggtcagcagtaaataggcattctgtacataagcctcatggaagggtaagatggagagactggcagaagtagcacctactctgctgggagcacttctctgagtacgctttagttcaattcaaatcactgtattctttccccattgctaacctaatatatgaaacaagcttagctgtctcagaagtttttcaagagatgatcaggaaaaattaatgcacattcaaaaggagaatcttcagtacaaatttgtttttttaaaaatagatttagggctgggcgcggtggctcacgcctgtaatcccagcactttgggaggccgaggcgggtggatcacgaggtcaagacttcgagaccagcctggccaacatggtgaaaccctgtctctactaaaaatacaaaacattagccaggcgtggtagtgggtgcctgtaatccctgctacttgggaggctgaggcaggagaatcacttgaacgcgggaggcagaggttgcagggagccgagatggcgccattgcactccatcctgggcaacaagagcgaaattccatctcaaaaaataaaatagatttagggggtacaagtgcagttttgttacatgggtatattgcatagtggtaaaatgtgggcttttagtgtacctaacacccagagaagcatacattgtgcccagtaggtaatttttcatccctaaaccttttctcagcctcccactttctggagtctccaatgtcggttattccactctttatgtccatatctacacattcaatcctaatttgtaccaagtagcatctcacctttaaatcacaggcttattagttgggtgttttctttttacttatgaaaattcatctagtcaaactgtcaattaatttttcctcatttcattaaaagtgtatatctaatgctttctctaaaaattgatgtactggaaatacaaataaataaatgctccctgtgtagaatttc

SEQ ID NO: 14007 - DNA, 268 bp, Homo sapiens
aattccaaacaaattatattgtacttgtatctttttacctatttttatactttttataatgtttacgtttgtcctgaatatatatatatatatatatatatatatatatatggtataggagataagctatttctttccaaaatctataaatctttgaatatagtcccacagaatacttatgttcactttctatttttaaaagactactctgaaaaacactcttggataataaatgtattatgtgcatacttatatactgacagttcat

SEQ ID NO: 14008 - DNA, 4143 bp, Homo sapiens
agaagaagagtggaagatgacggagatgcattttgaagcacccctggtactcagcacacacatgcttacctaatgcatcactgtgacaaaagccacacgcattatcagtaactttgcttgccacggaaaaggtgtttttgaaagatgtggctataatgagaattgcatgattgctttaaaccaaatcaggtggtggattttttttttcttattctatttgcctgcagttgcctcactcacctggaaataccgtcacctgttacaggtgtactttcttaatgactgaaagataagtgggtagcaccgtcagagagaaaatgttggatctgccctaggttatagtagatgccggaattgcgtaaacccacttctctttaagctgcctggattgcacctttgaaatatgtctgccaagttgttagaatctttgaatcagaaggaaaaaaagcagcgctggttgacaaagggtgttgaagatttttgctgcagaatcagttacaaacatcacagttcccatgctttgtaataacacctggtgaaaaagttagatattctagacttgttttagtaatggaaactcttacctccacatattatcctacagatgtttccagaaatccctgttgtaacatcaagtgatcagaactaagttactgggatgacaataattgctatttgaaatatatgcttctttatttcttgcaaggggcaagtttcacccaaatgcctgagactgcttgaaagatatattttaagtggtgcactaattagtgaatatataggaaaattatctgacgagtatctgaaggcattttcagctctagcaatttatttataatatataagttcatatattttttaatccagctcccctaacagacagctgctgcttctattttgtgaagggactatattttttgagaaaggaaaatctcagttagatatattttgtgaacccttgattagacatattaaaatataccaatgttgtagtaaaatttaatttttccttttgttacttttcatttgcctctaattttgcttgctcatatttctggccaatgtacagcctcatatttttcagagtaatacagatacttgttctcattccgtatatgagcacaagtaaggtttcagagcaacacacatgagaaagagagtaacccggaattgtacttgtcaagcaaaatctatactcctattggagtggatgctgatgaacatcgaacatatctacttcattagagcagaggctatttttctgcattcttgtccctataacagggatgcttaattttttttttaacttagagttttaaattgccaaacatgggaacagccttgaataggataaattttcagagggctgcctaaaatattttatttctagcatcctgattctggacttttcattataattctgagcaggaaatttataagaaattgaaagagcagaagaattacagccctgtcacatgtgcccagcactccgccccatgccttgctaaatgtagactaaagaacttgttgaatgctaaggctgaaatcccaacctgagatttgtagtccaggattacaaccagaaggaaagtatgacagatttctacttaactagaatggacacatgatccacaattttctcttcaagggaagctgttgtcaaattatggatattactggttagttgtcattaagtaagatccaggtcaaattccatttgacaaatcccagggactatccaggaatttttttttaactggatattgtgtttgagtatgtgagtcttctgataaaactcagaatttctttttaagcagttgtaaaaattgtcatgttgtaattcattactcagctaacatttagtctactcttgctagtgagtgccaagaaccaacttggtaaggttgaggctttgcaagttaactgctggggttataggatcaataccatacttgctagacaaagctacccagatttgtcttatattataatttttgagttaaccgtagtatacctattatgattatagtaaacagactagtgggtagtaatgctaaattaccatcacagttatgtgccatctccccaccccatttttttttttttttttttgatcagcaaagaaatacaggagaccagtctcgagtggtgctgtacttgttatgagtgaggcagcagcacagtgtgtggcatttacatggtacccaggctccacagagtaccaagatgttgccctctgggaccacacttagctcagagaatatggggtccttacttgtattcttttatcagctgattttgaaacatataataatgattttcttgttcccttctttaactagctgcctttagattttgataatcacagtcttaaaatactaggaaagaagtggatgggaattgtaggcatagatttcatatcaagggcatttcaagacagaatttttatttcctgtagtaggcttgctggagcaaaggaaatgtgctgctaaaaatcaacttatgccattttaaaattagataaaatatggagtgccatcctgctaggtgagtacagaccagaagaaaatttagttgggaaaatacttgtttttccaaattccggtgttttattacaatcaaagaagaggaaagcaaggtattttttcacctcagattctaatatattctagatttgtttctgttttatagatttaattcaatacctccacatagatgtttttatattacatgaatttaataataaactaaacttttttttgtctcccgttattgaaaagtaccaaagcttctttctgttgtgtttgattttactataggggttttgctttttctagagatacttttcatttaacagcttttgttaagtgtcaggctgcactttgctccatataattattgttttcagatttcaacttgtatgtgtttgtctcttaaagcattggtgaaatcacatattttatattcagcataaaggagaataaattccagaaaacacatattctgaaaatggagtgtttgttccctgccatttttcacacctctcttaattttagttctgtttagttgagaggctgtgattttactcttgcctgtgaacctcatgcatgaaagcagcacattaaattgtaaaaatacaaacagatcgtgtgatcattcaaggagccagacatgaggtcctgcacgagggtgttgggaggacaccacagattcatctcagacagtgatcaggactgaggatggagttaaatcactcagcccctgggtggggtggggtggttcaaatggatgactgatctcctgagtacactgaagccacaggctggtggccatgttctctgaattgggtgcagaagacaagggcagagtggctgcggcccctattacctttgtagcagccacatcagaaagcagaagaaaacagtatttctgaaggcattgtttgaggttgatctcagcactgaacgatttcaagccctacgcaccagaacagaaggagggtggaggaagtgatcagagggaacgagctgtaggtttgcagaaatgtgtgaaaccaaaatgatcactgcctacttgtgattcaaatcttcagagttttcctagttcttctagaaatacatgtcaggtttgtttgttcatcctttctgtcagcatggatcaagcccctaaaatgtggtaagtgttgtcagagcagggcaatatctctactctcaagtatgaggggaatagaaacaaagcagcagttttagccagggttcaatgatagagtggaggtaaattaagagcctccaggctgtgattcaccatttgagacattatacataatttgtttttgttataagccatttgaatttttaaaaaatttcatacatgcaatggaatatagatatgtatatacacatataatatatatgctaaagtataaagagtaataataatgacaataaacaaacccctgtgtgcctaccacccaccttattgcctttcctttgaggtaccgtgtgcggtttcctgaacctatctctatccctgtctgatagagggaacccctgtactgaactttgtgttgaccatagccttcttgtctttcatcactttatctccatgtatgtatccttaaagaataataaatggaattaaact

SEQ ID NO: 14009 - DNA, 318 bp, Homo sapiens
tttgcagttattcgtaatgtcagataccacctataaaatatattggactgttatactcttgaatccctgtggaaatctacatttgaagacaacatcactctgaagtgttatcagcaaaaaaaattcagtagattatctttaaaagaaaactgtaaaaatagcaaccacttatggcactgtatatattgtagacttgttttctctgttttatgctcttgtgtaatctacttgacatcattttactcttggaatagtgggtggatagcaagtatattctaaaaaactttgtaaataaagttttgtggctaaaatgacact

SEQ ID NO: 14010 - DNA, 2469 bp, Homo sapiens
ccatataggtaggtatgcatcttgagaaagctactatgtgcccctgacattaacgtactgttaaccaagacacagcaatcatcagtgttttgatggtaacaaactttgatggtaaagttggtaaaaggcaactttcagaagaaaataatgtgctttagaaaaaaaattcaaatttatagtagtatatttacatttttgttgttgttgttgttctgagatggagtctcactctgtcgcccaggctagactgcagtggtgcaatctcagctcactgcaacctcccccctacccctgagttcaagcgattctcctgcctcagcctgctgagtagttgggattacaggcgcccaccaccatgcccagctaatttttgtgtttttattggaggtggggtgtcactatgttggctcagctgatttcaaattcctgacctcaagtgatccacctgccttagcctcccaaagtgctgggattacaggcatgagccactgcacctggctatatttacatttaatagaaacatatctagcatatgtatatgtgattttttttttttttttgagaccgagtctcactctgtcaccaggctggagtgcagtggtgcgatcttggctcatggcaacctctgcctcccaggttcaagcgattgtcctgcctcagtctcctgagtagctgggactacaggtgtgcaccaacatgcccagctaattttttatatttttagtagagacggggtttcaccatgttggccaggatggtctcgatctcttgaccttgtgttccacccgccttggcctcccaaagtgctggaattacaggcatgagccaccgcgcctggcctgtatatgtgatttctaaaaaatagatgcatgcatatgttaacattgaatagtcaatcactagatgaagatgctctctaccatggtttagattgcaagtgtactttataccattgtttcaacttcaacctttatttttgtatatattttttcagctacttaaactgttcatgaataggcgtactttctgtatttaaaaatggcccctcaagcaccgttaatttacattccagttatttacatgataattcatgacattctgaaacttgcctgtatattatctgaaaaatggatttcttgagcaaaagatctgtttattgtatgtaaggaaaaattttacctgaaaacaaacaaacaaaccctaaaactcagcaccactaccatttccagaagcttttttaacaagtgaatattttttacataatggataataaatggtatttattcatcatgattttctaagtaatgcttatcagccccttcagtggtgttattctaacaaaatgaatacattacaaattattaagttagcttttcagagttttaatatagaagttactagcactgacacactgattttgaaatgtttcaaaatgagtagatatgattagatcctttaccttttaatatctagtttttccaaaaatgatagtaatatcttttgaagaactatgctttttcaaaagcaaaatcaactctgtataatagcacattctctactttttaaagatcagaaatgctagaattcttgacttttgtgtatgggtagtaaatctagctcactgaaaatcagagtgaaacgcctttacatttgtgcggatagagaagttaactctccctcatatgtcactgtgctaccataatccctacattttctgtctgttctagtctaagaatattgttatagatggaagttaggaccattagcccacagatgcatgtattctctcagacataccggtgtagatgctatatttctgatgtcttcttaatgtctgtgaaagcaactggcatctacaataaatcacacttagagctggttagaggactccttcacttttgttgtccatgtggttcccttccgtggaccagccgtaataaagagccaaggtagtgatggtggccacgtgcctcgttgctatttttaaagtaatattcagatgtggttttaaatttagattatgtattccttttgaaacataagaaaaacatttaaacctatgctgaaaatacgataaaagaaaaacaactccaatatgctaaaagttaaatatggtatttaagaaaatagtcatgtatgcaattgagaaagtctataatttattttacagaaaagctggaagattatgactagatatggaaatattttttctgaatttttttttatatttcctccgacttacctctttttgaaaagagagtttttattaagtgaaccatcacgatattggctgaaaagttctacattctattattgtattgtaacacacatgtattgatgattttcattaagagtttcagattaactttgaaaaatattccacatggtaatcttataaattctgtttaattacatctgtaaatattatgtgtgtgatagtattcaataaagtaaaatcaaattgtcttt

SEQ ID NO: 14011 - DNA, 673 bp, Homo sapiens
gaaatattagaggacagaccaaggacaactctgcatgagatgtagacttaagctttatccctactaggcttgctccactttcatcctccactatagatacaacggactttgactaaaagcagtgaaggggatttgcttccttgttatgtaaagtttctcggtgtgttctgttaatgtaagacgatgaacagttgtgtatagtgttttaccctcttctttttcttggaactcctcaacacgtatggagggatttttcaggtttcagcatgaacatgggcttcttgctgtctgtctctctctcagtacagttcaaggtgtagcaagtgtacccacacagatagcattcaacaaaagctgcctcaactttttcgagaaaaatactttattcataaatatcagttttattctcatgtacctaagttgtggagaaaataattgcatcctataaactgcctgcagacgttagcaggctcttcaaaataactccatggtgcacaggagcacctgcatccaagagcatgcttacattttactgttctgcatattacaaaaaataacttgcaacttcataacttctttgacaaagtaaattacttttttgattgcagtttatatgaaaatgtactgatttttttttaataaactgcatcgagatccaaccgactgaattgtt

SEQ ID NO: 14012 - DNA, 241 bp, Homo sapiens
gcaccattgctggttccatttagcttacatgtaaatgtaattatttaaaacacacacactgctctgcgttgtatagtttttccttttttgtatgtaacagaacacatttcagattgtatttaatttaaatatttgtatataagagcaaatgtctgaatgtggcctgaatcaagtttaaatattgttggctcatactgattatggtgcctaagagagctatatatatacacatgtaaagtcc

SEQ ID NO: 14013 - DNA, 259 bp, Homo sapiens
aaagcgattaagaggcctatgcctgtaatttcactaagtcagtatttctgttaataagaccaaattaaaaaggctagtggctgtgtagcatcctcagtgcaaaacccagctccagaattttcacctggtaacgaatttcaactgacagtgaaatgaataggcctttaaactttataacattgcaattgtgatgttatctctaggtttttgtgtgaagtcattcaaaaactatttcattgtaaattaataaaaacaatcc

SEQ ID NO: 14014 - DNA, 1017 bp, Homo sapiens
cagagacctgaaacagggcggtgtatcatctaaatcacagagaaaaccagctctgcttaccgtagtgagatcacttcataggttatgcctggacttgaactctgtcaatagcatttcaacatttttcaaaatcaggagattttcgtccatttaaaaaatgtataggtgcagatattgaaactaggtgggcacttcaatgccaagtatatactcttctttacatggtgatgagtttcatttgtagaaaaattttgttgccttcttaaaaattagacacactttaaaccttcaaacaggtattataaataacatgtgactccttaatggacttattctcagggtcctactctaagaagaatctaataggatgctggttgtgtattaaatgtgaaattgcatagataaaggtagatggtaaagcaattagtatcagaatagagacagaaagttacaacacagtttgtactactctgagatggatccattcagctcatgccctcaatgtttatattgtgttatctgttgggtctgggacatttagtttagtttttttgaagaattacaaatcagaagaaaaagcaagcattataaacaaaactaataactgttttactgctttaagaaataacaattacaatgtgtattatttaaaaatgggagaaatagtttgttctatgaaataaacctagtttagaaatagggaagctgagacattttaagatctcaagtttttatttaactaatactcaaaatatggacttttcatgtatgcatagggaagacacttcacaaattatgaatgatcatgtgttgaaagccacattattttatgctatacattctatgtatgaggtgctacatttttaggacaaagaattctgtaatctttttcaagaaagagtctttttctccttgacaaaatccagcttttgtatgaggactatagggtgaattctctgattagtaattttagatatgtcctttcctaaaaatgaataaaatttatgaatatgactt

SEQ ID NO: 14015 - DNA, 124 bp, Homo sapiens
tctgattagctacttttgattatatccaaagcttgtggggtttaaatttagtgtacaaatgtatcataattattttaaactaatttatttgtatataaattattaataaaatgaaatattttgt

SEQ ID NO: 14016 - DNA, 547 bp, Homo sapiens
tgaagagctgtcattgtcctttattcaactagtttatctaaatttgtgattgcttagggttttttaagagaacatttttgtacataacaaaaggttaactagaatccagccttcagtttcttaaatgaaatcaaatgttccttcagtacaggtaacttcttggctttcttttgtaccacaacttattttactactgatatttgacctggaaagttaatcatggcaacaaatacatacaggattctttgttatgaatcacaaatttccttgccatttaaattatatcactgttctacaataagcacttgtgttttatgacatgataaagtaaatgatcacttcgatcatgtttctatgctgtaaaatgtcttattagcaatacagattaaattttaccttgcactgttaactcaggaaatgatcatttatgtccttgttattaatgttaaaacatagaatgttataacttattaagtgatccaaacatttttttgtgtgtgtatggcattgatgcagaatagaataaaattatacttaagttcttttt

SEQ ID NO: 14017 - DNA, 1399 bp, Homo sapiens
gaaacatgctctgtaaagggtcttcctgaagatgtggattctatctttatgtagcaagaaatctacatccaccaaaattgtgtgtgtttgggggagagagagacatagagatagagacagagaggcagagaagagacccctttagaagagagctgagctgattaagctgagtggttttttgttttgttttgtttttgctttttaatacatttggagctttgggagtattaaagtatttacaccaagcttgtccaacccgtggcatgtgtcccaggacagctttgaatgtggcccaatacaaattttaaactttattaaaacatgagttttgtttttttttttgctattttttttaaagctcgtcagctatcgttagtgttagtgtactttatgtgtggcccaagacaactcttcttccagtgtggcacagggaagctaaaagattggacacctctgatttatactagctcgttttgcttgttgaaaaatttggccaaatacctattgtcagcattcttgggtgaggattagcctaccatgttctaatctggccctgccactactatgctctacctttggtgagttgctttacctctctgggctgccccatttttaactgtaggttgacaggtctagagtgatccatcccacctctaatattttgtgaatttatgactttgccttcagatgaggctgagctatacataaaacagtataaactagggtactgcctcgtatctcttgtaggctctctcaaatctctgtaccttccacttaaccctaattgagccaagctttagtcaggggatctggttgtctaccagaatgtcaggagactcatcttacacagtcatggtggccaatgtttctggtgggttgtgctgaaacagctcttctgagaacttccaaccacccatgctctaacctggagacagccatcccctgcctcagaataagtaccaattcgtagtacatgtatggtactcttgtccccaagaaatgttaggaagcttgtcagctgaatgagaggaggtgccttctgggtatctctgtgttggtgtatctgtgccattggctacagaacaagaaaaatactatttgccatgctattaccttggcagatgtgtaggtgatagtcatctggctttgagctgagatggtcagtgggttgtaaattccccactagcagatattcagggtggcctgagttatgtaaacaagtgagcaacacagctttaatttcatggaggaatcaaagctgcacactggtattaaaacaacttgattttgcgcacacagttgcatgcatggcaagctgttaacctctgggtggcattttcattatgaatttgttcaccacctgtcttgcttaagctacaaaataaatgcatttgactgc

SEQ ID NO: 14018 - DNA, 1774 bp, Homo sapiens
ccaaaaattctccttgcctttaatgtgtgaaactgcattttttcaagtgagattcaaatctgccttttaggacctggctttgtgacagcaaaaaccatctttacaggctcctagaagctgaaggttagagcattataaaatgaagagacagacatgattactcagggtcagcaacctagtgagttagaaaaaaaattaacatagggccctataaggagaaagccaactatgttaagtttacgtgtccaaattttaatgaaattttactaacaattttaaaccatatttttcttcttcatatccatttctaatccatcaaacagcttatgtttacataaaattttatcattcacaaggaagttttaagcacactgtctcatttgatatccacaacttatttttggtaggaaagagagatgtttttcccacctgtcagatgaaaaaactgaagctcaaaaagggttgacttgaccatacagctaatgctgacagatccaagacctagacctaggtcttttgaactcaagtccagcattctcaactatatcaagttactgttcagaatacttaatatctcctctcttcataattatcaatagccccaagctcatggatgacaaatctctgctttatttcttgtctctattttttcactttatagctcctgttataatagcaagtttaatggtataaacacaggataccatcctctcttgcaacacccatgtgcctttgatgagtcaggtagcaagctgtagtagataatgagaaaggccagaggctgcaaaagacagtcaaaggacacgagagaaaggaaggggaagaacaggactccaggactgttttatattatagaaaagcaagagctaaagagcatttacacatgttaaacagatacttgttaagcatagtgcctgacacacggcattagctgttattttatgagattccatcagctctgcctctgtcctctttcttctaacatgaaggtatcatgagaagagaaccttctaacataagctgtaattctaaacctgcacttgtccctctccagcaagaggctagcactgaattcattctactcatactacacacccagttatggaatgtccagagttctcgaagaaaataaatgactttaggaagaggtatacattttttaagtcgctctgcctccaaatctgaacagtcactgtaaatcattcttaagcccagatatgagaacttctgctggaaagtgggaccctctgagtgggtggtcagaaaatacccatgctgatgaaatgacctatgcccaaagaacaaatacttaacgtgggagtggaaccacatgagcctgctcagctctgcataagtaattcaagaaatgggaggcttcaccttaaaaacagtgtgcaaatggcagctagaggttttgataggaagtatgtttgtttcttagtgtttacaaatattaagtactcttgatacaaaatatacttttaaacttcataacctttttataaaagttgttgcagcaaaataatagcctcggttctatgcatatatggattagctataaaaaatgtcaataagattgtacaaggaaaattagagaaagtcacatttagggtttattttttacacttggccagtaaaatagggtaaatcctattagaattttttaaagaactttttttaagtttcctaaatctgtgtgtgtattgtgaagtggtataagaaatgactttgaaccactttgcaattgtagattcccaacaataaaattgaagat

SEQ ID NO: 14019 - DNA, 240 bp, Homo sapiens
actgtaaaaagctaaaaggcacgactttttccagagcctcatgagtggatgggggtaaggggtgcaacttattaattcttgaacatacttggttcaggagagtttgtaagtatgtgtggtcttgtttccttgtttgtttgtttgttttgttctgttttgtttgaggattgttatttggcgtgctgttttctacctctggtcttatctgtgatacataatttcaaataaacattatcatac

SEQ ID NO: 14020 - DNA, 2051 bp, Homo sapiens
tagtgctggttagtgcagatggacctttattaaaggttctgaaatcttcaaatgaaagaccttgtgagtgtacagtatcatgtttcttgttctagaacatgctaatgaagagagaagatagcagttgcaaccagacaactgtcgtaaattttgtcctttcacagctgcagccattatctcattctttttccacagagtgagcgtcataatatttttctttccttacctcttataaaagtgccatgagaatggaagttgtttttgttaattattaaattctgtataataaaagtacccatgctgttaaatttgcatgatgttttaaatattttaagatgaattatgccggtgcagctgtcgtgaaagtttacttgtgttttgctacttgcaaaggaaatgttcatgttctccctggcatagaacctatatttttaaagaaagataaatagaaattttaaggcctgaagtcaatattaaaaatatgagatatgagaaactgagttggctctgacaagtagtttttatagtgtcacaaatggttcatatatttcagtttccattttagctatttttgggacagaattttattttaatggaaaagatccttccactcagctactaaaataaggattaagaatatcccagagtaattggagtttttctttaaaaaaaaaaaaaaagtatgttttactgaggtatgatgattttgactacaactaaatgttatctattttagtgtttatgttaattaatgttaattaattttgtttatgttaatttgtgttaattaatgttactgtaatgttataaacataagaccaagtgttcttatagttatttaaaaactacaactactcaatggataaggaatagataaggtctccttattgtaccttttttttcttttgaagtttatatgccagcaggcctttttgtttttttccttttcagaatgtttcttattctctgaagcatcagcattttgaagtgtcttttatggaagtggggacagaaatgggggtaaaaatgagtgtaaacaaagcctagccctacggtcagtacccactggaggtgagaagcagaatggccttggttgtcctggcacctggcccaggggcctaggacagaggtcaaggctaggcccctgtgtctggccagattctgccttatagaattcaaatctttcttacaagggttctggacccgtttcatttctagatatatacctaattctccaaatcattgtcattgggcctcagtagtaaatcttacctctgaagtcttgcttcagtcgctattaatattaccaagtaataataacagcacaggcagagtttatcataatgttatttttaatttgtcatactttattatggttttgtaaggtacatgaaaatgtaattatgtgtgatttgtaggtattaaagaacttagctaattgaatttacatgaaactaaataaaatctttactactgagccccaaatatgtatttgctatgcctgtctgtataatgtacttcatatagtttaaaatgcacttcagtgatacaaaatcccttttaaagactcttttgtttttgttttccctgtgtattttggctatcacaaaactagggttcttctgtttttaacttatgcatttaatgacacattgccatcttttagaattttttactattcaacagaataagctgatgtttggtggcagaggagttattagttgcgtgaactgtcaagagattgcagtgcaggagggcaacagaaactgtacaaggtgcagacttgagtcatgtaagatctatgtgaatgaaccaaagtaactagagtcagtcaagcacaaagctgtgaaaagtagtgtgtggaaagaatcatactgaattttaggaacaagtacctgactatgatactttttacagagtgactacaagttgtaggacagtctttgtgtgtgctgagtgtcaacagctgcctgcctatgtgttgatgttttcatcctttctttgttgaatgagggtataaccatcaaaaataaaatacctttcaaatagtc

SEQ ID NO: 14021 - DNA, 980 bp, Homo sapiens
atttatgacatttaaaaatatagttaatttaaaagttgtattttgttgtagaatgcttcccaggtccacacagagagagtcagatgagggtctttacaggttgtctgaaagggattcatatctgaagatgaaaactaattgaatcaaagaataatgaaaacaggatatggagtcaaattgatgaattaggaaatggggaaaatctgaatcagaacaacttcattgacttataaataattgaagctgcagtatatttctgtatctgaaattggaggagctcaacacagataacacagatagtaacttatactcagagctgcaaaacaatttaacaggtttaaattgtagtagtctgaaaggccacagaatggatctcaaggtgggtttcttgtatgtctgtgcctattgattaattcattcatcttatttagtaagccacttattgtgtgtcagtaattattcttggcataagggatttcatgaaacaaaacagataaaaatctctaccggtttggaactcacatttgaatgccgtatattctaatgttcttcctctttgtctctcattttcgttgttcatctctttttttgttctttttagaggcaaggtctcactctgtcacccaggatggagagcactggcacaatcatagcttactgtaccttccaactcctgggttcaagggatcgtcttgcctcagtctcccaagtagctgggactacaggcaggtgccaccatgcctggctaatttttttaaaaaacttttttgtagagatggggtctcgccatgttgcccgggctggtctcaaacttgtggcttcaagttatcctcccgccttggcatcccaaagtgttgggattataggcacgagccaccatgccaagcctgttgttcatctcttaagtggtctttctttctctcctgtctcttgttgaattcctctcttttaaactcactaaaatgaaaacattttgaaat

SEQ ID NO: 14022 - DNA, 214 bp, Homo sapiens
ttacagacaacgttttaaaatagatgctactcaattatgaacaatagcaagtacttaaaggtatattaacatctatacaaattaattttgtaggggtggcacattcattggttgtgtgactgtttattgggttcccatattttatcaaactgttttctgtaacacatttttcattctgttgaaattgaaaaataaaactgtccatttatctttt

SEQ ID NO: 14023 - DNA, 803 bp, Homo sapiens
ttttagcctcacgtgagactccttttaagactaaaccatttgcattaaactagagccttaagtcaatctcagaaggtagcataaacaaataaaaattaactgtatggcatgatcagtgcggttatgtggaaacaacaacaaacaaacgaagctatctgagtgaactgctaatacagaaacttaatgtagacctgtttggggtctactattgttttagaatgaaggaattgtattattgtgtgtatatataatttgtaaataaaaagtatggagatgatacggtgttaaaaaaaatcatggtaaggctacaatactcaagtaacaaggtttgggacaatgtctaagggttaaagtgccaaagccatttctgtactaactgttctcttgttccggtaccggggagaaggatgacccctccttattctccaattcatgtacagtattttgtcctagcagcataaagacctagctcttttcttacaagaggcagaaacaagacaggctagttcataaacaaactgtgtaacttctcaaaatgaatctatttcataactcggacaatttctgggtggtgactgagtacccctttagtgagtacccctttagtgctatatttgtgccattcattatctggttcatatttcttttctgttagatgatacacatttcttcaaaaaaatttctaatgtcacttttgtacttttttaaataaagtatgtttaactgttgggctctcaataatttgtgaaatttcagtgttttctataatgttaatggggaaattcagcaataaactttatttg

SEQ ID NO: 14024 - DNA, 325 bp, Homo sapiens
aaagcaaataagcaaagccagaactatcacatttagcttaagagaaaaaggtgaccagtcatatttacatatattagaggagcctgttttgttgagaagataaatgtgtaacccccattgatgtttaaccagaaaagtacattgctaaccccaaacaggcatgtatcaaaacacctgtggagtactttagactccaacaaataataatgtaactaaaactgctcacacattttactgtactttccaaagtcattactaaattgtgagtaaatcattcttgaacttagagtatgtaaatgtaataaattccgttatccaggagtat

SEQ ID NO: 14025 - DNA, 496 bp, Homo sapiens
tgtttgaatgatatataacaaaccaaaggatattacagaatattagattcattattacaaaaataaaatacacattgaaatactttaataatgttgcgatggattgccacagtgtgaaggaaatgcagtgtggggataggactattttatcagtgcatttttccagtacagttatcaaatattacttttaatttgttctcaacacttatttcaggtaatagcttggggatatttatctaaaggtacccccaacaaatcttctaagtgcatttttgatcactttgataacttcttaggtgatttgcctgttttgtcttaaataagaacaatgtaatatagaaatgctttacatattagactttctctcccctggaagcactgggttgaacttgctaaagtaaatcatactttagaatctcttcagggaatgtgacatacaaagtttgtaagacatgaagtaataacgataatgataacaataaatgcttacttagtg

SEQ ID NO: 14026 - DNA, 963 bp, Homo sapiens
atttcagatttcagtatgtgtgtaaaacataatttttcccatatccctggactcttgagaaaattggtacagaaatggaaatttgccttgttgcaacatacaattgcaaaagatgagtttaaaaaattacatacaaacagcttgtattatattttatattttgtaaatactgtataccatgtattatgtgtatattgttcatacttgagaggtatattatagttttgttatgaaagtatgtattttgccctgcccacattgcaggtgttttgtatatatacaatggataaattttaagtgtgtgctaaggcacatggaagaccgattttatttgcacaaggtactgagatttttttcaagaaacagctgtcaaatctcaaggtgaagatctaaatgtgaacagtttactaatgcactactgaagtttaaatctgtggcacaatcaatgtaagcatggggtttgtttctctaaattgatttgtaatctgaaattactgaacaactcctattcccatttttgctaaactcaatttctggttttggtatatatccattccagcttaatgcctctaattttaatgccaacaaaattggttgtaatcaaattttaaaataataataatttggcccccccttttaaaatagtcttgactctttgtgtgtgactgtttctcatgtttgaatgtgtgactaggagatgattttgtgtggttggatttttttgacttctactttactggctgagtgtgagccgccatgcctggccataatctacattttcttaccaggagcagcattgaggtttttgagcatagtacttgactactctagaggctgagacgggagcatctcttgagcctgagaagtggagattgcaattgagctaggatcaggccactgcactccagcctgggtaacagacgctgtctcaaaaaaaaggccaagagaaagtaagggagacag

SEQ ID NO: 14027 - DNA, 3301 bp, Homo sapiens
aagacttaggggccacttataaatcaagaagacgtgatgatttttttcttttaatctcttttaatgaaggcatgcttgttttttaatcttaaaggagtaaaattctttttacctgataagtgaggacagggtgtggagaaaacatattaattacctcatatctaaagtgaaaatttttgcaaatccgtacttgataggattatgatattacaggagctggtatgtgatgccattctttctttttttttaccccgcaaccactcaccttcacagtagtgataccatttcttaacctggaggatacatggcatcatttttataaaatatgttagtaaacctttttgtaagccttaaatgttatgtgtatttttaaaagcttaagagatttcaaaccttatattcagaattgacacccatgagagtgttttgtggtatagggtggtaaacttgttctctaatcgtatattaattcctctaccagattgtatatttgaagccagtgtctttcctttttttgttttaagatagagcctcgctctgttgcccaggctgaagtgtagtggcacaatctcggctcactgcaacctctgcctcccaggttcaagtgattctcctgcctcagcctaccaagtagctgggattacaggtgtgtggcaccatgcccagctaatttttgtatttttagtagagacggcatttcaccatgttggccaggctggtctcgaactcctgacctcaggtgatgcacctgcctcggcctcctaaagtgctgggattacaggcatgagccaccgcacccggcctgccagtgtctttttaatacacatgtgtgttggtatttttaaattgttacagtatctagcatattgcttactctgaatattcagtactttttgaataagcaaatattgcttccttgcttggaatcatcagagtttaaagtagcttcgtggatggaccatgatcctaagatgagttttaattttgtgtttacagtcatctcttgtacaacgtggagaagaaaagatatacttactactttgcttcaggtacacataagaaaacctcttttttaaaaaaatttttatttttttacataatagagacaggggctcgctgtagcttccaggctggcctcaaactcctgggctcaagcaatcctcctgtcttggcctcccaaagtgttgggatttcaggtatgagacaccacacctgcccatttttgtttggttttttaatgggcaggttcttgctctcccaggctggagtgcagtggtgtaatcacagctcactgcagtctcgaactcctggactcaagcagtcctcccacctcagcctcctaaagcactgggattacaggcttgaggcactgcacctggccctgaccattttttaaaaaggttaggcttagtgcaaagtttaaaattatatgattcttaaaatactgaattagtttctaaactaaactagaggtataggtggacctgcttgaggtatctttgtttttatggaacatttttattacatgcctttataatttttcattgttcacaccctgtactgaaacctttttctcaaataccaactcttggctatgttaaatttgtagactttaaaagatgttatctaaattaatggtttaaatatacaaattgaaaatattttctttttagtggcaattttaaaagcaggccttaatatgggacctgcttttaaagtaaaatatgtggtactatgaattactaaattgctatataccatgtaatagtgagtatagctaatatttagtatgccttttaaaaattttggactgcttttcggttttaacaaattctccacatgtgaactactcaagaaattttccctttttaattgcctctatagcactcataagagctagggcattaggataaactagaatattttatgtttatgaatacttgtataaacttaaaagtgttttgatttcccacaatttcccaaaggaatgtttatttattaagagttgtgttgataatttaactgttacaatttcagcagttgaattcagtgaacactggttgaggagtgcctatttctaagcactgggtgtaagaagaaaagacacttgcaaaggaagagctaagattaacataatttctttggtttttctattgcttgttattattatgtaaaaactgggtggcagttcacaaggaagattgttgtaacagaagagtgacaaccaatagttttttgatcattaaatcaaattttgtaaacagtggcaggagcgtggacttaaaacaaggcttgcttatttggttttgtcaaagttttacgaaaatatatgatatatatttatactaaaactatataatccttagatttaggaaagcaatcagttaatgtctttagcacactaaagcagtattaaacacaggtacaagttggaaattgtagaaaactgaaagaaaacaagacaaaatgtctatggtagggaataaaagagtttaagatattatgtaaaattatgtgtattttcttctcttttacataaattgtttgtgaaaagtgtgctcaacttttttacaagagtgatattaacttggatttatttttcaatataatttggagaccctttgttatccaaataaaattgatgagtttctgtgcctgtaaaaaaaaaaaaaaaaaaaagaaaagaaaagacactgttgcatgccccagaaagcttgtggtgggtggtaagttctcacgagatttatttatctgagcaacattgggactgagggaacatctgaaagctaccatcttgaaaatttttgaggaagtgtttctgaaatatttaaaaatacttaagtcagtcattttgaacaaaagaaattgatacaataagtttttttttttaaggatgattgtctaattttgtaatatgttgttttttaaaaacctgtctgatggtgttttatacatttctaactttttacctgagttatctctttagtcttttggaaaataccctacacaatactaacctttaaaactatcaaatttttgttataagataaatgttatctttgtactagatagcaaccctttataaggttgtaaggtataataaactgcttatttttttacatacttcatatcaagcattttgcagtccaattatatagttgaggatggtgtattttgatatgtatgaagttaatattttcaagtaagcaatcagtctactaccatcagattataagcttttttgtaataataggtacataaaatgtgtatgaaaaatctacaataaacatgtttatctgat

SEQ ID NO: 14028 - DNA, 2680 bp, Homo sapiens
caccaataaagaggaaatatgaaaggattcttgaagatttccagttttgcaactgcataatagctatgcccaaggagtcaactattgtatatattgcagatttgcctttttaaaaaaatcactaattctacaatgtgccagatacatgtttcctatgcccaggaagttatgaagacttcaacaattaaactgaaaccaggggaagcttgcttagttttgggtttcattataaactcttagcctcagtccaggttaatctgaagtttgaaagctcagattaagcaagccatgccaagaaactggacgatgtgtaagcctagactctaaaattcaagatgtgtgaaataatataagtcaaaagcaagaaaaacgtaatcccgtctgaactcaagtagtcattcatataaatttgaacacacctgctgtgcctagacaagtgtctttctgtaagagctgtaactctgagatgtgctaaataaaccctctttctcaaattcgtaattctccaactgttgacattttaatcacatgaaaagttatcagatttttgaggagaaatattttcatgatgtcacaagatccaatatatcttatgataaaatttattgaaaagtcagtttatttaaataatgaataattggctaacagctctggaaacaatgagatcaaatgagaaagattcaaattgtttgttattttctgtattttcagtcaaaaaatcagttatatagtgattttaaagcagattaatggaaaaaaattcatgtaacaattacctgaaaatttataacctattcctaatcaaacccaattatatcagaatacctttctgaatttgagatttttgctctacattttataatgaataaggctattttttgaaagtatttcattttgaattctgtcattaacctcaaaagctttctactgctttgcggtgaaggcaaaatattcgataactcaacttaggccccactgttccccaacttcatggaggccagaagactttactttgttccataatgaaatataaacacagaacaaagttgtaaaagtagcatggatatgttgaaactttggacaagcttcttgtcctttggaatatgggatttatattcatctcctcaatatcccatgtatgcacagaaacttcagttctatttctatagacacaggaacctagtgactattgaacgtaattgtaataaaatgctgctcattgagccaaagagaagaaatgatttattaacatggggacaccaagaaaaacaaagtatgcttttattccctttgtcaagctcagttttagggttttttcttttttttatagtgacaatccatagatatagacattcctaaaagaaaaataattcagtagatatatgtcactgttacctgaatatggaatgaatttgatgttttttattttgttgagacagggtcttgctctgtcacccagactggagtgcagtggcatgatcacacctcactgcagccttggcctctcaggctcgtgatcctcctgcctcaacctcgcaagtagcttgggactacaggcgtgtgccaccagtcctggctaattttttgtagatataaggtctcatgatattgcccaggctgaatttgatgttatttcaagttgattttcatgtgtttgggagcttgtcttgttctcaactactacgcaggtagacagtcttcccccagagactcattagattgcaatatagaggcactttctcatttccctattgttcctaatacagaattgtagagctggagagtaccttcagttttctaaatctattctcaaacaggatatcactaacctctttagaatcattcctcagtatacatcaatttattgagaactgcctaatactcaagaaattaaatcctgagttcagtaggctgtgttccaagcaggaattattttcacttaccaaaatatctcctattacctcaaggtatccttgttgaggaatgctgaaaactaaattttaagtatcaagtctagaccatagagtgctttggtgggagtattttgattacctcctacccatcagaagcaggcagctaatattgtgaactgagtatttttgtcaaaagtcacagggaagagactacagaagaatgagaagggtcaaaaggacctagtgtggcttactacatggatcttgtctcttggaggtctgtcgtagaagaagaaacaaatagaggtgatgaagacacagaacaggctcagtcagcatcctcacccagagatggcaacatctattaagaccaatgcaataccttttcatcttcagcaaatgttgtttcatctgtttttgatccttggcattgtcaaaaacttaactgcaggtccagtgtatatttttccttatttttcccttttagctatctgctaaagtgagtaaatgccacaactgtacttttccaaagaaaaagaactattgacaacttatagcctgtcatgcaggtcatgtttcaaatcaaggctgaaattttcaacagctgtgggaaaaactaaaacacagaaatactgtacagtattagtgtttttttaaagaaattgttagtgcattattgagtatactaaatatctgtgattaaataaattagttctaacttttgattttgggagcccaaaataaagggagtgttgttttcatggtta

SEQ ID NO: 14029 - DNA, 626 bp, Homo sapiens
gttgctgaattcctgggactcttaactgatattgcatactacacagaagcttcaaattcctcatgttttaaatgagcactagagggaggtttatcacctttttggttaccagatgataatctatatttgttattactcagtgactctctaatttcacatcagcatgttcagcttgtgctagtcatcattctgatttgcttatctgtttttggtcaaaatatttatttttaaacatgttagaacttaccaaaatgaaagcaacagtgatgtattgaaatcttagttttgatattttaaagaaatgactttctagattaaaaaaatagttttgtagcattttaaacttagtgactatttagttcaattgttcatccattttttatttgcttttataattgcctccttgttttggtatattgtaaaataatttaaataatgtatttataaatatgtataattatgatgtaaaataccgtgtgtatatgtatgtatgtgtgtttctgtatatgcacacacataaacggctttgcctagccaaggattttttttatctgtataaaactttttgtataaagtttgctttcaataacagtaatgtataataaaaccatgtaaagttttgttgt

SEQ ID NO: 14030 - DNA, 3045 bp, Homo sapiens
tgcattgattaaagtttaatagttatcaaaatcacctaatttttaaaaatagctttcgttttgagttctggaaagaaaactgtcaaaatcagtatatactattagttatatttaaaaatatttttttaaattctttacagataatattatacttgttacccttcacaataccacatgagaaaatatctgagacaaaatgtatacaaatatattccttatggcataatttattgcatttctgactgaaatcaaaattctgatttgatggcaattgaattttcattttacaatagataaatgcttgtgctacctaaagcacttagcacacagttaaattatatttacatcctagacccaaataaataggattgtgtgtatatttgggatatctattgaagaaaaaaagaaaaccccttaaagataatgtacatgcttcatgtcatgtctttaaaataatttaatcaactttattgtcttagtatttagactctggataactctacaataatgaggaaattcttaagaataacaaaatcactgtaccttcctctcaattttgctgtgaacctgaaatggctttaaattaatactcttattttttatttaatttaattacataaattaaaccttaccatgaccaaattgtgttaggacggcctgctatctacagcacagtgtgtcatttgcagatttgtggttacctataccacgctaggtgttttgacatgtttagtgtttctgctttacagtgctgaattccatattttagaagctatgaaagtccttttatgaaaaagttactgattgcttctcagttattaggaaaacagttgtttcacaattattatgtagatatgatgcccaaatatcatttttagtatatcttgtcgatctttaagttgttactattgtgttattcatgtctttaaatcagataccaaatattttttaggaaagaaaaatgttattactgtcattaggttgtcttttaatactttaagttattttgacgaaaagtaatagagaaaatttacttagcattttagattctagagacatggaaatgaaaattattttatgtctagagtaggtcctgaagtttggctttacattaagtttagcactgtatcagaatgaagaaactaatattttacataaaaactaatactttcaattttttatatagtaatatccccattttgtaaatgttagacttttatcatacctgtaagttaaaatacttgttatcaataacttgtcatgttgtgacaaattgatcacttgtgtacgaaaaataaatctccttaaaaactaaataaaatgcactgtattcttacagttaatgtttataactatagtaaaaaattaatatatatcctattacataaatgttatttcttaggtgttccattaagaagagcaatagaataatgctaaaaaataatgcctataaatcttcagagtataaagacatccattcagaaacaaaaattagcactaaattttttataaaatagaccagatgacaaaatttattttatttttaaacagtggttttgacacaaattatgttattgaaaagcattattaatgtttaatttatttaaaattttggaatttgccatttctcagagaatgatcaggccttaggaaattaatacagtagtagtaatcattttctaggggaaaataaaagaataaatcactatactgatattttgatacaagcaagcacttacatggtaatcactatatagatccaacctgtggattttcttcttatgtccatttaactagaatatattattttaggtataatttacaaatgtcacacctaataatcttttataatataccatatttcattaaagttttgttagagaagtatctaccacagaggagtttttgtcattgtgtacgttgtgtatttgaacccaccatgacagaaagtaaattttaggaaatagttatgagattaagggaaaatctataaaaacaaggttagcatattctcaacacagataccaccactttctttttcccattatagacatggtgaatccacacagcatacttcatctctgagctttgttgtgattcctcaacacattaccctaaccagccagcagtaacagatttcagagtaagataaagcagattctgtcttcattgcaaaaagttattctcaatggaagaatggcatctgatctcataattactagtttatattaatatagtttttttctccctttttaataaaataattacagtcatccctcagtgtctgtgggggattggttccagttacccctatagataccaaaatctgcagatgctcaagtccctgatataaactggcatagtagttgcatataatctatgcacatcctcctgtatacattaagtcatctctagattatttataacacttaatacaatgtaaatgctatgtagttgttataccatactggttagtgaataattacatgaaaaaaaagagtctgtacatcttcagagtttcagtcggcaatttcttggccatggatgtagaacctacagataaggtgagccaactgcattaggaaataactctaataattctgttaattcttagagaggaaaactttcaaaatcttcctcaggtatttattacaactgcctttaccattttagttgtaacacagtttaaattgttatgataacaagtaaataagagcaaagaatgtatttcttaattcaaaactatacgtttgaattcaatatggtataacttaaagtggtataatacatacaatgcatgaatcataatggattcttttataagttattaatttttatggtttaatcagtctaattgttttgactgttatagaaaccaaatattttactgtttcttttaaggactaatattgtcaaaaactgctgttattaacttcacttgagttgtttaacttccttctgttttaagattgtaattaaaaattactattttgttatatggaatggttaatttttacctaataaaaacatagatgaaatacattg

SEQ ID NO: 14031 - DNA, 11377 bp, Homo sapiens
aatttttcatcacttgcacacttgataaatattttgatgagatatcatccaagtattgaggataagaagagatgcaacatactacttttgtgtcacaatttatttttatcaccctctctagggtaacgtgtatattttggtggagatttttaaaagctcagcatgagcaatcattccattcggttttaaattatcctgtatatacctaattatgtgcactggagagtaatttattcttcattatcatttgtaaacattgttttttcacatttttgtagttgtccataatgtaagcttgtggtttgattattgtttccacactgatcagctgtttaatctatttgggaaatgaagatgcacatcttaaagtatgaaaaattttcactaagtattacaatgtctagttccaactttgcatactataacagaggaagaacatgttgcgattgaattctaacctctttgactccgaagatgaatgaagtgtataactgtctctatttgatctattttttttacctgtttatcacatttgtgaaggtgaaattattcatggagtgaataagaaagatatgaagcagaactgttctattcgggaagctattagacttctcatttattttcattaagctgatttgcagctacttattctcatggtcttaaattaaattattcaagtatttttaaatatccaatttgttgtgattttcagcacctgggaagtaatcccaataatactttagaaaatctaagacagttctttctgctactgatgacactcattgtcataataaaacaaataatttcctcaaataacaaagaaaaatgatacctataaatatatttataaatggtgtcatttatgaacaatgtttaattatgtatcaatttaagatttttttctgaagccctaatatttaaaatggtcttattttaccatatggatataagatttggctcataatgatgagccctatcatttgatttgagttctatcatttaagagagcctaaataaaattatcatcaaggtattaaatataagacgttaaatataataaagtggggatatatagaaaacacacagtgttagcacacagtaagatctcaatgcacatttgttggatgaataaataaatgcaattgaattcccagaaaaatgattgtttcaaggaagtgacagttctactttagaagtactaattggagatgacttttatatcccattttggtaattattcatacatagcacatatgaccatgatgttcagggctttatagaaccaaataaacctaccattacatgaaaattttgaagagtatattcctgaacttgcagctgcctatagcattctcctccataaggctagaggagagctggatataagcagagatcgtaggtgaaaaaagatgggccattaaggattcttcaaggaaaacattcctcaaaatgatctttagtgcctttattcctttcaggccaataatccacccaaaaattagaatgttctgagacatccatttgggtctatttgtgacttattcgtattacaaattgacatcagcaaaattcaaaaagaattcagtaaaaagggcatagatccagctatccagactatcttgtgagagaataagctcaccccagcaccagaaagatttgagcagaggaatattcctgtaatgaatagaggattgtttgattctcaggtatatttcttaagccaagattgaatgcagtgtcaggcactgccttaacacccacagagataagatgaacaaggtactatcactgcctaaaatgagcttacaattaagtggatagacatataaaagcttcctttcaattcagcctgagactgtttatatgcatgtgctactccgaatgacgtttgtatgggtcaatgctgatttaatggggaaaaaaagtagaaaatttccccaattgcttagctgtttgacatgtttctgagctgcaaactttgtcaactcttttgacccaacatattattctctccgtattatctcttctaaccacaatgcattaagaaataatatttttatgtggatgtcctcctcaataagtaaagatctccatccatatttaattaattggtaagacagtcaaattcatacatttacatttactttgtcaaattttttggtctataaaaagcatagagatctaaagaggatacactgctaacaagtttagaaagcacctgcttttttttattattattatttttgtgatagagtcttgctctgtcgcccaggccggagtgcagtggtgcagtctcggctcactgcaacctcggcctcccaggttcaagtgattctcctgtatcagcctcccgagtagctaggattacaggcgtgtaccactatgcctggctagtttttgtatttttagtagagatgggtttcactgtgttggccaggctggtcttgaactcctgacctcaaatgatccacttgcctcagcctcccaaagtgctgggattacaggtatgagccactgtgtctggcccacctgttttttttgaaggcagaaaaacattcaatattaaaagcattcaatattatttcaacctgccttggctctagtgaatgttcatgatttgaaagaactgaaagacctaaaggcagtgtctctattgttgactacaaatgtaggctctttgttggactatgactataatcacacactgataatatgacgcaagtagaggcagtactactaagtatctagcaggtgctttgaaaccccattactaagtcccagaagactgtttcctaaatttgaagtggaagaattaaatgactcaatggaaccctttagctgtgggtccattgatgtgtgagttttagagctggaaggaattataattttgttgtttataattgctataatatagaaattataattgcttttctttctacttatgagttaactagatccagagatatttattcaagacacacattcacacacacatacacacacacacacacacaccccacagctagtgacaatagttaagatttggatttaaggatcctatctttctttatcccactttcttttcaatcgcattcataacttattatagaattatgtctcaatttttacaaatgtgaatgtcttattggtatttttagggcctatagaatggtacacctcatgtagaagaacttcgacttttgaaggtatacaataaataaaacatcaaacttgttagcattcgttctggtttaaatattttaggagttgagttcagcagaaggaaatgggctatcactacatttaagtgaaatacaaccctcaagaaagtgtatggttcacagccactcctttaataaatcctgtgggttgcaattctttgtaagaaactcatgaaaaagatatattgattcaacaaaattggtttgctgttgattatacaaaccaataattatgcctagaattaaattgtggacacaaaaaagggaacagaccatttaaaatgttttatttcaaaatatcgaaaagctattaccttcaatactctaaatatttaaatattaattattgtagacatcagtaagaataaataaatgttaatcattatagaccttactaataagaatatatactgaattgtccacatccagagtattacaccctgaacaagaaagacatgagagcctgacagtcatatatattatgacagctgtatatctgacaatatgaagtagaaactgaaaaaaaaaatcatcttagtgggaaacaaatacatgcttaaaattgttatatttactgtaaaactcctgataatcttagattgtgcagaaatgtttcttattttgaggggcttagaaagctcagcgcatttgatgtataaagcaacagaatatttaggaattatttgcggaggctttaaattcttacctccaattggaggttaaatattaaaagaataggaaactatgcctctgatattttttttgtcagcctatttttaaactagattccatgagtcttaaggtaatatcctagaattttttttttgcgtgaattaaagttaccacaaatttcaggtccttaccttatgactgtgtttgatcatatctttgagttcccttgaactctgatctcattttgagaaacattttgagaaacttcttaacaattacaatcgagctgttaaatataacaaacatcagaatctaaaggataagcacagtgcctaatgtacaggagggtcatatcaaatacttgttgaataaatacatgaatgtgataagtggtcctgtaaaatattttttaagagtagtgacaatgtttattggtaccaattggagatgatattttatatttattttgttagtttgtcacctggatgcaaaaggaaggcattttaattcctttctatcttacaacattgtaaagcatcaaaagaagtaacatctcaagaaagattagaaaggatttggatcacgttaacattctatgcaaatattagtaacatatcaactgtttctaaaaggaaagaaaattagtatttaaggagagtataaagtgcgagcactgtgaagggcagatatctattaccaaaccacatggagagaaatatagtctctctcctaacttcattccattgtattgcaatcagtcaattaaggtgattttttttttctggatgtctcaatctagagattttgtagcattttgcaaatgggtatgcttcactactatccacagtgttctcccctttagtaattcatattgaatatatccatattcatatgcattttataaaacagttaacagaatctaaataagatatagccggctaaatctggaatgtgagtgctaccctaggttattagttcaacaaactaattttgagagagccacttaacctctctggaccttgtttgtaagctttcttctagcactattactcttatctaagatcgaaattgatatatgcatgaaattcctaatggaatttcaatgtccatctcaaagtaattttttaggatattccatacagatttccttctcatttctctgtgtagatatttaaagtatgaaattgattatttaaactaatatgtggaaagaacctaatccagagcttggaatatagaaagtgctcaattaactgacattcctcctgtatttcctccctccccttagttgtctatgacttttgaactcactgctcactgacatcttaattgcctgcagaaaaatcaatcatattttaggcattattttgaaatattttagagttttctgtactattcaaactcttattacaaaaatctaaagatatttattgatgcaaaaaatttagggagtcattggaaatacctgaggcaatcccaggctaacaataaaatagcataattttaagtaagctagattgagttcatttgaacatttagttattttttagctcatagttaacatatgtccatgcatttgatttactttaaaaatattttatttaaaaataacctctcaaacaccagttgctttctgtcagttttactcaaagcatgcttcctaggtcacctgacctagaatcaccagaagtgttaacaataccgatttctgggctttgagccatgaaattagaatttcttcaaataatccatgcccccccgtcacccaaaaaaagagcatgcttttaatacatttccaaaattatcctgtttctgctataactggtgaaccatcctgtcctaaactagcagttctcaaacatgcatatgcctttgaaacttcctagatcatctacataaaaatcatttgaaatattgttaataatacacagcttctgaatctctgggtgtgagatgggaccaggaatcttattttaaaaatctccccagatggttctggtgtcctgctagttttgaggttttcatcccacctgtttagatgggtagtattctattaaatatgaggtattacctttctttagttcacctggaatcttcttaaatatatcggtaaagtattctacttcaaaatccaagacattttgtatacctaattatttcacacaagagcgtggaactcaccagtcttgtgacttggggcaggttatttatagtctccagacactttttccagttgcgagttgcttatagtagttcgcgaacctgaatgcacattagaaccatctggagaggctttaaaattgcagatgtccaaaccccacctccagagagctgatctatttagtttgaggaagagcccagaagtctaacaggtgtaaatgttccacaggtaatactaatgcaggcatacctcaggaaatcaccagttctcgtcttggaggaactattaggaaaataaaagattatatatcttgaaaaaaatctctaatttgctttctaggttctaactgcatgtttatattttgcaacaggaaagactggtctagacaattactaggatatatgcttctgtgatctgcttttctattgtatgtgtttaagagaccacattcttgggttccaaagtctccttgtctgataggtaatttgcaattgagatatggcaaagaattgtagcatccaaatttttgacaactacagatttagaattgaatccaaggtctgccattcactagctatgtgcaagttactcaacttctcttatcctcagattttgcagctgtaaagcagaggtagcatatttctgagaaattatattcaggtgactagatatgtgttcaagtgttatcttttattcttataaaagataattgtgaggaatccagtgctattttcacaattttaattctaaaactctgaagacattaaacaggcagtttgtaggaatcattgaaattttatacaagccgaaggaacaacattcagcaaaacggaaacaaataaatacagcatggaagcatatattcatgtttcccataattactaagttacggaaggggtgtgaggagctggcagtggtggtgaataggcattgtttgcattactaaatatatataccatttcttaagataattggaactcaagcagtcctaattttctctccctgttatgagcaatcagtaaatttgtagtcaatttaacttattatcagttggtatagcgcatgtcacagaataggatagcaagaagattctcagagatcattttctggtaaagaaaaaggcctagcaatatttaacagtttgacttaatccatcacttcagctggtccactagttttgacacaggactagttaatgatttgttaggaagtctccatctactcttaaactaatttaaaaaaaagctaaaagttgcttttaatatgttagggtataacttcaataaacaggagtatttatctagtggttcagaaataaaataattgttagccagcctgtgattaaggctaccataattgcataataaatagctttgacgtgaataatctcagttgttcaagtgtacaaatttaaagctgtactatgttagaataaaaaagtaggctcaaggaaaatttctatttttctatatgaaaaagagaatgatattcaaaatagtatttttaagtagtttctaattgtgttcctttaaagagtattagaaatgtctgttatgtcagtaacattagaaaacttcaaaaactgatttatttttctgagttctctggaaaccaaacaattttgaattagttgtgtaagtaaagtaagttaagttatagcttgctggaattttattgtggaaaacaaatatagattttatctgaaaaattttaagggccaattctacagaaagttatgctaacatgctaactttccacacatggctgcattccattttgattaatgagggttcaggaaatagaaaggcagtctctgcagaagcagtatccaaaggctaaattaacaacccaggactaccactcattatgtgagaaatatgggccagagttacaatatcacatctccagtctcagattggcctcattagccaccttcagttccttaaatgagataatcctgaagatgccatccttgtccaaggtgagattgccagaggatatgagctcatctaggatggaatacatgtctccagggactgtaatgagatcaggcttttcatttactggttttctgcctcaagagtccttaagcaaatgaagattatctgattgtctatgtaaacctggaagtagtctactttttagataaaagataatctatcttgaatatttcatatgtgattttaaaataattaatcaaaaaacaaagactatcatatttgagaacaagattttacttagaagggaaaaaaaagaactttcagcttaatcggggttaagggagtaattgtgacaatataaaatggcattgttatagaatccctaaaaggtaaataatgtatgagatgaaggtaggaagtaatgtgtgcttgcagaaatgcaactggtcaaaattacttgaatgaaattgttgaggttaaacatcttcattataataatatgtcttattctgattccaagacaatacgaatgtagagaagagatttttaaatggaaaaagtaaggagctaacaagtctgtacctagattcaagttcacaaagcggcaaaaaggagaaaagtgtcaacaagaaacaagaagaggagtagtaaactaaggatcaaagcccaagttccagttttcacaatctgctgtataattcactaacatttctgagccatagatttttaatctgtaaaaggagtgtgatggactgtacattagaagtacctgagaagctcttaataaatcttgatgaattggttagaaattctaatttaattagcctggcacagtgcacaaactgccatatattcgtgcagatgttttcttcttttcttactgcgcatttccatgtggccatgtcactacaaggggtggggaagaagttaatgtgtaattgcttcaggagctctgaataaaaggttgctgaagcaaaatactgcaatgaagttctgaaaatgaagagttaggactttacatgatttctcttgcctcattccctcaagaatgcacatatagacacacatatgccaatatcttttttatgtagttcaagtataactttgaataaaatgacttacattcaaggaaggtcaaaactattattctgaaacaaaatgtgacaattctagccattatgtgaattgtaagggtcagtaatccataaattatttggatggtaattgtatgttttattaatgtgatgtaattttgcactattgtattgtcatatttaatcaaactcttaaaaataccctgaaacataatgccaaatgtacagtttataggttcgtgttatttctgataagaatttaattgcattgtgctaatagttgtttattgctattaactttctgtgtatgtattattgcgatgcagacccaatagggttattttaagcacactaattagtcatctggatttttatagataaaatcacatgttgatcagaaatcatttttctacttatttttttgtagagtatttttccacacttgaaaaaaacatgattattttatatcaaacatcaacttttctttaaatcttattttagtagctaatgcatgtttgaaataagatgtgttagaaattatatgactatattaaggttgtgtttatattaggtgaaaaattgcatgcaattggtgaatcatgcagctttggggacatttacactgccactcacacacaggctctgtctcaatccgtatgcatgattcacgtcctttcaaaagtcccttttcaacatttggtaaagtgaaaatgttattcatagtgctaatgagccaataaacaatgctgcgtttcttttttctaactgcagcatattgtggtaaattttctcccaaaactttatttttggagttattgttggcaataaatacaacaaattatttgttggcaagtgatacaatttactgtataacaacttaatagtacaaagcatgaagatgtgaaaatatcatcttaaccagtttcattctatgaacataatattctggcagctttttctataactgagaatggtatatctttttatacactgcctaaatcagtactactgccagtcacctgaggtcaggtctgcacaacactaaattgggcaataacatagaacatctaggcagtcttgacagtcaaccagtgtaatcactaggggaagaaaaagtaggcctacccttttacttattaacttaagtaataaaaattgtataaaaatatgaatgttggctgcagaggagcctttacatgcagataatttgaagcagtctttgaaaataacaaaaattattccatttaatgaagggtttgttttgtttagcttttctcttttattcagaaaacatacctgtgcttttgaaagggcttaatcccaaacaggtaatatgtgtggatcaatcatctctcctcccatgaaattaatcattcatggtaatatattaaggctggaacgtagctcttagtgacttaaaacatgacagtaagcatttacactgttggaaggtaatttcattgctatgttattaaaatgatgggaatcctatttatacatttatttatttatttatttacagaagattggttccttccagttcaatttaacagcttcagtgaagttagtataatgataagaaaaattgactgtagctattattccaagtgaaaatcatgcagctgagtcctgctgcatcctgggagcaaagcattaattcaaatgaggagtagtcagtcctagcactgtagacgccgactttaccaaccaagatagtgtatgtgtgtgacattcagctaacattgatctaggcacttagtttgctaccacattgttcccttcattgattgaaactgtaaataacataacactttaaggcagctaagcaaatattttaataagccatgaaaggcaagatgccagagaaaatctgtatattcagctatttggagaactcgtgttttccacaaattaaactggagatgtcatttgaaattttcttcccttaaacatgctgtcacaacatggattccttctcatggatgtctttctaggcttataaatatatggtgtgattgctataattttgtgaaattttattcagcaattaatagtgatttcagcaatatgtactaagattccaaggcagaaataaatgtataaaggatttgagcctgtatgtgtaagaagaaactctctcttcagtcatatttcctaaattcagtgtaagtacctcgctgatttagcactggagttattccttgaatgtgtaaataatgatgttctattctgacctaatgaattcctgtaatgtgaatatttaaaataaaagaattcaatttaaatgta

SEQ ID NO: 14032 - DNA, 1773 bp, Homo sapiens
tgatcttaatttacatttgtcatatagtaagcattttcccccaaggttgaaggtgagtggtcacaaaaaagtagtcactatacaactcccctctccctgcaaaaaccacctcatacacacacaattcagttaaaacagtagtattgtattaaatgtaaatcttaaaaagatgtgaatttttgtaaattgggttcttcatggaagtttttttccacctgattttcacacaaatactatatgaaatttttcacattattttcacataattttaaaaattacatatttcaggtttgttctctttccaaatgttgaatgaaaaacaaattttccaatccatttatccctggggaaggattcatttgttgcgagtgccagtatacttaaatgtatactttatatacatttaagcagaaatttaaaatgtggtcttttttttttaaaagaaacacttctgtgtcagaaatgaaaataaatcatgttttttatttttaaatagaaagcacttcaaaactaaaatacagaaatttacaaaaaagaaaaattattactaagcccttgctcttatttttggcagaataaacattgattttggttggggctgcaaggatgcctttacaggtgcacaagaacgctagagtggcccatgcattgctgtgttctcttctaaaacaagctactaacaagagagagaacacatgcaatttattaccagtaagcataagtcatatttaacattggaataactaagcattttatacaaagatttttctttgacccagtttgcatttgtacattttatttttttagttcaacagctgctctgtcacataatactttgtaaatactagtgtgaaaaacagataggatgccttttccagtggtaggagcatctgtaagtgcatttaaatcattagaagcttttttccaaaactagaaacccttattaaaaaatagacatttttttctaaagattattagttaaaaataactaaaagagttccttagagtaatcatttcaaccaaatgaatttcaagcaacaacttacttactatttatcaaaaagggatttaattattttgaatataattataaattaaatttcaaatatttaaaaatactattttatataattccttatgacattttaaactttatattttaaaatatttgaatacgaaaagatcagtctacctctactccattctagacaaagtattaatccttagtgaaagtaattaattaaattgccaacttggcattattattaaacttgataggaacgcaacattaaatttaaaaatgttttcccgtgggtaattttctattatatattttcatatgggcaaagggaaaaaatgataaatcctctgtaatcacaaaccccaatttcgttttgtttattcagcttctaaaatattgaacacccagacttttaattcaacctttaagaaccttatcatttatgtttcagtagatatcaaagtaatccatgtttgtgtcaaatgatcatagaaaataaatagaagagacagtgaagcaagtaaaaagaaaagcattgttttaatttgtttgcattaatttttttcatttgtcaaaatgcttcttttgttgccacagtaaagaacagtttttattgttttgtaagtaaaattacgtagctgattttgtatgtaaagattaatttccataataaaaattattgtatgtttactgtgatcttaatgggcagggttaagaaagttatttaaaataaagttacctattctactaaa

SEQ ID NO: 14033 - DNA, 864 bp, Homo sapiens
gagacagtccttgcccacctaaaatccattttgccttcgttgtcactaaagccagaactcagttgcggtcttatttttgacttaagttttagaaaatattcatgtagtttagagtggaaaagtttttgcacacattttgatcgaactatattctaagcacacaaaaagcacagtagaacagaaatgaatatatgctaaatcacaaagacaactctccttgcaaaatactgcactctgctgttagaagcagaggaaaatatctcttcataatcaaatatatgacatatacctaggagctgtggatgtaattactgaagaatgaggtttttcatacctgaagagtaaaagaaaaactaagagatcaaactgagaggtatacatgaggctagtgtttgcattcctggttatatgtaatgtgataaattagctatgaatggtaaaagaacaaaactgatcagagtaaattcattagcaattatcacatttaagaattgttatcatttaaaaatcatcctttttttcacacatactgactgtagaattaaaaaacaaagctacaatttgccctcatacacactgcttccacagcttgctagttctgtgtttactcaatggaatatgagaactgaggacattatggctctcataatctgcataggtataaagaggatcatttctacctagggatagccaaagcatgggtttcaacacgttttgtattaaatatattttcaaagtccacagtgatttttctaaacgcttacagattccatgaaataaaagtctattctttcaagtggagctaaccaggataatctttgtccccaaaggcaaacctttaaaataaatagatcattaaatctt

SEQ ID NO: 14034 - DNA, 1101 bp, Homo sapiens
aaagccaagccatcatgaacaggaggaaaacatagctctgactgttggatactgggcatgaaaagactcagtgctccatgcttccttgtcttgctttataggtcttatattcggataaatttaagcaaaaaatgaacaattttctaaaatacgttattgaaaactcgtcacccttctcagtgtatgtcaacattcaatatgtatgacttttattgtggtatagcttagtgccaatttaaggtatattgtgttccatgggtctttagagcattctttgtacactttttctaatcagcactgtcttaagacaacataacactgttagtaaggcaatttattggacacaatggcatcgatgatcttaaaaatatatatattctgtacttaatccctttattatttaaagccgggcttgtaatttttctttttaaaatttaacattatgcagccctgctcagtagagactcactcagcattatgacatcataaatttttaaatgccatattttattcaaggtgatacgaataataatagacatacactggaacagcagttgttgaaatacccagatttttcaccttggttactctgaccttgggtcagaacctaactttacagtgcttcagttttcccaccttttaaggaggataattactgatttccacgttaatttaaaagaacattatgaggattaggcgaacactttgtaatactttgcccaagaaaaagaaaaatgttgttactgaaattataaggtattttattgtctttagaaccttgtaattgaacagggagattatttttgaagtttaaaaattactagatagaatttggaaacatgttgtggaataaatgattctaaaaagcatgtgaaagagacacacaatgaggaaatagggagtttctcaaaatctaaacttgtacaggtatctaaacttgcctcaagtaactctcagatgtcttatttaaaatcatttagtgaaaaatgacatttaaagctaaaaaataatttagttgtactaattatggtaccataaagtgctttgacataaatttgaacctagaattggcagttctaataaaagtttttccactttgtt

SEQ ID NO: 14035 - DNA, 2584 bp, Homo sapiens
actcgagctgggggaggggcagagcgcggggctccccctccccttcggtccttggccctttcccggccctcttgttccctctctaacttctgattgttcttttatttttaattattatttccccgtcccttaaaaagacaaaaaaaataaggcaaaaggaaagcaactaagacactggactatcctttaaaggtagcaggtgtaatgatgtgttttgacctttgcaggcgagtaaccaggcaatggagtggagtgtctcctggagagagtgaggagagtgtgtgatagctagaaagagagagagacagagagatggcaagcactgagataaatacctggcaaaactaaataaattaccaaaaaggaaaaaaaatccaccaaaccatgataaacacaaaatgcagcttcctgatgcttagagttggcacatgctgctgtgtttatttattgtggattcccatcaggaaagaggaaaaaatacacatgttctttcatataggcaaaatttaaccacataaatttgcactgcaagaaaattgaagtttacgtgaacaaattcatgagcatattttctctttctccccaccgttaatttgggagttgccgttttgggggattttgttttgctttgctttattcatcggagagagttgaagccagctcttggccactctccatttctaatgttcttgtgttgccccttcttcgtactgtttgtgaactttggttaccttcacattccccttacgagggtgtaacatctatttgttcctcttaccaaagcaaaaggattggcttcatacaaaatagacaattctctgatttcaggaaatgtgcatggtctacccgctttatcgaaggcaagaatccggtttggaatataaaaataagcattggttgttcttaccagccacaaagtaaacttcattttcaggcagtgtttctgggggaggttatggagggaagaaaaaagaaaaatcgatagtgagtgactgattgcttcattttatcaggcgggcccattgtgaaagagctcaggggaaatgtggaggttaaatatatttccagagttgtccagcagaaagaaagtggcactttgaagagaactagggaagtacatatcttcagatatccctatatagttctctaccttcagttttagtaacaattatgaagaattatttgtgctgacagcagcagttaaactttgtttctctaatagctttttttttacataaaaaaagacccaggaacttaatagtgtatgcataagactgtgttttttagcacacagatacccacagcatacactgacgatctccacgcagtagacaggttttgtcttcactagctcatttgtttatcaagtcatatttagggtcccacaccctcttttcctgtaatttattgcagaatacaccactttgacttggacagctttctgccccctctttcactaaggaaggcaaatgaagtgaaaaaaaaaaatgccattttcaatccttcctttctcccctttgttaatagttttaagtgaatttttgaccttatcttaatggaaaacggttaactccaaacacaaaagactctactggaaagtgtaggtgaaaaaacttgtaactgtattgaaaataaataccattaaactgtgatcagttaaaatttaaaagaaaaatcagcacaaaagggcgctaaaagggaaaacactttttattaatcttaaaagtttgggggtttttttccagttaggtattagataaatttttattttaaaaaatgaaagtctcactaccataaaattatggttcagcatcagattagcattgcactcagtagtctttaaggttttaggaaatatgctttatattgtcttttcaaacacctgtgattgtttcattttccatgtttttgcaagataaatggtgacttataatgggcatatttatttgcctgtatttcatttcccccaatgaatgtcacaaggagatgggcacggagctgcttcgggtgcatcacgctgctcgttcctgaggtatgggaactggcctttagtgaagctatccagagcagggcaaatagccactggtaaagggaggaaatgaatttccagatacttattaccaagtaggtaaggtcagaagctggagttcagagaatgtgtctacagcttctctgactcttataggtttactaagatgaaagttaccactgaaccttaccactatgtatatatgtttaatatctgtcttttgaaatgcagaaatagtttaaatgtttctttgtctatttttctttttttttaatgctacccagggaaatattttcatatcatttttaagtggcctgcctcaatgtatatttatttcttttgaaacaaaaaggttctggaaactgtttttctgtagctttaaatgaataggtgagcaaaatctatatgggatgtaatttttttgttcagtctcttaaaaaatactttgttttggtacatttggttgtgcttgtggggaaaataaaaacgcagagatccttatatatttatgttaaagtaatattttattatctacataaaacagaaatgcacaat

SEQ ID NO: 14036 - DNA, 819 bp, Homo sapiens
cgagtcttcccgggaaggggcggggtgaggacagagaggagtcgagggtttattctcgcagtagaggaactcctggtggtgggaagagggacccaatggacaaaaccgtttttgtttttgagagggcgccagatttgaaacagtgagaggtcccacatctggtgctgaaactcagagcaacagttcagaggtggcgtaaatctggccacctggagagctcgagtgccaccagtacctccgcaccccgggcctctggacttcttggatgagctcaccctgaaccgcccaggcggtctgctcttggtgttcagaatcacatcaatgcgaacgtcacagcgccttcgagggcgcagattttaactgccacgtatttttaagttgtacttttctgtggaggaaattgtgccttttgaaacgacgttttgtgtgtgtatttcacgttagcatttcattgcataggcaaaacactagtcacaattgggtagatgtgacatccatatacttgtttacattttatctgttctcatgtcaaagactactccttgccccattgaatatatagtggtagcaggtgtacaaattggtcaagttgcaattatttatgagaaaataatgataaatgtaaaatatctaaagcatgaatctaagagcacgcaatatataattttaaagaaaatattctatttggtagaatacaaatgtggtgtgtgttgttttataatgactgctgtacagtgggtatagtattttggttttggttccagattgtgcaatctttaagaaaaataaagatacaaacgagagttttgttcacttagt

SEQ ID NO: 14037 - DNA, 560 bp, Homo sapiens
aggtccttctgtagtgccatggtagaagaattgaggatgtccctgaagtgccagcgtcggttaaaacataagccacaggccccagttattgtgaaaacagaagaagttatcaacatgcacacatttaacgacagaaggttgccaggtaaagaaaccatggcataaagctgggaggccaaacacccaagcacaaactgtcgtctttttccaaacaatttagccagaatgtttcctgtggaaatatgcaacctgtgcaaaataaaatgagttacctcatgccgctgtgtctatgaactagagactctgtgatctaagcagttgcaatgatcagacttgatttacaagcatcatggatcaaccaagttacacggggttacactgttaatcatgggttcctcccttcttctgagtgaatgttaacatgcgcattttgtggctgatttcaaatgcagtccagtgagaaattacaggttccttttgaagctcaactgttgccaggagatggaatatcaatgcccaacagggcaaccaataaaagtgtcactaagaatataaatatt

SEQ ID NO: 14038 - DNA, 4548 bp, Homo sapiens
caggtcttcttcatatgttctttcctttacccggttgcaaagtctacctcatgcaagtataggggaacagtatttcacaagcagtagctgacctgggattttaactactattggggaactgtgaattttttaaacagacaaatcactctaagcaaattacatttgagcagggtgtcatgttttatgttaattcagagaataagatactatgtctgtcaatatgtgcatgtgtgagagggagagagcctgagtctgtgtgtgtacatgaggatttttatataggaatgtagacacatatataaagaggctttgtctttatatatttgtgtatagatcaaagcacacaccctctctcatataattggatatttccaagaattgaaaacccatgtgaagcattatagatagttttaaatttaacccactggagttttcttgaaataccacttcttttatattatataaaactaaaaacacgactgttaccttttgtgtgaaccaaaggatacttcagatctcagagctgccaattatggggtactaaaggtttttaagacatccagttctcccgaatttgggattgcctctttttcttgaaatctctggagtagtaatttttttcccccttttttgaaggcagtaccttaacttcatatgcctctgactgccataagcttttttgattctgggataacataactccagaaaagacaatgaatgtgtaatttgggccgatatttcactgttttaaattctgtgtttaattgtaaaattagatgcctattaagagaaatgaaggggaggatcatcttagtggcttgttttcagtagtattttaatatcagcttcttgtaaccttttccatgttgtgagggttgtaagggattgtgtggcaacagcagcttcccttggctaactcaatcttctacccattgcttagagcagggagccctccttatttactactgaagaccttagagaactccaattgtttggcatatatttttggtggtggtttttattcctcctggagagttatctaatttgtttctaaaacaaacaagcagcaaagaaatgaattaaatactggggttgagaattaaaattaagtggatgttcacagttgcccaatatatatgacctgcaaatgatacgaaaaagtgcagcatttagtggcagttaacaagagtgacaagcctggggcagaggtaccaaacctctcccaccagagagctagaagtattttatacagtaactttgatcttatggaagtgaccttcaatgcttattctgaagtaacctatatggtggatacaggatgaacattcagtgccagggagaatcttctcaggttggttctcgttagagtgataaactggctaggggccatagtattggtcctgttaggtttcggtcatggaaaaaaaaattattttggggtcatcctggctctagatgttatgggcaaatttctgaaacatctgcaagaaggtaccagttaattatagtgcttaatattgggaataagattaagcattataattataatgtatgggcctgttggtgtaagctcagataattaaataaaaatagcatgactcaaatgagacatattctgctgaacagtttctacttcctctcccgcctgtcctgtcatgggagacgtgtatagttgctgctgtttcagcaaaccaccataagacgaaaatgcctcaggttgggttgccagtcctttacaactcagcttgaatttcacaacagtgattgtgagaatctgcgtggtatacactgaaatatcggtgtgctgtgatgcaaagcttacctttgacgatattgaatgtgatatagctgtagagaagtacttccttgccttatgtgaggatttcaaacttatttaaattatgtagacaaatcaaagtggcattgcttaatttttagcaggcataataagcaagttaacagtaaaatgcaaaacatgataagcgttgctcaatttttagcaggtataataagcaggttaacagtaaaaatgcaaaacatgatagataagtcactttgaaaattcaaaccaaagttccttcaccttatggaaataggaaattatggacttcaaaattggacacttcctgtttacaaaaagaaattcagagctaaaatcatggtaaaaaaaaatagaaacacttgagaactatggtctttatgggtgcaatttgaaatccttttcatcatcttaccagactaaactaagagcacataccaaacctatcttatggttgaaagttggggtttattttttatatgagaatattatcactattacataacatactcaggacaaagaactttgctcagggaacataccatgtaatatttttgttgtttctttacagactagtctacagtcctgcttactcaaaacaaaccaaataacttatacctttatataagtattatgtactgatgatagtaactacctctgagtttgacacagatcaaaatttttgaatatcagatatcagttatcctatttttatttcatgtgaaaactcctctaaagcagattccctcaactctgtgcatatgtgaatatcactgatgtgaacacattgttcatttacataggtaaaatattactctgtttacagcaaaaggctacctcatagttgatacatagcacacctgtatgtatgctgttccagccttacaggtggctgataattctctggtacagaacctttttatctgtattataaatagcaattcacaactgcatgtttctgacaaacacttgtgaataatgaagcatctcgttttagttagcaaagtctccaaacatttccttaaaataatcatgtatttagtttaaagaattatgggcactgttcaacttaagcaaaacagaacacggaagcagtcttagaagcaccactttgcccagaggtggaggttggaaggggtagcagggagaggggttggtgtatgcaggtattcatgctaggcaaagagtttaaaagacgccaatgtccttcatttactgtctgtgctgccctgaagccaagcgtattgcagcattatagccccaggcacataactaactagcactggcttgccaaggaatgaacatgcaatgccattactagctattgagggaaaagggtctgtgtgaagcatcactttgcagggattactaatggtggggcagcaggtctgtgaattaagttatctcttgacctcaccctcatgtcaacacaaatgtaattcctaaacaagatgcattgccagtctcttagccctgtaagctgatcttttgctacatggcagactataatgaaaacatttttatacttgggtttctagtcttcactagaaggccttggatgtatttttgcagttgaaagatttagaaagatttttacctgcttataacttggaagtttagagtgcaatgtaagaaaaaagatcaagaaatgtcatgttattagcatcagtccacctccaatattgccgatactttttttattctggctcagttttattttgcaccagtgcggccccaagttactgctggttgtatttagtttgtgaataggagcccataagtgttaatagactttgtaacattcactataagatgaattatacaggacatgggaaatctcattaagtcttaaagttaatttaaattaatttatctgttttctctaagaaatgtttatcataaaatatatatgtgtatttcccctttggttataaaatttgggaaagtatgtacaagtgcagctgcactgactttaattttctagatgtcttaatgagatttatttgttttagagaagaacatcttgttaaaagcatcaaactctgtcttacatagctgtcaacagcctctttaagatgtggtggttgtatgatctgtgtcttaattgttcagttagagtgagaagttgacctatgattcatttttaaattttatatttggaacaaagctgcaagttatggtaaagtactgtactgtgagaagtattatgatatttaatgcatctgtggcttaacacttgtgagagttaccagcttgaaaatgatggtgttgactacctcttgaatcacatctatcaaccactggcacctaccaccaagctggcttcaattagtatgtgttgctttttggtattaacaactaaccgtactagagaccaaagtgaaccctgatttttatatgtctttaataatggtgttttatctagtgtttttaaattatcctgtgtagtatttagattacctcattgtccattttgactcatgttgtttacaagtgaaaataaaaacacttgaactgtatgtttttaaaagacaaaaaaggggtagatgtttggaatgcgtttcactcgcatgcagtcatctggagggactgaagcactgtttgcctttctgtacactctgggttttatattctcatttcatgcctaatgtcttattctgtcaattatggatatgttgaggtttaaaaaaattacttgattaaaaataaaacatataacgttggcattt

SEQ ID NO: 14039 - DNA, 2448 bp, Homo sapiens
gattttcagaaaacacttattttgtttcttaagttatgacttggtgagtcagggtgcctgtaggaagtggcttgtacataatcccagctctgcaaagctctctcgacagcaaatggtttcccctcacctctggaattaaagaaggaactccaaagttactgaaatctcagggcatgaacaaggcaaaggccatatatatatatatatatatatctgtatacatattatatatacttatttacacctgtgtctatatatttgcccctgtgtattttgaatatttgtgtggacatgtttgcatagccttcccattactaagactattacctagtcataattattttttcaatgataatccttcataatttattatacaatttatcattcagaaagcaataattaaaaaagtttacaatgactggaaagattccttgtaatttgagtataaatgtatttttgtcttgtggccattctttgtagataatttctgcacatctgtataagtacctaagatttagttaaacaaatatatgacttcagtcaacctctctctctaataatggtttgaaaatgaggtttgggtaattgccaatgttggacagttgatgtgttcattcctgggatcctatcatttgaacagcattgtacataacttgggggtatgtgtgcaggattacccaagaataacttaagtagaagaaacaagaaagggaatcttgtatatttttgttgatagttcatgtttttcccccagccacaattttaccggaagggtgacaggaaggctttaccaacctgtctctccctccaaaagagcagaatcctcccaccgccctgccctccccaccgagtcctgtggccattcagagcggccacatgacttttgcatccattgtattatcagaaaatgtgaagaagaaaaaaatgccatgttttaaaaccactgcgaaaatttccccaaagcataggtggctttgtgtgtgtgcgatttgggggcttgagtctgggtggtgttttgttgttggtttttgttgctttttttttttttttttttttaatgtcaaaattgcacaaacatggtgctctaccaggaaggattcgaggtagataggctcaggccacactttaaaaacaaacacacaaacaacaaaaaacgggtattctagtcatcttggggtaaaagcgggtaatgaacattcctatccccaacacatcaattgtattttttctgtaaaactcagattttcctcagtatttgtgtttttacattttatggttaatttaatggaagatgaaagggcattgcaaagttgttcaacaacagttacctcattgagtgtgtccagtagtgcaggaaatgatgtcttatctaatgatttgcttctctagaggagaaaccgagtaaatgtgctccagcaagatagactttgtgttattctatcttttattctgctaagcccaaagattacatgttggtgttcaaagtgtagcaaaaaatgatgtatatttataaatctatttataccactatatcatatgtatatatatttataaccacttaaattgtgagccaagccatgtaaaagatctactttttctaagggcaaaaaaaaaaaaaaaaaaaaaagaacactcctttctgagactttgcttaatacttggtgacctcacaatcacgtcggtatgattgggcacccttgcctactgtaagagaccctaaaaccttggtgcagtggtggggaccacaaaacaaccagggaggaagagatacatcattttttagtattaaggaccatctaagacagctctattttttttttgccactttatgattatgtggtcacacccaagtcacagaaataaaaaactgactttaccgctgcaatttttctgttttcctccttactaaatactgatacattactccaatctattttataattatatttgacattttgttcacatcaactaatgttcacctgtagaagagaacaaatttcgaataatccagggaaacccaagagccttactggtcttctgtaacttccaagactgacagctttttatgtatcagtgtttgataaacacagtccttaactgaaggtaaaccaaagcatcacgttgacattagaccaaatacttttgattcccaactactcgtttgttctttttctccttttgtgctttcccatagtgagaatttttataaagacttcttgcttctctcaccatccatccttctcttttctgcctcttacatgtgaatgttgagcccacaatcaacagtggttttattttttcctctactcaaagttaaaactgaccaaagttactggctttttactttgctagaacaacaaactatcttatgtttacatactggtttacaatgttatttatgtgcaaattgtcaaaatgtaaattaaatataaatgttcatgctttacc

SEQ ID NO: 14040 - DNA, 1891 bp, Homo sapiens
acaaagaaggaagaagaatcttctggaggtccttccagccaccttatttcttaaaaaggacaatgctgatggaagaccagactggaaagtggatcgactcctccttcattgattctaaattcaaccttaaatcatgctgccatgactcagagaacttactcatcgtttcaaaagactatcatagctttaaaccaataatttgtcctcctttcatttcttgcctttcatttttggtagctgcttaaacaggttgcctaattagcagcttttgggtgattttgtaaaatgttatatcaagatttcaagactgtgtacattttaaattatttccaaagatagtgacaggagagaactggaacaaatttaccaactttgtggacctacaaagcccttacactttaaagggtaagacaaaggcttaagtttgaaaggtagagaactgtttagcatctgagaagaaatactttattaggcctgtaattttggttcttggccttaaacactttctggaacctttaaatatgctgcatagcacaatgggaaagccttaggtattcacacatttaaggaactctaaacaaaatactattttcctttagttcatattaaaaattaatacattttaaaaatttaatgtcaaagtctggtaacatttgttagtaggatttgagttattattttttgagacaggatctcaggctggagtgcagtggcacaatcacggctcactgcagcctctacctccccaggctcaggtgatcctcccacctcagcctcccaagtagctgggactataggcacacatcaccaagcccagccaaattttgttttttttttgtagagatggggtttcatcacgttgcccaggctgatctcgaacctctgggctcaagcaattcactcgcctcggcctcccaaaatgctgggattacaggcctgagccactgcgcccagccaggatttgaattattttaactcatccatgggctgccctagaatgtcacaaatgagggttgtttaatgcctttcttatagctgctactggaacactattatgacctaatttatgagccatccttactcatctacaagtgctgaagcaatgttacatacttttttgctaaactcagattttttagcctaatttcttgtcctcctatccacctgcatccacacatggcctgcatggggctgccttccctgcagtgttctgcagccatgcttcagggtatagctgttggtggacagcctcaggtcttgggggcactatagccactaaacgaggtgtgaaaggctcaagaggatgaccagcaattaattatccccagaaagtgaaggaaaagagacctttagggatgttgctggtcaagtcttgatttgaccggagtcaaatcaatcttcaagcaatcttggaatcctcaactgcagtaagcatttcaaaatgcaaacaaactgcttaacaactgacaagacaccagcccatacgctgctcttccaacagtgggttctagctttgaacaaaagtgctaaacatttccttgaatatattcttcctctttttgtcctcatcactcaatactggtgctcttgtcacaggtagaacagcttgtttcttttccatctattcaagtgtgtttctaattctaaaatgctgatcttctctggagtctatggtaggcaattatggtcactggaatagtttgtcttgttttaaaatattattggtgcatgtacaacagcatccaacatatctgtcttgttcctagatatatagctctgattttaggccttttgtgcataccattacaatatggtggggtaagacattctacagtagcctgtgctgaactgatctcttaaataaacttgcttctggttaactatgttgatg

SEQ ID NO: 14041 - DNA, 1533 bp, Homo sapiens
acatatcttacaaattaaaatgacttttaggctgggtgcagtggctcacacctgtaatcccagcactttgggaggccaaggcgagcggatcatgaggtcagaagatctagaacagcctggtcaacatggtgaaaccccgtctctactaaaaatacaaaaattagccaggcttagtggcgggcatctgtagtcccagctactcaggaggctgaggcaggagaatcacttgaaccctggaggtggaggttgcagtgagccgagatcatgccactgcactgcactccagcctgggtgacaaagcaagactgtgtctcaaaataaataaataaaataaaataaaatgacgtacagagattctatattctagagagtcaaatggtcttgctcaattcttgtaattaggttcttgttaatacagtcattccatggaattactttttaaaattcctgtgacaattaataataaataacgtgtcagcatttagtaagcatccactaagtgtacaatacttctacaataacacaagatacctgttcctcaaagacaatgcattctgccataatgttcattaaagagtttacagtaaaaataagattagggataaacttctcaaaaattgtacatctgtgtaactaaagcactaacaaaaacatgaatagtccttctagaggtaacttggatagcctaggcaggcaacttatcatgtggtgaaggccgcctcaggggttgttaaaaatgcacagaaacaattgagtgcgattattggcttctgagcgctgagcagagcaggtggaagaggaactttgagcacaggaggaaatgcaaccagtcagggcccagaatcatgcaaatctcaggggtatgcctctctggggaggagctccacttgcagggactccttttatttccctaagaaagagctgaaatgactgagaactttcctttcctccttagagttacaattttacttctgctattccggagcccatgcctagaagccagaacaactccatgttacactgagttcatgctcctatttactgatcacaaatgagctcattaatgtcatcgaaacatttattgtaacctaacagaccatcacagattggaaacttggtagatagcagagcatggtattagtgaaaaaggttcaaaatacacaagtaacatacactctgaaaaacatgcagataatttgctgatgaagcagaagaggggatgcgcatggcaagaacttgccttaccccagattctctatatctcatggtttccttttcctcttgactgtctttacgagtgttttttatttgggaccctcgagcccagagatattaatggatatctgtattcaatatttgacaaaatctaatggaaaccatccatttactcatgataaggcttcatcactggatttctgtgtcttcactagaacaccattgtcatctcatattgatcaggtattttaatctagcacttacatattgttgataaatgaaagctgaattgttacttaataaattcactttgtttag

SEQ ID NO: 14042 - DNA, 105 bp, Homo sapiens
atggattgctttttagcaatagagctgctttctagtggtaaaggaaggggtcacctgaaaaataggacatttttattaaaataaagttctcttagcgtttgtgga

SEQ ID NO: 14043 - DNA, 3098 bp, Homo sapiens
gaacgttcactcacagggtacgctcatggagagagggcgcagagcaaaccatgtcacgccatccaatgacaccagctggtcagctcaccaccccctctggctaaaactcaagcaaataaagccgcttcctgtcattaagcatctcagaggaagcagccctccctcgatggcctctagcccagagaagcccgcgcatcttggacccaccaagcaggcccagccttcctgctgccaccatctctgcttctccccagaggaacttagggatttcacccctggcttttaaaaaaaacgaaataccgacaagccacaaggaccaatgtaggtattctccccgccccatcttcaaggctcagcgactgaggctggaagatgatatggattggaacacaaaaaatctttttttaatctttttaaaaactgctgtggttttgctgctacactaagaattgtgatttgcattgtacggttttggacctatattgttcacgttttgatggcggagaggggtggtcctggaggcccaatgcttcagagtcatctctgtcctgcccgggatgcacttttaaatgaagagttagaatattttattggctaatatacttttcttgttatttttacaaaggccacctttatcctttttgatgccatattttcagtgttacacttttatggcttttaattttcgatttgacagatgtaagaagcagcatgaatagtttatactgtggtttttcagagactgaatgccaagagaactcggtaaatgtttattcttctcagctttctctttaaattcccctaaatagcgccccatttgggaacagagcaagagtgttgaactgaagaccaaaatgccctcaaggtgtaaaataatccgagggggaatatttgctgggcgtcaggaaagactcagatgaaatttcaaccctgatggttttcggtgatccaggaagtcagtgagacaatctctctatatgcagagccctttcatgataattagaatggtatggacaaaccaatgaaaacaagagggaaagtgagaaagatcacccatgattctgtttcactgtttgctttctcctgtcatggttaagagaaatgtgcaattcgatcctcaatcagtgggtggaggataacagggtagattcacttgtgtgcacttgtacagttgtagctgcgagtccagaagtcctctagagcatgtgtactggcactgagttggtgagacagttgtggagtatcccattctgatgagtacagaaaaaaaaagaaaaagaaaagaagagaaaaaattaagaaaaaaatcaaaaaaggaagaaaactaaaaaaaaaaaaaatcaaatcaccttgtgattcagtgtatctgtttactaactcaaataaagcaattgttccctctggaggggtccaggtgcccccgccccacaaggccgcggagcctcagcaggaggggtggcgagttgcgggtgggcagggccaggacggtgtggcgccagccttgaagcaccacggcccaaggatgcggtgtacatactgtatttctagattctcctttgtacagagtcacttcacaagtcaagctactgttttacaggtgctccttatttattagagctgtgagagcttgggggacacacctggcgagcaagctcgctttttaaaaatgaaatttgggggcaggggaaggggaggcgggagggaggggaagctcgcaagcccggggagagatttataaaagtaaacaaaagaaaaccttccagcaacaaattaaaaaataataacaaatcaaccccagcaccaaacccacccaggcaggaagaagccgcccctcctctggggccatatttttctgctgggtcacaacattctcctctccctgactggtgtcagattcatcaaacaaaaaataaatctcgaagaaaaaaaatgcacttacatgtgcttatttggcttttctcattattatgactactgtttttttttgttttttgttttttgttttattacagaggtgttcatttttctccccctgggaaacattttaaaaaatagaactaaggagttttaaaagatggtaagctactgggatggcactgtctcttcctgacctgctagaccacgcttgtctgcagacaagagcccactccgtccgttccagggcctgcttcctaaccatgcccatcactgacagcacacagtgcatgggaagtgagtgtttaggctgtagacccaggtgtggtgtcccttccaagtgctcttcaagtcctgatcttttttggctccaagggttcaggcctgaggttcaagaagcaccatcaaatggaggcaaacatgctccacgggttccactcacatccacacaccatctcaccccactgactagagagacttttatttcagccttatgtgaatggggtgggtccgtttggctctttgatacctgagttaaatatcagaaagttcctaaggtggaaagtatgctaatatctagttctagtcattgtaaatctagttcagttctcttgttctacatatgaaaaaacagaagcctagaaaagcaactcgacctgttcagagtctcgcacttagttgatttagcttctcaaaaaaatgaatgttcattaaaatctgaggcaccacgagcagctcccttgaagtgatcatcctgtggattccggagacctgattttcttctcccatggagcccgagagaatcttggaggcttcctggtgcagagttatatttatggcggtgactccgtctgaactctgccgaggcaagcccagccaaggacgtgccagcggccgaggcacccggctgtggttgtcctgatagcattattcatctggtcttggccatggagacagtcatccaggatattgattttgcttttgtctgtagtccaagattgtcaagcaaacattttgacccttctggaaacaaaaggtacctttgttccagcatagaaagattctgtggcatctcataagccatcagcaccccttttcctcctcttccttctcacgatcttactgctgtctgaatgcacaattctcttgggatatcaaaaccatatataaagagaaatagaaac

SEQ ID NO: 14044 - DNA, 1344 bp, Homo sapiens
gctcacaagatacccacttttcaggatgggacagtatcagatgaacttcaacccatggagaacaagcctcaactaacaaacccttcaggaagcatataccggggaatgtgtagccttcaggaaaaaaatgccaattgacacaaagcattccagtagctatgacctgccgccctgaccaggatagggcgggtgggaaggagaggggtgcaacaggaccgcctgcactgaaaactcactgctgccatgccctgggagggggcaaactgggggttgccacaggccgtgccattctgcctcttacctggaagatcaggctgaacgatcaaaagctgaaacataagtagtgctttctcttcctttttagcatacaaagtttggtaaccaaatatagctctgtgtataacatcgtactgcggccttcaaaactacgttatgttggagcatttattttaaaaataatggtaggttttaaattaaaagtgttatcaaaagtttcccctctattgtaatacattattaagtggccttcagaactgagttaataagtgaaaagtagcttatgccatgtgatttgctttttctctatcttcttttttcttttctttctctttcttttgttctttcttcttcttttttaataccataggccaggcaaccttgtcaaaggaattgatggacaaaatgagattctcaccaggacttcaggttggataacatgtcaaaaagagaagagctttactaaaagaacataagtcaagggaggatgaataaaaacagcaaaaccaaataaagtggagatgagtgattgagtgaggtagattgctgtcccgttaacatagtgctgaaaccaaaggcagtgggggtccaaactcgtggtgcagcaagtcacaccagacaggaaacgaatatggacgtaattgcagaaggaacttcaaggagatgaatgaatgctaaaagggttcttgactgatccattgctaacagcctgagactcttcaatgcctttccgaaaactggtttctagtaaagccttgaatgaacacacacacacacacacacacacacacacacacacacacacacacacaccgtcctacactttaagctgctcctttggtatgactctatacttatggaaatgtagaaacaaacatttttaaatagctgctgtacttttcacattttgatttattaggtactagcactgaggaaaaaaaattcagcacttggactatcataggatgagtaaaacttttcttgtacaaagtgaattaactgatttgtgaagttaaaaggttgtactcattgtatttacaaagaataaaaatatattgaatttaaatg

SEQ ID NO: 14045 - DNA, 621 bp, Homo sapiens
ctgccacttttgcataaataaaactctagacaaatggttaacgcaggcagaactccttattgtgggacttgaaggaatcattttctcatcattaattatgcactttgtcctctggaccattttaatctaaaattgctctcaaggatctagtggattagtaagttaaacacttaacattttttaggtctgctttttcttatttggccttatttctgcaccatgaaattaaaatcatctcattcctgaagatgaatgtaggaccagacattttagcttcacattaaaccacctgaatgaaccttgaatgcacaagtaaatgcaagacgtctggataccttcaagctttggctgcatggtggtggcatgttagaaatacatcttttataatgggggaagaatgccctatgtttcaattcaaaacaaagacagttttccaatctgatataaactaaaagggataatattttagaatatgggcttatatgtggtttttttttttggttatgaattacagtaaatctcccaggccttcagatttctacataatggaagaatatgtttttaaccctgagatcaagtttagtaggcaggacttgatctcaagtggtcacaaagttttct

SEQ ID NO: 14046 - DNA, 4942 bp, Homo sapiens
accctcaaactgacacaagacctacagagaaaaccctttgccaaatctgctctcagcaagtggacagtgataccgtttacagcttaacacctttgtgaatcccacgccattttcctaacccagcagagactgttaatggccccttaccctgggtgaagcacttacccttggaacagaactctaaaaagtatgcaaaatcttccttgtacagggtggtgagccgcctgccagtggaggacagcacccctcagcaccacccaccctcattcagagcacaccgtgagcccccgtcggccattctgtggtgttttaatattgcgatggtttatgggacgttttaagtgttgttcttgtgtttgttttcctttgactttctgagtttttcacatgcattaacttgcggtatttttctgttaaaatgttaaccgtccttcccctagcaaatttaaaaacagaaagaaaatgttgtaccagttaccattccgggttcgagcatcacaagcttttgagcgcatggaactccataaactaacaaattacataaactaaagggggattttctttcttcttttgtttggtagaaaattatccttttctaaaaactgaacaatggcacaattgtttgctatgtgcacccgtccaggacagaaccgtgcataggcaaaaggagtggagcacagcgtccggcccagtgtgtttccggttctgagtcagggtgatctgtggacgggaccccagcaccaagtctacgggtgccagatcagtagggcctgtgatttcctgtcagtgtcctcagctaatgtgaacagtgttggtctgctggttagaaactagaatattgatattttcaggaaagaaatcagctcagctctccactcattgccaaatgtcactaaagggtttagttttaaggagaaagaaaaggaaaaaaaaaaaaaacaaaaaagtcctgttttgctttgcagaacaaatgaacttacaggtgagcattaagcttgcagtgagaaatgtgcgaagagtaaaaacccaagtcaatgctgaggcagttctaacttcactgttttcctaaatacacatccttgattattttcagccttgctatataatctgatctgctagaagtgtatgagtgagaggcaatagcatacaaactgattttttaaatataagcttaggttgtaattgtacaagtgactcaatggaagtacaaaatagggcagttttaacttttttttctgcttctatggatttcattttgttgtgttttcaaaaagttatggtgctgtataggtgctttctgtttaacctggaaagtgtgattatattcgttaccttctttggtagacggaatagttgggaccacctttggtacataagaaattggtataacgatgctctgattagcacagtatatgcatacttctccaaagtgatatatgaagactcttttctttgcataaaaagcattaggcatataaatgtataaatatattttatcatgtacagtacaaaaatggaaccttatgcatgggccttaggaatacaggctagtatttcagcacagacttccctgcttgagttcttgctgatgcttgcaccgtgacagtgggcaccaacacagacgtgccacccaaccccctgcacacaccaccggccaccaggggcccccttgtgcgccttggctttataactcctctgggggtgatattggtggtgatcacagctcctagcataatgagagttccatttggtattgtcacacgtctcctgcctcgcttgggttgccatgtttgagcgatggccctgttgatttcaccctgccttttactgaatctgtaaattgttgtgcaattgtggttatagtagactgtagcacattgccttttctaaactgctacatgtttataatcttcatttttaaagtatgtgtaatttttttaagtatgtattctattcatatggtctgcttgtcagtgagccagacttgcttactatattcctttataataatgctagccacttcctggattctttagtaatgtgctgtatgcaagaactttccagtagcagtgaaggagggttgcctctccaagcttcctaagggatgctgccctgtgtggggatgcattgcagaggcactagtagcatgggggctagagtggggagcgagatgtaaaagggtggggggataggagaattccagagtgcttccagcattagggtcctgagaacttctgagttcagagaaacatgcaaagtgactaacaaaatagctacttacctttgcagttttacagaccctgggagctgctttgggagtgagaaaggcaaccctccaatgtgtttcaactttaaaatgttgaattcttttcagacatggtatctcatttattctccttttctagcgtttgttgaatttcaggcagaatgtcttacagaatgtcctagaaccagattatcatttaatctgaaacagctgaggaagggacagagaaggtacaagggcaaggcagcacaaaacagatcaggagaatgaagagggaatgctttggttttttgttttgttttgttttttctttttcaagtaactaaaacagcatctacatgtagagtgttgtggagagctgagaccagggtaaagtcaagtgcagcatcagtactgcgagacccaccagcccctggagagggtcagccgagaatctggtagtgaagcctgtctagggtcccggcaccctcaccctcagccacctgcagagaggccagggccccagagactagcctggttctgaagtgggcaggggtgctgccagagccctctgccccttatgttgagaccctgctttcaggacaggccagccgttggccaccatgtcacattctgagtgagtgtcacaggtccctaacaataattttctgatctggagcatatcagcagaatgcttagcctcaaggggcctggcagctgtaatgtttgatttatgatgagaactatccgaggccacccttggcctctaaataagctgctctagggagccgcctactttttgatgagaaattagaagagtacctaatgttgaaaacatgacatgcgctcttgggatctgctgttctctccagggctccagaacctgatacctgttaccaaagctaggaaagagctttatcacaagccttcactgtcctggcatgagaactggctgccaggctcagtgtaccccattaactgtgaatgaatctgagcttggtttcctttattgcttcctctgcaatatgattgctgaaacacattttaaaaattcagaagcttgtcactcctgttaatgggaggatcagtcacacatgtgtagtacaaggcggactttgtgtttgtttttggtgttaatttttagcattgtgtgtgttgcttccccaccctgaggagaggacaccatggcttactactcaggacaagtatgccccgctcagggtgtgatttcaggtggcttccaaacttgtacgcagtttaaagatggtggggacagactttgcctctacctagtgaaccccacttaaagaataaggagcatttgaatctcttggaaaaggccatgaagaataaagcagtcaaaaagaagtcctccatgttggtgccaaggacttgcgaggggaaataaaaatgttatccagcctgaccaacatggagaaaccccgtctccattaaaaatacaaaattagcctggcatggtggcgcatgcctgtaatcccagctactctggaggctgaggcaggagaatcgcttgaacccaggaggcggaggtcgcagtgagccgagatcatgccagtgcactccagcctgggtaacaagagtgaaactccgtgtcaaaaaaaaaaaaaaaatgttactcatcctctctgaaagcaaaaaggaaaccctaacagctctgaactctggttttatttttcttgctgtatttgggtgaacattgtatgattaggcataatgttaaaaaaaaaaatttttttttggtagaaatgcaatcaccagtaaagaggtacgaaaaagctagcctctctcagagaccggggaggcagagtactactagaggaagtgaagttctgatggaatcatgcctgtcaaatgaggtcttgaagcggatgcccaaataaaagagtatattttatctaaatcttaagtgggtaacattttatgcagtttaaatgaatggaatattttcctcttgtttagttgtatctgtttgtatttttctttgatgaatgattggtcatgaggcctcttgccacactccagaaatacgtgtgcggctgcttttaagaactatgtgtctggtcacttatttctctaaaattatctcattgcctggcaatcagtcttctcttgtatacttgtcctagcacattatgtacatgggaaatgtaaacaaatgtgaaggaggaccagaaaaattagttaatatttaaaaaaatgtattgtgcattttggcttcacatgtttaactttttttaagaaaaaagttgcatgaatggaaaaaaaaatctgtatacagtatctgtaaaaactatcttatctgtttcaattccttgctcatatcccatataatctagaactaaatatggtgtgtggccatatttaaacacctgagagtcaagcagttgagactttgatttgaagcacctcatccttctttcaatgcgaacactatcatatggcattcttactgaggattttgtctaaccatatgttgccatgaattaactctgccgcctttcttaaggatcaaaaccagtttgatttgggaatcttcccctttccaaatgaaatagagatgcagtacttaactttccttggtgtttgtagatattgccttgtgtattccacttaaaaccgtaatctagtttgtaaaagagatggtgacgcatgtaaataaagcatcagtgacactct

SEQ ID NO: 14047 - DNA, 635 bp, Homo sapiens
catgatgcagattaacagtagaaacgagaactcacgtctccctcattcttaagaactggtaacaaacgtgaacatttttttcagcattaacaaatgtggaaagtttttcaagaactggttttagtgagtagctgaagtattttttaaaattaagcatttcttcttgttaggtattatggaaaaatgaatatacacattatatttcctgttgagagaaatgtaagatgaaaatatgtgcattttcaagtaaatgactttttcttctattctctattaaacaatttagttctagtcttaaaatcttgatttaacaattttggaattgaagtgttcataagttaaatgaactgtgcaatgaaggctgttagattatatagaaagaagggtaggcaacatgagtggaacacgttacaacataggatctgtactaattcttactatgtcaaataataaatgctctcattaggtaccagtatttttttggtctttatattaagagaaggagtaagcagaaaaacttaaagaaaactgctttgggccatctgttctttattaaataagtaaaatagataaaatgagagtatattttcatttgaaataaaatgactggactaagacagtccttctaattgtaa

SEQ ID NO: 14048 - DNA, 942 bp, Homo sapiens
caaaacagcaaaactgtcaccttaatgaactttgtcagtgagaccttgaattgtctaaagtggttttaatttaatataactttgtgacattttgaatcatgtttctagtttctataaaacatgaagttgcagtatttaaaaattaatgcctaatgacctggtgggttccaaataataaattaattgcttttttatttttcttattgattgaagcccgtaacctcatcttgtcttagaaacattgttggctttgcagatatcttaagctaaatttaagaaattgtactagattgacaatattcaaaattgagttaaatccaagctacaagtaccattcattccacttttcatttagtaggtttggaaccttaaaaaccaatgttcaatgaacagagttcagaaagatcatttagctttcctggtgccttctttctattttgttttagagctgtgaaatgtttttctcttttggaaaaggaaaaacttaatagttacacagttttgtgaagaagcctttaatccaagttttatgagacagtaggaacctatagctacttaatttttaggagacagtaattcagttgcagaagctttcctctgctattcccattctcttttacaaaactagttttttttaaaaaatcaatgatcaattttatcttactactttataacttttgctgacttttattctttgcattgtatgtaatgtccatcagtataaattgagactgtgaatttctaggacccacaaaagtggtattttttttttgtacaagaaagtatagaggaagaggaagctgggcattaaattacctcatccagcagaaattcacggtagtatggtatatttttattttttatattttaaaatcaataatgtcaaatgtcattgtgtatgcatgctttataataaatttacacttgatcatttttctggaa

SEQ ID NO: 14049 - DNA, 13 bp, Homo sapiens
agcttggcccttt

SEQ ID NO: 14050 - DNA, 166 bp, Homo sapiens
aaagagcgcaggtccacctggtggacacgtctgattagcttagaacctgtcttgtctcatcttcaaaaggtaacttattaaaagtcctttgcgtctgaagcctttctccttttctgtcacttgcaaattccaaattatagctaataaagatgactagataatttgc

SEQ ID NO: 14051 - DNA, 517 bp, Homo sapiens
agggctcgccccgtgtcctctcaccaacaccacaccccaacaagccagcctttggtaagctcggtgcctgctgacgaactctgagatcccaatggtgtgagtctgactttggaaagaaaaagggactaaagagaaatgtaacaaacttacaaggacaaagaggcttgttggcactttacatatacagtgtatacatgtgtacatatatatacaaatatttgtatcttctggaggtgttcaggatgtggagcttcctattctgtgaaaaaccaagaaaaagatatggttgtatactcaaattgtacatcacgtttgtcaaacgaagacattccaatactgcttaattatagcactttatttttagctgctgaactgccaaaacagtgttgccattttcaagggcagggaaaagggagtaaaaggtgtatttttgtcgtatgtgatagaatattttgctgcacatgcatcaacaaattacaacatgttttgtacacgaataaacccattacaagaatgt

SEQ ID NO: 14052 - DNA, 2086 bp, Homo sapiens
tgagattaatccttaaactagctgggatcatttttgatccattgtcatatttatatttaattattaaatgtatctgatgataacttgatttacagataatgttgatgacattgaccctttgtttaaaaaaagaaactgtaaatttgacataatttcatttgcaacttcattttgttttttataaatgttatttatacagaaagtggctattgactttctatttgacaagtagttataattggcaagcagtttgagtttatactcatgacatactgaaagcatctctttggggtcaagaaagaatccctagtggatttgggattctagaggaggtgttataattaattattcagaaaaatgcatgtatttacctcttcaaccaaaagggcagtaaagaatagggataatatattttaatgtaaatttggaagaaggataaaatcacccacagttactctccctattattttcactgggtcaagttttaatcttttggcttcatgagttccactccctttgatgatatatgttgtatatttttagttgtaaagcagtaatctttaactgtagcattcctctaattataaacagtgaaaaatcaaaatcagtccagagttcttttgttgacttaattcctgatcagtatagacaggactatatatatttaatcagagaattacattatatctgaagatggagctcaggagaatgcaccaagactttgaattgtatttacattcactgtcagtaaagacctggctacgctttgagaaatcaggatctcctaggtcattgcttcgcagctgtgattactgaaatcctcctcataggagataaagtacgaggggtagagtccaagatgtcaacttgtaatttctttgaagtcatatgttttatctttaaaattattcttattttacctgtgaatatatacaacagaactttttaagattaaaaaatttttaaacctctatgtctgaaaaaaaaaatgacactcctggaagatggctagggttccccagtttgagaagcagtggccatggtgaaaaatagtttttgaaaacatcagattataaaatcaagatagtccggacgcggtggcacatgcctgtaatcccagcactttgggaggctgaggcaggtgaatcacctgaggtcaggagttcaagaccagcctggccaacatagtgaaaccccgtctctactaaaaacacaaaaattagccaggcttggtggctggcgcctgtaattccagctactcagaaggctgaggcagggagaattgcttgaacccaggagtggaggttgcagtgagctgagatcatgccactgcactccagcctgggcgacagagcgagactccacctcaaaaaataaaatcaagataacctcttgaatgtaatagctcatagcactttaatttggcaagccatttttcctgttttattataaatctatattagatgtttgaatatggtttgaaatatttcactaccgtgctgaaaaaggttggttgatagcagcttggagtgctaactggaagatcaaaatcatgtctcttgctgataacctaagagcattaagctctgagtccagtgaggtcatagcagtgtatgctccttgcccttacggagtgtctgtttttagaaatttagattttaaaaggcgtgggacatacgaccaggccctatagccacataaatataaatttcatagaaaaagaataaaagcggagatatattttttgacacagaggcacccaaagaaatacaaacattgcctagctgctgccatttctgtaactgcccagaagggtgacagatttctgaaggggaaaggattcagatatgaccttttctttagtcccaaccactagttttaacaaatgtgaattattgaaatgtgaagggacaaaaagaatcatacatttaaactgtcttgttcagcataccaatattgtatgttacaaatcatcatttctaaatctggattgattctgttgtgtttttgactgtttctaaagtaagtgtgtataaaagtctcctttttaaaaagatcatatttttaaataaagcattttttgtag

SEQ ID NO: 14053 - DNA, 2094 bp, Homo sapiens
ttaagaaaaatgaagaaaaaacgcaaaaagagaacacatgtagaaggtggtggatgctttctagatgtcgatgctgggggcagtgctttccataaccaccactgtgtagttgcagaaagccctagatgtaatgatagtgtaatcattttgaattgtatgcattattatatcaaggagttagatatcttgcatgaatgctctcttctgtgtttaggtattctctgccactcttgctgtgaaattgaagtgcatgtagaaaaaaccttttactatatgaaactttacaacacttgtgaaagcaactcaatttggtttatgcacagtgtaatatttctccaagtatcatccaaaattccccacagacaaggctttcgtcctcattaggtgttggcctcagcctaaccctctaggactgttctattaaattgctgccagaattttacatccagttacctccactttctagaacatattctttactaatgttattgaaaccaatttctacttcatactgatgtttttggaaacagcaattaaagtttttcttccatgagttgagtccttaagaaaatgattccagttactcattttgcatatttgctattttaacattattggaccctgcatttatagtcctttgatttcttccctctccctggtgtctcccccaagaccccaaataaagcaatacactgttaacactgtgggtttatatactaattctataccccagatggggaatgggggagatggtccctgggcttaatattctttaaagggcatgggaatttagcctctcttttattgtaatgtgctcttttggaaaatagttggttagcagggaagacccagagttgtagattgagattagggtgtactggctgaactgtggaaaacatacaattctgtgttcctcagtaaatgagattagcgtctaatgagtagcacccctttactaacttagtagtagtataaaatcatttttatttagttaattaccagagagatttagcataattttgttctggattcagtaaatcaagtcagcttggatcattcaccttaacttttcctttagcagccatttccactagtttccattaagtagtgttctataaactttgatccaaagcagaatcaatgtcttttccatctcgtgacttaaagttctgtgactgtgatgcatgtgagtgttccgacttcatctgttcctcttaactacggtgtttcccttaccatggcattcataggatgaaatgaatgactgcccagaatgagaatttgtccagattattcagataaacatcataaagcagaatacattataaataagtagaatatgaataaatagaataataaaattccaaaatactcaatgggaaatgactagtaatataggctttcaagagttggtaccttttagctatatttgcagattctctgggattttaaggaactgagaaaacagcaaagttgactaaattttatatttcttgtcctctaaatattttgataatttctggattgatgcagtgatgtttttgttccttccgtatttataaatgaaacacctttttttagtgtttctaaacctaaaatctacttggtttgaaatcaagtggttggaacactgtttgacttttatttgaagcatgttgttgattgaaaatttcattgaggaagttttcaatcagtgtgatcagtttgattctgtaatgagcacagcacctaatattttgaggagctctgttttgaggaccaatgcttaaggtggactttgttcgtaaacaatatcccaatagatttgttgacttgaggtctggtttggttttgtttttgttttgttttgttttgttttgtttccaatagaattaagaattctaatgttgaaaaactgcacaaatttttatgggacaaagcctagaaaagagaaatgtagtttgaatcataatctaaatcatcgtatgatagaagagggaaagttttggtgccataatttctcctttcactggtgttggacttaaatcagttgaaatgtatttctgtaccacaatttacgcttcaataaaagtttaattgtctagtgacattcag

SEQ ID NO: 14054 - DNA, 86 bp, Homo sapiens
aaatcactcctagatgaaatgtttctcataataacttgtcaagaactttttagagttgttacataaaaataattgctgtgtagctt

SEQ ID NO: 14055 - DNA, 775 bp, Homo sapiens
tatcttacatacctccaccagactggacttgctttttgaattttaagcaagtttcctttccttttatacaaattgcaaatttcatatttttttaatcacatcctaggaatagcacaataattgggaaatagaacccttatcactagaagaaccattttctgccactaaatatctctgatgtttccatgagtctgagggcagagactctggtatatgaaaacgtctgaaagtcacatattgtgaaaatttgaagctatctcagtaaaaagcagctttggaaactgtgaatgatctttagcttgtacaaatgtttaaaaatacctcaggctatactgaaagggttgcagtttggttaggagtggaaatattttgtttgttaatgatgtcttcagttctggtacctctgttttactttcttatgctctttggaaactttttgcaaaatttaagcctgggttctagataataccagatctacctaaacctcaagtctatgttaaagttgctttcctgctgttaaataagctatgatattaagatattctgacttgctccagtgtcaagggaccttctgggagcaggtgctaacatagtgttcagaatcaatatgtgagatgaaaaggatcccctccaggaggatcctgagctgttcagaaatcatttaagtttacagcgttgttccctttgcgtttgcagtgcgttttactcaagtagccagaaacaccccacgtttctgaatttgtttaaactgtaacaataaagtaaaatagaatgc

SEQ ID NO: 14056 - DNA, 1939 bp, Homo sapiens
agaagatggattactcactgacatctttgaataactgccacttctaaggacgccattcagagcagagcattagcagaatttcaccatgctttggggattaaaatttttaggtccatattatagcaaatgctaaaaatttttgaaatgttctgtaattcccagagtcttccataaataaccaaatggtctcatacacgtacaataggatcttgttataacgctatcatttgacatgtgactgattaggaaatattttatggtctccacccctcagagcacccaaagaaggcattgtttttgagaaggggggtattctcagaatgagaccatgtaggagttgaattgattggttgaacaaattatcaggtatcaatatttttccaggaaagttgaggagaatagtttcataaaagagaaatgggccgggtgcagtggctaaagcctgtaatcccagcactttgggaggccgagacgggcagatcacgaggtcaggagatcgagaccatcctggctaacacagtgaaaccctgtctctactaaaaatacaaaaaattagccaggcgtggtggcaggcacctgtagtcccagctacttgggaggctgaggcaggagaatggcgtgaacccgggaggtggagcttgcagtgagccgagatcatgccacaccgtactccagcctgggcgacatctagactccgtctcaaaaaagaaatggagaggtatttttattaattgctttaccttatctgtagggttggatcaaagaatgtaatgactcatttgatttctaatttcaatgaagagaacacagaacagggcccaaggggtcgggcttcaagccttgacttcttctagccctgcactctgtcacttaacgtaggccttgtttatctcgcctcctgatctgtgattctagaaatgaaaatgagatgatttccaaattgggaatctgtaagttttaaagtttgtgcaaaatgtctgctagaaattagtacaagtgacagcatgttcttcatttcaaatgagaagtgaaaccaaaatgataaatagctttaagaatgtgctaatgataaatgattacatgtcaatttaatgtacttaatgtttaataccttatttgaataattacctgaagaatatattttttagtactgcatttcattgattctaagttgcactttttacccccatactgttaacatatctgaaatcagaatgtgtcttacaatcagtgatcgtttaacattgtgacaaagtttaatggacagttttttcccatatgtatatataaaataatgtgttttacaatcagtggcttagattcagtgaaatacagtaattcattcaattatgatagtatctttacagacattttaaaaataagttatttttatatgctaatattctatgttcaagtggaatttggagacactatgttctaattttaagaactgtttcagtgttattagattagtagtagggctgtagatggggtctttcgaggtcctttgcctacctcagtaacagaggctgggtctgagccttgctcgagattagctcttcaccaggtctgtgtggtaatcatatcgtagttaccgtaggtcacgctgcaagtgtaatttacagtgaggcatagtcttttccagtgattggaatacttgtgtcaccgatccagggtttctctttcctgagtctgaaatacctgggaaaccagttagaaggtgactgggtagcctaggagtcaaggatcagaaagggtacttcatatatatgtggcagaattggtgcaggtgatcctttgaaaaatgacaagaattgatgaaattttgtttacttcctccaattttttgctgaataacatctcctttctacctgattggagtaggcttgctttctcttacttaatttctataaatttgccattgttttgtctcaagtaa

SEQ ID NO: 14057 - DNA, 62 bp, Homo sapiens
aaccaagcaaatgggggaaaagttagtcaatcctgtcatataataaaaaaattagtgagtat

SEQ ID NO: 14058 - DNA, 2002 bp, Homo sapiens
caccattaagtcttttgtcaaggtctgactaggtcaagggtaatggaccagtatcatctggtgatctggtaaacaaataaaagtggtggcacctttagatgatgacaacagttgagctctttacttttagtaagaccgacagaaatgtagtcagtaaagcacatgtagtgataggctatcagttatgtctgatacataagacagaataatatttcacaattagaaagtaccttagagatcatcttgctcacagtagatcattaatatcaataattaaagatgaagcttaatccaccatggtcatcagtcaggtggggcttattctaaatgcttaatgtgtcttaagctcatttccttgttcatatttgggttgctacttggctaaatcctttcaccttagtaccctaagccagtttcctggcttgatactatttgataatgctctgctcaggaatgattatattgggtgagaaatggagccctggggttgtgtgttttggaacagtattcaagatcaaagaaagttcttagtccatggttaatctgcaaggcatttaagccacttccatagaggagcccagattgttggttaaatatattgataatgaagtcaaagctgtggttccaaccccgatttttccaagaaaaatgacgtctggttatcactttgtacacgaagtgctaaccaggtatcttgataaattgtttacagtaggtattgagaaacctcatgtggattttttaatttggttagatgtgggatcacttttgaggatgaggccagctctctatgttctctttttcttcttgcagtagtccccagaaactcagtctgctttccttttctctcgatggctgtcagcacccatctaatgaaattgtcttctccaaaagactgactttaggatcagatacaattttcaccagtgttttttgtctaccttgctgcttctgaaaatatacatataagccttttaaaatgaaaagtttattaacttataattaaatagacgtagatgcatatgtgttgcattaggtgaaaagaaaaactgccagggagttataagaggaaaaactctcagagctcacactgagctgggagaagtttgaatgccaaccagttaaagtggaaagatcttgaacatgtggggcattgagtagagactcagaaaggttgtactttcataagagatccaaactggagctagactaaaggctaatgtataccaattttaagaaagcttaaaaataagccttgagagactcaagatgatctctaagtaacctcattttatctgccaaataaaaatagaacattccttaaaggaagaaaacaaaatcgaggcaggaaattgcctgaggctggagaaaaaatgacaggaaggagaaaggagtgatgaaaaattcctcagagggctgggcttggtggctcatgcctgtaatcctggcactttgggaggccgaagtggatggattatctgaggtcaggcattcgaagccagcctggccaacatggtgaaaccccgactctactaaaaatacaaaaattagtcgggtatgatgggcaggtgcctgtaattccagctacttgggaggctgaggcaggaaaatagcttgaacccaggaggcagaggttgcagtgagctgagattgcatcactgtgctccagcctaggcaacagagtgagactttgtctcaaaaaaaaagaaaaacaaagaaaaattcctcagagctcatacaaggctgggtagaatatgtgtttcaacaatagtggatcttttaatatagtacatggatcattgagtagagtcttcagcaaaatattggcaaagtagggttagggttaggttagggagatgggaatagactgaagactactctggacttgccctaacagagtttaagagcaacatttgaaaggatcaaactgatttcaagtaacttgagtgcatccaaggggagaaaacccatcaaaataaaaataaaaactacaataaaatcc

SEQ ID NO: 14059 - DNA, 796 bp, Homo sapiens
gaaagtcagcccttcctagaagctttctgagaggtgaaagagaattttggcctgagaaaggtcagcatgattgaggaagagataatgtgctatagtgcaaagacttggtaaatttttaaagtagattttgtagactttgtagcaaaacaattttcggatttttggggtaaattttgtggaatttgtagctaggtaactggggtctttagggatgttattaagtactgtaagcttcagttttctagtctgtagatgcggataattgtatctcagtcaaacagctgtggtaattagagacaatactatgcctttgtcttatagtaaataacaaatagagaaatcttagattgtaagtaagctagatattaggttttgtggatagacaatatctttttcattatttcaagctgttttgtgtaattcctgataatgtctgaggaggaagaaaaattcaacagccagtgtgagttattttgttgatacagcatgaaatttcagagagacaaactgatattggggaagaactaagtttttcatttttattttctttgaaacacagccacataagttttcttgaaagacaaagaactttgaccaaaatgcattgttaatggtgattcatattcttatgggaagtgtcatttacccatctcaataattggactattgtgatttataagaattcttatcaaccatgttaactaacacatattcatcaaaaattgttttcaaggttgcttttggattttttatttgtagaatttattttcttgcaaataaatttataaagcattgg

SEQ ID NO: 14060 - DNA, 2897 bp, Homo sapiens
aagagcaagcttttgtgagataatcgaagaacttttctcccccgtttgtttgttggagtggtgccaggtactggttttggagaacttgtctacaaccagggattgattttaaagatgtctttttttattttacttttttttaagcaccaaattttgttgttttttttttttctcccctccccacagatcccatctcaaatcattctgttaaccaccattccaacaggtcgaggagagcttaaacaccttcttcctctgccttgtttctcttttattttttattttttcgcatcagtattaatgtttttgcatactttgcatctttattcaaaagtgtaaactttctttgtcaatctatggacatgcccatatatgaaggagatgggtgggtcaaaaagggatatcaaatgaagtgataggggtcacaatggggaaattgaagtggtgcataacattgccaaaatagtgtgccactagaaatggtgtaaaggctgtcttttttttttttttttaaagaaaagttattaccatgtattttgtgaggcaggtttacaacactacaagtcttgagttaagaaggaaagaggaaaaaagaaaaaacaccaatacccagatttaaaaaaaaaaaaacgatcatagtcttaggagttcatttaaaccataggaacttttcacttatctcatgttagctgtaccagtcagtgattaagtagaactacaagttgtataggctttattgtttattgctggtttatgaccttaataaagtgtaattatgtattaccagcagggtgtttttaactgtgactattgtataaaaacaaatcttgatatccagaagcacatgaagtttgcaactttccaccctgcccatttttgtaaaactgcagtcatcttggaccttttaaaacacaaattttaaactcaaccaagctgtgataagtggaatggttactgtttatactgtggtatgtttttgattacagcagataatgctttcttttccagtcgtctttgagaataaaggaaaaaaaaatcttcagatgcaatggttttgtgtagcatcttgtctatcatgttttgtaaatactggagaagctttgaccaatttgacttagagatggaatgtaactttgcttacaaaaattgctattaaactcctgcttaaggtgttctaattttctgtgagcacactaaaagcgaaaaataaatgtgaataaaatgtacaaatttgttgtgtttttttatgttctaataatactgagacttctaggtcttaggttaatttttaggaagatcttgcatgccatcaggagtaaattttattgtggttcttaatctgaagttttcaagctctgaaattcataatccgcagtgtcagattacgtagaggaagatcttacaacattccatgtcaaatctgttaccatttattggcatttagttttcatttaagaattgaacataattatttttattgtagctatatagcatgtcagattaaatcatttacaacaaaaggggtgtgaacctaagactatttaaatgtcttatgagaaaatttcataaagccattctcttgtcattcaggtccagaaacaaattttaaactgagtgagagtctatagaatccatactgcagatgggtcatgaaatgtgaccaaatgtgtttcaaaaattgatggtgtattacctgctattgtaattgcttagtgcttggctaatttccaaattattgcataatatgttctaccttaagaaaacaggtttatgtaacaaagtaatggtgttgaatggatgatgtcagttcatgggcctttagcatagttttaagcatcatttttttttttttttttgaaagtgtgttagcatcttgttactcaaaggataagacagacaataatacttcactgaatattaataatctttactagtttacctcctctgctctttgccacccgataactggatatcttttccttcaaaggaccctaaactgattgaaatttaagatatgtatcaaaaacattatttcatttaatgcacatctgttttgctgtttttgagcagtgtgcagtttagggttcatgataaatcattgaaccacatgtgtaacaactgaatgccaaatcttaaactcattagaaaaataacaaattaggttttgacacgcattcttaattggaataatggatcaaaaatagtggttcatgaccttaccaaacacccttgctactaataaaatcaaataacacttagaagggtatgtatttttagttagggtttcttgatcttggaggatgtttgaaagttaaaaattgaatttggtaaccaaaggactgatttatgggtctttcctatcttaaccaacgttttcttagttacctagatggccaagtacagtgcctggtatgtagtaagactcagtaaaaaagtggatttttaaaaataactcccaaagtgaatagtcaaaaatcctgttagcaaactgttatatattgctaagtttgttcttttaacagctggaatttattaagatgcattattttgattttattcactgcctaaaacactttgggtggtattgatggagttggtggattttcctccaagtgattaaatgaaatttgacgtatcttttcatccaaagttttgtacatcatgttttctaacggaaaaaaatgttaatatggcttttttgtattactaaaaatagctttgagattaaggaaaaataaataactcttgtacagttcagtattgtctattaaatctgtattggcagtatgtataatggcatttgctgtggttacaaaatacttcctctgggttataataatcatttgatccaattcctattgcttgtaaaataaagttttaccagttgatataatcaa

SEQ ID NO: 14061 - DNA, 1665 bp, Homo sapiens
gttgtctttactgaaaaatgaagtgaagacccatatatgcagttaaaaaaaagttaattttcaaaaaatactgtaaaagactttaaggaacaagttttattgaccaataagttgatatttgtccataggtctcctttctataaatcatcttgatgtttaacaactcttattatattaaaatctcagtatcctaaaacttagaaccttattgatattttctatacagtagttttgtgattagaattcacctggggacacacactcacacgcacagtcactcttacacatatgcctagtccagtggttctcaaagtgtgatccatagactaatagcatagcattacctgagaacttgataatgcatatttgcaggccccacgcaaaacctgctgaatcagaagctctgagagtaaggcctaccaatctggtttaacaagcccgtcaggtgattctgatttacagtacagtttgagacccactggctagaacatatcctccagagacttggcttaattggtctgggtaaatatggctgagcgttgttatcttttgttatcttttatatgccctaggaaagtacaaccagaattgaaaaccaactgatctataccagttctttcaattaatagtcaagaacattgagtccagtgagattaagtgatttttgcaggctatgaggttttatgctattcctgtgttctccaaaacaagaaaataaaaagacatgacttattctctgttcatacagcaagtatggaaaaaagatgatctagaagtcaactatctcaacctccattgttacccactaggtttttttctaataatgttaaaggctatttaatttatttaatcaactttaagcattacattctcaattggggacaaaaattggttcttggggtgaaaaaatattagatatggcttgtggacttccaatatcatcctatccaccaaaatcttattccttagtattaatttatctcattgggaagaaatttgtagttaaaactatttaatgtaatttgaatttaatttctgtaattgggaaggagggtaataatgaacaaaaagtttgagaaaaaaatgctttaatgggttttacaggcatgctacaatccaggactgtggtgttctatgtgccgtgtatggtcatattagtagctatttgttgcaagatacttgaagccaaatgtttgcagtataggttcctggctactgtttatgctgtgatttcactctgtctatcatgggcagtattagaaaacacactggttttcactatctggtttacaaacactatcattattttacctggattgaagtgcagaatttggcatatcgatgcatgcaatggaaagaaaaaaaatttgttaaaatttgtaaatgttcagctaaatctcagatatactgtgggatgagtatctcagggtaagtaacaaaaaaacaaacaaaaaaaatcactgaaatttttccctcacagtcagtagctttgtttgatatttaacaataagtatatggtgatatacttgaaatttatgtccagaatgtcactggaatattacaatgagcataaataatcaagcttaggactaaatgaaagatactatctcatgtatgctttaaatagagaatttatttcttttaaaaataaagctatctttcctt

SEQ ID NO: 14062 - DNA, 934 bp, Homo sapiens
cactgaagctataaattacctggtcattttgtgatcacaagagtctatgcaaaaaaaaaaatttctttaccccagattatcagatttttttccctcagattcattttaacaaattaagggaagatattttgacacaagaaagcaggaacgtggagaaattggagcaggaaaagaaattatcaaagcaatagaaatagcttggtggtcctatggtgtttttggaagtatttggcattgctaattgagcagtccatatagtactacttttagaagaaacaaaaagtctattttttaaagtaatgttttttcttatgagaaaaaggtttagatagaattgggttttattaatattaatttaatgctattagcaatttccatatactatattgtggaaaagactgaagaatacaattctgagaaatataaaaaaattttaatggtatactcatgttgaaagataaatgttgctaagtcctggtatgatggtgtgagcttccttggggaagtacttcttgagttatgtaactaacaggatgttttactacagatctggatggctattcagataacatggcaaaaaatgatagcagaagatcattaaaaacttaaaatatattttattagaaaacatttatctatgaatgaatatttccttgatgctggtctctgcacacatatgcttggttacttgcatgcattcattggttgttcaataagtgagatgattacagataatactgtattttccttatatggaaaaccgttatagacccaataacaactaaacctttcaaaagaaaatattttctattatgaatgttgattttcataccaaagaagatggagagtctaaaatttggatatgattcttatgtttttttaatagaaaaccttcttcaagtttattttcctaaataaacatcataattgtgaa

SEQ ID NO: 14063 - DNA, 65 bp, Homo sapiens
ccttttgaatgagtagaaaaaaaaattgttttgaattattgctttattaaaaaataaacattggt

SEQ ID NO: 14064 - DNA, 2556 bp, Homo sapiens
ctcatccaccatcaatgactcatggtgttgagtggcatgctcattctgtgatcctcctaacgtatcaccagcaacctgtgtgtctctgtattttcttacatttggagtatgtttacaagacaataacacaaaggaaactgctttgaagctctcaagtggaacatcaggatgtgctcaaattgatgctgaggggtgacaaaggtgctcttgcattggtggagaggggctcagtaggcctaaatgttgctccaagatctaagattttatcattcaacagacagactcatgtgagagggctcatcagtctctgtaaatattggttgcagaatttaggggcagaagcaatggcttgtgagtgagcaagttactcttaacataggttgccctacacagtggctcctgcagtgtgatcagcaggagtctctgtcctacaaatctacacttttaaggatgtatgaaattgtggaattcattccctcaggatctgaagatctcagttctcaaaaatcacaagttgcaagaatatgatacctaaaattgaaagtttttcacatgttttcactgtatactgaaaatactcccctggaagcagggctgcatcataatttttgtgggctttatgtacttttgcctttgcgaaccatttcctacattcaaaatagtagtaacaaatatatatatatatatatatatatatatatatatatatatatatatatacacacacacagaaatatatatttataactgcattgataaaaggtgaatatattagcattttcttcaacctaaaagtttatgtattttcttctgattttaaaagaaattaaaaacattttagtgggcccttacaagtattatggtccttaggcacagtgcttactaggccgtgggtatgtcttagtgcgtttgggctactataacaaaatatcatagataggtggcttatacaaaatagaaatttatttctcacagttctggaggctgggaagtccgaggtcaggctgccagcatgctcaggttctggtgagagcaattttccaggttgcaaactgcttgctgacttctcagtgtccttccatggtggaaagtgcaaataagctcccttgagcatttttataaggcactaatcccattcctggaggctccaccttcatgacccaattacttctcaaggctctgcttcttagtactatcagcttgggggttaagatttcaacatatgaaattgggggagacacaaacattcagactatagtagggtaaattgaccttggctaaaggtctggggacactgtccaaagcagtactggcataaaactgcattgcagtcttacatttatcagaaataatgcaaatcttgcattctacaatgtactatatccatgttagtatgtacatatatatgtgtatgtatatatgtacataaattctccttaaatctctgagaagaattgtgctttaaaaaagaactatgttttgtgctgtggctcataccttacagtggtagtctatgtctcttagtttgagaaagctgaatattaacttcttattaacatgaaacatgatggcaaactgaatcctacaagtataggacccagaacatatctatgttattgtcatttacaagaagaaatatgtatttggtctttcttcctattcctggtgcagagctcctaaaacctttgggacctcccaagtgatgtgtctggtagtacgcgaatgagatgactgatagttaggggcttctgaatggcctcagaatagggtctggttgccacgggaaccaaccatgtgtttagagggttggaactttcagccccactcccagaccttggggaaggaagaggggctgaaggttgagtcgatcacaaatggataatgatttaatcaatcatgcctaagaataaagcttcccataaaaatctaaaggacaaggttcagagagcttctgcattgctcaatacatgaggagtggtgagcccaaaggggccgtggaagctccgtgccccttcccccaaacctgttcctgtgcctccatctggctgtttctgagttatattattttataatagactgatgatagtaaataaagccctttcctgagttctgtgagctactctagcaaatggtgaaatctgagaaggaaatcatgggaacctctgctttgtagccacgtcagatagaagatgtgagtaactttggaacctactgcttgtgactggtgtctgaagttgggggagatcttatgggactgagctcttaacctgctggggatctgcacttaatgccgattaatgccagaattgaattgtatgatatccagttggtattggagaattggccagtgtgggagaaaacccacacagttggtggcaaggagtgttcagtgttgagtgtgaatgtcaataaaaaaaggtttgttttttctacgtacaatatctttgggaacttggaggtgcagggtcagacgtctgtgtgtgtatgtggcagggacagaacagggattagggatgtgagggggtagagttttcagaataaagggagagaaaattc

SEQ ID NO: 14065 - DNA, 656 bp, Homo sapiens
ttacagcacctttcatgagtcaggttgcttagcagatacttggcttttatggcttttatgatcaggccatttcaatgtaatctcttcatctttttctttctctctgatatttgtttacgtaagtccatctcaaatattatttctaaaatcaatctattagataattgtgccaatctctcattttgaaattttgccaatggtctggtaatgcctagagtggaatgtgaagtcacatggaaatttgcatcttagttctgttacttagtagctgtgtgaaaattaatatttctgagtgccattttgtcatctgcacattgtagctacctcctagagctattatgagaattaaacatgataatacaaagtgtttagcacagtgtctttcataaaaatagatgctaatgaatgttactttctctctttctcttttgcattccatgtcttctattcaccattttccctgcctctattttctggttttatcagtttctacctttatataatgtccagaacttttcacagcctccccctctttcttcagacctaaatatctgaccttttgggaagcaggacagaaacctctttctaatccagtaacatgtgagggagaagcccatgcaggaagctcttgagttactgtactataacctggggac

SEQ ID NO: 14066 - DNA, 168 bp, Homo sapiens
tggactgtccccatctgcagagaggcttgactgccacagcatctgtggctatgctcagagggttatgattttcctttctttttttctaagaaaaaattattttcaggagaatattcttctgatagctttcatcattgaacttaataaactgaccttaaaatttcaaat

SEQ ID NO: 14067 - DNA, 537 bp, Homo sapiens
taaacataaaattagcctggttttatgtgacactgatacacacacaccccttatatgggactaattttacacttttctgtgttatgtgtgtatatacatacacatgtaagaaattattcaactgcaaaatctcaatcttgaaaatcaagcttgaaatttcataggtagaaatattagcatttttattgaaagatactcacaggattttccagaggctaaataacatgcaattgcataattgttctgagggttatggataatggaatatgtgtttgtacattcctgtttttaaaagggctcaggtttcacatggtccaggtgaggtaaaacaattaaaataaataaataaatggtctcaggtttaatttgtaatacgacaaacactggaagatataacccacaggaaattcttggaaacatcaatactttttaaagagtgtcaaggggtatgaagacaaaaaatattgatagtcactagagtaatgtattcttaacctttgtaagaactgatctcagcatgtattcttaaacctttgt

SEQ ID NO: 14068 - DNA, 361 bp, Homo sapiens
aaatgacagactttttcattgaatgatgaggacacagcagccatattatgccaagaggaaaaatatcatgatcatattgaaagatcaagcatgagcttccatggtgaagtcttctgtaccaatgcaccagagaatgcctaccatccaaaaaagcagtcagctgatggaaaagaagattattaaacctttgttctgggatttactgttaaaaaacaaacaaaaaacaacaaaaaagcggtgacaggaaacagttaaggaaatgatttaactgaagggaagcaagatttttttaaagcattgttcttaatccccatgactgtccttcagtcacaattccagaataaaagaatctactttgtgt

SEQ ID NO: 14069 - DNA, 639 bp, Homo sapiens
accaccaatgtgggagggggtgctaaaactttaaaaaaaatctctactgtgcaaatatcattattcactcagacttccataagagtaaataaaaatgaatatgcagtggctgacattgttttaaagtcactggtactatggacaactccatagtgaatggagatacttgcagagcttgtcatgcacactaagagtttaaaatgtgagctcattattaatcatagtttcaaaattatcaaataaaaccagtgaagatctgaagatgcaaacatttcaactatgaagatttacatttcactttctaatttattaaacatctgtgtgcctttttatctttggtttcttttaaaaagtatatttaatgcctttacaatacctttaatttattaggatctcagaatcattgtttactatcccttatttgacaaaaagtcaaatgtgtatgttctacctccaacggaaatgtttacaaggtcaagacttaattcaattcagacaagaccaaagttgcttgacttcaattcctgtgcattagtgtgatgatttctgtcacatagcagcattccgattctatgtaactgaatggagatgataagtgctttcccctctttatttaaaaaagattaaaaggaataaaag

SEQ ID NO: 14070 - DNA, 1070 bp, Homo sapiens
tctgctgacccagggtttccccttccccttcccttctgaccagccttggaggctcagcatctgtgcctctcactccgtggatgaggacatgggggaaggcagagacttcagacttctcagtgtgttgggaaaaccaaaaaccacaactacagaaattcatctaaaaataagtcctgctgctgaaagagcaaatccaaagactgagttatgtttaatgacttttggccgaatcactggaaatatctgtggtgagattgctgagtcaggtgatgtgatatcataagctttcttggaacgggggaaagaaaatgaaactttttggtgtgaatattttttatgctgatgtgaattattttgttaggtagtgtgattatagcactactactgtcagattttaaattgtatgtgtacttgcatctaagactgtggtagagaagtaaagagaagtcaattccttcttcctcacctctcagcctccagatcccttcctgcccatcccttccctacaatgcccactccagacgcaaagatacacttttttcctttggactgtgaacatggaagcctcagcctgaatgtgagtggcaagtggcttatctggagccacctgcccaagtcttactaaaatgcagctgttgttagacaactgttgaaaactccagaaatacatcacccaaggtggcagttctcagtatttggcagaacaattgcaattgcactgggtatattatatatatatatgtatgcatatatatcatattttttacaaggaacattttatgatgaaagaagaaacccttctctgccttctctcccacgaattctgtccctgtatcctctggatgtaaaaagcaaggagagaccccaactgtctccatggagaagaactaggaatcaccacaaggggaagaaatgtacatgaagtctccattacctcgaatttttttctcagtctcactggttgtgatttggtcactttagtgttgggacaggggaaagggtctgtgcgtgggcaaagctgaaggtgatgaggaagaagagacgaacattaaagatgtctatttactatg

SEQ ID NO: 14071 - DNA, 231 bp, Homo sapiens
ctccgttgactgccaaaatagcatccccaacgtgcagccctccgcatctatcagcaggttgccccggatggatctcagagatgaggattggaacaccatgttctttcccaccctaacaacaacaaagggcagtaaattaaagtactctttgtaaggtacagttaccgattaatctagagataaaatattttcttaaaaatatatttcattaaacacctatgctgtctctat

SEQ ID NO: 14072 - DNA, 3706 bp, Homo sapiens
tggtcattggttgcataatttgatttgaggcttgtggaggaaaggaaccaagtgactctgatgtttacaaagcacctatgaaaccctgtacacacctagttcataatcctcataatttatcaacaaacacaaaaaagtgtcttacttgagagtgagtgtgtgtgtgtgcgtgtgcacgtgcacacatgtgcacgtttgtatgtatggaaataaacttataaatggggacgtattggagaaggaaatacatagacctacaactttgagcaaatagcagtgatgttttaggaactgaaatgtcacacttaaagtcttcagcccagctacttccctatttttgtggggagaagagggcctgattagaactgttctggttgtgtttggcgggaggggaataatttttgttcagtccttcttagtgaccaaactttaatttttaagaataatatattgacttactgaactgaagcattctgagttgaaaggagctccagaggagtggagttctgtgttgctcacatgttaaaatcttgctcaccttcagagcagagggaatacctatcttcagatatccgtccattttcatctcttaattgtagtcaaaagtatgacttgagagtgttgctctggtattctgggttctgaagtctggtattctggtattctgggttcaaaagtatgacttgagagtgttgctctggtattctgagagttgctctgtattctgggttctgaagattatttgaaaaataactcctactacattgaaatgcagacttaaaaatttaaacattggattaggcagtcaaaaaaaccaagcaagcataaaaggtcaataagttgtaatcttgatagtaaaggtggaaaacttattataaatggaaagaaagttttatttccttttttgtttgatgggcagtatgccatattatacccaaagttcttttaaaaaatatttccatcaaccatttttatttaaaataaacatttgagggaagttaccaaggcagcttttttcctcaaaagtaacctgttcctctttggaatagcacattttaggggcatggttaatacctgagatttttactcagtaaatcctgatggttactgtgtgtaaaatatctttaagtaggattgaaggcctctgtgggggaataaaatattaccaaagtctataaaaataaattttacatgttctcttttatgacagagagcagcactggttctgttatttttaaaatgaataattgatttcttgataggtgtttaatatttcttccctcactgctgattcttagatagaaaccattctttatatttgatagactgctttcagaaaacccttatcaacaagtgtacaatacttatctaaaactatacatttagaatggagcagtttaatactagatctcagaagttttgaaaaatagcaaagaagactggatttggaaagcatggtctacaattggttgttaaattctgaagctatgaagaataaatgtttcaactttggattatgaaaccccatttatgattttttaaatacacttgaaataaaaatgattaaactaaattttggtccagtgacattactttgcactgcataatccattatacgttgtacgactttttttttttgttttaatttattactgagagttttgtgtgaagctacagcatatctaaccagagaatttctgattccttatactgtgattatattatattgaggcatttgtagtgcagctgaagactgaatttatgccttttgtaaacatgataggtataaatgtcttataaacattctggagtatgtatagctttaatgaatgaaatttaatggacctgattaaaatgaagggatttaatcgttgttaaagttaagttagtcaaataaattacctactggaatatagcccaagccagtaaaggtttaatatttgcattttcgtgcttttattttctccttccattcataagtatatacttgaaagtacatctgtagcctatgatttgagtctcttgaagttctaggaagaggcaaactacaaactactaggattctgatttcagatgtagtcattccagaaccttctctttatgagttcacctgctagtacaatctccacaacttgaatggcattggttgttctgtaattcctgccaaaagcatcacaagttgtacatcatcaaggctccctttgcactcccaagaagaactggtaattttaaacaaaagtatgtgtctttatttgtattggaaaatactgtctttaaattgtttcttgttgacactccccacaatggaaaaattaccgaattaaacctgttttatggatggcagcttggagcatagcaagaagttggaggatttgaattccattcccagttctcattgtgttttgtttcttaaaactataataatcggttactgttataaagtttaaaaggtggttttaatgtgaatagcaaattctggtatatcgtgactaacgcttaagaatgcctgtctttgagaggaaggtgttataatattaatgaacagtgccaaatacactgtgcatatctgcaatttaatctttgaatgtatgttactggattagctccctcctcctgtgtgatggtaccatgcatagagtcaatcaaatccttgtgatgttttgtatggactttgacaatatgtaaataatgtgtaaagccagtttttatgattaaggaatcaaatttattgaattttattattgaaagttgaaacttaacatgtatgaacaaaaaccaataaaagaatatactcttttcattgactatagtattatgtgaatgctacatttgttctgaacacttaggggctgcaaaaatgtaataagaaatgcatatgactagatagcaatagtgttttttttagatggtatgctcttgattgaaatatattctcacttttaccaggttaaacatttggaatcttataatgttacttgctttttgatagataatagtgaaataaattcagctttgccattgctggagttgtcaaaattccacagtaattaaaatttgaatttttaccgaatatgaaatttccaaattaaaaacgtatatgtgtactcttttaaaaaggaatttgatagttcttgtcaaatgagaaaatttaaaggtaagagttatggtttgtcttatgctgcatagactattcacctcctaacttgaaggtctaatcataagacaattgtttttttgtgcatagttttcatctaaaattaagtttaccaaaggcaaataactgcttactaggaacttcctttagcaaaaattactataaagttcaggacagtttgaaataaaacccaggaaacaagattaatgtgagcagttctccaagatcctaactggtgggacataaactatgatgcaatggataggaaaaggtagtgcaaaaagaatttcttaaggtttaaaaaatacacttttcattataggaaaaagaagattcagagaaacaaaggaatgtaaccttattgattacatttttggtgatcaccgagaattttttgtactatattttaaaaaatgtattctactgtaacaagttaataaagagattttttaaaaaactataaactagaaattgagagtcttgcattctcttttgtatttgattattgtgtctggatataaattacaatagcacatgaaaataaaatgtttt

SEQ ID NO: 14073 - DNA, 3415 bp, Homo sapiens
ggtgaggcccgccctgccaactgaggccaactcattggccatgtttttgcccatcatctctgtattgtacatagagaaaggtatttactaggtgcagtttacacaggtggactgcaaggtagcaaatcctccaaaagcttgtgaaaggaacaagctcaacatcactggagacacaggctctaatccacctgacttggaaggatgcctagctaacgtgtatcctgatcacaactcccctgcattcattactgtgaaaatttttgaatcaaaagcaagtattattgttattatgatttgtattattattattgctgttactgttattacaccaactttcaggaggatgttttgtactcctgatggaaactattgccagacccacatgtagtcaacataaaccccacttttctatggcaattcactttttaagagtcatactttatttttttgcacagactatatgagtgatgcatgccacaggagctccacccctgagaagtttccttttcctagggacctggtggttaatggtttcctctgttacctgttggattgcctgctcaataagtattttgtgctgtgacctttgtggggaggggcaactgaccatatacttctctattctaggaatagatataaaagaaacattttagcctttttatatttcgatctctgattactccaggccattgcctttctgttgtgccacgtgattctgctaatcaagtccctgtaataacaggataaggactgttccattactgtggcttttgggagcccccagaaataatatcatttgtgtttaggacaatatataattataaaatctttctgctcctccctgtagcctctcttcaaaaactatcttttattttttttccagatttccttagtgataatatggaaattaatcaaggcactggaaaaagccatggtcctctgcccttttaattctgtgacacctttttaaaaatacaccagcatggaaattacctttattgtggaaaatcattggttgtgccacctcctaacaaagtcaaggtgctgatgtggagcagtctttgaaaatggcttaattgatttggccactttgcagtggtaacaatgtcatcattgaaaaagtctggcattttggtcatatttggcatccattcaataacagatatattgacacgacattcttttttttttttttttttttttttgagacggagtctcactctgtcgcccaggctggagtgcggtggcacgatctcagctcactgcaacctccgcctccgggattcacaccattctcctgcctcagcctcccgagtagctgggactacaggcacctgccacgacgcccagctaattttttgtatttttagtagagatggggtttcaccgtgttagccaggatggtctcgatctcctgacctcgtgatccgcccaccttggcctcccgaagtgctgggattacaggcgtgagccactgcgcccggccgacacgacattcttatggacccagagaatactgcaggatcctgataagaccttgagtgatatgtcactagtctaatctgttgcccttaaaatagcccttttttcaaacacaggaaattaagaaacaccacagacctctattatttagaatagattctatgtgtcagtatgtgatgtactcttttagtttgactgacttcaataccattcaaaaagatcctcaatggagttacagggtttataggggaaaaatacatgtttatgagacattgggcaattcaaatcaacatgtgttacataagcaagcaaagcaaaacaccagtggggtctctggaaagtaaaaggacagactacagtagaaggactgatcccagagtgcctgtacaaggcctaaatctggcaggcaaaagcatcccacactgtctgtcagcacccacatggcctttttgcctgccttctataacgggtaagtggacctacccttggagatagagaagaaaaattatcttctctgatattcggatgtaatggtcatctcagttcagccccctaggaaacatgttttattttccatggggaaaatatcagcgttaaagctctatcaaatcaaaacaactttgccaacatcttctctctgctaccttttaaaccaattaaatacctttctctgaatattttgtccattcagatccgaagacctttaaagactgtggttttatttttgtgtttacattcctttggtttgaataatttgcttgatttattgcatttttagtatttattttaagccagatgttttcatctttgattcatttttatgacattaatttgtagacacttagtaaagtcttatgagaagcaagtggatgaaattatctccaagtccactcagtagactggagttttttaaaaatataaatttccaaaaagtttgcaatcaacagatggctaaaggttgccatctgaattattttataggatattttaattgactccattgtatggaaaccaagtgtgaatgttaagatgaatttgccgtataccctttatcattcggtgtccttgtactcagactttcatgtccctgggtgacctcaatgtgttggtttgtctccatttagaaaggttgataatatattgaattgttcaagatcaggagttccagactgaccctccaggaaaaaaaaaatcgcaaagaacaaattctttttctgtgtaaaaaacactgatcctttgggaatggggcgggaaatgggagtaggacaacattaactttagctgttttagtttctgagatttcataacctcagtagacaccagcaaaattttcagtttctaactccaccaccaatctctcctcaatgaataagactttagcaatttatatagaatttgatcaggtaagagcgaaccacaattctcctgaaccctgctagagattaagtggtggttctcacttcctcaatgaaaacttgcactggggacagcgcttgccttggtcagaccttcccacatctacatactctcaaatacatgaccaggtgatcaagcaatggaaaaatttgcaccaccgtgtcccatgaaattgtttcaatgtttagtttagatattgctaacttgtgctattaaccttttgacaagcgtgtagtattgtttgttttgggtttctttttgatttataactatttagtagtccccagctagctaccagtacagattttaccccatgggtaggattctattgttaagccacataacaaagcacactaattctgacaacactgcaaatggaaaatacgaaccaaaaaaaagttacaccgataagttcaacaaactgtccatttttgatatttgcatgctcccctatggactggctgtggcaatgtaatgcctgtataatgttttcaaataaaaataaatgctttatgaa

SEQ ID NO: 14074 - DNA, 1343 bp, Homo sapiens
agttctgctacaacctctagatctgcagcttgccacatcagcttaaaatctgtcatcccatgcagacaggaaaacaatattgtataacagaccacttcctgagtagaagagtttctttgtgaaaaggtcaagattaagactaaaacttattgttaccatatgtattcatctgttggatcttgtaaacatgaaaagggctttattttcaaaaattaacttcaaaataagtgtataaaatgcaactgttgatttcctcaacatggctcacaaatttctatcccaaatcttttctgaagatgaagagtttagttttaaaactgcactgccaacaagttcacttcatatataaagcattatttttactcttttgaggtgaatataatttatattacaatgtaaaagcttctttaatactaagtatttttcaggtcttcaccaagtatcaaagtaataacacaaatgaagtgtcattattcaaaatagtccactgactcctcacatctgttatcttattataaagaactatttgtagtaactatcagaatctacattctaaaacagaaattgtattttttctatgccacattaacatcttttaaagttgatgagaatcaagtatggaaaagtaaggccatactcttacataataaaattccttttaagtaattttttcaaagaatcacagaattctagtacatgtaggtaaatcataaatctgttctaagacatatgatcaacagatgagaactggtggttaatatgtgacagtgagattagtcatatcactaatatactaacaacagaatctaatcttcatttaaggcactgtagtgaattatctgagctagagttacctagcttaccatactatatctttggaatcatgaaaccttaagacttcagaatgattttgcaggttgtcttccattccagcctaacatccaatgcaggcaaggaaaataaaagatttccagtgacagaaaaatatattatctcaagtattttttaaaaatatatgaattctctctccaaatattaactaattattagattatattttgaaatgaacttgttggcccatctattacatctacagctgacccttgaacatgggggttaggggagctgacaattcgtgggtccgcaaaatcttaactacctaatagcctactattgaccataaaccttactgataacataaacagtaaattaacacatattttgcgtgttatatgtattatacactatattcctacaataaagtaagctagagaaaatgttatttagaaaatcataagaaagagaaaatatatttactattcattaaatggaagtgggtcaac

SEQ ID NO: 14075 - DNA, 1554 bp, Homo sapiens
ccacctaccatccctttagtacaaattaagctattaaaaatacacagaactatttccctgaaattccgtaagtacatagtcaaaacacaatgtgaagaatttgtttaaaaacatcctgtagaaagtttataagaaaaccagtatttgaacaaattgtggaatataaatacaactatttttaagtaatttttttctctaatgtgttattttatttgttctgaaactaatctgattaaagcatatatattattttcttctcctttatatgtaatgaaagcacttataaagaaacaggaatcattagaccaggttgtaaagatgtcttggcctcccagacagtctttggaccactattttactggcctttgaaagaacaaagtttacttcaactaaaatgtttcttcctgtgaagacatatggtatcattttaatttaaggggcagatttccattcttttttggcatgtccttaaaaagaggatttgaaatcaactatatgctaccaagaactttaggatccaattttccaagccaccgtgaagcctcttatggctactattatagttcatgagatgttggacagcatttggtttgtttggtaagagaagaacaaatatggctaattgttaataaggtcccctggctatggtttttgttcttataacagagtttagaatatcagagcatttcttgaatcatacatcattattgtccagtgaattcaagaccaaatacaatatcgggagaaaatacaaactccctgtgtttaagaataggggattacaatggctcaaattggttcatttgatttctaaaaataccatgacctttaaaaattcttttaatagatcatgttattggcagtatttatataaaaaccatggatttagaaaggtatatttagctttattataatagatacgttactattttggaaatatatatattttcacacctgtagtactcttccccatttcctctgacactcatgcagaatgagatcaggcatatttgtggttgacatactctagatagcttttccaacaaatctttgaaaagcaatcttggaaaggaattcattaactaaatggggtaaaaggtttctttttctttgagagttaagtccttcctcaaaaaattttcttatgctccataaaattgaggtagaatattttcattattcttgcagctaagcaagacagccatatgatgcaggttatgcagtgccttcatatctaaaacttttatactgcactttttaaagcttttatgttgaggaaaggaaaagggcatttgtctaaacatggattctgagttgtatatatttcctatcattctaaaaaagtgaatttgtgaagcaaagttttgccagatgttaaactttgaatttaatataccagattattaaaatattgtccattaactagttcatagattttaaaagtaaaatacttctgactgttaaaactatataaagaaaatctcatttgtctaattgcaattaaaagaaaaatgttaaaatattaaaatgaaaataaaagcattactttccaac

SEQ ID NO: 14076 - DNA, 1731 bp, Homo sapiens
atacaggcttgaaagcatcaagattccactcaattgtggagaagaaaaaaggtgctgtagaaagtgcaccaggtgttaattttgatccggtggaggtggtactcaacagccttattcatgaggcttagaaaacacaaagacattagaatacctaggttcactgggggtgtatggggtagatgggtggagagggaggggataagagaggtgcatgttggtatttaaagtagtggattcaaagaacttagattataaataagagttccattaggtgatacatagataagggctttttctccccgcaaacacccctaagaatggttctgtgtatgtgaatgagcgggtggtaattgtggctaaatatttttgttttaccaagaaactgaaataattctggccaggaataaatacttcctgaacatcttaggtcttttcaacaagaaaaagacagaggattgtccttaagtccctgctaaaacattccattgttaaaatttgcactttgaaggtaagctttctaggcctgaccctccaggtgtcaatggacttgtgctactatatttttttattcttggtatcagtttaaaattcagacaaggcccacagaataagattttccatgcatttgcaaatacgtatattctttttccatccacttgcacaatatcattaccatcactttttcatcattcctcagctactactcacattcatttaatggtttctgtaaacatttttaagacagttgggatgtcacttaacattttttttttgagctaaagtcagggaatcaagccatgcttaatatttaacaatcacttatatgtgtgtcgaagagtttgttttgtttgtcatgtattggtacaagcagatacagtataaactcacaaacacagatttgaaaataatgcacatatggtgttcaaatttgaacctttctcatggatttttgtggtgtgggccaatatggtgtttacattatataattcctgctgtggcaagtaaagcacactttttttttctcctaaaatgtttttccctgtgtatcctattatggatactggttttgttaattatgattctttattttctctcctttttttaggatatagcagtaatgctattactgaaatgaatttcctttttctgaaatgtaatcattgatgcttgaatgatagaattttagtactgtaaacaggctttagtcattaatgtgagagacttagaaaaaatgcttagagtggactattaaatgtgcctaaatgaattttgcagtaactggtattcttgggttttcctacttaatacacagtaattcagaacttgtattctattatgagtttagcagtcttttggagtgaccagcaactttgatgtttgcactaagattttatttggaatgcaagagaggttgaaagaggattcagtagtacacatacaactaatttatttgaactatatgttgaagacatctaccagtttctccaaatgccttttttaaaactcatcacagaagattggtgaaaatgctgagtatgacacttttcttcttgcatgcatgtcagctacataaacagttttgtacaatgaaaattactaatttgtttgacattccatgttaaactacggtcatgttcagcttcattgcatgtaatgtagacctagtccatcagatcatgtgttctggagagtgttctttattcaataaagttttaatttagtataaacata

SEQ ID NO: 14077 - DNA, 746 bp, Homo sapiens
atccccaggaagtggactttacatgtatatattcatcaaaatgatgaactatttattttaaagtatcatttggtactttttttgtaaattgctttgttttgtttaatcagatactgtggaataaaagcaccttttgcttttctcactaaccacacactcttgcagagctttcaggtgttactcagctgcatagttacgcagatgtaatgcacattattggcgtatctttaagttggattcaaatggccatttttctccaattttggtaaattggatatcttttttttacaaatacgaccattaacctcagttaaatttttgtttgttttcctgtttgatgctgtctatttgcattgagtgtaagtcatttgaactaatggtataactcctaaagctttctctgctccagttatttttattaaatatttttcacttggcttatttttaaaactgggaacataaagtgcctgtatcttgtaaaacttcatttgtttcttttggttcagagaagttcatttatgttcaaagacgtttattcatgttcaacaggaaagacaaagtgtacgtgaatgctcgctgtctgatagggttccagctccatatatatagaaagatcgggggtgggatgggatggagtgagccccatccagttagttggactagttttaaataaaggttttccggtttgtgtttttttgaaccatactgtttagtaaaataaatacaatgaatgttgagtactagtg

SEQ ID NO: 14078 - DNA, 1177 bp, Homo sapiens
aggctcataatctatcaagagtgctgaatttctgcatgttgaaagacttagtggttctgttttcttgagacatttaatctggtggtaactgtggtaacattgcagccctaagcagcatgtgtatattagataattgtgttgtgatgctactcactttgattgcaatgatgatgtccaaggtaagctattaaaaggcaggttacttccaaatcgcactgaaggaaaaggttaagaataatacatgatcacagaaatgcataccactgtctgtaaacccaacaaaattcactgttctcttttggatttatttagcctgatgtatttttaattcaatttttatggtgatgggcaaatcattcttggtaaatgtaaatcaaacatgattgatttaaaacttcatggaatttgtagaaaattatggacatttttggtgagaaagaacaatagtcaaaactcacatggatagagtgtgtttgttttttgccaaaaatgccccagactttttcccaaacctcaaaaacgtcttggaaaaattgtaaaagtttgataacagaaacatctttaggatatttttgtctgacatattttgcttctagtatgtgcctactgtgatttttttcatgtggaaaatgcaaaatttgtaacaaaatggttatatggaacatgcctattaaatgaattttactatcttccctaactttggtctgtgtatgtgtgtgtgttttactttaatatgaattatacaaaatactagttgttttacactctcttttcttattcttagggcttttgtgtatgtctgacttgtttttaaataacttcctcagcaatgcagaccttaatttttatatttttttaaagtagctaacatagcagtaggcacttaagcatttagtcaatgatattggtagaaatagtaaaatacatcctttaaatatatatctaagcatatattttaaaaggagcaaaaataaaaccaaagtgttagtaaattttgatttattagatattttagaaaaataatagaattctgaagttttaaaaatgtcagtaattaatttattttcattttcagaaatatatgcatgcagttatgttttatttgattgttgacttaggctatgtctgtatacagtaaccaaataaactctttcactattaaagagatttcttactg

SEQ ID NO: 14079 - DNA, 304 bp, Homo sapiens
aaatgttcctggtcggggcttggaagagctcttcagtttttctgtttcctcaagtctcagtgctatcctattacaacatggctgatcattaattagaaggttatccttggtgtggaggtggaaaatggtgatttaaaaacttgttactccaagcaacttgcccaattttaatctgaaaatttatcatgttttataatttgaattaaagttttgtcccccccccccttttttttataaacaagtgaatacattttataatttcttttggaatgtaaatcaaatttgaataaaaatcttacacgtg

SEQ ID NO: 14080 - DNA, 309 bp, Homo sapiens
tatttcacagtttttgctaatagaaaatgctgattctgattctgagatcaatttgtgggaattttacataaatctttgttaattactgagtgggcaagtagacttcctgtctttgctttctttttttttttctttttgatgccttaatgtagatatctttatcattctgaattgtattatatatttaaagtgctcattaatagaatgatggatgtaaattggatgtaaatattcagtttatataattatatctaatttgtacccttgttgaaattgtcatttatacaataaagcgaattctttatctct

SEQ ID NO: 14081 - DNA, 157 bp, Homo sapiens
taacttctctacatccccttcatggattagaaatggaaagtattggttttcagcaacagggacaacactgtagaggaattaccagctggaaaccgacttattcatgttaatgtagcataatatataacaaggcatcaggctttccttggcctgaacc

SEQ ID NO: 14082 - DNA, 614 bp, Homo sapiens
aaaacagagaaaacgatcacggacaggtatgcactggtaacatgcagatgatttcatccagctaagctggttggagtaggagcgataccaaagggtacacccatctgtgagtcacatcttgaaaaacactgagaggaaccttctaccatctcatctcccagtgattctccgtgggccacaatgcctctagctatggtgcactcccaacatggtatcctgtcctttccctaaacaaattgctgctgcttttaaaaaatggtcactttcataaactataaacatctatatcataactctgacctttgtggttcttggaagaagatattttaagaaccagttatcctaagaattctgagcacgcctcttctgagaattgcttggactgtctttgaactctgcacctccttccaggccatcttgtgagacttggtgttaatagctgaagtcctatctgtaccaacaagcaaggccacttttcagaagataagagttcactgaatgcacctattataatctgtggccccagcagtataattcttttatctttcaaatgttataattgcaaaaaatctcaatgtccaaaagggaatgagtgaaactaaattaatgagaag

SEQ ID NO: 14083 - DNA, 655 bp, Homo sapiens
gcggtacgaaccctaatggaggcagttttgaggaggtcctcagctccacggcccatgccagtgcccagagcttggcaggaggctcccggcggaccaaggaggaggagctgcagtgctaagtccagccagcgtgcagctgcatccagaaaccggccactacccagcccatctctgcctgtgcttatccagataagaagaccaaaatcccgctgggaaaaacccaggccttgacattgttattcaaatggcccctccagaaagtttaatgatttccatttgtatttgtgttgatgatggaccacttgaccatcacatttcagtattcatagatgactgtcacattttaaaatgttcccacttgagcaggtacacaactggtcataattcctgtctgtgtaattcgatgtatatttttccaaacatgtagctattgtttgctttgatttttgcttggcctcctttatgatgtgcatgtccttgaaggctgaatgaacagtccctttcagttcagcagatcaacaggatggagctcttcatgactgtctccagcaataggatgatttactataaatttcatccaactacttgtgatctctctcacctacatcaattatgtatgttaatttcagcaattaaaagaattgattttaatgac

SEQ ID NO: 14084 - DNA, 1466 bp, Homo sapiens
atttttcttgaacttcttgcaatagtaactgaatgtcctccatttcagagtcagcttaaaacctctgcaccctgaaggtagccatacagatgccgacagatccacaaaggaacaataaagctatttgagacacaaacctcacgagtggaaatgtggtattctcttttttttctctcccttttttgtttggttcaaggcagctcggtaactgacatcagcaacttttgaaaacttcacacttgttaccatttagaagtttcctggaaaatatatggaccgtaccatccagcagtgcatcagtatgtctgaattggggaagtaaaatgccctgactgaattctcttgagactagatgggacatacatatatagagagagagtgagagagtcgtgtttcgtaagtgcctgagcttaggaagttttcttctggatatataacattgcacaagggaagacgagtgtggaggataggttaagaaaggaaagggacagaagtcttgcaataggctgcagacattttaataccatgccagagaagagtattctgctgaaaccaacaggttttactggtcaaaatgactgctgaaaataattttcaagttgaaagatctagttttatcttagtttgccttctttgtacagacatgccaagaggtgacatttagcagtgcattggtataagcaattatttcatcagttctcagattaacaagcatttctgctctgcctgcaggcccccaggcacttttttttttggatggctcaaaatatggtgctgctttatataaaccttacatttatatagtgcacctatgagcagttgcctaccatgtgtccaccagaggctatttaattcatgccaacttgaaaactctccagtttgtaggagtttggtttaatttattcagtttcattaggactatttttatatatttatcctcttcattttctcctaatgatgcaacatctattcttgtcaccctttgggagaagttacatttctggaggtgatgaagcaaggagggagcactaggaagagaaaagctacaatttttaaagctctttgtcaagttagtgattgcatttgatcccaaaacaagatgaatgtatgcaatgggatgtacataagttatttttgcccatgcctaaactagtgctatgtaatggggttgtggttttgtttttttcgatttcgtttaatgacaaaataatctcttaatatgctgaaatcaagcacgtgagagtttttgtttaaaagataagagacacagcatgtattatgcacttcatttctctactgtgtggagaaagcaataaacattatgagaatgttaaacgttatgcaaaattatacttttaaatatttgttttgaaattactgtacctagtcttttttgcattactttgtaacctttttctatgcaagagtctttacataccactaattaaatgaagtcctttttgact

SEQ ID NO: 14085 - DNA, 2339 bp, Homo sapiens
aattcagactgccttaaaatataacattaaaaagactgggttcgatcagccctcctaaagctggctggaaaaagaagccccagcccagcctgcctcatcccaccccaatgcttcctttctgccatcatctcagagcatgatcacattgcagaaagattctggaaggtccatgtagagggcagacattgaagaaagaaacttaaaatccaggttgttgaaaagactttgtactcccacttcctccaaatccatacagtgaggaatcagagtgtttatagatatatgagttgaatgcaatttttatttttggtaactgtgaaaaataagatactgtggatatatacatgccttgtgtatttatcagcataattttcattaccaaaatgtacagctattatttgccatggaaaaggttagtctcatttagaaaaatcgaaagtgcacagcacttaaagggaatatatgaggtttttttttttttaaaaaaaaacttttatttattatttgtagtatattgtctgaaatgtgtcggcagttttttttcttttaatgtgtcaaatcttgaaatattaaatgtatacattttgtgctatgttttgggaacaaatctgtttgatttatatagttttatattgaattttttttgccctgattgtttagggtgataggtcttaagcagcatatatctatatatctgtatgtgggtatatagagatatatgtgtgtgtgtatgtatatgtacatatacatatatatgagtgtataattctaaatttctaaaaactcattatgaatgttcatcaatttgactattataggccagctttccatttagtcaataaaagcgtacatttttagttacttaccttgaacatattcgtgtgaaaaagaatacatcatttctcacagtcttaagttgatatttatagaaatgaatacctttgtgaacctagacttagaacaaatcctgcttttgaaaaaaaatgttttgcttcttacaaaatcatttgtgttaataacaaaaactttattttcggagtgttctttgtataacttttccaagcttttacattaacgagcaggcctctgtcttaaaagggactcagtatattaatttctgcattttttaaatcaaatgaaaaacgtcaaattggaccaattgtcttggtttcttgattcatttatttgagaaaaaaacaatacaaagaaatgcattcatatcaaaattggaatagaaaggaaaacctatttttaagatatcaacctattttcacatcataaaacatctattacataaaataaaggtccaggcatagtggctcttgcctgtaatcccagcactttgggaggccgaggcaggtggatcactcaaggtcacaagtttgagaccagtctggccaacatggtgaaaccccatctctactaaaagtacaaatattagccgactatgtggcgggcacctgtaatcccacctactcgggaggctgaggcaggagaattgcttgaatccgggaagcagaggttgtagtgagccaagatcgtgccactgcactctatcctgggtaacagcgagactctgtcttaaaaataataacaataataataataataaagacttacttaaccaatattattgattaccagacttttatgaaagccaaagactgcttgctagtaggaaaaaatttcaaataataaccaaagctgaaaaatggtctgtcataaattatttccccggtaatttttgaaaggaaaaatgtataacaagtactatttacatatctgcatttaaaaaagcaattcttagaatacttcctttacattattctcctattttagacattttgtgaaagagaacaaattgtccagtggcctcctgtcagatcaacaattattatactccttaattccatgcaaatttaaatgaatgctataaaattttaaatctgtagcctgggtgtacgtttcactcaagttctcctactgaggactcttgactaacagcatactggcagtttcaccttaacctgctcgttaaataatgtgttggtgtgagatatcaggaatgtctcatgatatcacgtttaccatttacaccatctgcaaccatatgctattaataaaatggaaaaaaacaaaatggtcattttgcatatacttcactctgacctagtttagtccatgatactataattgtgagagcatatccagatgctgtgttctctatgtaaaacagtattgtccattcagaaatgtgtgacccttcatttatggatattgactatatgtaatgcagtgctatcccaatattttcaataaaggactttatgcattcagtg

SEQ ID NO: 14086 - DNA, 751 bp, Homo sapiens
aaatgtcaagagtggaagatttttctaatcttggttcagcatgaagtggtatttaggtcccttttaagtctaattgcaattttaagatttgttgggttttatgagaggctgttacttagtggccttaaatcttttctgaatgtctgtttcctaagatctgtgatacagttatgtgaatattttgttactgacttgtttcaatggttacttgtataaggattttatatatatgatactatagataaaatcctatttaagacaaattctgttaatcaacaagggctctgtatttttttaagttaaaatattttcatttctcagtaagtagtcagttataatagtgatttatttatgaagaataaactactatagaaagtactttgtgggaacctttattactgtgaaggagaaaaatagctatttcttgacagttctatagttatacacataaattttcaaaataaagaataccatactacacaatgatctctgattttgctgagggaaggaattatatatgtgccactttttcctcaaatttcagatgccagttttcactttttgaagcattgcatctttttaataaatctatcctgaaagctatataatatatataatttatatcaatgaatttacaataactatcaaattggctatcagaattcactgtaatggaattttgcctctaataacataaagggggaagaaacataaagtggttctcttaataaaactagcagaaaatgttgct

SEQ ID NO: 14087 - DNA, 436 bp, Homo sapiens
aaattaagattttgacaatgaagaaagaataagaatttgatttaaaaagacatctggatgtgaactttcatgtatgatccagaaaataggtacggttttaaaatattttatatagaaaagctacaaagtaaattgagcaatgcttttaaagttatctttgttttatagacttttttgttgtatgtattacagtctttataatcttatttaatgtatatttgtactttcaagtactgatggagatagactcaaaacagttatttttttacaattaatctacaaagggaattaatattgttgacttttaaaacatctgctggatatattatatgcaattaatagtagttaagaatttattcatttggtagatatgtttatttggtttttggttgtcatcgatttacattgccactaataaaccatattgagaatttct

SEQ ID NO: 14088 - DNA, 110 bp, Homo sapiens
aagtcaaagaacatattcttgaaagttatgatgcattcttttgggtggtaacagatcataaagacattttttacacatcagttaatatgggattattaaatattggctat

SEQ ID NO: 14089 - DNA, 1030 bp, Homo sapiens
agggttccatgagattattgtagactcatgatgctgctatctcaaccagatgcccaggacaggtgctctagccattaggaccacaaatggacatgtcagttattgctctgtctaaacaacattcccagtagttgctatattcttcatacaagcatagttaacaacaaagagccaaaagatcaaagaagggatactttcagatggttgtcttgtgtgcttctctgcatttttaaaagacaagacattcttgtacatattatcaataggctataagatgtaacaacgaaatgatgacatctggagaagaaacatcttttccttataaaaatgtgttttcaagctgttgttttaagaagcaaaagatagttctgcaaattcaaagatacagtatcccttcaaaacaaataggagttcagggaagagaaacatccttcaaaggacagtgttgttttgaccgggagatctagagagtgctcagaattagggcctggcatttggaatcacaggatttatcatcacagaaacaactgttttaagattagttccatcactctcatcctgtatttttataagaaacacaagagtgcataccagaattgaatataccatatgggattggagaaagacaaatgtggaagaaatcatagagctggagactacttttgtgctttacaaaactgtgaaggattgtggtcacctggaacaggtctccaatctatgttagcactatgtggctcagcctctgttaccccttggattatatatcaacctgtaaacatgtgcctgtaacttacttccaaaaacaaaatcatacttattagaagaaaattctgattttatagaaaaaaaatagagcaaggagaatataacatgtttgcaaagtcatgtgttttctttctcaatgagggaaaaacaattttattacctgcttaatggtccacctggaactaaaagggatactattttctaacaaggtatatctagtaggggagaaagccaccacaataaatatatttgttaatagtttttc

SEQ ID NO: 14090 - DNA, 664 bp, Homo sapiens
ataaaaatgtcttcagctccatgctcaaggttgaaagggttacctgtaaatttctgcccacataacattatactcatccctagtagtgcattttgggagttggggtgggaaggggtatgggaaggatagactcataattaaaatgtctaacatgtctctgttgagaaatttatttaatgtaaggaacttgggtgttaatagttgagagctgtttagtaataacccagttttcttgaggtctgtttactttatactttttaaaaacttctgtagttcttttggccagtgtgtttgtattatctgtgcattaatggtcctcatctgactcctgcattgtgtcttatttttctgcatggattggcataagaccattactaaaatttggcacctgtgagatgtttgatattatgaacaggaaacataatttaatgtatgaatagatgtgaatttgggatttcaaaatagatgaataacaactattttatagtaaagttattgaaatggaaatgaaaacagccagtaacttatgtttcagaatgtttgtaacacacttcatggtgttcccataggctttgctgtctagtcttatagtttgaggtttttttggtctgcatttttctttttgattacaaaatttataatttaataaatactagagtttatc

SEQ ID NO: 14091 - DNA, 191 bp, Homo sapiens
aacatttaacttcaaacttcaggaaatgattaatgaattaaaaatgaaaaactcgaacttgacaatcagtaatttcaaaaaattaatgtcatcatgaccatgtagtttattctttctgatatttttgatttatgcttatttgttaagatcttgtacatgtattaaaaacttaaattaaatgcattcaagtt

SEQ ID NO: 14092 - DNA, 216 bp, Homo sapiens
taaaaataagtgtaaccccaggaagagtctgtcaaaacaagtatatcaagtaaaacaaacaaatatattttacctatatatgttaattaaactaatttgtgcatgtacatagaattctttctgtattcagatggtgctaattcagactccagactgaattttaattcaagttctttctcaagtctataaataatattaaactgattatttcattct

SEQ ID NO: 14093 - DNA, 1686 bp, Homo sapiens
agatggtgaattctgaataccatcagcattctgctttaaagctcatgttttattcaaagcacaaggacggttataactcctaagtgagaagtctccaaaactcaaaagagcaacactatcggattatttatattactcaagagacaatatatatgaattcttatgaaagtgcttgagcttttaaccaggtactgtctaacaacagtcatcttttggttctgttcactgagctaaatttatctttgtaaatctttttgagtctggggggtggggggaaggggggcttcattaattatttatggtaatggggggcagagtaagaacttttggcattttgtaaacattgttgaattctctttcatgtacactgtttctttttcaatactttcagaaacctttttatataatcaaatttcaatttaaaccaaattagtcgaaacctggctaagtttagccagtaggactgttatctgtattgttaattttgtgccatattttgaattgcaacattatgctaagtataactttgcaagtcatgatattgcctaactgcttgtcataattgtcagggctgaatagttgtaagaatgacttttctttgaatcagtatttttccttttgcacgcattatgaaatgttaaacaaattacttttcaccagcatctttactataattaccaaaaacatgtatataaaagaatgaaattgaaaaataaaatatataaacataaataaattaggtagtgtattttgagtggcatcagtctcactcatcttggtgccccggtgtttacaagagccagatggtgtcagaggagtacgcagttgtatgcagttatggttggggggaatgtttgtgagggtcttgaactatttatgagatgatcttgagcttctaattttcattgatgaaattgtggtggtttacagagactaagagctcattctgtcaacagaaacactaatctgtacagagcgctgtctcaggtcatgcattgtcctccaaacccaaaggtttttttcagggttggctagagagcgagtattgtgattttgctgaaaagacaaggtgtgaaggagcaacttcagttgacacaaaatttgaaatgctcacagatcagggaggtgatttcccaaagtaattgcccaagaacctccgttttggaaggattcctttttctgtagaatactttgcctcgatatataagcatacagatgcactttaaatgaaaacccttgattataaattgatagctggtagtgtttcttttgcaagaatgcatttctaaggcaaaaggtaaattattttgtccgtcttttgatgtactttctgattccaggattggatatttattcaaggactattttaaaaatagaaagtaagtttgtagcatgctgtctgaattctggggtaagttccacctcttctttagttgctttcgttttttatgatgtaggacttcctttgatatccctgttggaagtccattagcagtcctttgcatttgccaattcaaggtaaaacagggtcagtgacatctgcagtgtcccagtcatttatttgcatgaatctgcttaaataagttttttgttgctgttttttcttttttatgttttgttcagaatttgtacattcaagttgtacttgttatatctgacatgaatgaaataaaatcttaattacag

SEQ ID NO: 14094 - DNA, 1165 bp, Homo sapiens
tgttaaaagaatatatcattttacaagggtatatattttaaaacgattttcactggtgtttccttcttaaagtattggctgtaagcctttttaatcaaatggtttgtagtgtattagaattggctgcttagttctgtaatgaagatggttgtatgtttgggttacttgtgactgcagtactctatgttaccacacatgattttatttttctcttcctttgaaagcatgatctcttttattaatatgaatgcaaaatgcttgcatccaaattaaagcttattttctttacttttaagttctttgattgccctattcataaaatgaaatgtccagtatggaaaacatagggtaccaaagtgtggaccaggagtacaaattcagtcccaatactcaatacgtattatagatgactatgagtgcaaaccttaggatgtgattttctgaataattgttctttgtaggatttggttacattatttaaaatgaaaaagatctagttttagtgtgagctcagtaatgttaattggttaagttcattgtgaatcttgagttttagataagtagttatttttttcaatatcacttctgtttttagtgatattatatcaagaaacaacgtattcaagagccatggctgacagtgccagatatacttagggataaacatcaaaatgcaattatagttgctataacgttagatactcggaatcaaaatttatttgcaagctgacttgataaactaaatgaaccaataaaatttgtagaaatgctatcctgaaataattatatacatgaagacaatgttgactaatgaattaagatacattatatactagttaatgctaactagtctcagtacctgtttttagccatctgttactgtccaatagcacctcattcccacattctattttcccccggtattctttagatcctagtatttggaaaacaatcggctaaccttgacatttctttttaccttcatatgccactatctcggtagttcaaaaaaatttagttcttgataaattgccttgaagtttaccttgtgctggagagccttatgataactccaaagactttcttacggtataatacatgttgtttaggattgtgtttcttagtcactgaagataataaatattaaaatggatgttttcatcag

SEQ ID NO: 14095 - DNA, 1809 bp, Homo sapiens
gcccggaacgcaggcccccatgtctctgtgcaaagcctccctgcttccctctgctgagtctagggactgacttgcagcgtgctgtttaagttaagtttctctggtgcaatctgtgaagattgcctaatacttttcatgatcgatgtgttcgcattgctgaaacacaacagaagaaaaatggagtgctgggactggcagaggaaattaattgatgaaagaagaatggcccaagtttcattcgccctcagccacgcacaagggaaagggaactttgggttatgcctcctggacgcaaattaaaggccgagaaagaggccttgccatcaatggaatactgccatttatattgcttagcagggcatttgactactttatctgaggccagaactctcacacacagctatcaagtgctaagtttaaaataatcactgttggaattgtcatctgtacaattagtccataatgtttcatgtttgtcctaagtgtgctgttgctatgcagtgtgatctttatttatagtaaattatgtttcatgtaaatgatatatttttggtgaaatgcaaccttttctataaaatgtgggcaacattttaaagtttttttaaaatcctattttgataagtcagtatgccatatttaatgaaatgttattatataatttttttttcttaggcaagaaacctattggaattcgagacttaattaatgaagctttgcatcgagaaacgatgggtctgaagtccaaagtgaaacagataaaggaacttttattaaagcctgagactcaggccagaattaggagggagctttttgaaggaagacttattaacaacagtaattcagcaaatgacgttgatttcagcacaactttgacataagctctacattgcgattgtgacaacatagcttatgaaatcttttcagcttattaagtagctctttggtaaacaccaaagaagtttctgatagtgtctgcacaacagcaaaccaacatttggtgaggaattagcaatttcttgccaaagaaaattgattctgcccaattattttttgagctacacttgtgttttagaatatctgtttctgtaatattgagagttattttatagaaatgatttcttaattagctgttgtgagatatttctcgggtccttgcagaaaaaaacatacagactgtgaacaaatcattcacaaacagaataaaacagagccaacaacagtattttaagggtcacttgcctcctgttgacacaattgttgctaaatcaaaagaagcgttgtccaggtgtgtctacatctagtgttacttttaatgagaatttgaatgtttattgaacaatagtacttgaatgaacatttataaatgtaattattgcgatcactggttaagaatgttttatatatccttataatatttttcactgatcaaaatgttgttctgctttttcatttcttaaggaatacatgtttgggatttttattttttacgtgtccgaagataagctccaggtcttatcgtatcccttgccatctgaacttgtttgcactgcttctgtttgaaagagcatcttgaaaaacttccccggtatgatgattgttggtaacaactttttctatagtcattgatggagtagatcatgatggaggggaaatcactggagatcaaatatgtaaaatcatttcaaatataaaatccagtttactcatggattttagctattttttcactgggtaaattatactacatttatttacaaatgagtttatgcattttcatggctcttaataaacatattgttttcccttgtt

SEQ ID NO: 14096 - DNA, 420 bp, Homo sapiens
atgtggaaacatccgatataaatctcatagttaatggcataattagaaagctaatcattttcttaagcatagagttatccttctaaagacttgttctttcagaaaaatgtttttccaattagtataaactctacaaattccctcttggtgtaaaattcaagatgtggaaattctaacttttttgaaatttaaaagcttatattttctaacttggcaaaagacttatccttagaaagagaagtgtacattgatttccaattaaaaatttgctggcattaaaaataagcacacttacataagcccccatacatagagtgggactcttggaatcaggagacaaagctaccacatgtggaaaggtactatgtgtccatgtcattcaaaaaatgtgattttttataataaactctttataacaag

SEQ ID NO: 14097 - DNA, 453 bp, Homo sapiens
cttaataatgtctacttaatatataatttactgtataaagtaattttggcaaaatataagtgatttttttctggagaattgtaaaataaagttttctatttttccttaagtcccctaaaagccataatttttattattcctttttctcttttttcaattctatgaatatgtattattttaaagttatatttttcacacagagatgatgctatattacaccttcccttttttgttggtttcttaaactctaatctcatgacagattataccttccttattacttgttttatcttactcagaatctttgaatatatttttctgcccagaattatctaaacaaaagggagaacaaaagaagtatgtctcacttgggaactgaatcaactctaaatcagttttgtcacaaaactttttgtatttgactggcaatgctgattaaaattaaaaatgcac

SEQ ID NO: 14098 - DNA, 699 bp, Homo sapiens
tatgttttttatccccaaacaccatgaatctttttgagagaaccttatattttatatagtcctctagctacactattgcattgttcagaaactgtcgaccagagttagaacggagccctcggtgatgcggacatctcagggaaacttgcgtactcagcacagcagtggagagtgttcctgttgaatcttgcacatatttgaatgtgtaagcattgtatacattgatcaagttcgggggaataaagacagaccacacctaaaactgcctttctgcttctcttaaaggagaagtagctgtgaacattgtctggataccagatatttgaatctttcttactattggtaataaaccttgatggcattgggcaaacagtagacttatagtagggttggggtagcccatgttatgtgactatctttatgagaattttaaagtggttctggatatcttttaacttggagtttcatttcttttcattgtaatcaaaaaaaaaattaacagaagccaaaatacttctgagaccttgtttcaatctttgctgtatatcccctcaaaatccaagttattaatcttatgtgttttctttttaattttttgattggatttctttagatttaatggttcaaatgagttcaactttgagggacgatctttgaatatacttacctattataaaatcttactttgtatttgtattt

SEQ ID NO: 14099 - DNA, 21 bp, Homo sapiens
agaaataaatctttggctcac

SEQ ID NO: 14100 - DNA, 2722 bp, Homo sapiens
ctgtgttctttagccggagatccattttttatatttcaagtacactgaatttttatgtgtgattcaatgcctctggctctacacatataaattgtcttaatggatgaaatcatatttggaataaaaattccagaatgaagaattcagattgctgaatggagttaaactttagtgctacagaaaagaaactctatggtcttatatttacaacactttaatgggttttttaaaaatctgtggaggttgctggtacacaccaaatgagtccaaactggaatgagcagctttagcaaagaactcttaccctggcaaagcagcaacacacatgctccgtctgacaaggtggtcaacaacattcctcaaaatgggagatcttctcagccctgaggtttgaatctgactttagcctacctaacccagaaaatctgaattggaatgcactcagactgtataaggacagtcctatttagacatgtaatttgtgtaaattattgatgaaaataatttactgtgactttattagcagctgactttcaaagtggatgcaatttttctttcttttgttggggaggggaatgggaggggaaatgggaatataatattgtctcttttttaagtttggcaaacagaatgttcatactgatgtgttgtgccttaaagacaagacagcatttgtgtgttacaatgtaactttggttaaaatctctgtagataatgaaaaaaaacaaaaaaaaaaacctttgtgatgattcttaacatgaccaaatttaaaagtcaagctctcagagcttaattaccgcatcagcaagaaactgagtattttttgcaataagaaaacaacaataataaaggaaagcttgtgtttcatttgggttcttaataattccaataattgtatgaggcaactatttgcgcatccaaccatgagtggaaggtttgggaaagactgtgggacctttacttagaaagtgaaatgtatgtagaagtctcaagtaccccttctacagttttactggagaaaactaagagccatattcatgacaacttgcacagttttgaggttgagacttttgatatgtgtaagttgcatagaggaggatattatcatgcaaatcatgagcaattatcacataaacttttttagaatgtgccatgaacatggcataaaattcacattgagtgcacagggcttaaaataaagctaagtatgtttattcccaatgccatggcaaaaatgataatatcatcagaaatggaaggcagttctcccagatggtgtctaatgaaagcaatgagtctatgaaaattttacctagaatatcatcataaattaaattagcaagtgcgctggatcttggcagcgctgctgaaatgacaacagtaaaataatacctggttctccatctgaatacatcaatgcaggttctcctcgtaacagacttgcatatgtttgttagtttctgcctgtattgtcactgcgcaacggatggcattcattacaagaagagcccatcatcgttgtgtttgcatggtttttttccttgtgtgtagcccatgttgggaacacgatacaggttctcctcttatttcctatgacacgatttcccttgtggaaatttaagactttaagaactagagtatttttatggtgtctgcacctgcagttctgtgtttaaaatgtcataatgtggatcctggagtcaggctactagtcagtgcccctagccagaggctggttcatgagttcatcaactgaggcctctgtggcttcaataaagtctacattttgctcacagatcacaacattcactgtggaaatatgatttcatttctttaggctacaaacctgtatttctttactgaatgctaaggccatgtttatattgggtagaaagatattgagatcccaattttgtacaagattgtgatttcattatctaaaccttaaacttaatcctttaaattttgtagcttttggctgcatctgccccaagtactattccaggcaaattaaagttggaatacctttaataatataaaaataatgatagtaaatcttatacttctgttggcccttagcttgaaaatagcagttaaaaaaatttaaatgttgccttgattatcagtacttaattatgttgtgcactaaaaccttaaatatttattactgtgaataaaaacaaattatctttactgtatagctggtttctttaaatgttgatagaattgtggcattacatctaaatttgtaagtcttttcatatcaaacaagcaaggctttttatgctgctaagtctgtgggtgcagaaagaaacaccccttggaagggcaaagagaagccggctggttgcatcaccccgtgcagtttctcacacacatctctttttctgattctgtgttcagaagaggctgccggcataaaacctaaatgcaaggttgacggagaacagcttgtctggcacaacaatggtgcaggcccacgagccagcatcacagcttggccatgggacgttgagtatgcacaaactagaactcttcccttcccaccttaggaatagaaaatcctcttcctttctaatctgaaaaacgaaaactgaacaaacacaaaaccaaccccttggcagttcccacctcctattgacatatggaatattgtgccttattgtaaaccagtttgaaaaatgttctgtaactaaagtgggttttcggctattatgtatac

SEQ ID NO: 14101 - DNA, 2383 bp, Homo sapiens
tttggtacctggagcgagagcttctccgcccttccaccaaccccacaggccgcttcgcgggtggagccctctgcctggccatggaggaaggatcccgctaggctggtcccgactggagaagctgctctgccaggtgtgctctctgtcagcaatagtgacctcattaccaaggggtggcgaccacattaccaagcgcaattccccattctccaagggctgagaacttcggtgacttcatccacctgtctatttgcacatggaggacttttcaagatgtcaggatacccttccatcaccccaccaccgccaccccaacttgactttcaagaacacatttcaagctctggccagagtcccgttcctcaaattcatgtgttctctcctttctaccagagggatagagcccatgcctcaacctatccagagttcaaatcaaagagtccccagtgtgattcaattgattgcctttcacgtttcgcaaattttccaatctcccactcacgtttttacaaaacgaatgctctaaattctgaggattccaggcaggccatccatagagaaataactttttcttgctcattcccttacaaccccaatctatacatggatttttagaaagtcttcatggctatctatagttccctaccaataatttgaagcctttgctttaggcaggaggcatgtggctatgaatagggaacacgtagatttgaccctggttctgcatccaactagctgtttcttgaaagagcctggatcctcagttttcccatctctgcaagcagggataacggtaatgagaatgataataatcattatatgcagaccttcctctttcatcttacagaggcttagtgaggctcagatgagattatatctgtaaaatcccttggtaaaggaaaagctccgtgaaaatgtcagttacttttactaagtggcgggtagtgaattatctgtgcctagacccaaactgaaagtgtctcaggcaggaagttccaagggatgtatgtttatagcatccaggcaatgatctttttttttccacgaactaaaatacctctttttggtatctattgactctttctctctctctttctgtctctctttcaccttgcacctctccctaatgctctctaaatttgtccagagctttctttttcctagaaatccagagagcaaagtcagagcctggcacctgcagataggataacactggtgtctgatggtgaggctgcccagtcccatcaggagcctcagccaaggaggggcctgggcacactcaggtccccatggttgtccattgaatggagtgaggatcaaggtgggaatgactgggtggtggctgccactagcccaggaacatgacaacgtgaccacaccacacatgcctccaacacacacccacagtctaaacatctctccttctcagtgagcccttctcccattccagatcatcagcacacccacacccaccataggtctctctcctccggtcttcccagaagggtaaaactcccagcctaccctgctccagcttcagcccaggtagttggtgtgtctcaatatgaatagggggtgagtagcttcatagaaagaatggggaactcccttggcctcaagccagtatagtttggaagttgggggtcggggatgttaagggtggggagtatcctgcctgtgacctctaggttatgaaaactatcttagaaggtgcttttagaaagaaccaggagaacaaccaaagcagcttacagacgcctgaacggagaatgaagtgtttcaagtaagcgagtctgcaagttctcagaagcagacagatatccaatctggactgcagccagggaagtcctctctctcgctctctctctctctctctctctctctcattgcttgtatgacttcacaagcaactcaggatcattctagcaggctttcccactgtcaaacagagacttcattctaaaaagagaagtgataaacagagctccagctctgctagctctatatatttactgattagtggaaagcactgaccaaggagacttttaagccagtggttcttcagaatcacctagatgcctccaccctccagagatcctgagtccaggagtctgaagtggggccccaggtgatgtcattgctgctggtcccaggaccacattttaacaatcaatgttttcaggtgtctcatgaggaacactacttaatgcagtgggaaagaaaatatttcagaggagaattttttcttaaagaagctgcatattctggactctaatttagtttaattcactccaggatggcacgcaggattcctaattcttaaatgccattcagtctggacttcaaatcacttgtcttcagaaaataaaagatttgttccacc

SEQ ID NO: 14102 - DNA, 451 bp, Homo sapiens
ccttggaggtgcgagtctgggaaaggcgcgctcccggggggagcgggccccgggaaggcgacccctgccctcagtgctctctgtctctgcttccccctcgcaatgctcctctctctgtcccaccccgcgagaacactttacaacgacgaggagattcgtttccaaaccagaggagatcaattgtacttacaaagattcccatctatttaactttattaacttctaccgtgaatgactctgcaagccttgctggtccaagtgcaatatgtaattataaatatataaatagataagagcctatcaatgtatcttttgtacaatatgttgtaaaatgtagatcataggatagctgactttgacagtcacatttataaagtaattcacttaaagatatatatttttttcaaacaagttttgctacttttgaaaataaatctttctttatattgct

SEQ ID NO: 14103 - DNA, 449 bp, Homo sapiens
ttcaccacttaattggttagaatctctaactgagcaccttttaaacctgctgcacattggactcaaaaggaaaactggaccaacaataattgaggaaatagactcttttattcattcacggctacagtgtaagctccagtccctttggattttattccaaaccttgctgtaatataaaaggaagtttacaagacatgatattgctgcttttacaaaaggacattctatttattttcgcagtaattctcatgtccccataagcagagctgtcacagtgtgcactaccttagattgttttattgtcgtcattgttatttttttccattttgagctaatgtgttttatttgtgaatagtcttttacatttttgtatgctgaatatgggcaccaaagaacctgtaaaagttatctttttcaattgaatgtgcacaaataaaagtttggaaaag

SEQ ID NO: 14104 - DNA, 1191 bp, Homo sapiens
gacatttccagaaaagcattatggttttcagaacacttcaagttgacttgggatatatcattcctcaacatgaaacttttcatgaatgggagaagaacctatttttgttgtggtacaacagttgagagcagcaccaagtgcatttagttgaatgaagtcttcttggatttcacccaactaaaaggatttttaaaaataaataacagtcttacctaaattattaggtaatgaattgtagccagttgttaatatcttaatgcagatttttttaaaaaaaacataaaatgatttatctgtattttaaaggatccaacagatcagtattttttcctgtgatgggttttttgaaatttgacacattaaaaggtactccagtatttcacttttctcgatcactaaacatatgcatatatttttaaaaatcagtaaaagcattactctaagtgtagacttaataccatgtgacatttaatccagattgtaaatgctcatttatggttaatgacattgaaggtacatttattgtaccaaaccattttatgagttttctgttagcttgctttaaaaattattactgtaagaaatagttttataaaaaattatatttttattcagtaatttaattttgtaaatgccaaatgaaaaacgttttttgctgctatggtcttagcctgtagacatgctgctagtatcagaggggcagtagagcttggacagaaagaaaagaaacttggtgttaggtaattgactatgcactagtatttcagactttttaattttatatatatatacattttttttccttctgcaatacatttgaaaacttgtttgggagactctgcattttttattgtggtttttttgttattgttggtttatacaagcatgcgttgcacttcttttttgggagatgtgtgttgttgatgttctatgttttgttttgagtgtagcctgactgttttataatttgggagttctgcatttgatccgcatcccctgtggtttctaagtgtatggtctcagaactgttgcatggatcctgtgtttgcaactggggagacagaaactgtggttgatagccagtcactgccttaagaacatttgatgcaagatggccagcactgaacttttgagatatgacggtgtacttactgccttgtagcaaaataaagatgtgcccttattttacct

SEQ ID NO: 14105 - DNA, 3730 bp, Homo sapiens
gggccggcccaacttagacgcggctctcctccggcagggcccccagagggcagaagcagcgtggaggggccctcacgcagcagcccagccactttctgagtgttgtcctggggctctttggaacgccatcttcctcccacttacctgcctcccctccttttcgcaaatgtacagaagccatttgtcacctcagcattcgctgccgaaatgagcaactccattcagtaacgtgggagctgatcccacgggcaggctctccctgctccaggagaagactaggaggaagaatgaggtgctcctgccgtgtccgccttgttccgggtcgcactggaacaggcagcaattcctaagtccggagcgtttgagcgtttgctatctgactgctgatctgcgtgacagaaacaccagcatatttgcaacgccaaggatattggtcttaagtgcaagagcacaaatgagagtgtgagagaaagtaccttctattttaataataatattattataaaaataataaatctttttaacttttatattttatgcactagacaatggatctgcaactttggactaaggtcattcaatgtacccaaacttgaacagggggttcattgttttgctattgactttattatgccactttggggcagagacttggcatcttcgcagtttaagaaaccacgtttcctatccaatccgaagggaaggtgctgtacagttcattcctttgcaccattagccaatctgtcttttatggattctgtgacatgtttatattcacccatgtacattttctgtaaataccaaacgctactgattcccatgccaaaatacatgagtattatgggattgctacctgtataaacaatggcactgtgaaaatactgttagttttaatacaagagaatgcatttgtaaatatggtatagagtttattaatatactattgtttgcagataaaggccttaactttaaacatctttcatcttctgaaagctgcccaacttaaatcctcatagatgtctttctcaactgccttcccatgttcatctgtatgttttccagctaaggtcacaaaccaaaactgaataaagtctttgaggaaacattttggaaacttcacatgcattccgcttgagaccatagtgtttaatctatggcaccaagcatcgtttcctcagattaatgagacccttcaacaagcctgaatcagtcacttttcaacacagcgatgttttaacaagccagctgctaagcttgtgtttatgtgactcttgttacagatcatggcggtgcgtcagcctcacaggagacatagcaggtctcagaaaccttctatgaccctgtcatctaaccatcagggaattccctgctcccatgccacacatttgtctattatggctatagtaccaaagtacttttggtgtttggttggtgtgcatttctttagtgtcgatagtaactggatttttctttttccttaatctcatgtgaacaactacccaactgtttagctgaagttcatattatttaagtaaagaaaatatttcagttttataacagactttaccttcctggcaggtcattgtagttaattatgtctctagcttggagtgtcaccttggaatttcgttgccattttttctcagacacctggccgtaaaatcagtttgttacagcattcttctctaggctgctaaacgctgtgcattgaaccttttctttagaagtttcagcgtaactaatgttagatgaaaattgttgatgcccctttctttttactttaaacaatgtggtagtgggagaatgactgtttctgccactatcaacctgatcctcatgctgatagaatgacagctagcacttatttcctaagtgcaactgttttagagatttttctcctaacatgcaaaggaaatactgattggcctataataagttcctatagggagactgaggcttgcagaattaaggttcaggggaaattttggaaagttggttgtattttcattgaagtaggagagattatcagatggtgctaaagaaagtgtgaagatcttatgaaataggtggatggtaagttgaaattattgatgtgggtaagaagggaggttgtggaaagttaacactagctttgtatttttttttctgtaaaactgtgaactgatatattttcctttatcactttagtattctgcagttctcagcttggtgaggctccaaaagagaatatgtcagatgtattcctacttccaaacctgtcttactttggtttgatggtacacatagggcttttgaacagtctatttttaatgtatatgaggtcaaatcaaggaaggcaattgctggggacaagaaaagtagaggtaggaaagaagacactattttagctaatggggtttcttgggactaaaaaatggctttgtttaaattataattatataataatttaaataaatgagattggaggtattcttagtagttctgagttgatagtttacattacaattaggtcttgaagaagagctcacagagaaaaaactaccaaatatccaatgggtaagcccatgatgtagccactagtacaataaaaatctgaagtaaaatgaggcataaacttgatgcagctgcctccctcattcaactggggagttcttgagttcctcatttgttggtaaaaagaaaaagaatgtgaaaatgtctctttttttcttggctattagtggctgtcttgcaatatttcaataggagtccaattactagttaaaacactggcggggtgcggtggctcacgcctgtaatcctagcactttgggaggccaagttgggcagatcacaagttcaagagatcgagaccattctggccaacatggtgaaaccccgtctctactaaaaatacaaaaattagctgggcatggcagtgcgtgcctgcaatcccagctactcaggaagctgaggcaggagaatcgcttgaacctgggaggtggaagttgtagtgaactgagatcgcaccactgcactccagcctggcaacagagctagaatccgtctcaaacaaacaaacaaaaaatcccacagctattggatcatccacagattttttctttacaatcttgttctccttgtccatggaccatcaatagttgacttgccaggtttaattctttcattgcttgagaagaaaggaatcaaaggactgtgtgtagtaagctgacggtaaagttaagattaaattaagacagagagagaatacatatcactgccaggcctgataggaaaaatctgctcttccttttaataacagtgatgaattgtcaggaccttatttaggaaaccctgacctacccataactccctgctaggctaagtagaaaccaggttatttctccctgcttatggctccccgcaaagggacttgcagcgtgtcctgcaactttgtcttcagatagtgcttcctacaaaactaggtcttgttttgtaatcttttctcgtgttgaatcagatctgcttacttatttaggtttggttatgagcttgtatctcactgtatttctcatgctttgttcttttaaacaaatcctttaaactgtgtcattttgtatacacatgtgaggtttgaaaaaaaaaaaaaaaaaaaaaagaactaccttgtgagttttgctcaaaatgtggcctaagtagccattggcatgtctagatgaacaaataaaaataaagataatttctttaaaat

SEQ ID NO: 14106 - DNA, 395 bp, Homo sapiens
gatacactactttggtcagaaacagaggatgttggctgaagaactgcctaacagcaaataaattaactatggaaaacatagacattatgcttttatatgctattcagatttcaaatctttccaatttaccctggaatcagttttgagggagctgataaagactttagctgactcgttaagcctgatacataagccatatttaaaattctaagaaataattaatgttatgatatatcttgtagtatctattaaaatgtctctgggtcataaaatggattaaaatatgggagatcagtaggttatacttatatagatagtgatatatttcatttttaatttgtcatttttgatgtaaaatataatcactgctgtgataaataaactatctattgatc

SEQ ID NO: 14107 - DNA, 940 bp, Homo sapiens
gaaggaggtgcatgtacgtacctatgtgcatacacttattttatatgttagaaatgacgtgttttaatgagaggcctccccgttttattctttgaggagtggggaagggaagaaaagaaagaagctgaaaggtactgacacagagcaacaaaattagcacctgtgtgaattatttagtgtgacttcacctgaggcatcacagagacaaaagaatgtgaagctacttaacaaagtaaggcaacgtttctgcttcagactcctggcacatttactttttgtcattataaccataactaaatatctgcatgtaccaagagtccctaagccaccccctccaaagatggagtgtagaaatgatgacagcacttagtaagttcaaagatgacattcagggatgcattttttgatgatagaactacagtttttatcgccagctgggcaaagagtatattgctgaaatgatatataaatatattgaattgatgtttactgtttatagtcatctgaaatatcatatttactctgattctactcacttgttttttaaaaataagtgtcctattattgtattatatattgatagaaactgttaaagctattttgaaaatatgagttcttagctttaatcatgaagtctgaagtttgctttcagtaattattttaaaagttgttttggttcattgctttataatatttattattgaatgccaaacctgttcttttttttactgtgtccaatattctttcaagcaaatgcaatggctggaatataattcagaattaactgaaacccagccagaagagggaccacctgtaaagcaagtcctttcaagtttcactgcacatcccaaaccatgttacaaaaagagcaactgctatattcacattatgatatttttctatcttaaatttgtcaaaataaagtatgagtctaactatt

SEQ ID NO: 14108 - DNA, 1989 bp, Homo sapiens
ccggaaacaggtgggtcacctcctgcaagaagtggggcctcgagctgtcagtcatcatggtgctatcctctgaacccctcagctgccactgcaacagtgggcttaagggtgtctgagcaggagaggaaagataagctcttcgtggtgcccacgatgctcaggtttggtaacccgggagtgttcccaggtggccttagaaagcaaagcttgtaactggcaagggatgatgtcagattcagcccaaggttcctcctctcctaccaagcaggaggccaggaacttctttggacttggaaggtgtgcggggactggccgaggcccctgcaccctgcgcatcaggactgcttcatcgtcttggctgagaaagggaaaagacacacaagtcgcgtgggttggagaagccagagccattccacctcccctcccccagcatctctcagagatgtgaagccagatcctcatggcagcgaggccctctgcaagaagctcaaggaagctcagggaaaatggacgtattcagagagtgtttgtagttcatggtttttccctacctgcccggttcctttcctgaggacccggcagaaatgcagaaccatccatggactgtgattctgaggctgctgagactgaacatgttcacattgacagaaaaacaagctgctctttataatatgcaccttttaaaaaattagaatattttactgggaagacgtgtaactctttgggttattactgtctttacttctaaagaagttagcttgaactgaggagtaaaagtgtgtacatatataatatacccttacattatgtatgagggatttttttaaattatattgaaatgctgccctagaagtacaataggaaggctaaataataataacctgttttctggttgttgttggggcatgagcttgtgtatacactgcttgcataaactcaaccagctgcctttttaaagggagctctagtcctttttgtgtaattcactttatttattttattacaaacttcaagattatttaagtgaagatatttcttcagctctggggaaaatgccacagtgttctcctgagagaacatccttgctttgagtcaggctgtgggcaagttcctgaccacagggagtaaattggcctctttgatacacttttgcttgcctccccaggaaagaaggaattgcatccaaggtatacatacatattcatcgatgtttcgtgcttctccttatgaaactccagctatgtaataaaaaactatactctgtgttctgttaatgcctctgagtgtcctacctccttggagatgagatagggaaggagcagggatgagactggcaatggtcacagggaaagatgtggccttttgtgatggttttattttctgttaacactgtgtcctgggggggctgggaagtcccctgcatcccatggtaccctggtattgggacagcaaaagccagtaaccatgagtatgaggaaatctctttctgttgctggcttacagtttctctgtgtgctttgtggttgctgtcatatttgctctagaagaaaaaaaaaaaaggaggggaaatgcattttccccagagataaaggctgccattttgggggtctgtacttatggcctgaaaatatttgtgatccataactctacacagcctttactcatactattaggcacactttccccttagagccccctaagtttttcccagacgaatctttataatttctttccaaagataccaaataaacttcagtgttttcatctaattctcttaaagttgatatcttaatattttgtgttgatcattatttccattcttaatgtgaaaaaaagtaattatttatacttattataaaaagtatttgaaatttgcacatttaattgtccctaatagaaagccacctattctttgttggatttcttcaagtttttctaaataaatgtaacttttcacaagagtcaacattaaaaaataaattatttaag

SEQ ID NO: 14109 - DNA, 2313 bp, Homo sapiens
ccgactcctgttctactctcccaccaaataacagtagtgagggttagagtcctgccaatacagctgttgcattttccccaccactagccccacttaaactactactactgtctcagagaacagtgtttcctaatgtaaaaagcctttccaaccactgatcagcattggggccatactaaggtttgtatctagatgacacaaacgatattctgattttgcacattattatagaagaatctataatccttgatatgtttctaactcttgaagtatatttcccagtgcttttgcttacagtgttgtccccaaatgggtcattttcaaggattactcatttgaaaacactatattgatccatttgatccatcatttaaaaaataaatacaattcctaaggcaatatctgctggtaagtcaagctgataaacactcagacatctagtaccagggattattaattggaggaagatttatggttatgggtctggctgggaagaagacaactataaatacatattcttgggtgtcataatcaagaaagaggtgacttctgttgtaaaataatccagaacacttcaaaattattcctaaatcattaagattttcaggtattcaccaatttccccatgtaaggtactgtgttgtacctttatttctgtatttctaaaagaagaaagttctttcctagcagggtttgaagtctgtggcttatcagcctgtgacacagagtacccagtgaaagtggctggtacgtagattgtcaagagacataagaccgaccagccaccctggctgttcttgtggtgtttgtttccatccccaaggcaaacaaggaaaggaaaggaaagaagaaaaggtgccttagtcctttgttgcacttccatttccatgccccacaattgtctgaacataaggtatagcatttggtttttaagaaaacaaaacattaagacgcaactcattttatatcaacacgcttggaggaaagggactcagggaagggagcagggagtgtggggtggggatggattatgatgaaatcattttcaatcttaaaatataatacaacaatcttgcaaaattatggtgtcagttacacaagctctagtctcaaaatgaaagtaatggagaaagacactgaaatttagaaaattttgtcgatttaaaatatttctcctatctaccaagtaaagttaccctatgtttgatgtctttgcattcagaccaatatttcaggtggatatttctaagtattactagaaaatacgtttgaaagctttatcttattatttacagtatttttatatttcttacattatcctaatgattgaaaactcctcaatcaagcttacttacacacattctacagagttatttaaggcatacattataatctcccagccccattcataatgaataagtcaccctttaaatataagacacaaattctacagtattgaaataaggatttaaaggggtatttgtaaactttgccctccttgagaaatatggaactaccttagaggttaagaggaaggcagtgttctgacttctttaggtgatctgaaaaaaacacccttatcatccagtgtaccatctagagatcaccacagaatccatttttttcccagttccacaaaacactctgtttgccttcagtttttactcactagacaataattcaagtttagaaacaggtaatcagctatttgatcttaaaaggcaatgaattgttgggatatcagtgaactatgttgtatacttttgaatttttacattttataaatggaattgaaagttggataactgctttttttaaattttccaacagaagtaacaccacagttgctttgtttctttttatagcttacctgaggttcagttcttctttgtgaacctgtgagtactccacagtttactgggggaaaaggcttcagtaaagcagaggctagaattacagtatttatacatagcaacttttcataaagtagaaaaattcaaaggaagctgtctcaatttgagaataccagctgggcacggtggctcacgcctgtaatcccagcacttactttgggaggccaaggtgggcagataacctgcggtcaggagtttgagaccaggctggacaacatggtgaaacctcgtctctactaaaaatacaaaaattagccaggtgtggtaggatgcacctgtaatcccagctacttaggaggccgagacaggagaatcgctcgaacccaggaggcggacgttgcagtgagccaagattgcaccattgcactccagactgggtgacaagagtgaaactccatct

SEQ ID NO: 14110 - DNA, 367 bp, Homo sapiens
gaaaaatgaaaggaagttctgctgtcagaggcaaaacatctgtttatcatagacatcaacatgacctataagtaaagtgcgtgtctagtgtcttctattgagagtactactattaattaagcttatttccaatgtgcctttttaatgcttgaagttttatctacatacacaggtaacagaggacagtagtctgtaaacatataaatcggtcataactatcgtggtctttatttctgtgaggatctagggaaatttcatgtcacttccctccttcactgcatcacaatcatattcccttttttttttcttggatttgtgtcagttggatgatatcccctccagatagtatcaataaaatgttaaaatt

SEQ ID NO: 14111 - DNA, 514 bp, Homo sapiens
aatgaaatgtagtttgctttcttgtgatttgaagagaagcagcagtctttacttttccagccaaatccagtagcagaatcatcttccacaacaaggaattaaagtaattaaagtgcaagttcaatgatcgttttcacttactgcttttagtaaatgtgactcgctgtaattcaccataactggaggcctaggccttgttgaaggcttcatcaggaaatgtgacgcagagattgtgctgctgtgcttcatattgttgccttatgggattatacttgaaatgcattgtgctgatgttcttgacagggcggagggatttctctttcctgagctcaccaaacttattccagtgttgatcgcaagctgttgatgcacaggcgtcttgtggcaagcccagcttcagtttatgttagacaatcagtacacatgctggtgtgttttccaatggccagtgataagaaattaaataagtatttgtgagatttgctattttttaataaagtaattgttttaaatt

SEQ ID NO: 14112 - DNA, 3703 bp, Homo sapiens
tgaaagctttgctttagtaatagctattttattgatattattactttattacatatcttttatagggaaacattctgtgacattaatttcctttctaatttaaaggagagttactttgttgtatgtgtgccactaaaataggggctgcccttgccctgtcttgattcccgagtgttaatctgtggttttgaccagagcccagatgggtaatcctgtgcatttgggttggggttcactcttaccaagaatctttgatgcagctttaagatggtggggaggatggggtgaatttaggaaaggaatttgtggttataaactaagagcttgataggagttggaaggaaactcttactaaaatgttaactttctaaaaaccttcttttagatcttccttgggcctttggaaaaatatgtgacaagtgaatgtaagtctgtgcctggagagctaatagtgcattagtctatctcagcctagtgttctgcagcacacatgggcaggcagtttactcacactgacaggtgacctgaaagtggcacaagtgctgtttctatcactattgtaatttgccagttcatttttcatgctgaaagtaatatccaaattgtaagacatatgaaagatattagtgttgcaaatatgtttaggtaaactgacctataacagaatatgtgaaatgaatttggaaataatgcaagaaggcagaactcaatcatttaaattgtgtctttgaagttggtaatatagcttttaaggagaacccatgaataacctgatttgggcagtgatgatttattacaggttgcactgttgaagtgtcatttggtgtcaggttcttctcacaggtaaatctttcagccacagaatctaactggtgagcttcagaaccaataattgccacatttattgtcctcaaaattgcttatggccatgtataaccaattaattctgagtttccaaaatcaaagatttgaccttaagagggaagggaaaaaagtgtgaaaggatgatgaagaaaataattttactatttcttttaaaagtatgttttggaaaatcaatgattttaatgcatagcagtatgtttgaaaaatagaccattctaaaaagcccatgataccttactgttgatgaaaaaggatgatcatatatatagaacttgattagtcagagcattgggcattccaaaatacagcctttggttcagtagattttaatgctttaaatagactgacgtcgcatacccttatagaattggaatatgatttctcaaaaattaatttgataatttcatgtatgatgtgcatatatgctaaaagaatgcagaaaatcattttatgaatagccaaatttggggttgatgtgaacattttatgttactcatttggtttatacttttttttttttttttttaactgtgtggtttttcttttcagaagtatttaggcaatattgcacgtgagtttcagttctttttttcttttttttgagatggagtctcactcttgtcacccaggctggagtgcagtagtgcgatctcagctcactgcaacctctgcctcctggattcaagcgattctcctgtcccagcctcccaggtagctgggactataggcacgtgccaccacacccggctaattttttgtatttttagtagagacagcgtttcaccatgttagctaggatggtctagatctcctgaccttgtgatctgcctgcctcggcctcccaaagtgctgggattacaggcgtgagtcactgtgcctggccaagtttcagttctatatgaagtatttgatgttttgtttgaaacaatacagcattaaagaaccaatgttattcactaatatcattcatctttcagtttggatgatttggtttgctgcatctaggttggtgtttgatcatctgaaaaaacatttcagtgggaagaaatgcataaaatgcctataagaagtagaaagtcattgaactgacagtgtttgatgcaactaaaagaggattgtaagacatagctttctgcaaacttgtctttaatgcacaaagctgtagtggtgaattaactatctccttattgattctctcctgtacccagatgcaaaaagtgctaagtttctcttgtcctcgtaataccatttggattttatttctgaatttaaatagtaaaatatttatgatgctgatctttaacccacctaaaattttatagtgaaacctgctttatattgttgttctgaagcttacaattgacctatacattgcattcagcaagctcctgaatttagaactgccgtcagtgtagtgtatgctgtgttccatgttgcctttttagatggctttctaccccctgaacaataaataggatgaggttttactgtaattgggtaaagtttactcttggacattatttcgatgctaaagtaaggattctgtggatgttacttaaagagaaaagcataagagcatgaagcatatctgggaatatcttttgcctttaagacgattcattcttgtctagagggaaaatctggctgatttgggaataaaatataatcgaatattcaacaccatgaagataaatcttattttggaaatctactgaccttaataccccaagcttgccctgaatactttgattggaattggaatatatcaaaaaaggttagtatttttgttgtagttaggatactaaaaggatattagttacccaagagatccaatttgtttttctgatgaatagtgttcagtaaaatgaagcagtcttaagagtgactaataatttcaaagtgatttttcgtctattcttaatattttttaattatttatttttaagagttttataccttgagcagatacaatgatctgctttagtgagaggacaatttctgattgattgttttctcttcaggccatctcacctcttcattctcttgttacatttgaagcagttgatataatgggtttatactttaaaagatagacatggtgccatgaagttggggagttgggtgaattatcccattctagttacagaggagctttccttaaatgccctttaacttctaggttttgttcaagaagttcattttctgagtaaaaggtattttcatatatgttgggggaaaattaactcatctaaaaagaatcttattaggtatttgaactctaaaactaacagataagacagatatgtaccttattagagcaccagaactaatttgctaagtcttttgtttagtcctgcaagactgatgcttaatacacagtctgttctcctgtgtctaggtcaggaactccagtttgcttttctgttttgtgtcctggtagcagctgttgagtaactttcattggaggttgggaaggaagtgaggagaaagtgttcttgtttagtgttttatttcctataataggatgctgcctaacccagttcatctctatgtcctgttcactgaatattccgggtaattgaaagaaaatataatggatgggctccattaaaaccagctcaaaaataaattcttgtcagtaaagatttcttgtcaagatgtcttggattgcacttttgttgaggaaagacagtgtaaatagttaaagaatgttgataaaattgaaacatttggttgtggaattgtgtgtggttttagagggtttctgtttgtgaaatgtatgtattaaaaataataaaattccagaaactaacattgt

SEQ ID NO: 14113 - DNA, 2303 bp, Homo sapiens
agcctttgtatgacagacccatgtatttttggcatgaggaactaacagtccattactctatcttcagcctatcaggatcacagttttaaggaagacttggttttgttgaatatgacaatgaaatctgtgtgtatcagatttttattgaagcattcatcagcagcctcaaccagttttcattgtccatttactagattcaatcgtctctgagtatatagggctgatgttagcaagaccctaaaaatgtccattgaaccctgcttcaaaaaatgaaaacacacctctataaaatgtgtactgggaataagctttgtatttacatacattaggggaattttttaaaatctgtaatgtttggacaaacagatgatattactttgctataaaattataaatgtaacttttaataaagatagccagaatattctaaattagaaattacgtttttgtttccctcaagacataaaacaaatataaacattctaaactgctggatgaatctgaaaagacattaagttcaaattttaatttattctcatattaaatataactccattaaaagtttaaaatttcatgggagaaaatataataaggtaaagaggtagaatcactttcagacttaagaataatgttgatttcccaagtgctttaccttatctgttaaagcgtaagatgaattggtatttgcttcataggcagtttgactgcatgtattagagaatgaaaagaagatatttgtagtaatgcctggaaacttggtgctttaaattaaggtactcctctgctgctgtagaatggattccacacagtggatagctatgggtgattcagaatattatgtttagattcccatttgttaagtttataagttttgtggggaattatgaacttactgtgtactacctgcatttgtgctgtgtgaaaaataaatacaaggattcgtttagctaattcaacttactacaaagacaaatgtctgtttttatttgcctgctaggattgtcttttttaaaagtcatttttatttataggaatatgggtgtttctataggaagaaacaggttttttgttttttgttttttaagataaatttgacaaagttaactgaaatttatctggtccattttattcatgctactaagatgggaatctttaaacacaagggtcagcaagctttggcccatggattggccacctgttacgtaaataaagtttctttgaaacaagcctacactcattcatttatgttttgtctgtggttgctttccacaactgcagagttgtatggcttgcaagtctaaaaacatttactatttggccctctaagaaaaagttaagacacctagtctaatggccttttgggaaaaaacaaatcactaactcataatcatttatatccattattttctgcataaatgtaatgctattgtacagggtttggtagaataaatattcagactgactaaactgttctaaatcctcacaaaaaagtccccaaacaacatgcctcctaaaaaacattttcctatcttttacaagaggtatgaacatttgtagggttccacatttgcatctagaaatccaatgctctttagaatgttattacgaatagaaagatggccaggatgacctttagtgttacatgatgttcagcaaattttaattcaaaccttgatatgcctggacactgaaaagtaaacgcatcacctcctattttataccctaccttctggttcccaattgggagagcacatagagggaaggagacaatatagaaactacggagtccgctggtagtgggctgcatggtgtgacagagcccttctctgtaaaatggaaatgacaccactagccatctcaatagttacaagaattaaaagagatacagtacctgaagtgcttagcgcatggtagcatttcataaatgtttagtgtcaatactaatgctctaataatgtaaattgttaataatttatttccctaatatcaggaaatcccagttgtctatgtggcccagtgcttaaaaacgccttcttgcatgaggggattgaactatacaatgtttgttaactttgtatttgtattttttcctataaaatcttaaaataaaattaggagatgtgttctgatgtaacagtaggattagcaattttcatttattccttccatatatatttactgaatggctactatatgcctggtattgttctttgaaagcagaaacagcaggaaaaaaagtccctccctcatagagtttacattctaaaagggaggaaatagataataaaatatacattacattt

SEQ ID NO: 14114 - DNA, 2866 bp, Homo sapiens
tggagatcaaacatcaatcatccctgtccatcaggtcattgataaggtcaagggttattgcaatgctcattcagacaacttctataaaaatattatcatgtcagacaccttcagccacagcacaaagttttaatgtctttaagaaaaagaaatcaatctgcagaaatgtgaagatttgcaagcagtgtaaactgcaactagtgatgtaaatgtgctattacctaggtaactgcatatatataaggaatgtattttgttaagaaggcttttgtgaaattcagaatttttctttttaatatatttcttccatggaagagttgtcatcactaaaacttcagtactgagagtaacatgactcagtagccacagaagctatgatttgtaaaatatataattgaatcagagtaatcataatgcaggggagacattcaaattagagacaagggagaagcaatgctgaggaagaccctagatagagctcattttactccacctaatcgttatatctggatatacccattttctgcatcttctttctcaacaataaaaaatgtaactattttgaatgcccacaaatcccattccagtgttactttctgtgaatgcagtaccatattctcattttcaatgacatttcaaccacaggcagaaaagactgtttactccttgacccaaagattaaaaaggattttttattattttaaatattacaccttcagaaccataacatgcttaagaaaactttcccaaaatgttgacctagttaaatgaggctatataaatttctaatattttacttattctattcaaggcatagggccaaagcattaagtataatttaatcccatacattcgagttaagtttagtgttgatgttccatcattctggacctcccaggagttgtttaagaatgaatctcttacacctctacttttgcccctctactgtatattaagcccataggcttgtgggaggaaggagaatttccattaggcaagctgtatgcagtggaattttccttttaggagacacacaattaagactctctggttctgtccttgctttggagactttaagacatttcctaaagcacaaataaaagcctcgtatttccccattgagagttttgttccaaggaatatgaagtgagacatatgggtgagtcataataatcaaaataatttatgaagagctgggtctgcaatagctagtctaaaaactacttgtgtgtcagtcctctggttatagtatataagagcctgaggaggtctggcaagatagatggtgtattatttatggatcaggctgctgcatacaaaccttgcatactattatgcagcttacctaactctcagactattctgagtaatgcttgcttgctaatgaatgtataggagaccacattgtaattgttcttagatgatggagtccatgcagtttcttagaaatcggtctcagtgcatgctgtgctttttcacatttgctctgggttatctgggaagtatcaggttctgggaggcaacagcattaagtgataagaaaaggagacattctggcaaagccaatctgcttaaaggcaaagtccagaacctggaacctagaggcctttctctctgcacgaaaaacaggtagtttgcagtctgagatatgggagagcttttaggctacacagcaacccaagggacctctcaccttttgctgagcttcaatcaggaagctatttgcctggctccagcagatgatgagataatgaggtagtgggttttttattactgttccattttgcaacatcctgcaacaccatcctgggagacaagagcattacccagcttggctttcacgggggagggttgtattcagtaaaaaagaatagtaaatataaggtcactgagattctaagtaagatagtaaatctaaggtcactgagccaaatccttttcaataggcatatattaacaggctgcttattttggcggaggttacatatggatgaaaatgaatcttagtcactgaatattcatatacatttcccccaaaaccttagacattcatagtagattttaattagttagctttctaactagtcagatttctgcccaaagtgcttagtcaatagtaattaagatatagcttcaaaaatggctttgcttttgatttctactcatattcgtatggctccagaaaaatatttttttcatatttgacaatgtcagctccactttagaaattttcaataaccagatgagaaaaaaattaagaaattgctcaagggaaacatttgtaaatggatttgaaagattgagccaaattctgttgtcagttctaagcatgcagttctcacctccatttagtcccccatcagaacagaggtcaggaatttagctggggagcctaaatttagttcagcttacctttgagaatagcatcaattcagactctcttttcattatgttttcttttctttttccctctttttaaactacattgtgttagagtcatagtctaggatcctgagagattttccattcttgtcaccattcacttgcattgtaaagattttctttgtctgttgttggcatagattcttttgtacatatttatttatttgtgtttatatatgtcaattggtttcctttcttagcttgatattgcctagctttgttgttttaattaactttctattagagagactgtatatattttttctaaatactttgtgaaatcatttttggtagcaatatctttgaatatgatgaataaaagtgactgtgagtgcaaatagaattagcagtaagaagctactctagctaatttgccattttacttaaatggaaaatgtttttcaaataaatacttatgttgttc

SEQ ID NO: 14115 - DNA, 626 bp, Homo sapiens
gatccaagtctaaacgcaagagctagattgagccgccattgaagactccttcccctcgggcattggcagtgggggagaaaaggcttcaaaggaacttggtggcatcagcacccccctcccccaatgaggacaccttttatatataaatatgtataaacatagaatacagttgtttccaaaagaactcaccctcactgtgtgttaaagaattcttcccaaagtcattactgataataacattttttccttttctagttttaaaaccagaattggaccttggatttttattttggcaattgtaactccatctaatcaagaaagaataaaagtttattgcacttctttttgagaaatatgttaaagtcaaaggggcatatatagagtaaggcttttgtgtatttaatcctaaaggtggctgtaatcatgaacctaggccaccatggggacctgagagggaaggggacagatgtttctcattgcataatgtcacagttgcctcaaatgagcaccatttgtaataatgatgtcaatttcatgaaaagcctgagtgtattgcatctcttgatttaatcatgtgaaacttttcctagatgcaaatgctgactaataaagacaaagccaccctg

SEQ ID NO: 14116 - DNA, 778 bp, Homo sapiens
tttttccttcaagaaaaactacagtgggattcatttactttttaaaatacactgggtaaatcacctatacttagagtaacagtttgttatcaaaatgcctgataaaatatattcttaataaaagtcttcatttcataatgaaatcaatttatttggcatcttaatatatttttttagattcatcaacagaccagtttttgtgggcatatatatatacacgtgcaaatatcagaattgttaataatttgttacacatggacatttgttccaaactgactaaaaatcaatatagatattttatatacatatatatatataaaaatacaaaattcagtgtactttaccatattaatactgaggaaaaatctgttggagacataggtctaggatgtgtgaagtttggaaaaatatgctatttaattataatgttccctagactgctgtaaacagaagtgaatcagacttttctccagctacctttcaaaataataaattatttgtctcaaatataccttgatggaggacttttttattcttatggaaatagtgaattccaacaactatgatgaactatgttctttgctatttcttcactatattttttaaggttttattaaaaagccttagaaagttacatattggtttagaggctaaaattgtgttgatgctgtttactcacctaattacatagttttaatcatttgtacataattttaaaaacttactttgtattgattttgaatacagtgaaaatcttattgcaataaactattttagt

SEQ ID NO: 14117 - DNA, 7496 bp, Homo sapiens
cgaagagtgagactatttggaaacagagactgatcatctttgggggaagccctgcttcctgaaaacctgatattgcactgggatttgaatgtgtgtgtttccgtttaacttgtggtgaaggaagtgtgtgactcagcttggctgggaagtgctcctcacctgtgtggcccagatggctccaacaagcaaaaggaaggatgcagtgactcttgctgcccagaatgcacagcgatggtaagagacaccgtggatattcttcatcagaagctttaatcaaagaagatgagcagaagacaatcactggctccctgttaccagaaagccaaattttataatgcgggtgaaagaaaaatatagattaaaattgctgggcactgaaaaggggtgggagttggaaatcagaaagaaagagaaatatttcattatgttaatgaagaaaagagaaaattgaagcataaatgtatttttgaagtagttattcggtagctgagaacttattaagggatttaggaatttaacctcctgatgtggattcctcaaagacttgatcggagaatactcttgtttcaccattatgttggtacagtatagtaccattattttatgttgtgccagtgaatccagttgccagaaataagtctgaatgttttcatgcatctttttcttaaatgcaagagcttctactgactcttaacaagcatgcttacccaaattttgttgcatgcttttaagtagcattagctatgcacacttgacatttttaaatatccctttcctagtgtaccagccttcacaggataagaggactgggaataaagtcagatgtaatgtgaccctagaaaactgtagcaagcttcagaaataaatcttttgatctttccctatcttgattagatccaaagtcaaagcaaccatacttcacctagagaagacagtattggcaatcatgacacctgtaataaaaacttgaatccaaagtcaaaacttaagcaagatacaaatgtgctgcctgcagttagtcctgcatgggaataaggactagttatttttttagtgctgcatttttttaaagttggattgctgctatttaaaaaaaaaaaaaggacacagatcaaaaaaacacccaaaggcttaacagaacatggaaagttcccactaagttgtgtgtgaggaaatcctcatcttgtattttaagaatctgcagatggcatccatagatacagtacagtatttactgtcaatgcaaaagaatcagtgaggttaaagtagtggaagttttccctatgagcctacagtctgtattgtttacattaagaaactctctattattgtgttgctattttccatggagtcacaggcacactatgacttctgctcccaaatacatatgaccatatgtaaataccaccttgcatttcattgttcttcacaagtgctttgtgcccctttaattaaaaacacatgaaatgaataacaaaacaagacccaaatagagtttattttattctcagagtttggactacaattttctaagatgtttctggttcaagactgtcattttctatttcaaccgaaaagtaagcatttaacccggtgaataaatgtagatcctgccattcattggtattttaaagaaccacttgaaatcggatcattttatttaaaaataaaaaatgttaatgccagttggcctactataaaaagccaggaccatgttagaattaggaaaagtaaccagcattactgcacctcttgttagactctgtgcattaataaaacacacctagagtctgttgtcatttcactaataggataagacaaattttttgctttgaaaaaatttttctgcatgcccaggtgtctgtctctggctgaggttttgtctattttacagtgtttcaatccagccataaaaattaacttgtgattttttttttcccaaagtcatgcttttccttaattatatttttattttattattttagtgtcttgagaaaaataccaagagatataatgtttcttttaattgtctatgcttaatcatctttaaacactttttaaatttctaaccacaagacctctctataatggtaaatgtaagacatcaccattttatcactcaaagtatgttattgaaagtttctatttggttgataaaaggaacaattttttcccacttttgatgcctgtgatgcaattttttattgcctacaatgagatacacttagtacaaaaaatgaaaatctggtatttcaaaattgcatttcttgtataataggtcagatttattaactactcatactttttctttacactaatcgatacatttagaaaaaattttctaagttagagacaagtttaaaagtaaaaaaaaaaaaaaattagccactgctagtctactgtttaggtaatcggaatcaccaattattttattagaatgatggcttgagtaaaaagctgtggaaagaattaaaggattatgagctaagctgtattttgcagaatatggttctattttagtagagcagagatgagacatatccccaccggccacccagccagaggtctcctacctgggggccctaaagggatgcagaggtctggcccaccctccgtgcataggcacctctgtccaccaccagcgtttcagcaatccaaccagtaagcatatgctgtataggaaaaataaaagtgtgtgggaattggatttcttttgttgtaacacaattccaggtttttggctatttaaagtttgacattaggctgacatcgaggaagtaagtgggttttcctgagttcccaagatatgattaaggaagaaaacaaacccatctccaggaagatcccaggcaggaaagaactagacagatgtagaaaccaaagtgaccattttagtttttttattggagaataaaacattaatattagggtattaagaagatgctcagcaagcttgatcagaatcttcatggtcattaccaatcagtctgacaaaatagttctctggtagtcagcattcatttaaggcagcttgcctgataatttcctgtgttatgtgaagtgtcttgcactttcacatgttagctataattccttaaattacttaactgaaatctgtaatagagaaccattttggcatttgaacagctattttacatggagaaaaagcaaacacatctgtttgctttacccagaaaaactgactttctggtttcatcttcatattgtttagtagcataatgagagtagtcctttatctttctctaatgttagtaaatatattctgttagtaggaagttctgaaattgaagggaaaatatatttaaggaaataaaggaattcaatacacccttcaaaagtcaccaaatactgaaaataagagatgagtccttaaaacctgagtcaaaaaaggtccagttttacagcctgcaattaattcagggctgcgttggcattaaaaaagaaaatatatatatatatatatatatatatatatatatatatatatatgtatattatatatacagtagcttacacttaaaagaggaaaaatttgcattaacattgcatattctgatatgtaccatattaacacataacaggcattttatttatgcttcatagaatcagacagacacaactttcaaaaatcttactgtattcacaatagaaaagggtagtcttgtctaccacagaggagtatgtccacacttaataatgaaaactttcttcctttcctgcccaaaaatttcttcagtctgttattatttttaagtgccccttgctgcaaatttcaaacagagcaagaaatcttcctcagagtaggtggtatgaaattaaactagtacaatatatatgaattcatgtcatttacccctgagtatggtagaattgttaaagcattcttaaattccaattatatgaagcctatcattactaggaaaagtatattctttgggataagaattaatttcttcacactattagagcatgttgtgagtagtaaggaactacttagatgcaatttatttacagaattgtcccttgacctcttgaaatggctagatctttcactactgtgtaggtagtctctacttactggtaggatagattacattgctttactggacaaagcagaatgaacttatataactaaaatatgtcctatattggctgggtgcggtggcttacacctgtaataccagcactttgggaggccaaggtgggtggatcagttgaggtcaggagttcgagaccagcctggccaacatggtgaaaccctgtctctactgaaaatacaaaaaaaaaaaagtatctgggcatggtggcttgtgcctgtaatcccagctacttgggaggctgaggcagggaaatcgcttaaacccgggaggtggaggttgcagtgggcccagatcgtgccactccactccagcctgggagacagagcaagactccatctcaaaataataataatagtaataatgaataaaataaaataaaatatgtcctccagggaaaagcaatgacagagtaatcaccaaattaataggaacatctttctagagaaagtacatgcccagttagttcaaacccaggtttcaaagaagtagcactgggctctactgtaaaggcaggcagtgaccaagaggtggtggggagagaggtagagtaccctcaaatcattcccattttcacttccaatttcccttttgtaatcattaagcttaagctatgtatggaaatgcaaagcaccattagcatttctagaaagcagctggaaccttacccaccaatgcttttttgaagacagtatcatcccaaatttaaaaatcctattgtatatgttgtaaaatttctggcaaagaaatggaggatcctgtggcagctattcccacctaaagccaaccctataaggatgggtcattttttagccatgctaggatttactgcacacacaaaaaatgtcatttagcttgtcacattgctagcacagctgcacatatgagcaaagcactgttggtctgtgtttctcagtgggggtactcttggcatttggagctggataggtctttgctgtacagaatcatcccatgcattgccagatgtttaatatcccaggcccctgctgactaaatgtcagtagcattctcagtcattgtaaacaccaagaataaaaagcattcccccaggttcaaatgccctccctgggaggttggtatcacctcccctgaatgccactgtctactgcattttgaggacacagggagaaaaagtgcctatcctcaaacattgtctctgctgccttgcatttctttgggccctgaatggtttttctcccttcatttttcgagcctttctctcagtgcagctgttcttcagggaggaggttactgggcagccttggccattcagtgggcatggggacttggcctagtccctatatatatatacttaaagtccctatatatacttaaaggagagatcatacatgaagaaagcttttttttttttttttttttttgccttacaacttttctttagaaccacattattggtcataatccttgttactgtcatgaggattgttgcatgggttaaacacaaacacagactagcaatgcacttgaacaaacctggtggtctttggaaataaatcaccattagatttcacctggttatgctgcatcccataagttccaaatgaatcacctgcttatcctattaacgaagcatttaattcacacacaaatgcttgaatttcccctgtataaatgtagtcatgcgattcaacttttctaataagatttgtgaatgctgcatcatgatgaaaatgtggattaactgtgggttgcatgcctgttgttcatacttcagtgatggtcacacacaaaacaagatgagttttacttaggtgaaacattattaaactgtactaacaatacagaaacatattctctttgtcgctttttatcaccaaaactgaatggcaaatatgtcttgacattacttggatgaactgtggctagcaaaatggaattaacttagccactataattttttaaaacattaaagtttctaaattgtttttggggccgagtaacgcagagtcaataaaggtggttatattgtaagcttttagatggtgcttaagaattcttatctttttaaatagcagtattttttttttaagaataaattgtaaggagcaaataaggcagaatgccactctaccctcaggtcaattttatggtatatgaaaatgccagtaatatttgtgccacttgccaactcgggggaggaggggcttttcccttactggatacttttgttatagtttgactatgtcattatgttgtttagagagcctccacaatgagaagttgccactgcagggctaactcgccttcagaaataatcagaatgattcaagggtcaaaccactttcatcccttaaaatatagggactaatatttctttttcttttttttaaaaaaaacatttcttctgtggcttagaaatgtgccagtgtgttcaaaacatttacaccaatttcaccagatttaggacctattaaaaattcaaacaagtttcttttttttttttttttttctgtgtaacagggatttttaaataacggactatatgcattcttttgttatttcacacttcagttaaagtgataacaatggtaaactgtgatcattatcagactgactgaatgctttctgatttccagtgagtgatctagttctacgtattacacaggtgtaatatctgtgagtgtaaataactggaactgtacactgattaacatgacagtttctcttttgttgttcttatctgtactgtattatagtatgtgggtataaatatctacaagtatacacacatatgtacttgtattccactattgtaacctgaaagaaagactatgtattcccttttttaattccgtactggtatttgtgttatttaaaaagcaaaattctgctctatttagttgtataatattagaggatactttgctgtgcacaattccaagtgccttagaacattgtttagctttcctaagtatatataaatgcatatatgtataaaattgggaaaagttacctcaataaaatcattgggaaatccccagttttagtttgttccagtttctcttatatttggatagtgctcagcctttttaaatgaaaaaagaaaaaagagtaagacaacttccctaattgcctgttatttcagcttcacctaagtttttaacacctctttgtatgtaaggtcttgagacatgtaaggcctggtactttttatttaaaatgtctgtctaaagaattactgctcttaaaagaaacttccagtattttttttaacttgctatctttttatgtctgaggtatttgatattgatgtttttattgccattattatatgtaaacataaaagatagtccatttagagtttataatatagaaaataaacagacttcctcatta

SEQ ID NO: 14118 - DNA, 277 bp, Homo sapiens
acagtggagcatacagggcaaggcactttattaggggctcctcatctttggttattgactagaaacttcagaaagacaaaactgtttgccatttttactggcagataagaggaaaatacaatatttgtattatttttatactagtaagtgtcccctgccaaccatcttgtaaatattgtaatactttaatttttaatattataagcttacatttgctctgaagtaaatgacttcatgaatgtgaaatgtttgataaattaaaggaaaatatcttcat

SEQ ID NO: 14119 - DNA, 873 bp, Homo sapiens
caggccggcccgggccgccaccgcccatcccagaccatggagcgcgctgggaaggacgcaccaaagccgggagctctgccctgcagggagttgccccaaccctttccggaactcagtctttagaaaagaaacgccaggttcaagaattgcaaaccagcctgtgcttggaaagatggttagttgataccgtccgatgattcttcagtaaagatagattcccacaaagttgtgcaatgtcattatatgacaccttgcactcttaccgtcttgacagaagccaagtaaggaactgaagttgtatctgactgtagggtgaatgtctgaggcctgcctcctaataaagactcaaggaggaagtcaattgggcatctgctaatagaatgaactcatgatggaaacttcagttcatttactttgtcctgaaaattccctggttctgttccattttgagcgaaattggccttgggaaaaaccacgttcttcctttccgattcttcatccggtctacgctatgcaattcctccccaaatatagatcttatttctgctcatttcccctacttattaaaatcacaccaaacacttactattttcttatctctttcactttttaaatatctttcaccaggttatattttggtattatttttccaaacatttttaagcactgaatatcgaacaagcactcaaattgaagtatcagtcatgttttgtgtatttttcgctgataaaaattatttaacatttatatttttacttgattacatatgcacatgtatgtaaatgtaaaatactaatattcactaatatatgtacataatgatcaattggtttaacttcttttatgtaagtatggtatataaatttcaagacg

SEQ ID NO: 14120 - DNA, 2035 bp, Homo sapiens
agtattcatccggccaaccaatgtttcctgacgtacagtgttgcccttttcagcaaatgccaattccaagttccattaaatcagaagctccatggctccttggcccacgatgttgagtgctgactgtgtgttctactgaaagagtaaaacactgactatccaaagagaaatggatattttgtttttataataaccatatattattgttttcttcttccctttctatgcaagtgtaaattaatgaacagagaggtatttggaaatggtaatacatttgtcacggatttgtataatgtatacagcattgggaaagtgggtgggggctttctaatatgataccgtctttttaataactatgacaaagcttacataagaattagaagaccactttacatttttacattccttctgctgttcatattaaccttgcacaattacttcattttttctttgactcttttaccacaatgttttggttatttataatttatcagccatatgtttatcagccatataaccaactagatcccaaatagatccatgtatttgtttccgtgatttggccacattaataaattcataaatttcaatcaaatatcttatatatacacacatatggtttaagctacagccctgtgtatgccgtttaactttatttgacgttgcccacttacttctttgctgaccacttggataaccgtaataaaaatcctataagcctaaatggcatttcttttgggatatttttcctgcattttattccctttttatataagtaggaattaattatttattttatgtcttaatctatttgataaagaagactacattataataatctcaaagatcatattaccaaaggttgcccacttgagcatattttcattttgacacagaaacaaaatttagtacaacctttcctagttcccatgtcttgattttcatcattacatgcacagcagacctttacctattgtgataccagaacacatcattgtctttggttcccttcaaagagaattttattgttgttttgtattttcaagtccttaatagttcttgaaactcctagttgttttcttgttgaaagcagacacacatttagtgcacggcttattttacctttcgggtgaaagatcagatgtttttatacccttcacttgatcaatatatttggaaagaatgtttatcaaaagtctatgtcactgcttctacagaagaatgaaattaatgcttaggtgatggtacctccacctacatctttttgagtgcattcaattatgtattttggtttagcttctgatttaacatttaattgattcagtttaaacatgttacttaattagcaaatgtagaggaaccaaaaaaaggtgaaaataatatgttttgattcaaacctaaagacataaaaacataaagacattttaactttgggttctctttagctgggatctggccagaaggaggcttaaagttagaaattgctattattttagaataggttgggtgggttggggggcaagggtgtctatttgcagcagagatattttgaaaagaagaaaattgttttatataaaaaggaaagccatgaccacctttctacctcagatccatcttcatccattgcattggaaactgctttatgctgctgcagtctgcaaagtctagagcttttatcaggccatgtcatacccaagaaagcacctatttaaagaaaaaacaattccctgagctctcaactccaagttgtagatttggtgtcttccttgttcttactttaaaaagtcatgtgttaattttttttctgcctgtatttgtatgcaaaatgtcctctatctgctattaaagaaaagctacgtaaaacactacattgtaaccttctaagtaataataaataaaaagaaatatattgcagtaacaatgggaagtaagtatgtagttcttttgaaatatgtggtaaagaactaatcacagactatcatctaatctggttacatattgtatttttcatcctgaataaaagtaattttaacac

SEQ ID NO: 14121 - DNA, 2802 bp, Homo sapiens
gggggaagggtccacatagaaaagcaagacaagccagagatctcccacacctccagagatgtgcaaacagctgggaggaaaagcctgggagtggggggcctcgtcgggaggacaggagaccgctgctgctgctgccgctactgctgctgctgccttaagtaggaagagagggaaggacaccaagcaaaaaatgttccaggccaggattcggattcttgaattactcgaagccttctctgggaagaaagggaattctgacaaagcacaattccatatggtatgtaacttttatcacaaatcaaatagtgacatcacaaacataatgtcctcttttgcacaattgtgcatagatatatatatgcccacacacactgggccatgcttgccaaggaacagcccacgtggacatgccagtcggatcatgagttcacctgatggcattcggagtgagctggtggagccagacagagcaggtgcggggaagggaagggcccaggccagacccatcccaaacggatgatgggatgatgggacagcagctccttgctcagaagcccttctccccgctgggctgacagactcctcatcttcaggagactcaggaatggagcggcacaggggtctctcttcatccactgcaacccatccagtgccagctttgagattgcacttgaagaaaggtgcatggaccccctgctgctctgcagattccctttatttaggaaaacaggaataagagcaaaattatcaccaaaaagtgcttcatcaggcgtgctacaggaggaaggagctagaaatagaacaatccatcagcatgagactttgaaaaaaaaacacatgatcagcttctcatgttccatattcacttattggcgatttggggaaaaggccggaacaagagattgttacgagagtggcagaaacccttttgtagattgacttgtgtttgtgccaagcgggctttccattgaccttcagttaaagaacaaaccatgtgacaaaattgttaccttccacttactgtagcaaataatacctacaagttgaacttctaagatgcgtatatgtacaatttggtgccattatttctcctacgtattagagaaacaaatccatctttgaatctaatggtgtactcatagcaactattactggtttaaatgacaaataattctatcctattgtcactgaagtccttgtaactagcgagtgaatgtgttcctgtgtccttgtatatgtgcgatcgtaaaatttgtgcaatgtaatgtcaaattgactggtcaatgtcaacctagtagtcaatctaactgcaattagaaattgtcttttgaatatactatatatattttttatgttccaataatgttttgtacatcattgtcatcaatatctacagaagctctttgacggtttgaatactatggctcaaggttttcatatgcagctcggatggacatttttcttctaagatggaacttatttttcagatattttctgatgtggagatatgttattaatgaagtggtttgaaaatttgttatattaaaagtgcacaaaaactgagagtgaaaataaaaggtacattttataagcttgcacacattattaacacataagattgaacaaagcatttagattattccaggttatatcatttttttaaagattttccacagctacttgagtgtctaacatacagtaacatctaactcagctaataatttgtaaaatctttatcaatcacattttgccttcttttaatttttatgttcatggacttttattcctgtgtcttggctgtcataactttttatttctgctatttgctgttgtgtaatatccatggacatgtaatccacttactccatctttacaatccctttttaccaccaataaaaggatttttcttgctgttttgatttcttctattatttgtggaatgaattataccccccttaaatatctttgtttatgccttatgttcagtcatattttaatatgcttccttcatattgaagctgctgatttctcagccaaaaatcatcttagaatctttaaatatccattgcatcatttgttcagaatttaacatccattccaatgttggaggcttgtattacttatatttcatcatattctattgccaagtttagtcagttccacaccaagaatgaactgcatttcctttaaaaattattttaaaacacctttattgaaaagatctcatgactgagatgtggactttggttccatgttttcattgtaagaaagcagagagcggaaaatcaatggctccagtgattaatagatgggtttttagtaattgacaaattcatgagggaaagcatatgatctctttattagtgaatcatgcttattttttactcttaatgccactaatatacatccctaatatcacagggcttgtgcattcagatttttaaaaaattaggatagataaggaaacaacttatattcaagtgtaagatgatatcaggttggtctaagacttttggtgaacacgttcattcaactgtgatcactttattactctgaatgcctactattatcctgattatggggtctcctgaataaatagagtattagtccttatgtcatcattgttcaaaattggagatgtacacatacataccctataccaagagggccgaaactcttcaccttgatgtatgttctgatacaagttgttcagcttcttgtaaatgtgttttccttcggcttgttactgccttttgtcaaataatcttgacaatgctgtataataaatattttctatttatt

SEQ ID NO: 14122 - DNA, 345 bp, Homo sapiens
tatatggcttctgcttctcttgtgtgtgcctcagctctgaagaagttcctgagaatgggttacagatgtcatgttagctgggagtcttcccacatgtggcacttcaaaaggcagcaccactgggcgcctgcacttatttgaaaatggaactttgggagaagtatccctgctagtggctctgtaacttaacagatgacaattaggcttttgtcattgttgccatcatatggaagataatgtttacatccttttaaacatttttatatgacaattcctcaggatttggtaaggcttccaagttgtagcttttagtgtaagtgctggggtggtaataaaatgttacct

SEQ ID NO: 14123 - DNA, 1000 bp, Homo sapiens
caaccagaatccaataagtccaacttcagccagaaggaaaaaagttttccatttttattacattctttaggaaagttaacgttaaagggatgttcgtcactgaatactgttctttcctagcacagtcatgcactgttttacctcagtcatgtggctttaactgaggagtgttcacacgcactcgaaatggagtatatggtgtgtgccagttatgagttgaccatttgggaattaaacaggtcacacgtgacagatgaagaaaccaagggggctgctgaggagacctggtgcagggactaatcctggatcattcctgtattaaactttcatatgccaaaagggtttgtgccgttttatctgccatcagtgtttgacctgtttagggcagaggcaataagtcagaagtcttgaagttgaaatagttatatgtgtgtcattggactggattataaacagctgtcttggactttccctctcttaacactgactggtcatcagtatcattagtgaaaaagaaacaaattgtttgttatcatctctttagacagataagctgaatggtgggctttaaataataaaaacatacacatagttgacttgtgtatgagctactcttggattcttgttattatagacttgtatttagttcatattttgtcaaaagcaaaacaagaagatacatcacttttcattgaaaagaaaagtgtagagcatgactgaattgctcatcattctgggagtttccatgtagtggctatgcagtgtggaaagtgagaaaaacctccattgtggtgaggagaatacttcaatgtcccttgtccttgttctcattaattcagctaaaggtggatttgaccaaaataatgctggttaaatttgtagaaatgttgaaattggctgtgttttaaattttgcttgaatttttataaaatgtttaaccaaatgtacctttgcattctttaattaaaattgcttaaaaaaaaactttcattatttcagt

SEQ ID NO: 14124 - DNA, 5565 bp, Homo sapiens
atatcatttttgagacctcgtggaggactgatgaggtgcctgaagactggaaaagggcatatttagaaccttctttcaaaaagggaaatggatgatgaccctggaaatactcatcagcttaactttttgcttggacaaattctggaataatcaacttagtaaactgggtaactggcttataacagctagaaataaggcagtgaactatcacgcataaagaagtattgagttcatttttttaagaagatatcatgatgagatacagtcttatgcatttcttggcattctcccttccattcttaatgaaaacagatgaggttggctaaggcatttgagtcataacttagtttaagtacaatataacaaaaaggtagatttctgacagtaagtagtaattatattatttccaaatttgcttttaacttgagaacagtagctttaatttttatattcaagcatacattctacttcatttcatataggaccatgtttttataagataagatacataattctatgtagaatagtttggtgaaggaattcttattttaaggtgcttttatatagttattttgtatattggtacaatgttaaaggtgatgaattaaggaacatcaccaagagaggacaatttcttctaacttctctttttaaatttaatctggctgaggtttagtattaggactaatacaagtgtcttgctctgacatgcatcaagcaagagctagctattttacttcatagctagtttcttgcactctgtggagactgccagggccgcagctcacagcctgttctgagctgcagtgctttatcccaccttgctctccaggcttctgacttcaggcctgtgggggccgggaggtgggcagcggcagtggcctgaggagccctgtagaactacggctgaaaaagaaagtagattgaggtggggggaggaaattaacaggaatctagagtttttctaattcttatcgtcttatcgttcttgtgtttggatgctggtagtttttttttttttagacagagtctcgctctgtcacccaggctggagtgtagtggcacaatcttggctcacagtgactttcgcctcccaggttcaaggaattctcctgcctcggcctcttggtagctgggattacaggcacgcatcaccacacccagctaatttttttgtatttttagtagagatggggttttaccatgttggccaggctgttcttgaactcctggcctcaaatgatccactcgccgtggcctccagtagcgctgggattacaggcgtgagccatcacacccggcctggatgctggtagttttattttctgcttagaaaacgcaaccatgttgatgggaccaaaaacttagttgaaagaagccatggcaaaagatgttgacgtacaactggctcctgaggctgtcaattgtttagagctcccaagtagtactgcattacggaatctactacttagaagaatgtacaagatgtaagttcccatcggcaccgtcatggtaagaagaataagaaactctcaaaggaaaagaaacttacattcactttttcctggtccattttggttcctaagaatagataggccattaagaaggatattaggtttctaaggacaattttaacacaatactgctttaaaaatctgaagtttaaatagtttagctatttctgtaggttaattcaggcactgactaaaatcagtctcattatcatatacaaatgtaaggaagttaaattttaaaagcatgtataggttgtccttaaattatacaaaagcttttagtttcatcaggattatattccagttaacctttcatcttttttttttttccaaatgaactagggtctttaaaattcctaagtagattcttttgagtggtaggggagtctgtatagattacagatataatttattgtgataacaaatggcttcctgtttgacctcatttccaggtgtcgcatccgtggctgatttatttcacagatgtacatttgcatgtacttgttgaactttgctaggaaggactcaatttttgaaaaatctgttattttcactgtgggccttatgaggcaatctactgcaatggaaaaagggttccttggtcatttcaagttttattttctattagagtaatatctaacttcaattattttgccaggtttaaaccttctctctgtgtctgtggttagaatttgaaaataacaatgctctgcttaaagtaagagtcacagtcagcaaaaaaagccaatggattttaaaaagacatcttagttaaagctagaggaagaaaacttcaaataagcaaagaagtattgaaggatgcccacgaattcctttgcattaaaatcaagatgaggtaagaggtagaatataagagaaagggattatttttaccatgaattgtatctggggacagttagtcttagaaggagtaattttttcagcgtttttcctctgtatctaaacaccaataatatacttaatttttgaatataaaagaagtagcaattgactaagaataaatatgttataaaaactaggggattatcttgatttacatttcctagagtattaaaagagattaattacagactttcacttgataatattgaggagtctggagggtcatagcaaaattttctttagttcatcttaaaatttagggaggtaaaaaaagattttattcacataaaagatttcttggcatagggaaggcgtaatgttaagggcttcttccttacccaagtgggagctgaaccagtaattgtggggaaaactgaatttatagcaacaaaggatagtagtttctcaactgggagcatacgagcaatttctcagttcagagatatttatagcatcttggtgttatgcaataaacaatgacaacaacaagcattgagctttcactttggagttactcagatctgagtttaaattctaaaattattctagtagtattttcctgcggtgaatctgttaaggatgtaagctatagtgtagcttggggaatcatcttgaacagttatgaaactcattaaagcttcttttcccttgtctgtaaaatgggaaaaataaatacctctatagctcttaagaggcttaagagttctatggcttacacccacatacagtccttggctcagtgctaggcatgtagcaggtgctgactgcctctctcccttcccttctttactctcagttgtcttatttcttcttatgcagaagagattaccttaaagctgactagaaaactcagacataaattgacatttccttatcattgcctgaaacccactgaataagtcccctttgatttctctcaggaaggataaaaaaggctacagtacctgctcataggagttcagtaaatgtttattgattgaatgaaaagaatttgatttaaggaaacaataacactccatcctgggcaacagagcaagatcccgtctcaaaacaaaacaaaacaaaacaaaacagcaaattcataaaggccagcagttttcaagtctggggaaataggcacatggacagattatatgaaggtatttcattagctttcttctctttatggcagcttcagattgatgaatttgaggtacaaatgagtgagtgacatatgtatattttcctctgattttatgactgatttacaaattaggagtgcaaatgggctgttccccgatagcatcttctgggaagaatccaaccaagatacaaagcagatgatggtggatcggcaaactcttttctatgaaaagaaaaaccagatataccagggactggaaagcacctgcttgaaaattgatatgagcatgtctgaatttttcccttataagagcctgagtattgtaacaggtctcttgcacagggggttgaaaaataaaaaaagaagttaacataattaaaatgcttggacaaaacatttgctttatatagattcttacaagtaatatttgattaggtatcaaaataggtttaggcaggtggaagttctgaatttcaaggcaaataaggcatgaagggtggaacattgcatctagggaaaataagagaaataagtgaaagtctgaccctacattgccaattctcagaccaagtacaaagtattaggaattttttatatcagctgacatcttgtgcttacagtaaagccatatagatgcacacatagtgactttattaaatcaaatgagttgtgcagagcagagcaaatctattaggctttctcttttagagttttctaattttactcttattagctccctcagttgtcatcaattacatattcctacatcagatattttacactatcagattctttgattaaaaaatcatcttcagctttacattattaatctctgaggacataaaatcaaataactttctagtccatgatcattaatccctactattttagatatttccataaaaggcttaaagggaaaaaaaaatggtaggtagttcagaaaaaaatggctgggcacggtggctcacgcctgtaatcccagcactttgggaggccggggtgggcagatcatttgaggtcaggagtttgagaccagcctggccaacatggtgaaaccctgtgtctactaaaaatacaaaaaaaattagctgagtgtggtggtgtgcgcctgtaatcccagctactaaggcaggagaatggcttgaacccaggaggtggaggtcgcagtgagctgagatcgcgccagtgcgctccagcctgggcaacagagtgagactctgtctaaaaaaaaaaaaaaaagaaaagaaaaaagaaaaattgaagaacataacttttctacttatgaaatagataattttttaaaattgtttaaactcctggaaattaagtgttattttttattactgcagttgagagataccttttcagaggaaaacaagaggctaaattccatgttaagagctaagtagtatttttttcttaacaattttgccaaaatttcttctactggaccaaaaggaaataaatctacaataaatctactttctaaatattatttaagatgggaaatgtcttttataggtatattctgtataatacccttaattagatgaattatcccttatcattccaaaaatgaaatgctgtgttaaatatctccagggcaaagtggtatgttgactgggacaaacgttagaaattgtattgttcattgcacttgttgccctgttccccaagcttgtcaatgtttagagatactattcgggttgctaaagccattattcatagaaaatttctgcccctacagaagtgtgtgcatgggccttggaaaatctacatgtgtatatctgagtagcgaagcacagattcactctaattgaaagcagcagtttggttttgtaaatgtaattgcaattgacactttcttttccctttcagttattattttttttaaaggacgttatgagaaggcactatgaaaagcctaattggaatagcattatgaaccatgtaatgcatgcccatgcacactgtgatttgcaaacatatgtccgctcttcaataaatgttacggctttcacagcg

SEQ ID NO: 14125 - DNA, 3490 bp, Homo sapiens
ccaggcccggaatgggcctctctggacaagagccaccctttcactgtgcatatgatgctgatgcaattcctccatcatctctggacgtgcagaccagatccagaagaaaggcctggcgtgtggccaaacagcgtgaaaccttggcacaggactgaggatcctctcctccagaaaagccccctcgaggaaataaattagtgcggttctctttgacccccaaagacaagacaagcacttatttttattttcagaagacaaaagaaccaagatgccaactggctgcgaatgctctatctccagtctgtctctgtgtactggtagaggctgggaggagtagggggcagcctgttccatttctgatagtgcccttgctcttctgtctgtcatcttgcaggatgcccgagggccagatgggcttagctaggccaaagtaacagactcaagagttattgtacattactgaccacgctcatttgttcaaaagttagaacatctggctgcaccaggaaaaaaaaaaaaaaaaagtcctgttcttctttagataaacaagagacattttcataattgctttctagcaatcagcttttatttgccttaatataagcttttaagcagttatctaactagtgtccacaaccctgtaaccatacttccacatcttcagcttaggcagacatcgaacctctctgggatgtttccagcaaaagtgagcttttctaatcgtctcattgtaacatggcttattttgtagaggtattcatcagccacacacttcatgttggtttttggtttttaagctaactacaaatctagtaaaaagctatctgaaattcacaaatatcatgtgtgtgcgtgcgtgcgtgcgcgtgtgtgtctgtattcatagtgactgcttttggttttaaccagtttagtatcgttactgtgtggatcgtcgcgctgcagtattgacttggaatcctgaccatgtccatcccaaaattcagtcctcagttaacggatcatgtttgcaaaaggtcactgtgaggctgcatatttcagaaagatgtccttaataagggaagtcatgtataagatgttttctaaaagacttttcagtattacaactaatactattattatccttctttttttatttagataattcttttaatttaaacaaaggttcactatggaaccagacaaatctcattagccatgtgttaagtatttgctactttaaattgttttacaactgatttcagcacattctatccttttttttttttgaaatggagtttcgctcttgtcacccaggctggagtgcaatggcacgatcttggctcactgcaacctcagtctcccaggttcaagtgattctcctgccttagcctcccgagtagctgggattataggcacccaccaccacgcccagctaatttttgtattattagtagagacagggtttcaccatgttggccaggctggtctcaaactcaactcctgacctcaggtggtccacccgcctcagcctcccaaagtgctgggattacaggtgtgagccaccgcacctggcctctgtcctcttttagtctagtgtctggttttctagcaaacagtaaatttaaacaagtaaactattatggtttccattgcttacaaaatgattttcctttacattcttatcatgaacactattttaagcatcaaatgcaatcatctaaaatataaaggtcaatcatttataatagaaacaccttgaccacaagcccttgattgaacattttataatatttcatctacttattaaaacaaataatttcccttgggttggaggggaagtgatttcataaattaattagaaagccatctttagcatattgcttatgtctggatccatgtttctgaggaaaaagacattctcaggtgatgtatttttttcatgcattagtatgcatttttaaaaaataatgcatgtttctttaataattaattttcatcttctataagatgccatgtgaagaagttgtggaaatgtagaataaaaagctaaagctgccaaatttctgttgaactcttaaaaacagctcatgtttgtttgtcctctcgggttgtggcctagcctatttgcaatgtaatgaagctgcagggttcttgtatagctaaagcgttcaatgcatttcacgtgctgtggtggatgtgggtgctgtagacaggcttcttctcttcctgctctcaaaatacctcggcttgacatttggacagatcctgtcattgtttaagctgagcaaaaaaccacacaaaagttgtgtaagagatgagataacaaaggagcgagagaaatctcatgtgaatttccaagttttaattcgttctccatgaaggattttcatttcagtgaaagtcgcagcagaagagggaactttctggagtttttgagaatgccaaaccacatttttatcacacttctttggaaatcaatgcctttgcatagaaaatcaaattcagggaccacaaagaattttcagtgggaatgtctagtctgaggggtctgaggttgtttttactttattgtgttgtttaaatattttaaaaatatctttagcgtttggtcttttttttttctgtaaacatttaatttggtctgagaaaagctgaatgtttgggtgtgacgtttgactgaggtggattggggctgcctgtggacattagtgaacaggtggtaggcttcaggaatatccagttttaatcagttgcatttggtacagaattttgagtaatggtgaaaattgttgtctttggaaagcacaaaagaaacctggaaaggcagttcggctcaggtagctacacataacattgtgtatgattttcacttcaaagctgtctggaaggaaatgcagtcagctccagctagtactatttatgtacccagataactaagatattgtttcatggccttgccttagtcagaggcccttttctctgtcctgaacccccaggtatgggtgaaattggaaattactaatctattggaaatcagttcctgacatagtaaagtttgctttcataactgcagcaaaaaaggtcaacttgccaagtcactgctgccatgtgtgtactgtattattttcagaaaaaaatataatagtctgagtccaagttatcttgatttaaaattgatagagaaaagaaactgtcgagcaagttatataacaactaacaacattgcactttctgtatatgaaatcaatatttaaataacttatttttctccattgctgttcttaaaaacattgtaagtagctgtaatataccagtaccaatatgttcttgcaattgcttcagcccaagaaagctgtgtattgttttaaaaattgtaaaaattattgtgatgattcatttagcataaagagaggtggacggaagggttttcctatgtatcaaaacttgtctataattatgtcatctatgtacctagaaaaaagtaaataaatttcttcagttgaatatg

SEQ ID NO: 14126 - DNA, 2873 bp, Homo sapiens
tgtgactgtgttgcctctatggctttatctcccttttccagaaagttctttgtttggggaagtaaaatccttaagggactaaattaatgcttgggtgcattaaaaagaacaaaacattcccacatgttggggtcattgggagatgcccggttttgcgggttttatttgtttaattttattctgtgttttctcttggctctttgggtctttcccgggtacactagatggctccatcccaaggcatcttgtcataaaacagctttcccccaccccatatcatgggaaaagggggagaaatatagcccctagcctaataacttatcatttgtaaaatgacttataaaaatattacctcaatggtaggagacatccagacttgtatatttcagtggaaatacaaaaccacttcagagaccagggtatctcctctggaaggatctaagagaaggtaagacagattaggacatcgaaaaggaggatggagccaggtgccatggcttgagcctataatccgaggctgaggtgggaggatcacttgagcccaggagtttgaggttgcagtgagctgtgatcacaccactgcactccagcctgggtgacagagtgagactctgtctcaattaattttttttttttaaaggaggaggatctccatgggtaagtggtttctacccgcatgggtagagttctgcctctggtccttctcagggggcactttcaccaagagcagtgtaattatctctgaaagagcaagtcagcttgtgccgcatccccaaccaatccacagcctggagtacctttcaaggtcaaagtgcatggccagctccattgagacattccatttcaaagcaccgtgctgacagatatcaaagtactctagcagggaaaataatttgtttgctgtgtaaggaagaatgtagacaagacagataaatctgaaggtcatgtggcatcagggaaagggcatggctgtgtcttttgcacccaatatgaaacatcttctcccaacactgctttaatggaagttctaggaaccaatttagctcaggcatttgactcctacagcagaagttctgagcctgaccacagatggtgtgtaatctatcaaacacacccctggccaagttgggtcctataggacctggtactatgtactattgtaacttctagttccctaagaggtacctgttttcagtaaaaaggggtcctgagttctgtgcaggtggaagagctacccgagaactacctgagttctgtgcaggtagagtcccatttcttatgggacctgtgtgctcctgagaactcttacttgagacatcaaaaagaagcagcaagagcttctgggacagagactgcttggccagctttgtaagtaagtggctgcctccaatgtgatgtgagtacatgttgggcagtctcactgtcctaaggtatgtcttctttccacctcccactgcccctcccctgccacctatcaatgatgccttggttcagtcattagaaatctgttgctttgagttctgaaatattttcaccttaaaaaaaatgctgaaaatacacattctcctgggaagacgataaacagctagctaagaagccgaggttcagtggtggcagcaggaaggacactgccacaaattttgtctatttcatatttgtcccctagagccagccctagcaaatgtgtgagttgggagtagttaatagtaaataagactctgactttacacaagctacacattttatacttttcataaaccacaaagtctctctagaattttttctgccttcactaaaattggactgtagccaagatataaagcaagtcatttggaacctgccgagtgagcactgaagctactttatcatgagatgtgtgttaagaaggctgcagcccacaggagtccagggaaggcggggaccacagaggcacagagtccagcacttggccgctcatgggccttctttctgcctcagaggacgggggcagagaagtgatgaagggaaatgttcttagaggaggaaatatcctttgtcctgttcagagagaccagggccctaccattaggcatactttcagaagcaacctggagaacagctatcaatcatattcaaaaccagtacaagaactgctgcctggtaccctgtgagtcatttctatgaaattccatataaagaatgatgataagtttacacactgtgcaatctcacaatctgaaaataaagttgagttggctgtgttttctctgctcttgtcagaacattgggacaattggtcgttcaaaaacattcatcctcttactgcaagtttatctgggtacttttacctgtgtgttcaaaggcatttcttttcagcagtgatcattataacttcacaaaaaaagatgctgacggatttacttacagggccttaatgttattttgtcccagccaacaccctctaggtcctaaaagtcaaggtacttcagtttatttggcaaacatgacaacattttttttggccctgggcccaacagtttgtacttcatgaaacatattgtacattttacatagtttaatttaaaaaataccttttaagctagttgatctttgactgtcttatttattataacctttcagcacattccaaggttttagttactcaggaaggagttaattaaaatgattttattttggtctgatggatgttttttaaaaggaaaattattattatgaaccttcagcctactttcttgagtgccgtaaaagtgcttgtaaatctttttttttttttaagaagaaagaaaaaaatggtgtttgacgttgatggaaattcaaaaatatatatggaactgaaacattaacttagctaaaataaaagcaatctgtgtttg

SEQ ID NO: 14127 - DNA, 1892 bp, Homo sapiens
gccaaatggccctgtatcttctctaaaaccacatctaaagttcaagaaactagtctgtcatcgggaaaaagtttcactgctacataggattttgtcaaattgaaggtgtgacaagatggtgttctgctaatgttaaatgtcagcccacagagctaataatacctcagtataatgtcatgagcagttgaaattcatcacatgaaaagtaatctgctgaaagacttggttgcccactgcctaactgtgtacagtgttaccagtgtcccattatggataattctcaatatgttaacacctaggtgttcccaatacctttttcccctcatgtcactactgaattttgacaggaggaaggaatagaatgatagcttgttttatttgtaaagctttcagtgaaacactacatacacgaagaaaaggaacaaggtttaactatttaagaaccatttgctgccgcatagtgccattggatagggaagaacttcagaaatctgtggtactcttggccttgtctttgtcttccctgaacgtgtctccactctgtgaagccagcatctaggggctaaagatgcaaaggaaagcagcatgcattgtctgtacaaatgtgcagcgaaataccccaaagcttttcctactgtacagatctctcgagtctgctttaagtgatttcttttcttcttgattattttcttatatttctatatgtatagtgtaatagccttttgttaactaattttcttttttccttttagtaattaagcacgatcatgtccctttttaagccttacctgagaggaacaatgccttaaaataaaaaagcattaatgagatgaaagtatgcacagaataactttcctctacttattctgtactttgccctcatgagttccaatgttgtgtgaagacaggcagatgctgcacagtgaattgcagatgatattacagaagtgatgtctgtaggtcacattaaatactgacttgagcagtgggtgacacaacacagtgtttgtcttccacagggaagcttaaaacaaaagatatttttaacccactgacagaacaacaaggttaagcttcatctgcttggtgtcccacagaacttgcacaagcagttgttattgggaaagtacagtctcaaaaccagcaacagcagcagtacctacagccctttttttggagagaagtttaaatgctttactgttggggcagtccatttctaatcctgacttggtgacagtatcatgtgtatttataaaacaaggctagccatatttaggacaactgaagaaaagctggaaaaaaaaacaagcaaacttgaacactgaagcaacctcaagcatctctttattttgatgatatatttttgtaaggaaaatattcagatgatcaggaatgtatataactgaaatcaagaaaaagaacagtatgcatttaaaaagacagaattatgaaattatatgagtgcttagaatggggctaagggaagtgctgaaatagagcaaaggatggaagataatatagactaccacccactgtaaatgtttgcaagtggctgtgttttaaatgggattattacagttgatctctatgaatgtcagagccctaactttcaggctttgcattttgtatatgggaagaaatatgacaatcctaggtaattaaaccatagacccaaagcccttacgtttgatgcaatttatttttaaaataggccttgtttttcagcttcatctgcagttctatgtgaagattgataaatcagtttttacttgttttattaataaaacgtaatttggatatcttgagttgatggttttgtgatttagctgggtaaactatctttgtaacagataagttatttataaaaattaaaaaacttatattctaatgtg

SEQ ID NO: 14128 - DNA, 365 bp, Homo sapiens
aaagggaacctgcttctttactccagaacgctgttctttaaagaccaagattactgcattctcaattagaaaactgcaatttggttccaccacattctgactactacagtatagttttctctattcttttgtttcccccttccacattcttttattatacatgaagtaactggtatgtgtacacaagcatattgcttttttcttcaaaccaaacagccaatggtatgttttgattgacatcaagtggagacaggatgggaaaaaatactgattctgtgaaaataccccctttatccattagtggcatgttcattcaggtcttatctttatattctagtaagttattttgctctcactgttttaac

SEQ ID NO: 14129 - DNA, 93 bp, Homo sapiens
aacgccatctcatatcatggactccgaagtagcctgttgcctccaaatttgccacttgaatataattttctttaaatcgttaagaatcagttt

SEQ ID NO: 14130 - DNA, 805 bp, Homo sapiens
ggatgaattgtaaaagcaacatcagcttgaccagtataaaattacagtggattgctcatctcagtcctcaaagctttttgaaaaccaacaccatcacagcttgttttggactttgttacactgttattttcagcatgaaaatgtgtgtttttttagggtttctgattcttcaaagaggcacagagccaaattggtagaggaaggatgcaaagtataaatttgtgtaatattactttaacatgcccatattttacttggaaatattaaaagaaagggttctgtaaaatggaaaacttagtttgtgaattgattttgaggagtggtttttcttttcttggacacttaattctgttctgatattaatttatcagattgcttttgtgcattggataacaccaccattcacaagttaagattcttggtatttggatatctgttagatgctactaagaaaatagagatgagctttctttttaaagcttttgatgtggtgtcatagaatagcatgttgtagatacaatcagctgctttgttaccttaaaactaggcatttgtaaatattaaaccataagatggcaggtgatgtcctgtaaacactcagctgttcagattggacataactgacttagttcttcccttctctctctctcaaaattataggagacttgtagtttagtgtggttttctgtttctaatttgctgctgataatgtatatgaacttaacatgctgtgtaagctgtgtcctagttcttgaacagtttatgcagtgctgctttgccaaataaagttaaaagtaaaagaggc

SEQ ID NO: 14131 - DNA, 508 bp, Homo sapiens
gttaaagctgataccaaaaggctcctgtgagcacggtcttgatcaaactcgcccttctgtctggccagctgcccacgacctacggtgtatgtccagtggcctccagcagatcatgatgacatcatggacccaatagctcattcactgccttgattccttttgccaacaattttaccagcagttatacctaacatattatgcaattttctcttggtgctacctgatggaattcctgcacttaaagttctggctgactaaacaagatatatcattttctttcttctctttttgtttggaaaatcaagtacttctttgaatgatgatctctttcttgcaaatgatattgtcagtaaaataatcacgttagacttcagacctctggggattctttccgtgtcctgaaagagaatttttaaattatttaataagaaaaaatttatattaatgattgtttcctttagtaatttattgttctgtactgatatttaaataaagagttctatttccc

SEQ ID NO: 14132 - DNA, 2340 bp, Homo sapiens
gtggaaagtgatatcaagaagcctctgttagcctggtctgggtcctgctctcccttcagggaggccgcctgtctactcaccactgtgcctttctggaaagcaggagttcaagccttagcaagcccagaggcccccagcagacgatgaggacattgtcggctcaacatctcaggccactcattaccttcgctcatgatcccagcagccatttttcttaacaccttctgccactttctgtcggtgctaatggatggaactcctgcacaagttttaactgaacaagaaatcccagcaaaaggcatttttttttctacttctttgattgtagaaaagcagacacttctctgaaacatgaccttattcttccaaacagtatcgctagtaaaatagcatgctggacttcagacctcagggatccttttgatgcactgaccaggaattgtgataatccttttcatttttatggctttttacagtttctcattctgtcaaccatattgaagtgaagtggcatagtcttcactcactgtaatctccagctcctgggctcaagtgatcctctagactcagcctctagaatagctgggactacaggcacatgccaccaggactggcaaactgttttatttttaggtagaggtagggtcttcctatgttgcccaggatggtcttcaaatcttggtctcgagcaatgctaccaccttggcctcccaatgctctgggattacagacatgaaccacagtgcctgttgtagaaatttttaattatttaatatgaaaatattacattcatgattattttatttagtaaataaaataatagagagcccagaaatcaacctgcacacctaccgccatctaatcttcaatagaaatgggcaatgtgggaaagactccctattcgaaaattagtgctggaatatctggccaaccatatgcagaagaatgaaactgaacccctacttctccccatatatgtaaaataattcaatatggatgaaagatttaaatataagtactaaaactgtaaaaatcctggaatataacctaagaaataccaatgtggacatagggcctggcaaagatttcatgaagaagacactaaaaacaattgcaacaaaaacagaaattgacaaatggggcctcattaaactaaagagcttctgcacagaaaaagaaactagcaacacagtaaacagacagcctgtagaatggggaaaactatttgcaaactctgcatctgatgaaggtccaatatccagaatctacaaggaacttaaacaattcaacaagcaagaagaaaaaacccaattaaaattgggcaaaggcatgaacagacacttttcaaaagaagacctacaattggccaacaaacatgaaaaaatgctcagtatcactaatcatcagataagtgcaaatcaaaactgcaatgagttaccatctcttaccagtcacaaagtcagagatggtggtgaggctgcagagcaaaagaaacagacactgttggtgggaaagcaaacttgttcagccactatggaaagcagtttggagatttctccaagaacttaaaatagaactaccattcaatcccgcaatcccactactcgggatatacccacaggaaaagaattcattttatcaaaaagacacctgcaccaatatgttcattacagtgctattctcaccagcaaggacagagaatcaatctaagtgcccaacaacagtaaattcaatgaaaaaaaatgtggtacatagatacgatggaaaactatgcagccatgaaacacaagaaaatcatgtccttttcagcaacatggatgcaactagaggctattatcctaagcaacctaatgcaagaacagaaaaccacatactgcatcttcccattggaaagtggcagctaaacattaaattcgcatgaaccacagatgctggagatcaccagaccggggagagaagaggggcacctgggctgaaaaacacacctgttgggtatcatgcttactgtctgggcgatgggatcattgggacaccaagcctcagcttctcaaattctacccatgtaacaaacctgtatatgtaccttgtattatataggttgaaattaaagatgaataaataaaataaaatgacacaaggccaaaaacaaatgggtttaactgaccagagcgagagaactctgcactatgaacccaaacccagctcaaaaagataaaatctagtcatttaagataatcataagttgtatgatgataattgtataaaaatttgtatgatgataattgtataataattatacatgaaagtgccaaaaccctacaattaaacactgtataatgg

SEQ ID NO: 14133 - DNA, 1570 bp, Homo sapiens
ttctggaacagggtgaaactctcccagagacgaagaaagagtcctgggatttgtacttcatgaagacttttgtgaaagaataggtgtccttatgaacaacgtttttgtttttttttttttcttttttggtgtgaaggtgggggggtctattagacatttattcaagagcgttctttttttggttttaaaggtttttgttaatgtaatattttaatagcaaagatatcatgactctagccacagcctaaccaaggattatcaaaggaggtggacactcaaggaagggccacgccaggctgcgtttcctgcaaggactcagatgttcagtaccttatgatacagggaagatagttttcttacaagtagtttggtaatattttttttcttaagttgtacatttgactcagctgtcaaatttctcacacttgtatatatctacacacaactaagttaaaatgttgatgtgagttttatttcacatggatggaataaacttgtggttgtcctttaactggaggtcccagcacatgtgttttcaagaggccactaggcattcttcactgagtgctgctgacttcaacgttcactttatgcaccaaagtgaaagaattcagtgtatccgttattttaatgcactacaccacagaaatgttaagttggtcaagggcttaatttatggaatttctattatttcattggttgggatgctttgccaggtcatgtgcttattgtctcattttgtagtcttttaaagttgtatgaacccttaatttgaagaactaacttgatttctagagaaatatccacactatctcagtggtattttgcattggaaaaaggaagcactgtgtagcagtgaattgtctgctttccaccgagtactgtgtttattctctctccaggaaagcagatcaaaagaaagttagcagatcgagtgtcttcttccttagaaataggttctggtagcttctgtgcctgggtagtatcagaccagtgggagtaaaccgagtgttaagtgtcaaggtgagaaagcctcacattctctcaagacagttgctctaggagctgagttgctggtttggaagtgtggagattgcatttctggcttctctcaatggcttgtgttgaggactctgggtgctcctggccctaattgtgcaccctgatccccgtgcttggagctaggcctggtggcgtgctctagccctctcagttaccagctctttggagaaggatcaaaattcagatggaatgtgggatgggtaataggtgagagtagaaacccttccctccaggaggcccccgctgactcccacagaaacccacctaccataagatgtcttcaggtggccttgtccaaggatgggggtcaggcattttatatcaagggtgctctgaacatattttattttttaaaaaaactatgtttgtgaattttgcgtatactggcaagcttttgaaaatgtatttaattttgtattgtttaccaatgatttatttacaagatatttactcaaataaatggagctgcttacaagcctgttgacatgtgtggcttgcacaacacgtt

SEQ ID NO: 14134 - DNA, 6391 bp, Homo sapiens
gcagggccccccaagggagtggcagggagatggcgcccctgcttttccctgagcctctcgcctgctcctcttgggtctcttggctgctctttctccaggtgtcaggtcccctcattgctcttctcaggtggccacactatgtcaagaagcctctccacactctgtggcacttccagtcccataaatcctgtttcttatccactttggaaatgcatgaacactttacaaagaacatgcccgggtttttacattttaaaagttattctagacaatcactattggcttttttcttttatttttaaaaaactcacatagaggagacaatcagaaatttaccatagtcccaagaattcagctacatgatgactcgaatttaaatttagattaatcaaatggtctcctgttctctgatttctggtggcttttagacactaatttttgagaactacttttttttttttaccaaacttcagggacactctgctagttttgaataagtaaccatcaaagttactaaaacatggccaggcgcagtggctcatgcctgtaatcccagcactttgggaggccgaggtgggcagattgcctgagctcaagagttcgagaccagcctggccaacatggtgaaaccccatctctactaaaaatacaaaaaattagctgggcatgcacttgtaattccagctactcaggaggctgaggcaagagaactgcttgaatccgggaggtagagattgcagtgagtcaagatgctgagatgccaccactgcactccagcctgggcaacagagcgagaacctgtctcaaaaaaaacaaaaacaaagttactaaaatgtcaccttcacagaacaggacagggtacccttgggtcgcacgggcctggctggcatgtaaacggtcagttgcactgcctagtggtttggtagatctgacttgtaagcagttcatagaagctgctcaatactcaagaatcttgcaagacagttattaaacattcatagcttgaaattgcccatggtgggagagtttacatcacaaccactacaaatcagcacttgctttcttcttcttaaagagagctgcttaccatacatagcacccacagtgtctcccttctcttctaccccaacccctgaaacacactgacccctattctccagatgacagcacagctgtttgggactgatagggtcacagttgccaggttgggaatgctagatgtagtcttcacccatcaccttctgtcgtcctcccaggggtgtcatatttacagaggcaaactcttacagcttggatgatttctcatcaagcaactctactcacctctttttcccctttccctgtgcgtttcttcttcttgtcctcattttccttgagaaaactctctctataaaaaatttccatagagtatgtggctgataaacaacagaaatttgtttctcacagttctggaggctggaagtccaaggtcggggtgccctcatggtcaggtgctggtgaggaccctgatctgggttgcagactgctgacttcttattgtgtcctcgtggtagaaagagggttagagcctctggcatgccttttataagggtactaatcccatcatgaggccccgtccttatgacctcatcacctcccaaaggaccccctcctaataccatcacattgggggttagggtttcaacatatgaattgcgggggacacaaacattccgtccatggcacctacttcatagggtttggcatgctgctcggtacatggttaacattcataaatggtgggggcccttactgtggtagaaaccattgtcactgcaaggcagccctgcttgggattcaggtgaacaaatgtaacgtgggtgggtgagggactccctcctcttcagagaagccctcctgtggctcaggggcagctgcagggccagatggagttggcctgcagggagtcagccttaccccatcagagaccaacttgaaagatttttttctctgtgtagttcgtgttatcaatctgatctgcagccaggttatttacttctgaagcattggagttatcgattgccattgccccatggttctcactctttgcaggcactcttcaaatttttattttaaaaattataatgcaaacatctggccatcaccttaaccaagtgacaaagtcctagcacaccattaatggtaggataactgacattaagtgttcctgctgggatgaattatgaagtattccttccaaagatgtcaatggaaactaatcgagtcttacacctaattttcagtttacagtaaatacagaggataaagaagttaatggcatggtggaataaccaaaatgtgtatcattctacaaaaaaataggcctggactatttaaggagtgagtgtcactgtgggaagaataagagggggactgtcttgtccttgctactcaaagagtggtcctgggcctgtatcatcattgggaccacctgggcgcttgttagaatcaaagactctcaggcctcacctagacatccagaatcaaaatctgcattttaacaagatgcccaggtgatctgcatgcctgttaaagtctgagctctgttgcagataaccagagacccaacaaccaaaggcaaagcgtaagccttgattggattttggtttaggaaaaatctcataggtataaaagacaactgggaatgttgaatgtggatctggtggtaggtgatattgttagtgatgtgagtgatgcctgctgaagtactgagagatgaagcatcatattgacaacttactccaggaaaaaaggtgtgtgtataggtgtgtgtttggagagtgtgagcgagaactaacatggtaaaatgttaggtggagcatatacagttctcattatactcttattttaaatttatatttgaacacagtcaaatctgaatggaaatacatttaaataagcatttctttcagtcatataagtaatttgcctaaaaatgccctctaagtccatcattaggttaagcgatttactgaaggtgcagatatcatgcttatttcattgggttgttttggaatgtcccccacttggagagtttgaggaatggaaatgagaatcggaggagaaataaggccagaggctcacattgcttgcagggaaccgactgagtaatgaagaagaggaaggaagcccttggaaggaacgtaaaatccatttcagcctgccgccccttggaatggagggtcttctagggaccagaaacaccagacacttcttctgccccaagcacaccccacactaatttctgctgcagcatcacgatcagggcaaatcagcacagccccccagccatcagtggtgtctagaaaagtaaggataattttcttccttctcactgcagccccaagctcttattaaccttcttttatgtgttcattaaatgcagtcatgtgacaactgtgttcaaagttagaaatagtggtcggggaggcttatagatcctcttgctgttctgaggccttaaaaccaaaaaaataatggaatgattgcatcactgcgaggaagtatacttaattaagaaagttgaaaatggtttgtgtcttactaataggactcacctgaagactctactttgccaagagggaatttttaactcaaagttgtgtcagccagcacggggtagagccatggtcctcatacttgctggcatccctcatctggtggtctgttaaagcacagattgctgggccgcaccctcagggtgtgtgattgtgtgattcagtattgctgggtggtgcccaaatgctccagttctaatgtattcccaggtgttgctgatgctggtgattgggtaccacattttgagaaccatggggcattggcaatcaacaaatgcaatgcttgtgacttgacgtgataaaagttcatttattgggcaggcaaagtcctctgcaggcctggaaaccctccgagacaattacttgcatggggtaacccagtaatactgtgggatgcaacttctagggcatggctgcctccttcctagaggcagcagggggagaaaacactggaagaggtcaccccaacaattccatcgtaccttggcctaggagtgacctcctcagtctcacaaccctttggctagaactagtcatgtgacctcacaggaggtggagcagtgtcgtcaatgttatcatccccctgcacctgcaaggaaggaggcccagatgtgtgtaggtgctggatgtctcttccccaaaacatataactctggatttggaaaacaaaactggatataacagaaaagaaaaggaggggagaaggaaagttgaagaaattggtgaaatcagaataggacagtgaaaggcataaagattttcttctgaaacgctaagatcggttgatatttgtctaatacagctttaaatagagtatcactttgggccaaagaaaattgatataaacatacataaagtggaactaagattgacttcttcctagacatctctgcctctgtccacaaaatggaaacttccatcaaggagtactggaggacagttcagtatttcttcttatttgctcctccctatgaaaggaagagtgacttctctgctgcatgatattgggggtaaatagttattgcacatttgctcaaaccccagcaaagtgcaccccattttaagccaaatttacaaacttacaaagatgatccaccaatagttttctctatttactttattcttgctctgtcacccaggctagaatgcagtggtgtgattatagctcactgcagcctccaacttctggactcaagtgatcctcccaccttagcttcccaggtagctgggatacaggtgcacgccaccacacccaggctagtttttctaaatattggagttcccaaagagtattcaaactgatgtgatattttaaaagacattttgtaagcatcttttaggaatatcagtaagtggaagaaaaacacatagttatcagtggatattatgccagagaggcatgagaaatataattttattttgctaggtatcagcagagtgccctcttataatttgtgtgaaatggaaacaaaggtaacatcgtgttttcaattcacacatatatacaagtaatgagaggtccagaagaaatgtggcttcagctctgctgctactgtgcctcccttctcctgccccactcagcccacaaaataggctggacactcaaaaaacgttgcgtttatctaccttttagagagggtgaatagcagagaactggaggtgggaatggtaaggaactcccagcagggtagtggagggaatgggctgacgcatctaaggctgatgccaggtctgctccctatctgggtggcctcagcaaatgacgtccagcacatccaggggcaggctcaagggagaacagcccccaaagctaagatcctgccaagctaaatacagtagttctaatgaaatgtgagaggctataatcccatttgggaaattcctaaaaagtcatgaggcaggggattggtttatgttattatcatgacctgagagtcatggctcagagccaaatgttcaggattgaattcaacagcatttaaatgtctttagagcaggatggaaatatgttagcaatgcctgcagagtgccaagtaaacgcaaaagccaatgagatcataaaggaagttgttagctaacctaggtggagtcgccaacttccttctactctaataattaaaaataaaaataatacttgggaggtaactggaataaaggttctaaaatcaaaaccctctgaagggtgaaaactgggagcctcctgttcccatagtaaccacagcactcagggcactgtctcccagcgctggagtactgtcttatgaccagagatcctaagcaacctctgctcatctgagttgtccaccatattgtgggcatgagtccttgacaatagtaaatagcacctctgttcccttattgggtaaatgattttccaactctgggaatgtgtagaattcattatggaaataatgcaataattcaaatccataatattgatactttcatgttaagtttaggactaatcttgtgtatgctccttaagtgatttgaatctttaaaaagcttatgattccaatttgaaatgtgaaattgattttacgtttgtgatttgaagttgaaaggtataagaatatttaacttagctcatgaaaagtattagactagatttactataagtttaatgtattagatttacaagagatgcttaaatatatgagaatgttttgtcttaattggttataatcttgtcatatcaatgatttgaagtgctaaaatagaaaattaaatatgataaattacacaagaagtttagaatgtttaaaagattttaataaacaaagcctataactaag

SEQ ID NO: 14135 - DNA, 2767 bp, Homo sapiens
ggttcttcataataactgcttgaatcaacttcttattttgctcataaaacgttacagatactgatgaggtgttttatgtataccagattaaaacaattttgtaagaaccagaggtgtaaaatatactttcttttacagcacaacttttggaaatggctgacgatgcagcccggattgtactgtagcacatgttggcatcaacagtatattttctcatgctgagtgtcttcatgtttcatgtaagtcaatcttacttgaaagtttttagacttttaacacgatggccataacctgacaatagtgcccacaccttaagaaatgcaataatcctttcctgttatccagaaggcccaggtagttttatcctgtgactcaaaggcagcaaggagactttttcacattttaaaaggcaacgaaagctgttgaaagaattatgcttatatctcacattttggttatatttgtggtaacaccttaggataacgtaagccagagatctgtaaattggactgcagtctgaggtgcccattttagggtttttgtgctagtattcttttatgtcattttgatgcagaaattgtgtgactgttgaaaattaaaatgtagcgggacccattttctgtacgcagaaccctttacctgtattcctggacaaggcctagagaacgagctgctcatcatgtttctaatataatttctggggtgaaatgaatgatttccttactggcttagagaaaaccaaggtcaataaaatgcagattgacttaactattagaaaagatgggatgacttctgggaaccacttaactcttcaaatgactgttgaaagagaaaaagcaaaactgaaatcccaccagaccattttgtgtgcctgtttctaatcgatacaaagttaagcatgagctaaaatcagacaaagcactttaaatttatcctttccagagcgctttgcacatgcaccctcctgagtttgggattctgccaaatgaccaacttgatcctggccctgaggagtcattggctgcaggaatagggcaagaatctatttcctaaactacacataacatgggagcctttttttcgttgttttcaggtatattaaagaatgaaatctttggttactaggtgctgactaataaataacaccttttatattctgaccatttgtcacatttcattgtgatactgtatactgatctaactccttatgaaaggcaacaaacaaaaataagacattgaataaaaagcaaaatcaaagaagctaaagagaaaaatgaaggcagatatattgcaactttataacatattctattttattgaagactgcaattaatgcagcaagaatgctttctcaagcggtggcctttgtattctcattttaatcaggtgtacattctatggcctctcccccatgctgttagtttctattttaaaagatacaataatatatgtagggaaaggggcctgggctcttcatttaaaggtaagcagtaatattgagtaagtgacataattctttttctctttgttaagtcctatgcctctttttcttaactgtaaaacatagaatatgagcgtttttatcttacaaataggtacctaaggcatgtgattttatttttaaataacaaaaaataacccaagtttcttgcttctccaaagtattcttctcatagcttataaaagaaagtccacattgaatagcatggtctgggaacattccttctttattgtgtttatttgaacatgatatgagtttccaagatgaaatgatcaaaaaagataagtaccacaagaaagtttttttgtttggttggtttttttgtttgtttgtttttttcttgagactgagtctctccctgttgcccaagttggagtgcaatcttggctcactgcagcctccacctccccggttccagcgattctcctgcctcagcctcttgaatagctgggattacaggcgcccgccaccacacctggctaatttttgtgttgttagtagaggcggggtttcatcatgttggccaggctggtctcgaactcctgatctcatgatccgtctgcctcggcctcccagagtgctgggattacaggcatgagccactgcgcccggccaagaaagtatgtttttagaggtgtgtgtaagtgcatttgtattacctatgaacaaaattacctgactcttgtcccaggaaagctgtttcgcattttcgctttttgattggtattatccagttctatgtagttcatattattgttctgtctgactctcagaaattacttcttcacgccagtgtcttgttgcatgactttgatgtcacctataggaatacacctcactgcacgtaagtgggtatcttactgtataaaaggtctacatggctttaggttttaggacaaatgtgtagatttatagaccatttctgttggccaggacacagattttgagagctgtgtgtatatatatataatcatgtttgtatttttttcctgaaagttatcaattgcttttgtttaaaacagtttgttttagaggtggggtggggatgtatataacgaggaaaagttatatgtactttaaagtatgtcaagttcttactagtttcctgtactgaaggttcaattttttttatataagtttacttttcacctgctctattctttgtggggaaaaaatgcatctagaaaaacatagtttaaatactgtatataagataatgaaagttagtaacgtccattatttaataaagtttgtaaagtacaaggt

SEQ ID NO: 14136 - DNA, 359 bp, Homo sapiens
actcctgaaacagactactctttgcctttttgctgcagttggagaagaaactgaatttgaaaaatgtctgttatgcaatgctggagacatggtgaaataggccaaagatttcttcttcgttcaagatgaattctgttcacagtggagtatggtgttcggcaaaaggacctccaccaagactgaaagaaactaatttatttctgtttctgtggagtttccattatttctactgcttacactttagaatgtttattttatggggactaagggattaggagtgtgaactaaaaggtaacattttccactctcaagttttctactttgtctttgaactgaaaataaacatggatctagaaaac

SEQ ID NO: 14137 - DNA, 1047 bp, Homo sapiens
ttaaactcattgtctgtttggaagaccagaatgtgaagacaagtagtagaagaaaatgaatgctgctgctgagactgaagaccagtatttcagaactttgagaattggagagcaggcacatcaactgatctcatttctagagagcccctgacaatcctgaggcttcatcaggagctagagccatttaacatttcctctttccaagaccaacctacaattttcccttgataaccatataaattctgatttaaggtcctaaattcttaacctggaactggagttggcaatacctagttctgcttctgaaactggagtatcattctttacatatttatatgtatgttttaagtagtcctcctgtatctattgtatatttttttcttaatgtttaaggaaatgtgcaggatactacatgctttttgtatcacacagtatatgatggggcatgtgccatagtgcaggcttggggagctttaagcctcagttatataacccacgaaaaacagagcctcctagatgtaacattcctgatcaaggtacaattctttaaaattcactaatgattgaggtccatatttagtggtactctgaaattggtcactttcctattacacggagtgtgctaaaactaaaaagcattttgaaacatacagaatgttctattgtcattgggaaatttttctttctaacccagtggaggttagaaagaagttatattctggtagcaaattaactttacatcctttttcctacttgttatggttgtttggaccgataagtgtgcttaatcctgaggcaaagtagtgaatatgttttatatgttatgaagaaaagaattgttgtaagtttttgattctactcttatatgctggactgcattcacacatggcatgaaataagtcaggttctttacaaatggtattttgatagatactggattgtgtttgtgccatatttgtgccattcttttaagaacaatgttgcaacacattcatttggataagttgtgatttgacgactgatttaaataaaatatttgcttcactt

SEQ ID NO: 14138 - DNA, 987 bp, Homo sapiens
cttgatttaggagctctcagttgcatagaaagatctggtgagcaccttttcatccccagaaaaggagcacgtgaattgagtcgcctggcggctctgtacgcgctcagggaagcttagcttcttggtgcccatctacgtgcactggatgatttttcttttgaacattttgccccactacactgttttggggatagctgggttaagcaagttaaagatatttacatttatattggaattttagcaactttttttcaggttaaatatataatttcaagtgcttttaatgaacttatttttaattggctagggagcaaaaaataagtgagttctgcttttagttagttaaccttgttcttttcttaaatagtacactgcatggtatttaatattccaggaagcatgggattttattttgcttgattttgggcacatgaaataatagctctaggaaaatgcgcatcttaatgactctttgtaaagagaggcatttcttacaactgtgatgtttgcttacataaaagttacctcataagttaattctaacttttattcttgaattttatttcatttcaatagcttgtttcatttgcacgcctttgtattttgattgacctgtagaatggatgttaggaaactcaaaattgaacacagtgaaacaaatggtatttgaagaaatgtaatatcttttatattctatttatgatatccataatcaaatgagattattttaccacataaatgttttaaatatcagatttttagtttgcagttttaggaaaatgctttagatagaaaaggttcttatgcattgaatttggagtactaccaacaatgaatgaatttattttttatattcttacacattttattggtcattgtcacagatagtaaatactaaaaatttcaggtcagtttgttttgaaactgaaattggaaataaatctggaaatgttttgttgcactaaaataataaaatgaattgtactg

SEQ ID NO: 14139 - DNA, 3045 bp, Homo sapiens
acactgtatctcttgagagaggtggccataagacatggcacacaattcccaatttcacaaattcctcatgtctttgagatttgatcagtttgtgaatattttatgctttgatgatatagtgagaatgcatcacttgcaaaaacgatctcaaaagtgtcagccttagataaacgttcagcattaaaaacgcctattatttcatttactagcattttaggatccagaagaattccaccagattgcatgagttagattgggaaatgggagtgggagataatattgggaggtatctattttaagtcaggggctttactagccgatttagttctcacaataaccatgtggagaagctgtgacatttttaatttacaacctttctggggctcagacataaagttacctatccaaggttgcagttgggtagtggtgggaccaggatggacaactcattggccctgcctcaaaagccatacctcttctcctgctatgcagaatctgtttctcctgaatctctgtgatgctggtgggaattgtttgcatagaggaaggacaataaccctgccatcgtgagttaatgtccgggctggtcacagtggttcatgcctgtaatcccagcactttgggagtccaaggcaggcatatcatttgaggtcaggagtttaagaccagcctggctaacatagtgagaccctgtttctactaaaaatacaaaaataagccaggtgtggtggtgcatgactgtaatcccaactactcagcaggagaagcacttgaacccaggagacggaggcggcagtgagccaagattgtgccactgcactccagcctgggcgacagagtgaaactacatctcagaaaaaaaaaaaaaaaaaaaaaaaaaaagttaatgtccaaaaatgacagatttacaagtgtaagctatatgatttcttcaaaaagcaaaagcaatatacctaattcatttggatcaaacttacataggtctcaggtcctgtaagaaacttgcctgttctaactgttgctaccagattatatctggtggtaattgttaatgtttcagcagggctggtctcagtcctttaaaatggaaagctttatttggagcccaaccctataagatgaagaaatcctatatagtcttattcaccaatatatccaatacacccacagcaatggtacctttttaagatcaggattttattatgaattcctgtcactttctgttttccatttaaatttctattttacaaatttttcagggaatcatattcttaacttcactgagaaaaatgtgttactcttttggacaatttatcttatttctatcatataagatgtatttttttattgtccttaaaagaagctctagcatgaaattaaaggaaagggaaagaaatagatctggtgcacccgaacattaggagaaaatgaaaaatatacaaccaaccgttcgtgagtcatcaaaaagtcaaagtcagcctggccaacatggcaaaactccgtctctgcaaaaaatacaaaaatgagcccggtatgttggcatatgcctgtaatcccagctactcgagaggctgagacacgaaaattgcttgaacctgggaggcggaggttgcaatgagccgagatcgcgctactgcactccagcctgggcaacagagagagaccttgtctcaaaaaacaacaacaacaaaaagtcaaagtcataataagcaaattattggcttctttcttctagactaaaagaaattaaagagatgaaacaatcaattgcaagggtcaaaactagattggatcttggtttgaatgaaaaaaagcataaaatattcttgcaataattgtaaaaatttgaatgtggactaagtcctagattatattaaaatatttttaattttttaagcttgacaaatgcactgattgttatactttaaataactaaaaatctgagaatccacagtgctacagacaataagtgataaaatgggaaaaaatagtgaagatcttcttttaggaaaactaccaataaatgtagaatggatgattccaaaaaaaaaaaaaaaaagaagaaagagagaaagaaagaaacagaaaaacctaaaagaaagcgaatgaatttgacacctgttggttggatgacagaccacacagagggagagtgaccaggctttgcttgtggagcgggcatccctgcctagctatctccttcatgtgcaaggacagtataagtagtattttgcatgtgagtaaacacacctgcgcagccctggctgaggtcactaggctggccagaggcaggacaggcagtcttgaatttcctctaggggaggcctgcagttttccccaccaaccccttttcacatgctccaaagatgtagtagtgtctgctgttttggatcgaaaatcaccttgagtggaggaagtgacttcactgggtctctggaggctctcggagcttgagtggctctgccccaccctgaatcatgcacccataaatgcagttatgggtggatgtgggtgtatgagagtggagattgtttttgtacattctctttgttttcattttccaaatataatctttaataaacttgatttagtttcttgggaaatttattttctacgctattcaaagatattttaaataatattttaaaaacatgaaatttttttttcatttttgatttgatatcattaattttatatcaggattcatgtaagagactaaaaatgatccatagtggttagtactgtaatttctgtttattacatgaaattacattccatttatccaaatatatgtttatataatatttccactgtgtgactctagtgatctttaacatacacagaatgatctacagtgatctttaacatactcagaaatatgaaaaatgtttgaatatgatctttagggacttctaatgaaaagggtatatgaaatgggaacaataaattctgtacatgtatacagtccatatacacattaagtgtttgtcatttggacaaattgaaaacttttaataaagccattttcttctttgttaaaatgcc

SEQ ID NO: 14140 - DNA, 4305 bp, Homo sapiens
gagctccctggctcccacacggttcagataatccctgctgcattttaccctcatcatgcaccactttagccaaattctgtctcctgcatacactccggcatgcatccaacaccaatggctttctagatgagtggccattcatttgcttgctcagttcttagtggcacatcttctgtcttctgttgggaacagccaaagggattccaaggctaaatctttgtaacagctctctttcccccttgctatgttactaagcgtgaggattcccgtagctcttcacagctgaactcagtctatgggttggggctcagataactctgtgcatttaagctacttgtagagacccaggcctggagagtagacattttgcctctgataagcactttttaaatggctctaagaataagccacagcaaagaatttaaagtggctcctttaattggtgacttggagaaagctaggtcaagggtttattatagcaccctcttgtattcctatggcaatgcatccttttatgaaagtggtacaccttaaagcttttatatgactgtagcagagtatctggtgattgtcaattcattccccctataggaatacaaggggcacacagggaaggcagatcccctagttggcaagactattttaacttgatacactgcagattcagatgtgctgaaagctctgcctctggctttccggtcatgggttccagttaattcatgcctcccatggacctatggagagcagcaagttgatcttagttaagtctccctatatgagggataagttcctgatttttgtttttatttttgtgttacaaaagaaagccctccctccctgaacttgcagtaaggtcagcttcaggacctgttccagtgggcactgtacttggatcttcccggcgtgtgtgtgccttacacaggggtgaactgttcactgtggtgatgcatgatgagggtaaatggtagttgaaaggagcaggggccctggtgttgcatttagccctggggcatggagctgaacagtacttgtgcaggattgttgtggctactagagaacaagagggaaagtagggcagaaactggatacagttctgaggcacagccagacttgctcagggtggccctgccacaggctgcagctacctaggaacattccttgcagaccccgcattgccctttgggggtgccctgggatccctggggtagtccagctcttcttcatttcccagcgtggccctggttggaagaagcagctgtcacagctgctgtagacagctgtgttcctacaattggcccagcaccctggggcacgggagaagggtggggaccgttgctgtcactactcaggctgactggggcctggtcagattacgtatgcccttggtggtttagagataatccaaaatcagggtttggtttggggaagaaaatcctcccccttcctcccccgccccgttccctaccgcctccactcctgccagctcatttccttcaatttcctttgacctataggctaaaaaagaaaggctcattccagccacagggcagccttccctgggcctttgcttctctagcacaattatgggttacttcctttttcttaacaaaaaagaatgtttgatttcctctgggtgaccttattgtctgtaattgaaaccctattgagaggtgatgtctgtgttagccaatgacccaggtgagctgctcgggcttctcttggtatgtcttgtttggaaaagtggatttcattcatttctgattgtccagttaagtgatcaccaaaggactgagaatctgggagggcaaaaaaaaaaaaaaagtttttatgtgcacttaaatttggggacaattttatgtatctgtgttaaggatatgtttaagaacataattcttttgttgctgtttgtttaagaagcaccttagtttgtttaagaagcaccttatatagtataatatatatttttttgaaattacattgcttgtttatcagacaattgaatgtagtaattctgttctggatttaatttgactgggttaacatgcaaaaaccaaggaaaaatatttagtttttttttttttttttgtatacttttcaagctaccttgtcatgtatacagtcatttatgcctaaagcctggtgattattcatttaaatgaagatcacatttcatatcaacttttgtatccacagtagacaaaatagcactaatccagatgcctattgttggatactgaatgacagacaatcttatgtagcaaagattatgcctgaaaaggaaaattattcagggcagctaattttgcttttaccaaaatatcagtagtaatatttttggacagtagctaatgggtcagtgggttctttttaatgtttatacttagattttcttttaaaaaaattaaaataaaacaaaaaaaaatttctaggactagacgatgtaataccagctaaagccaaacaattatacagtggaaggttttacattattcatccaatgtgtttctattcatgttaagatactactacatttgaagtgggcagagaacatcagatgattgaaatgttcgcccaggggtctccagcaactttggaaatctctttgtatttttacttgaagtgccactaatggacagcagatattttctggctgatgttggtattgggtgtaggaacatgatttaaaaaaaaactcttgcctctgctttcccccactctgaggcaagttaaaatgtaaaagatgtgatttatctggggggctcaggtatggtggggaagtggattcaggaatctggggaatggcaaatatattaagaagagtattgaaagtatttggaggaaaatggttaattctgggtgtgcaccagggttcagtagagtccacttctgccctggagaccacaaatcaactagctccatttacagccatttctaaaatggcagcttcagttctagagaagaaagaacaacatcagcagtaaagtccatggaatagctagtggtctgtgtttcttttcgccattgcctagcttgccgtaatgattctataatgccatcatgcagcaattatgagaggctaggtcatccaaagagaagaccctatcaatgtaggttgcaaaatctaacccctaaggaagtgcagtctttgatttgatttccctagtaaccttgcagatatgtttaaccaagccatagcccatgccttttgagggctgaacaaataagggacttactgataatttacttttgatcacattaaggtgttctcaccttgaaatcttatacactgaaatggccattgatttaggccactggcttagagtactccttcccctgcatgacactgattacaaatactttcctattcatactttccaattatgagatggactgtgggtactgggagtgatcactaacaccatagtaatgtctaatattcacaggcagatctgcttggggaagctagttatgtgaaaggcaaatagagtcatacagtagctcaaaaggcaaccataattctctttggtgcaggtcttgggagcgtgatctagattacactgcaccattcccaagttaatcccctgaaaacttactctcaactggagcaaatgaactttggtcccaaatatccatcttttcagtagcgttaattatgctctgtttccaactgcatttcctttccaattgaattaaagtgtggcctcgtttttagtcatttaaaattgttttctaagtaattgctgcctctattatggcacttcaattttgcactgtcttttgagattcaagaaaaatttctattcttttttttgcatccaattgtgcctgaacttttaaaatatgtaaatgctgccatgttccaaacccatcgtcagtgtgtgtgtttagagctgtgcaccctagaaacaacatattgtcccatgagcaggtgcctgagacacagacccctttgcattcacagagaggtcattggttatagagacttgaattaataagtgacattatgccagtttctgttctctcacaggtgataaacaatgctttttgtgcactacatactcttcagtgtagagctcttgttttatgggaaaaggctcaaatgccaaattgtgtttgatggattaatatgcccttttgccgatgcatactattactgatgtgactcggttttgtcgcagctttgctttgtttaatgaaacacacttgtaaacctcttttgcactttgaaaaagaatccagcgggatgctcgagcacctgtaaacaattttctcaacctatttgatgttcaaataaagaattaaact

SEQ ID NO: 14141 - DNA, 370 bp, Homo sapiens
gtagggtggcttttggtttttgtttctttcttgtcttgtcttttattgaaaggaaatcaaaaataggctaaacagaattttgagggcatggcccaaataactcatgagttccaagttgaaacatggttgtgcaagttggacattacaatgtaaaacacattttcttcaaacacgttttcccttttgtttcaaaaaatgtaatattttcccccaagcgttttatatttatgtattttgtattcaatgtgaggcttattaaaaatagtgattctaatgtaagaatcagctaagatgcattatatatattttaattaaaattaaaacttcagatatttgtggattacaatcctcatttacttccaatgtgact

SEQ ID NO: 14142 - DNA, 854 bp, Homo sapiens
aattcttgaaggaaaatgatacgcaacataattaaattttgagttctacataagtaattcaagaaaacaacttcaatatccaaaccaaataaaaatattgtgttgtgaatgttgtgatgtattctagctaatgtaataactgtgaagtttacattgtaaatagtatttgagagttctaaattttgtctttaactcataaaaagcctgcaatttcatatgctgtatatcctttctaacaaaaaaatatatttaatgataagtaaatgctaggttaattccaattatatgagacgtttttggaagagtagtaatagagcaaaattgatgtgtttatttatagagtgtacttaactattcaggagagtagaacagataatcagtgtgtctaaatttgaatgttaagcagatggaatgctgtgttaaataaacctcaaaatgtctaagatagtaacaatgaagataaaaagacattcttccaaaaagattttcagaaaatattatgtgtttccatattttataggcaacctttatttttaatggtgttttaaaaaatctcaaatttggattgctaatcaccaaaggctctctcctgatagtctttcagttaaggagaacgacccctgcttctgacactgaaacttccctttctgcttgtgttaagtatgtgtaaaatgtgaagtgaatgaaacactcagttgttcaataataaatatttttgccataatgactcagaatattgctttggtcatatgagcttccttctgtgaaagtacatttggagacacaactatttttccaaaataattttaagaaatcaaagagagaaaataaagaccttgcttatgattgcagat

SEQ ID NO: 14143 - DNA, 451 bp, Homo sapiens
cagggtctcatgccattccgaccttcaccaagcttagaagccaccatgtatgtggaagcaggttgcttcaagaatgtgtaggaggctctaattctctaggaaagtgcctgcttttaggtcatccaacctctttcctctctggccactctgctctgcacattagagggacagccaaaagtaagtggagcatttggaaggaaaggaatataccacaccgaggagtccagtttgtgcaagacacccagtggaaccaaaacccatcgtggtatgtgaattgaagtcatcataaaaggtgacccttctgtctgtaagattttattttcaagcaaatatttatgacctcaacaaagaagaaccatcttttgttaagttcaccgtagtaacacataaagtaaatgctacctctgatcaaagcaccttgaatggaaggtccgagtctttttagtgtttt

SEQ ID NO: 14144 - DNA, 95 bp, Homo sapiens
aattaggtatatctactggggatgacataaaaattataaggctttgtgctaaactaggagtttaatccattatagaggatgagaatggagggaag

SEQ ID NO: 14145 - DNA, 82 bp, Homo sapiens
ataatgtattaccctgatttggtaggtaaagtattatcctgatttatgtgacagagtgaaaggcaacttttaattgttaacc

SEQ ID NO: 14146 - DNA, 74 bp, Homo sapiens
gcatgattattcttcagttgcccgacactgcccttgactcccttccaaattcggcattttcacatcagtatggc

SEQ ID NO: 14147 - DNA, 663 bp, Homo sapiens
tcatcactcagtaggtaaaagataccttttgtaaagttgtcatctctctgtaatagataatggctgactggaccatagttgttcacttttgtctgccagaattaagttaatctgatgttcatgttcacctttctcttaaaataattgtacaactgacttgtatagacattgttcttaatatgaacatggtaggtaaactttttttttatttttttctgataaaatacaaatgttggccccagattcttttaacgtcaaggaaatgaataacagcttgtcagagacttcctatggaagaaagaattttttagatactatcattaggttggatatggtaatagatatatttcagaatagcaagtggtggtatatcttatccatatctttaggctgctgcagaattttaaggttatagataaagctgtgatattttatgcaaagactggctctaggtatttgaggagcacaatacagagattttaaaaagtgattttgtaaaatctacactacggtctctgtttctccaaagtaagtgtttgtgatttgttcctcatactgcagtgagtaaaaaagaaacaagaaaacaacaacataaatattaaagtacgtttcaatgttgggtgaattttgtttttagatgccaataaaacttatttgtttgat

SEQ ID NO: 14148 - DNA, 601 bp, Homo sapiens
tatgattcaatccagatatgggttaaattcctcattttacttttaaactggtggtaaagtggaaattgcaaaaaaaaaaaaaaaaaaaaactgttcattcctgggttttgtgcagtatacattttcccacaaaatggttgtaaagatttaagttattttaatttattgtggatcagaaacctagatgaaactggtcagaatctgtaaattacttagtttatatccactttgagcaggtatcaaatgatttaggatccttaaaattacattctaataattaagttatgtggaaaaagtaaggctggggaagtcgtgattaatagttttcaaagggccattttttaaaatcctctgggcattttctttcagctgtttgttagtttttgctttatttaaagcatatttaagttattttaatgtggtttaggggcaaaatgtgcagatacttcatttttgtaagatagattgtaatagatgctgtttatactaaacatgtcataactatctatacagtatatattaaaagaaagcttgtactgtatcttatttgatgatatttattttctctgccaagctgtatagtaaaaggaaaataagtcac

SEQ ID NO: 14149 - DNA, 166 bp, Homo sapiens
ataactgagtaatgcatatgaaatggaacttttgggtgccaaatgggacttttagattaaaaaaaaatcagaattatgcttaactttccctacaaagaaagtagaatgtaaaatactttaacaactacaaagtagtttaaaatgccaataaaactatcatatacaa

SEQ ID NO: 14150 - DNA, 1376 bp, Homo sapiens
cataagtgagaaggcaagcatgtgtgagtgaagattagagggtcacatataactggctgttttctgttcttgtttatccagcgtaggaagaaggaaaagaaaatctttgctcctctgccccattcactatttaccaattgggaattaaagaaataattaatttgaacagttatgaaattaatatttgctgtctgtgtgtataagtacatcctttggggttttttttttctcttttttttaaccaaagttgctgtctagtgcattcaaaggtcactttttgttcttcacagatctttttaatgttctttcccatgttgtattgcatttttgggggaagcaaattgactttaaagaaaaaagttgtggcaaaagatgctaagatgcgaaaatttcaccacactgagtcaaaaaggtgaaaaattatccatttcctatgcgttttactcctcagagaatgaaaaaaactgcatcccatcacccaaagttctgtgcaatagaaatttctacagatacaggtataggggctcaaggaggtatgtcggtcagtagtcaaaactatgaaatgatactggtttctccacaggaatatggttccattaggctgggagcaaaaacaatgttttttaagattgagaatacatacctgacaacgatccggaaactgctcctcaccactcccgtcatgcctgctgtcggcgtttgaccttccacgtgacagttcttcacaattcctttcatcattttttaaatattttttttactgcctatgggctgtgatgtatatagaagttgtacattaaacataccctcatttttttcttttcttttttttttttttttttagtacaaagttttagtttctttttcatgatgtggtaactacgaagtgatggtagatttaaataattttttatttttattttatatattttttcattagggccatatctccaaaaaaagaaagaaaaaatacaaaaaacaaaaacaaaaaaaaaagagggtaatgtacaagtttctgtatgtataaagtcatgctcgatttcaggagagcagctgatcacaatttgcttcatgaatcaaggtgtggaaatggttatatatggattgatttagaaaatggttaccagtacagtcaaaaaagagaaaatgaaaaaaatacaactaaaaggaagaaacacaacttcaaagatttttcagtgatgagaatccacatttgtatttcaagataatgtagtttaaaaaaaaaaaaaagaaaaaaacttgatgtaaattcctccttttcctctggcttaatgaatatcatttattcagtataaaatctttatatgttccacatgttaagaataaatgtacattaaatcttgttaagcactgtg

SEQ ID NO: 14151 - DNA, 822 bp, Homo sapiens
cccacatggccccaggccgggggacaccagaggctcctccatgggcagcaggagtgagcggaggggtgtgtcccacagcgactttcccagccaatgccacggtggagatgacagccccaggtctggggtacagagaccacttaggatggcacagggtggctggccccggatgctgagagcttggtttcatttgaattttcttccccaacctgagtgctttgacaacaatggaaatagagaagtggctgctttcttttggtgaccctccaggggtggaatcggagtgtgtctgcccgcccttgtgacagacacacggaaggcttctgacgcttgtggccagactgcaattgcacttatgtgttatgctactaatatttgaaacagacctgccattccatttgttaattaaaaaaaaaaaaaatcctaaagggaaaaaaccgaccaggtgtggatctgcatgccacgctgccgtctgtgttacagtggtgttgctatttccaaggaagtgctgctttctttttctttttttaattttgtgaattttcaagtgctgttttgttggaagacagtgcaacgaactgagactaatggacagtgtcatcactcagcttactgggctgaggcgtctgtggagaggtggcaccggggctgcagagggcggctggggttccgtcgtgtcgggtgtcacttcaccttctgtttggccgctcgatgaggtctcgtgttgagatattgtgtgccacaacccccacagtcttcacctccgtgtgtgatgaaacttcccgtggacagccaataaaatgacgtcctctgttattttgg

SEQ ID NO: 14152 - DNA, 2239 bp, Homo sapiens
gacagaacgggccttgaagagaatgccgcgtgctttctcctgacttggggcaatgcaattcaaaactttttttcccctattattcagaaaaaaaaggaaacaaaaccaaaaagaaagagttgcaaaaaactgcatttattttattagccaccctaaatgcgtcagttatttagggatggtcttttgttcatttccgcatccattatttaaaccagtggaaattgtctctatttttggaaagtacttaaaagttaccagaattttcaatggaaaatgaggggtttctccccactgatattttacatagagtcataatttatatgtcttataaattataagtcttatataatttataagtctcccacaatcttccagttcttacccagtgtcagataattaattactaattactttcttaaaaacatgaactatgccagaataaaaaatatctatgtttgtatatttttataactcctttcagtcctctggggctcctgtcattgagggaagtcgttacgcctttcactgccacagttacagctcaagtgcttacacttcaagagggaggacgctgggggcccctggggctgctagtgccatcgtggtgtgtggcaggtgggccatcccatgtccctccagggggaccccacagcctggcagatgagcagatacccctggccacccatgtcctcagcgacatttctgatgtgctgctcttatgtgaggaccagtgctttctctctttgcacttccttcctaatcttggttaaggcatgttttatgccatgaagaatacattagaagaattgagggactttgtagagaattttgtggctttggtccaacgggtgagtggctgtgcggaggcctgtgttcgggagggcctgggagaaggagggcacccagcaccccggcgtctctggccctttcttattctttggctcctcatccaccgtgatgagaagcgctgctgtggccacggcacactgcttggcttgggtggcgggttcatggccagttggtgtcatcagcaaagagaaaaagcacaggttagctccccattagatggaaaagtgtagggactgagaagggctgcagcctcagcagtgtacagagtccccggcgctctgaggttggagagaaagaacagaccagcgcccttcccgactacatccgaaacttcacacagggtgtttctgagcaccagcacttccagcgcttcacttaacggcataaagcaaaacaggaccttggcacaccgtcagctcgaactcaacactggcagccaccgtctcacccctgcggaggagcgctcccgtctcccacaggtgccttaccgcgttccctcccgctgctttcatttttctgacctaataattacgggaaatggaaagtctgggccagcatcaataaaatgacaccaaaaataagtagatgaaatcaaatgaatatgagaacatcttgttcttcaatatcacgggtttttgttaatgtttcataagtaattctccccacttgatttttcttctataaaatcccatagaacaatgtttatgctatagccatttaatatatgtacaaattgtaaagaatatgtataaatgttttacacgaatgtaagagcatgtagaagccaacatataaataaattgtttaaaaaaactgtacagtaaattctcaaagcactttttcaaaacactttttggactttgtgtgtgatttttgttgttgttgttaagtactttttattccagctgctgaaaatggtccaggtaatgaattcttccccaaatcctatttcttctgacatgaattcatcatttcagttccgtaggtcagtgttgcggtccgggaagcgtatcataaccacctgggagttgccaagaagcagacagtctcccagtgtctgactctcggatatttggatttgactggtgtgaggcaaagtgaaaaagggatgggggaaatggagatggcacgggctcctcagagcgtggtagccgactgtgaggaaaagcagagggaatgtgaaagaaaataagagaatccacgggatttgatgcctggaagattctccttcaagtggcaacatggcatatatatccttctccggggagtcacatgcaccatttggttcttagatacgttgatgttttgatttttaatgatttgtatcaacctgtaggtaccacagaagagctgtagtcatacaatcacataacttttacaaatatagtgg

SEQ ID NO: 14153 - DNA, 2172 bp, Homo sapiens
ctgagcagctttgaaggctgcagtcctatagaatgcataccttcctccctctagacatccctccaccagaagagacatctatttaaaggcacactggccaaaacgtttgtgcatctgtcactctcgtgtagtttacaaaaatcgtgtctcttattcagtaagatggttactcagccaccaaaatatatttcactcaaggcttgtacatctgaagtttgctcttcaaggaatgggaaccttcctgttaaattcggtgtatggattttaagaaaggaatctagccaatgaggtccaagaagttctcacccattgaatttttaaatggctgttcagttcatgttgtacgtgatggagatttgtcttttgttttatttgcattttacagatttggtataacattttggggagccacctgaaggttgatgtataaagtaaggattagagaaagaggtcgttgtgaccattagtagctgtcctggcccacttaaacaaggttacaaaaaatcagagtcggaagcagccaaataggtcaacctaatgactagactgtacattcccatgagccttcatgtttaagtgtgtacatgtgcgttaaccttgatgatgcgtgaatcccgagggagccggtggcatacaccgttagcttaaccttagcttaaactagctgaaggctcctgtgccatgtcttagacattgcatgccctatcaattactataatcctgagccatggtgtgctactgaaaccaatttttatccaccatctagtccttattaaatgaaacctcacggatcctttgttccgcttatattccatgcataccacataaaagcacacagtgcgaaaactcttgctgatacgcgatattgattctcattgttagaatatggagagtgtttcagcctcgtctgtccggctggagcttcgggatggaaagtgctatgtgtccctgcatataagaatcaccaggccagtgtttctgggtttgcttgtctatatgtttgtctatattttttgcctatacatttttcccacgtttccaacagcacttctcacctattcaataactgaaaaagacattaccatagtgctttacatttttaaagtaatgttacaaggtctggaatccatttggagcagataccgtgttttcgctatttaataagaagttcagtagtgaaatcttactgtaccgcctgttgtatctgggagcctcgtacagaggctcgcacagcagtgatcaagtgtcatcccttacgtgactgggggatgtctgtcctaaaagctgactgctaggatagtaaggatcatcttgcctgggctatgccactgtcttgttaccaattagacatctggaatttcataattagttttcattgtcactgtcaagatatattgcagattacttaaatatggccatcaaaacaaaagttacaacacgtatctcttttcatctgaaaactaatacctggaaaaggataaaaaaaaaaaggaatccgtgacccacagagctagacagataagatgcatagttgaccagtcataaaaggcggtgtttaggtgatcaggatgccgttggtggcatttacgtgctttatatgatttttacctctgtaacaaacacaagaaataaacagaatggtccttaacagagtttgggggagagagcaagatgggttccttggagaagctgatttgccaagatgcacatcgctattaacagccagagtcataaatgaaatgaaattgaagaattcattcaaatgctcttttccctataacctcttttctcaccaaaaaggagataaatttgaaaacagataaatgtaacaaccagtcaaagaagcaggggaaaagtaagctcctccaaagttgcttgcagtgctggaaatagatctcatttttaggttttctcttcgttccagataccaaataaatgggacagagaataaaatttttgttaaaatatgtgctcatctcctaagtagctcttcagagtctgaccgtaagtaaaaacacacagaattgtgttgactgggggaggtgaatcacaaaaaagttacgaggagtttaagagttaaatattatttgatcgtggctgtcaaatttagtgaacaacatagattggatttggagttggtagtaggtatggttctcataccagaattctctt

SEQ ID NO: 14154 - DNA, 185 bp, Homo sapiens
aaatactcaatatggaccatttaggaattataagcagcaactgtgaaagacttgccactcaatatcttaggtgactgattagacatagagggttgttttaggagcatgccacgggaaagactgagggatcatgatcatttgttcagaaaaaaagcccctgaactgattttgttaccatagaattt

SEQ ID NO: 14155 - DNA, 5222 bp, Homo sapiens
tggcagtgcgtacattctagacttccagtatccgttctcagccgtgcaggcctttgcagttgccctggccaacgtgactcagcgcctcaaatgaagagactggtgtggggaggagagagatgcagagagcctttggaagaggtcttcggagatgccagaggagccctctaggggtccgatgcctgggaggaccagaagccaacagcaaaactggaaaagcccggcaggcccaggagagggcgctgacctgtggtcgtcatttatttggttgggttttattaccttttattgtctgttcttcttttcttctttcatttcagtggcatttggaagcaaagagtgctaggcacctgctgttctttcaggaaacagcttggctgtggtaatgctctactgggcccttcagaatgaagacagtctgccttagagcctgctattcttttagacatagggaggatgcattatcctgtattctcctccaacatcaccactagcgtaaaagcaaaaagcttttacaaaacacagccaaaaattctcaagatgcaggttcttggggaatgggatggggacagcatttgatttacactgattatgttactccccaaaaggtgacttaattaataaagggcatttgggcagacacactgtgttggaccaacaaagtaggctctttacaggggtgttctcaccaggtagaaatgcgatttgctcactgaggatgttggggaagggacgaagggtaaagaagaaactgcacgtatacacaggttcacatcactctgcagacagcaatgtgactcagcgtgtgacttgtagcagcagtacgagggctacactcctctgctgaggatgtctacattgaaagcctccactagtttcatcgtttgtcaaagttccgtaggatcagtgatggtcattcagcatgactggttctgggagaaggtgagagacaaaaatggaaagatcctggcctgtggtagtggtagcagttttctcaaataatgtggtgacagtcactagatcctcacatgctgagaaacagcctctactctctctgccccttttactttttaatctggaatgcattactgtaaacatgatctttcccatgagataccatgttctatgccttcccattctaaaagtgtggacaacgcttgatttgaaaccactccttttctcctcttggctacattaaaattcagttgactacaaatgctttctatcaaattagaaatgtaaccaaaaaaatgttaagtgttcaccagggtattaaaatacagaggagtatggtcaaatctttgacaaaattttcatgatcttctctaacaaaaaaagttgtttattaactgtacagactgtttactaaggagctaaaccactgagaaaacgttattaaaattgtaatacctaggtagttggttgatcacagtttgttaattgtataaaaaaaaattacctagaatatctcttcccacttcctcgtcctcgtgagaacctgtgggcagtattcaagccctgatgacaaaacccagtgttttttgttgttgttttttgttgttgttttttgtttttgtttttgtttttctcagtcttacctgtgatgttgtttaggatcaggcccctctcctgggcctgctgtgcaggagcacaggaactatctgctggcgttgggttccaaatttgcattttatttggaaacagacaagtagaagatgctacagaaaagtattttcaaatttaaacgttttttaatcccctgttttagttaaaaaattggaaaagaaaccgacccatttttttcccagatcaagatgacatgacatcactcccaattctctccaaaccccagagaaatactgacgaagttttctgatgtggcaaaggatatttcccatctaataccagtttctcatttatatttaacgtattggacctgatatttttagtgggtgcattcttccagaaagaattcagcaatgttatcagaattaattcttttatatgagtttatgtagcttgatatggtgtttcagtgcttattggttgtgcaataatggttatagcctgttagataatctaaatgcaattcccctgttttgtcgtttaggagataattatttatcttgcttttcatagtgttcttaggaattattttgttgttacgttttggtgagttatacccattttatttatttagaaaaatagtatctttgttaacgacttacatggtcacagtatattttgctgcaagaaataaagaggatatgatagaaggtttttttttttttttttttttttttttgagacggagtcccactcttgtcgcccaactagagtgtagtggcacaatctcggctccccacaacctctgactccagggttcaggtgattattttgcctcagcctcccaagcagctgggattatagacacccgccaacacgccaggctaatgtttttgtatttttaatagagatggggttttgccatgttggccaggctggtcttgaactcctgacctcaggtgatccgcccgcctcggcctcccaaagtgctgggattacagacgtgagccaccactcccggcccatagaaggttttttgctggataatttgtaacttttctaattgggaaaaaattcctattaatcacttaaaaatttttttttgtattttgtgttattgattatatacaaaggagactttttttttgagataacactcaaatagtattctcttcttttgaaaattttatttttatctgaaaataacagttgatctgaaataaaaaggggagacctattagaatgagagtagccaaggaaagagttactaggtaataagcttcactttttgtgttctaattgtttttgagatataaagaccctgaaaaagcccattttagaacctgtttaataagagcaaatataggggaaaatctttgaaatgaaagctacaaatacatgtgagaagaaaaaaatggatttttttagcaaataattaactaagcttctaaatgcctagctccctcccccaaaggcgctttcccccgatggaggcacaggcttctgtctcggatgtttggcgcacgtgagtttgtatgagtttgtaccggagtgaccccggcagccactgcccacctcccctctacccaggggcctgaaaagaggggctgccctcctgcgccaaggcagacacaagctgcgggctgtgcggtcctagtagtgtgacgtttcagttaatagtggtggtcttattttcaactatgctttcattcagtcagtctctgttgactaaatacgacgaaaattcatactttatgcaggagatttctaaaaatttaatgtttattaatagtttatgaatatcaagatacctcattgaatccctaaatttaaaagcagtccagtaaaaggttaactgtataaagaatctatgactttttgagggaagtgtgatatattaacaaatataaccaattctaaatttgttttagctctaacctcatcaaaccaaaggcacagatttgtgtacaatatacccattgaatgtatatcctgagaaaaattggggccaaagaagcaggaaaatctcaaagctctaatggcagcataaatcaaagaatttcacaggctagtgtttttatccatagccattgctcccttgtcaagtgtctcacaaggacatggaagaatgtgttatgttcatcttgtaatcatagcaaaaagtctgcaaaccccagggtcaagcctgctctgccacagggttggatggtgaccttgggcaagtccctggggctggctaggcctccacttgtccatctgtgaaatgaaaggatcagcctggacagccctctaaactcccttacagctctcagcctaagagcgcagcactgaacagcctcatcattccacttttcatgggaaatatatttcacaccattgcctttgtgtagagaaatatttcttttcctgtgttaatgagctatgtactgaatataaaccagtgcatttaaagtaatatcttttgtgcacctctaaatgtgtttggaattgtgtttgttctcatagaatatacaaaagtactgattctaggtaagaaggagtctccacgggtgtgccctgctcagctggatgtccatgagaacagccatgaaataagtcactacttgtccccaaaaccacaggaatatatacctaggtcacctcaaattcctgagtgtgctctgccatgttacacggtcttcaaattgaaaaggtttcttgaaaaggaaagtttggcccagcaactggagaaggagtccatggtgtcgctgtgtgcctgtatcatttggccaagtcaatggttgtaagcaaagttagtggagacaaaaatgtgtccaaaatgtcgtttgagttcctgggatttctgtaatagcacacaactcagaactcttcagcatttgtgtgattccttacctctggctgataaaactctaatgggttgtggcttactttgtttccattttctttggctttgtgcaatttttgtgtaactttacttgtacctatattttctgtttacagttctttttaaggggaggggtagggttctaagatcttgttgtttattgtagataaaaattttttcgtgttgtagaaaagcatgggttatgcgtttgactgaaaaagacactgtattatttaccaaaggggtattgtttttgcatttgtttataaatgcattattttggtactgtaaatttggacataatttctgagtttattactactggcattttctttttcccttttttttttttttaaccgtaagtgcacgatgcaggtgcataggccccagaccaaactagaccaccagcatgttcatgtccagacctcggcagtggcgtgcactgcttgtgcacctcagttcctccagtgttggtttgtttgttttttaattcagcatcctgctggttttactttccaagcaagatctgttgcgactcccaaatgcgttttaatgagctcatccttatttgcctttcttcttacgtattttgtgtattagattgtgcaggagatattctagaaggcattaatggtttgcattcaaaacgatgtggtttgtccaagttattttctgtctttattactgagacggattaatctccttatttttttcttgatgatttgaagttgtaagagttgtccagctattgcttaataaaattttgcagatc

SEQ ID NO: 14156 - DNA, 265 bp, Homo sapiens
catgaaggcctcaaggttccaggttgcagcaggcgtgaggcactgtgcgtctgcagaggggctacgaaccaggtgcagggtcccagctggagacccctttgaccttgagcagtctccatctgcggccctgtcccatggcttaaccgcctattggtatctgtgtatatttacgttaaacacaattatgttacctaagcctctggtgggttatctcctctttgagatgtagaaaatggccagattttaataaacgttgttacccatg

SEQ ID NO: 14157 - DNA, 666 bp, Homo sapiens
tcacaggaccgtcatgctgcaagcttgccctgcccagccccaccaactaagtcgcactaggggctgtgagcaaagacagccagcgtgctcagccccgctgccctaggtgccaggaaggtcatagatggacactggccattctggtcatctcagtctggaactcagtcccacttcttggcctggacaatgaacaggattcagttttgctgttaactttgcttctctacttttttttgtttgtttgtaatagcacatcccagagacatcagaaaccagcaactgattcagtgtgatttccagactttttaggcatgaaattcggacacttcagtatttccaggaatagcatatgcacgctgttcttgcttcatggaatgctacatgctttctgtttttctcattttggatttctccaaaactaactgaatttaagcttcaggtccctttgtatgcagtagaaaggaattattaaaaacaccaccaaagaaaataaatatatcctacttgaaatttactctatggacttacccactgctagaataaatgtatcaaatcttatttgtaaattctcaattttgatatatatatgtatatatgcatatacatatccacacttgtctgcaagaatattgattaaaattgctaaatttgtacttgttcaccaga

SEQ ID NO: 14158 - DNA, 1047 bp, Homo sapiens
acaaatcatactccccagtcaagacttccctgacagtcccactacgagaaagctgtggtgggacagccaagtactcgtttccacaccaagactcagactttttgagccaaaaaaaagccacattcttacactgtccagcttgtaatggttaatgtaaaacttaccagatgaaccttgtgtttcagcttttttcttttccccttccccttgcttcagaggcctgatggcgtcggactattccgaagaagtggccacctccgaaaaattccccttctagaacatgtagacacttgagaaatgtttctgtttgaagaaaatagagggagaaacagaagtcttaagtctgtggcacactgtgtcttcagacagtttgaaggaatgaaaacctagagattttaaatcatgaattgaacatgtaaaattccagtaaaatgtaaaaacggaatatgcatcgctcttaaccttgagcatagtgacttagagacactgtgtatcagttttgccaataagactgtggacttcatgattgttgttgaacttctgggtcaaaactcaaatgaggtgaattttgcctttaaagggtttatttgctgagaaccaactttcaatagtcatgagagaatcaaataatagatgtccgtacaagtagcgcatatatttaaccatttagtttggggctctatattacttgcttgagccttaatcaatgtggttttattcaatggtttgttctttgaatggttgcaaaaactgtagataatcttactgaggactgtacaaacatgaaggtgtggtatcaaacttcaggttgaaactgtttgaagcattataaacattcatttcacaactagattgtataaggatattagctgtgatgagactcactgcattattttttttagtgaattttatgaaatccccgttccattcaacaggcacatgtttaaaagagctttgtcgttggtgttaatgggggaatgtgttccttcattgtatttgggccttttgtattgcactcttgatattaaattaaatgtgccttgaaat

SEQ ID NO: 14159 - DNA, 706 bp, Homo sapiens
tattttttcagcaaatttttatacagtgtcatttaatttgggagaggatactgtccagaaaattaatgcatacttttgtcacaatttgcctttttgtgggtgtacgttttggtttttttttgttgttttttttctttgttttttttttcttttctttttttttttttttttttttttttgcttcaatacttctgccgctttggaaattgtaacagttaattactttgaatgttgctaaaaggacattttgtgtagggtcaagttatttttatatgagttaatgtgaaattgtaaatggaaatttttccttaaaatacaacacaatgatgtctgtataaatctgtctgtttagaatctgtgctgtgtaagggcattcgtactcatgctgttactgtacttatgcaccattcagacttgttagagtagatgtgggtttatgactgccaagtttgcccagtacagtagttttttatcactaaaagttggactcattgatggagtcctgtagtagtttcagtgttagatacagttttttccaccatacatctgtgcattttctctttaggtgactgtttaagaaatttgtgtgcatagttactcagtttttatgaactgttgtatcctgttaatgcatattgctctgtgactccagtatatcttacctgtactgaccaaacctaaataaagatttttattgtaactcctt

SEQ ID NO: 14160 - DNA, 226 bp, Homo sapiens
attgcttaaactttgaacaacctcaatttctttttaaactaataaagtactaggttgcaatatgtgaaatcagaggaccaaagtacagatggaaaccatttcctacatcacaaaaacccaagtttacagcttgtactttactttaatgtgtaatactcaactcaaggtacaagacaattgcatttaacattgttataaataaaaggaacatcagatcaatcattaa

SEQ ID NO: 14161 - DNA, 305 bp, Homo sapiens
atggaagcattaattgttttgaacatgtaaatataaatctgtcagccactacagccatcaaaagagagcatctggaagaacagccagcttggaagttttacagcaataatgttgcagtggaatattatttgtagttaaggtcatcctcctcccctttctgtttttttaaatcaagaactacgttctgcccctctcttgggcttcagaagcatctaagaaaagcagtcatcaattataattaactttcaaagggcaagtcagaagttgtttataaattacaaaataaaggcatattatgaactctt

SEQ ID NO: 14162 - DNA, 186 bp, Homo sapiens
gtgcagcgaggcctcctgcggccaccctcgggtccccatgctctctgggaggtgtgctgggtgtgttcgtgtaaatcagattctgtttgcagatggatctgtttggtcttttctagaaattctgttatgtcctgaacgtgaaattctgtcaacactctcaatgataaatcagtccttagatatcgt

SEQ ID NO: 14163 - DNA, 140 bp, Homo sapiens
gaactgtgagggaagttgtggataaaaatggtggaacacaggtcatttttagtttgtgcttggaatatgacttaagtatctcctaaatgtgatacagaagaacatctcatcccatatgcatgagatactaattaatgatg

SEQ ID NO: 14164 - DNA, 1467 bp, Homo sapiens
ctccgcagtgcctgcaggggagcacggagccgcgggacagccaagcacctccaaccaaataagacttccactcgatgatgcttctataattttgcctttaacagaaactttcaaaagggaagagtttttgtgatgggggagagggtgaaggaggtcaggccccactccttcctgattgtttacagtcattggaataaggcatggctcagatcggccacagggcggtaccttgtgcccagggttttgccccaagtcctcatttaaaagcataaggccggacgcatctcaaaacagagggctgcattcgaagaaacccttgctgctttagtcccgatagggtatttgaccccgatatattttagcattttaattctctccccctatttattgactttgacaattactcaggtttgagaaaaaggaaaaaaaaacagccaccgtttcttcctgccagcaggggtgtgatgtaccagtttgtccatcttgagatggtgaggctgtcagtgtatggggcagcttccggcgggatgttgaactggtcattaatgtgtcccctgagttggagctcattctgtctcttttctcttttgctttctgtttcttaagggcacacacacgtgcgtgcgagcacacacacacatacgtgcacagggtccccgagtgcctaggttttggagagtttgcctgttctatgcctttagtcaggaatggctgcacctttttgcatgatatcttcaagcctgggcgtacagagcacatttgtcagtatttttgccggctggtgaattcaaacaacctgcccaaagattgatttgtgtgtttgtgtgtgtgtgtgtgtgtgtgtgtgtgtgtgtgagtggagttgaggtgtcagagaaaatgaattttttccagatttggggtataggtctcatctcttcaggttctcatgataccacctttactgtgcttatttttttaagaaaaaagtgttgatcaaccattcgacctataagaagccttaatttgcacagtgtgtgacttacagaaactgcatgaaaaatcatgggccagagcctcggccctagcattgcacttggcctcatgctggagggaggctgggcgggtacagcgcggaggaggagggaggccaggcgggcatggcgtggaggaggagggaggccgggcggtcacagcatggaggaggagggaggcgctgctggtgttcttattctggcggcagcgcctttcctgccatgtttagtgaatgacttttctcgcattgtagaattgtatatagactctggtgttctattgctgagaagcaaaccgccctgcagcatccctcagcctgtaccggtttggctggcttgtttgatttcaacatgagtgtattttttaaaattgatttttctcttcatttttttttcaatcaactttactgtaatataaagtattcaacaatttcaataaaagataaattattaa

SEQ ID NO: 14165 - DNA, 165 bp, Homo sapiens
ggtccaaacctcagaaccctcgggcacctgagagagatgttttgcggcgatgtcgtgttggagggatgaagatggagttatcctctgcagaaattcctagacgccttcacttctctgtattcttcctcatacttgcctacccccaaattaatatcagtcctaaag

SEQ ID NO: 14166 - DNA, 3925 bp, Homo sapiens
ggcccccgacaaagacagaaagaaggagctatccaggagctgatcctccttgcaaagctgtgccttgcagagatgcacgtgtgcatttcagctacatcatgccgcgctgttgtaatactgtataaagacctcaatctatccagagtatttttatataatgttggatgagttaggatttgtaatgctgttgaagtttctgggaacacataatatgtagccagtttaacaaagaagctgtcaggtgcacagcccttcctgggtttttttcttgtgttccctgtggtctctgacccattaggctaaagagagacaagagaagcccccaacctgattctcatgacagctccatcaagaatgtgggatgtgccgaccaaggatttgagaaagttgtacagaaatgtgttcatcaaatctggtcaagggactaagctcctagctgaccattcattctgaagattgcatggaggatgaacatctgggaatcctgttaatgagaaggctgaatcacaggcacctgggccaaagggtgtgagcattcatgttctctgctcaccttggtttccgcacaccttcgcaatgtgaacaggtcaggagtccctcccgtccacctcctctgtaacagctggggttccaggcatggtttaggccctgttccagcaataagaaccaatctgctgtacaatctgaggacttggctctgttatttacaaaatgatgctgtggttctgagattatttgggacatttttggctctcctttagtggacacctagagccacagattcccttctttactaaacaaatcccatggattctgatttctgggtcttaggattttaaaagtgaagggatatttttcttatatttgtgagttcagttccgatggtgcccgtggtcaaaagcgaaaaacatggacaattcctattcattcttagcactttgacatgtcttggggaaaagcttacattttaatttaaaagaaagatcaattatatccatgcttaacaggatcagcaggagctttataaatgactttacagagactaataagggatttgatctttctttttttgttatcgaggcttttgaaatgtggaacttgtgtgttctgctttatatgttatattcaatatcttttcagatgcagtctatattttatgctgagttttaaaaatgaaatactttatgcaaacaggcaaaattggtaccaaagggaaacattaaccatgaggaagagcatttttctaaggagaacaggtgacaatatacacatgtgcgctaatcgtaaaatgagcatcttagtctttaaaacacatcagaattgaatacgaataatctatttgtcgatgaaataaacacaactctttgaggatttgagactacattcaccctttattcacagtcacttgcagttttgcttttctctgcatttctctgctgtaagatgactgttgcattgttgaattgtattttgagtggatatttttgtttggtaacaattaaaattttaaatcgtaaaaaatgtacatttgccctttctcttccttctaaacatgtgtctctcccacaggtcattctcctgtgacacgtgtactgcagagtgtttcaaaaccgggcaggcaattagcaatgggaaataagtggtccaccttcaatatttgcttgttgttcatttacatgctcttggcaccaatcctagactcacgtgtgccccagaataacattcagactctcagctggtcttgtgttacacatccatggaccggttcactccatcatatacagctctctgctccgtgtcccctgggctcaagtcaagcagtcggtgacagatttcattcccaataacagaatcggtttgcatgactccccatacatgttgcagctttgaaaacattcatctcagagttaggtataaagacataaaaatgtgtgtcaagccctcgttagctgatgaggtaaatgcatggacaacttcctaggacttctcggctctgccctctgtgaccttgcagcctgctcaggtctttgtgctctgttccttatcaaaaacagcacaaccccctcaatctgcccatttaaaaattggtggagtgaacaaagagcatgaaaatgttgaagaccacaaccaaaatttactcaaatcaaagttaagtacagagtttatttttaacaaatgtcatagctatgtcaccttactacagaatccagcagtcagaaaataacacaaaaaatgccgaggtttggcgtagctggtagctggggacagtgtcttcgtttgattactgccagttatttccagcatgctaaatccctacccacgttccagcctctaggtgagtcagtgcgtcactctgtctcccgtccaattaattatttctcatcactccctcaatccaagtaacaaaccttgaaacacgaacatagacaccaggcttattggggcgtgcacagccaagaccccaagaagtgactccttgtaaaatgtatttgtccttctcaaagcaaaccagaggccctccactgtcaccctaaatagaggtagggaaaaattcatgtgagggttaggctgccagccttttattgtggcatccatctattgtccatatgtatattttcccagtaattgaaattggaaaggaacttatgggcatattactggagcatctgcagtgcttaagtacttagcaaaatctattcagcgaaaccacaccacttagtttctcccaggggtaaaaaaaacccttgtgaatcctgcacacatcccttcctgtgttggtgtttcctttagactggcctagcctgggcatcactgtaaagtatgtgcagttggtctctgtcctgtaccctctacctccttccctgtcggaaaagtcaccactttagtccctggccaccagcacaccccaggagggtgagtggcctgaggtagttacggcacttaaaactcccttgctaccgatctggaactcaagccccaagacatccccttagatgatctgaatacgcattcagggacagatctaggcagtttctaaacaacacttagactggggtctaacgttgacaaatccttctagaatttgcctctttgggactgaagtctaaggggctgagaccaagaagggagagcacaagactaactttggtctcttgaccttttcttaccttgcaactgtcagtgcctccagccaaatgcctagcacagagctcagtggatttgattcttccattcagatactcatagcgattgcacactttattctcaatcacaagaagctggggcttccttgagaaggccagccccaaaggtacctgtgtttaaaagatgaaagaaatggttgctgaacccaaaacatgtttaggaggaaaaccagaagaacagagcagtggcactggacctcctgtctgtccgtgaggctgcagaacacaaggcagctcccaatgccgctggactctctgaccttggagagtgtaaacatcatatatgattctgtgttcctgagatctgggtttaacgatctgggctttgtcatggtgttttacgttcgttgttgtttgtgtactttttgcttttcttttgaaagtatgaaaatgatttttacaatgtaaagagagtctgagaaatgcaattgctattctttttatatactttttcagattttttatatgcttctttactacttacatcataatgcacaattttatatactgattttttcaatcaatgtatatcatgagtttttaaaataatgctacaatcttcataactaatattttaatggggagtgactgcttaattggcatgaggtttccttttgagatgaggaaaatgttctgaaaatatggtgatggttgcacaccattgtgaatgtactgaatgccattcagtggtaccctgcaaaataattaaaatcctaactctt

SEQ ID NO: 14167 - DNA, 245 bp, Homo sapiens
ttggacgggagacagagtgacgcactgactcacctagaggctggaacgtgggtagggatttagcatgctggaaataactggcagtaatcaaacgaagacactgtccccagctaccagctacgccaaacctcggcattttttgtgttattttctgactgctggattctgtagtaaggtgacatagctatgacatttgttaaaaataaactctgtacttaactttgatttgagtaaattttggtttt

SEQ ID NO: 14168 - DNA, 514 bp, Homo sapiens
agcctagtagaatatggacttggaaaattctcttaatcactactgtatgtaatatttacataaagactgtgctgagaagcagtataagcctttttaaccttccaagactgaagactgcacaggtgacaagcgtcacttctcctgctgctcctgtttgtctgatgtggcaaaaggccctctggagggctggtggccacgaggttaaagaagctgcatgttaagtgccattactactgtacacggaccatcgcctctgtctcctccgtgtctcgcgcgactgagaaccgtgacatcagcgtagtgttttgacctttctaggttcaaaagaagttgtagtgttatcaggcgtcccataccttgtttttaatctcctgtttgttgagtgcactgactgtgaaacctttaccttttttgttgttgttggcaagctgcaggtttgtaatgcaaaaggctgattactgaaatttaagaaaaaggttcttttttcaataaatggtttattttaggaaagctc

SEQ ID NO: 14169 - DNA, 505 bp, Homo sapiens
cagtggcagcagctgggacttgaaacctcccgttggtgttgggatcatctgtctctgttgcttttagcatctcattccttgtgacttccacagctttcttttctacagctgctaaaatagtggcttatgggccattggactgttagccctattgagagcaaggctttccaatacataaatagtgtctgtttcttagattacaatagtgtactgtgcttatttgttctaagagaagaattgcttctttatacagctccgacagaagcaggagtccgagttaaaccttcagttgtatagacaataaactataattttcatatgcaattcagcaattgctgttctgtgtgtgcctgccctgggggtgatgtcagaggttgtaagggaagagtttatgctgactgcttactaggtgtttgtcatggaagagaagcatgggttcagcagtgcctctctagcagctgtgcggaataatgtgctttgacattcaataaaactgttgaatcta

SEQ ID NO: 14170 - DNA, 6392 bp, Homo sapiens
caacattctctttataaatatttttgctccctcagattttgaaatgattttatcagttttagagaggcaagacaagtttgcattagggaagaccgaaaactaaattttgttttatttcagcctctcataagggttcccctttgaaataattgcaccttaaatttattcagatccactttggtaactgaggttcagtttggttgggtaaatctgttgtgtacatttcaacaaatacttttacatttgacattactgaggtcattctgagttttaggtcccaccccattggcccgtcacctccatcagctccacttctcaaactttatttgagatttattttatctcacaggtttgtgtaattgttggaaaatttttaaacttctaagtgaaagtagtctgagcgctttataaaattcatattattgtgtgtgttttgtaatatttgcgatcacttaaaatatcagataaatacagtcatgcatcgcttaacaacggggatacagtctaagaattgccttgtctggcagtttcatcatttggtgtacatcatagagtgtacttacacagacatagatgatatcgtttactacacacctaggctgtgtggtatagccattataatcttatgggaccacatagtataagtggtccgttgttgaccaaaatgttgttatgcaggcatgactgtagttgtattcttaagatttttcagttcttgtgttttggagtcctagtcatattaaacatgagagatactcttaatttcagtagtacagtatggaatagttaaataaatagcaaatcactgaattcagaatctcacttaaggcagaaattaaaatcataatataaacgcttggttttacatgaacaaaaagtggtgtgctcgaaaaagacattactgatgccttttttttatagagtggattgaaatgccagtcatgcctgatatttcagcccattgacttgctggatgaaggactagaatacagcagctgttataacacgaccagtcaatgtggaacaaactgtttctgtgcaacccctttgttttaccagacaaaatttgaatactttttttcctgaattgtatatgaccttggtgctgcatgcatgctgttgacttttaggactttgatcttttaaggttttttttccccagcattaatattgatttataaagatttgaaaatctttaatgaactggagaacactaagatttaaactcgaaaattcgttgttcaagtaaagaaagccatgatgctctgtatgttatctgtgtgtgtgcatgcactcaggtgccctttgtttcatgaacaaatacatttcattgtacatgttttctgtttaaatcattgtataaagtaattgcaggtcagaattataccacagaactgtttatgagaggcttgtgtctgttgcacatttcttgaagcatttttaaaataacatgtaacctgtaaccttgttgtttaagttttcttttctattaatactctgtcctgtggtcccgtgcatgctccttttcccagaactcctctctgctgcacccacagcatctgttcccgaggagttatgactcttgacttcctgcagggctggggctcttagccaccagctgctgttccagcactttcagcgcaagatctccctgattttgccacgtggaattgtacttgtatatgattaccttatctaaaatgaataagaggtgatggaccagtttactgcttagaaatagcaagaggcactgcagtaaaacttgtttctcattgtaaagcttcatgtcttttgtttgttggaaaatttttacttatagaaacttaattattagactggtaaaataaagaccaaaatatgcagatttctaattggcattcataaggtgaataataataagtgcccaatgaaaaaatctattatggttaatttcatttcttgctttgccacctaagcagtaaaacatgatattgaccacttggagaactcagaaaattattttaaatttctaagttataataaatttgcacacagataacatgcatgctatttatgtcacatctcacattaaattattttaaaataagcagtgcccttcaaaacagatgcagacatgtgtgttggtagtagtgaggagattggtattagcatcaagtcttcattgatgactaatttttaattcccttccttttatctttaggtatggctttcccaacgaaaggctaagaattcaagaacggtcttaactgaaccctcatcagatctgaatttaacaaatgcttagtctcagcagcctccgggggaaaaaagcttagcctagcagtcagtgacttacttgcactttttgcacatagatataaagtaaaattatgttattaatttggtttagtctgtaatattacacagtaatggtaatttataaaggagtgtatagtagtatactgactgctaagtgtactatactgtttgctttactaatcacctaattcattgcagttcatacttattgactcagagtttaaaaccacaatctgtaggctttaagaattgcttttaaacctttttaagtgataaactcttgaagtggtcttaaggttagcaaataattgtctgtattaaacatggcgttatttaagtagtcctgctgcaagaaaggcacttcagtgaatatgtgactagtaaagcttaaatatgtttggatctaatagagctcatgaaatactgtaacttggggattgtaaatgaatggatacaataggttaaggcccaagatgtttgaaatgaatgcaatattaatagatgcatatatacatgacatattgtggttaattttaaaactactgtgccttaacgtgtttcttaaacttttgtagtaaatgaacatttgaaatccattttgataaacctgctgttaatgttttttccccccttgtgaatgttttctaactttgtcttggtaattgcaatttaactaggtgcggtggctactaaagttcgaaggcacgatatgcgtgtccatccttaccaaaggattgtgaccgcagaccgaggttagtttagttctgcagttcttgtctataagaaatgcgttgggtgtccataaaatttgcaacaccacacctgatggaaaaatgtaattgcttacctgcacacagttttttttccttttctaaatttgtttgtgatcattgacagatttaagggttgggttttttgttttggtttggttttttctcccttcatattttaacttattaaatcttctattattatgtactatgatttattcctactaaaacataaattagtcaatttggggagctattaaattttgatgttgcctcagttattttcattaataacttttgctaaaatttaccttttaaaagttctgaaatttggggttggtattgcaaaatgaattgaacggatggtgctttaatgagagaagtaaaggaatatatgcctcctgtgtacttttggagaaaactgaagatttagtttccatttttctttataataaaatatttgagccactgtataaacatgagggtgcacatgtcaagtacttagctaaaatcaacaaagtgaggactgtgaagataactttcatgtagttggatttttttatataaattagagcgtcaattcccttttattcttacattctcttgccaaaatggatcctttgatttttgtcatttgctgctaaaatatattatctgaaggtaaactgtctcttgaagttctgtggtggtatgagatccagctgtgtgaatataatttttgactaacctgtgactggaaaataagtcttcatttttctcctttacaacttttataatttgtgtcctgtatatgcccttggacccttttataaattatttttgcttattgaggaatggtattttcggtttattgacattgaattgttttctaagtttttccatcacaagataggaatatcaagcatggtagtaaaaaaggattttttacaagtttctattatggcacatttgtttcctacaaattaaattgatcaaagtctcaaatattagtggaggaaaaagtgctggatttgtacttcaattgtacatcttctatgaatttatgaaggacctacctgctttatgtgattaccttgagtactgatgataaatactagacacagctgttgtccacatcagaaataacatgcctttcccaaagacattgttaatatttgtttagcataatccataaagaacgttgaagacttttaaactaatgtattcatcactaacagtgattgttcagtgaacaaaatagaccccagctccgtggtcgtctatgaggatggtattccttgtaagtgttctgtatgagcacgtctcatagggatggggaagttttttggaaagtcacttgagttttaaagaaactggacaattccatgaataatttgaggttttattcatattgctaatgtctacaattgttctaaagagtattttaaagtagtttttttcccccagctaatctttccctatgtatgcccccttttaggagatttctcaccattttgctttaacacaataattattggcctacttaatactccagtgccttgagatagttggacatattttaggaagattttattgtatttggaaaattacgacacattccatgcatggatcttttgtagttacgtgttttgattagtcctgtcactgtttttatttaaaatgcagtgtcagcaaaccgaaatgctcatttcttttttagtaacagagtactcgtatacttatcactgtatgcactcattgggtctaagggagatgtctgaagtccttcacttaaattattttatgatactactgttttctctatttttgaggttaaaattattttaaaaaaatattttgaagagaagtttattagtataagcattcatttaatgcaaaaaaactcagcccttggacatataaccatgtaattctatatgaacgtttagagtactacatggttgaccaatatctagttctttactaaaagtaaactcacctctttatatatatttcaaaactgaatttgaagcctattagagaccaactgaccttttagttgtaatgaactgtatggtcttgcatggtgacacacctgtgtaggaggccaagacttggcagaggatgtagtctaggtgtcctggtatatataaatggtcactcacttcgtttatatattccacactcagaaaagaagtcagagttttttctgagtaatacaaaaaccatcacttacataatttgtataagaaactttaaacagttttaatcaaaactatgagtaacatcaaaaatgctttaagattctatattttggaatacctgtgaagtagtatgactacatcatgttaaatatttattttcttctatgattttggagcagcaatttttattttaaataaaattccacttttaagaaattcagggaagatttggtcacattgaagatacagtatttttgtagtatttataaactgttctaaatgatagactatagaaaacatttttgtcatatgaaggtaaatcagtccattattttggatcatttaaactgaacattacaccttctgggctttgatttatgaagtggcacagaatctaactttgcactgaatatcttttcattcacatctcctctgccttagtcacaatggcaacagtacagaaaattctatcaaacctcagaatatagtagaaataattaagctgttgaatgagtcttaaaaattatactactgttaagtggaccaagtttggtgaagcagaatgtgacaaaggttgattaaggaaggaacaactcaaggacattgggaatgataacttttccacttgagaactactttatgttttactgtaatttttaaagtttttttgtcctttttgttattttgcaaaagaaaatagtatttacaggtggcttcttttaaaatataaaaatataaagcaggaatgtatatgaaatgtcagattttattgtatttgcagagtattagctttgaaattgaataaagaaagctgtttgtagttttaaaatgccttattggtatcaattagaaatttcttctattttttgatgtacttagagctttttgagtgtagaattttaaatggcaggattttacagtgtttacatgcaagtgcattttataagtgttctatatgtgtaaaatagtattttcaactggaaagtgttggctagtgcaaaaggcctggccattttctggttcccatgatgttgcctacactgctagactacagtttagtatcgctttgtatcatgaggccaagaaattccatgttgtttgtaaatagaataattgaaaaagcaataaacatttattgaac

SEQ ID NO: 14171 - DNA, 3150 bp, Homo sapiens
cctatgaccttctgacctctgaactcttcacccaatgatgacctgaccatgcctgcctgctgatcagttaactggtaatcgcctttgcttgcctgtcgtcagtgcagcgagctgaggcacttgtccgttcgtcttaccatctaaccaaacaaaagacaaagaaattgttgtcctccaactcagctttttttttttttttttcctgtttgggtgaaagtggttctagaaactgcactgaatagtagtaaagcaataaggcccaattcatcccacagcactgatcatcttttaatatcccaccctaagcgaacggtaagaaggcctctcttaagaaggggagacagatggtccttaactactcaatgacagaggcagttactgtgagagacttctaggaatctttttcttctcatagcgaagtcaaagctctctctgaatgtactgtgtgatgatgcatcatgcatgaaccttcggtcagggatatcattggtgaagtgatttcaaaaagtattcaaaatttgatatgctgtttagtcactacagtgccctcaaagggcagaagttgcagccttttttatattgcctgccaaaatttgaagtattagaagaaagtgtgccatgagagaaaaacttaaggagttttgaaaagtaatgcaaataacaaaactgcaacactatttttaaaaagataaatatctgagttaaaattactgaatctttattttacacctaaaaaaatatgagaacaaggtacatgcattatgtgtcacattactgggcaaactgttcaagtatttttttttaaacctccctgtatagaaaaaaatcattaaggatgtaaaagccatgcttgcctatttgctgtatacatgtaatgaaattgtagataaagtgtagtgcattgaaacaaatgaacaaaaagtagatacttttactatacaagggtgctggtgcagaaaaaaatatatatatttttggaaatgtagcattttatactttcaagtgttataaaaaaaaagaaaaagaacaaagaaaccctttatttcattaaatgattttttctggtggttgtcaagaaacaaaagaccaaaagagcctttttgtctttcttttttattttttaagtattggaataagtctaaagaaaagaaagtgccttattttccttcatggtcattcagtcaagtgtctcataaagatcagctcctccctcagaatacaagttaatgcatgttactcagtcgcccagtatgtgaaagaagatatgagggagacaaatgagttgatagtttgaattataggatttttgccacgttaccttgatgcaaatttgccaaatctgatactgtgaaaagatttgataacttttctaatgcctgactagtaagttttaaaacatcattctttaaaagaatagtttaatacttttggttattccaatcttcaatgttaacccaaaggattctgagataaaaattatgtgtcatctaaacttcagtttacagacaaaattagagctttgttttatttggagaagggggatgcattcatttgattttgttttttgtttttaattaattgaatataataggatacctagcaaatgttttcacaaaagtgaatctttgtgattttcattctagaaaacaatgttttaaatcacccaaatttaatcacatgtctttatatcataccagataactggtgtagtgtatccttttactgtttcaataacctctgcctcccccaccccttaactttaaaagaatgtgaaaaactagcatcatagtgcatataaatactcaaccacatttcagcttaagcttctaatttctcaagaagttgaaacagttagttatgtagttgaagcaatttgtgtgcaaagcctacatctaaacacttgagtgaataatcattaactgctcagtaccagacgtggcaaatctcaagtgacagtggacccccccccccgcccagcttatcaactcgtcccctcttccacaccttcccagcatcacagtcagaggtcagcaggaagctgagtcattaccttcttggtgacctcccccaccatcttgtctcacttggaaaccgttgtcagtttatttactatgcaatagacattcattgttttgtatccagctagctttggtttaatatgccactgctttgtctttctgttacacatacagttttgatttatttacaatatatgctgtgccattttgatttttatattgtttggttggttgaataaatttgcgacactcaaacacttgaggtgatagttgttaaaaacaataccagtatttgatccagtttcatctcaactatgttatacctggacattttagatgtttatcaaaggtcttttatggggaagaaagtaaatgtatgaaataataaatgtgtgacatttatagggaatgttggctctgaacaaacttttgaaaacttggttgacaaaattttggatcaactgaaaaaagcatgacttttgaaatctctgaatgccttggttctcagtattatcattctttattgaatttatttcttattaaaatatgtagtttttaagactttttttctgacagtattatgtaattttttagcgtgggtagatgggagtgtcgcttgtatgttatcgtacagctgacatgtatttttgtctattctttattatcttagtttcatgctatgtatgtaccataaccaacctattgcctatgagaaacatgtaagataatgtatttacagccattgttacaagtttataatgtatttttctatcttgttttatatgtatgttatataacattcaaaaagaatttttttcttgattgagaaaaggatacaaaatgcaaaatccacaattttgataactgaaaattgccaattgttttgcagtactttattatattgggtgtcttgtcttttttgggcttttagttagctaatgaatgaatacattagacacttttgggttttagttgggattttacatagcttgcattttaattctttggttctttgctgtttctattaacccacagcattattttaataaatgttataataccaacctactaactctggactttgtctgtttattaacctttatatgtttaattaaaataaacaaataaagac

SEQ ID NO: 14172 - DNA, 599 bp, Homo sapiens
acacgaagaaggaagtattctaattaacaaggacagaggactgaccggttccattttttttttttccagacaatcactcagctggaatgtctgctctctattggtgccttgcatttcaaaaacactgcagatattttttaaaagtaattttcattttactaaacaaaatacttcctatttgagcccatgtgtggaagatttaatattcttaatttaactgtacatttctttatggaaattgattatctacactcagtttcattacagggaaggaacccatgaaaacatcagtgttaagagcatgatgaaaggtgtcaataaagccgtaggatcgcgcaaccctttgtgtgtgtggctgctggtacgtgtgatctttgaaaaccttggctttagccctctggaatcagagcttacccaccatagtatattttgatattaggtggttctacacatagttggcaaaatgacttggtaaatttgtaatgctgaagtatattagtataagttaaatttgatgtgtcaactttattttgtatttccttccatttggaaggtttgttagaccattaaggttatattaaagtactcttgtgtgtgct

SEQ ID NO: 14173 - DNA, 1786 bp, Homo sapiens
tagaaagctgagtctccctaaggcatgtgtgaaacatactcatagatgttatgcaaaaaaaagtctatggccaggtatgcatggaaaatgtgggaattaagcaaaatcaagcaagcctctctcctgcgggacttaacgtgctcatgggctgtgtgatctcttcagggtggggtggtctctgataggtagcattttccagcactttgcaaggaatgttttgtagctctagggtatatatccgcctggcatttcacaaaacagcctttgggaaatgctgaattaaagtgaattgttgacaaatgtaaacattttcagaaatattcatgaagcggtcacagatcacagtgtcttttggttacagcacaaaatgatggcagtggtttgaaaaactaaaacagaaaaaaaaatggaagccaacacatcactcattttaggcaaatgtttaaacatttttatctatcagaatgtttattgttgctggttataagcagcaggattggccggctagtgtttcctctcatttccctttgatacagtcaacaagcctgaccctgtaaaatggaggtggaaagacaagctcaagtgttcacaacctggaagtgcttcgggaagaaggggacaatggcagaacaggtgttggtgacaattgtcaccaattggataaagcagctcaggttgtagtgggccattaggaaactgtcggtttgctttgatttccctgggagctgttctctgtcgtgagtgtctcttgtctaaacgtccattaagctgagagtgctatgaagacaggatctagaataatcttgctcacagctgtgctctgagtgcctagcggagttccagcaaacaaaatggactcaagagagatttgattaatgaatcgtaatgaagttggggtttattgtacagtttaaaatgttagatgtttttaattttttaaataaatggaatactttttttttttttttaaagaaagcaactttactgagacaatgtagaaagaagttttgttccgtttctttaatgtggttgaagagcaatgtgtggctgaagacttttgttatgaggagctgcagattagctaggggacagctggaattatgctggcttctgataattattttaaaggggtctgaaatttgtgatggaatcagattttaacagctctcttcaatgacatagaaagttcatggaactcatgtttttaaagggctatgtaaatatatgaacattagaaaaatagcaacttgtgttacaaaaatacaaacacatgttaggaaggtactgtcatgggctaggcatggtggctcacacctgtaatcccagcattttgggaagctaagatgggtggatcacttgaggtcaggagtttgagaccagcctggccaacatggcgaaacccctctctactaaaaatacaaaaatttgccaggcgtggtggcgggtgcctgtaatcccagctacttgggaggctgaggcaagagaatcgcttgaacccaggaggcagaggttgcagtgagccgagatcgtgccattgcactccagcctgggtgacaaagcgagactccatctcaaaaaaaaaaaaaaaaaaaaaggaaagaactgtcatgtaaacataccaacatgtttaaacctgacaatggtgttatttgaaactttatattgttcttgtaagctttaactatatctctctttaaaatgcaaaataatgtcttaagattcaaagtctgtatttttaaagcatggctttggctttgcaaaataaaaaatgtgttttgtacatgaa

SEQ ID NO: 14174 - DNA, 561 bp, Homo sapiens
gagcagtgaggtccgaggaggatgaactcagaaagcaccagccagagaattttcttagaagatgcctcaggacatagagcggctcctcatcaccatctcagcacaatttggccattctgaagagatcatgttatttcactcttcatgtattttttttctattctaacaaatttttcgtccaccatcttaacagagatcaagtgtatacatgaaggtatcagttcatttaattttagatgcaaaagaaaaaggtctaacgtacaatcagccaattagaatttgcctgaaatcatagactcaccctagttttattgctgtagttgtttttaagaattggaagcctgcttaaaaaatgtagttgagccccataattttacaaatgggcgaacttttaaacttctaactctacttggatcaaaacctcatacattttacaaaggggtcctgacaagtcagctgactcaacctcacagagtcagggggtgacaaagccagactggggctcaggattcctgaaacgtgtggggtctgcgtttctaaataaagacggttatttaatgg

SEQ ID NO: 14175 - DNA, 1010 bp, Homo sapiens
gtggtaaaaaatcaaatcaagaaaaagtgacatggatttttaaaaaccaaggatcctgtcctagagaaagcaatagttcaagtccctacctgtgccaccagcatgttaactatgacattgggactgaagatgtggccatatgtataaatataacagctctgacaaagcacaatatgttcaagtggtgattaaactacattacatcccatgtttatttgctcaggtgtcttgaaagaattctacaaataccacacagcctcccaccagtaattgaatgtgctacactacgattatgctatgtatgtatttaaagaggagaaaaagattattctaatatttttaaaggattattaggtgaaaacagtacaaaagaagccaggagttaactttctgtgtgtttttttttaaatcaaccagttatttgttaaaattattttgttaacttaagatcagacaatcattcagagtgagataaatcactgaaagccctaatgactctgttgtttacaaatcctgggcttgaaatcagactttgcaccaaagagctccctgtgggggcatctttgggctgtatttaaatagtggccccttggccttgtcaccatttgtttaccatcacagcatgtgaggtcatggcctcccagatcaaagtatgctgtcattcctgccacataaaaagcatctgcagtcctaagacataaaaattccagtaggttacttgaaaacattattctagtgaaagtagtcagatacaaaaggccacatgttgtatgactccgttgatatggaatgtcagaattggcaaatccatcaaaagcagattggtggcttaggggaggggtaatgaggagtgcctactgatgggtagggggcttccctttggggtgacagaaatgttctggaactatatagaggtgatggttgcacaacacggggaattcactaagtatcactcatggtacattttgtgttatgtgtgttttaccacaataaaaaagttaaaagctggc

SEQ ID NO: 14176 - DNA, 93 bp, Homo sapiens
atgcattaacaagtttttctcctaaaactgtgtttcttgtccttgctttataatgcatatgtgcttagaaataaacaggtttcacgtggactc

SEQ ID NO: 14177 - DNA, 1553 bp, Homo sapiens
atggctcataccccgaaggcagttcctagacacatgggaaatttccctcaccaaagagcaattaagaaaacaaaaacagaaacacatagtatttgcactttgtactttaaatgtaaattcactttgtagaaatgagctatttaaacagactgttttaatctgtgaaaatggagagctggcttcagaaaattaatcacatacaatgtatgtgtcctcttttgaccttggaaatctgtatgtggtggagaagtatttgaatgcatttaggcttaatttcttcgccttccacatgttaacagtagagctctatgcactccggctgcaatcgtatggctttctctaacccctgcagtcacttccagatgcctgtgcttacagcattgtggaatcatgttggaagctccacatgtccatggaagtttgtgatgtacggccgaccctacaggcagttaacatgcatgggctggtttgtttcttgggattttctgttagtttgtcttgttttgctttccagagatcttgctcatacaatgaatcacgcaaccactaaagctatccagttaagtgcaggtagttcccctggaggaaataatattttcaaactgtcgttggtgtgatactttggctcaaaggatctttgcttttccattttaagcttctgttttgagttttgccctggggcttgaatgagtcccagagagtcgttcggatggtgggaggctgcctaggaggcagtaaatccagtcacagtgcctgggaggggcccatccttccaaaatgtaaatccagtcgcggtgtgaccgagctggctaacaggcttgtctgcctggttttcctcctacacgtggacattattctcctgatcctcctacctggtccaccccagggctaccggaaggtaaaatcttcacctgaaccaattatgagcagtctccttactgaaggtacagccggatacgtggtgcccccggggctggtgttggcagccggggggaggtgcctgagggtccccacggttcctttctgcttttctgaatgcatcaagggtacgagaacttgccaatgggaaattcatccgagtggcactggcagagaaggataggagtggaatgcccacacagtgaccaacagaactggtctgcgtgcataaccagctgccaccctcaggcctgggccccagagctcagggcacccagtgtcttaaggaaccatttggaggacagtctgagagcaggaacttcaagctgtgattctatctcggctcagacttttggttggaaaaagatcttcatggccccaaatcccctgagacatgccttgtagaatgattttgtgatgttgtgatgcttgtggagcatcgcgtaaggcttcttgcttatttaaactgtgcaaggtaaaaatcaagcctttggagccacagaaccagctcaagtacatgccaatgttgtttaagaaacagttatgatcctaaactttttggataatcttttatatttctgacctttgaatttaatcattgttcttagattaaaataaaatatgctattgaaact

SEQ ID NO: 14178 - DNA, 3270 bp, Homo sapiens
gtcgttgaccacactctgggatataaaaccctccatctgtgaagctgattgcagtttgctgtgaaccttgctacttgtacttggttgaagttctaggtacctttagtcaagggatggaaaaataaagccatacgcagttttgttacctcagttaccccaaaaataggaaaagcagcaagcacagtattttaaagatcataattcctataaaaggactgtgcacaaagtgtttagactccattttcattaggcaggttgactaaaaatgattgcagtaacaggtttatataaaatagagcaacctttcatgctgtgacacaaatcaaaaggttgataactttgtaattttactctggagattctaaccgaagttggtgtaagttttcaagagttactaaaatcaagttggaaatgatttacgtacacttccctgagcctggactaaagcctcatgcctgtaccccaagtaggtgatggtacttttctatacaaaaaggatttcctggcaggcaggtatttacaaagtttgttcctgtaccagtccaataatgacaactctaaatccagctgcaccaaatcttagtgggccatttgtcatacctatgaaaattcttcagttattaaataactttgtcagtgctacctatggtaggccggaaacaatgtagattaggaagtttcatgaaaattaacttttggggctatggagaaacagttaagtatcttaagttactaaacatttccactgaatttttggagtgagccaaggttactataaaatactttggaagatgaattctctacctggagttagtttcgagagtaagcgtagcttttaacagaaataactgcagattttaagctcataatttgcaaaaaaaatcttttattggcatgaaaataatgttgtaaatggcaccaaatattccacttaaatgcatatacagtattagagtcaaaaactattttatccctctttgctgtttttcccccttctgcccactttcctgggtgttgggggggcccgctgacaacagtcacaaatccagcgacctaggaaaaaaattgttaatatagaatgaaaaattatctttacaggactgaattttaagcccatctaaactcttctgccttagctatcactaatgatattcctctctggattttgtggtgagaagggcactatgagttccttaatttaaggaaaaaatgtaaacttaatcaatgtaatcaatgccatgcaaaattcattgcaagtcaagggggatgggagagatgcaatgccatacggtgatacggacctttaagaaagtacaatctttcctgaaattcaaacactatcatacttcaaaaggtcaaaacccattccggaatttggcttttttaagactttttctctcctgctcactggcagctgtgtgtcttaacagcattctttcaagtcctggtgtactctgctgacagcactttaaaactttaacagcacaatgataacttgtactacatacttgatctgaattactacagaaaaataattatgttgcttgcttaatgattcccaggaaacttcgttgtaggcatatattttataagagtattatacagtgttaactatgcaagtaagttctaaaattacacaattatctgtgtaatgttttagtccaattactgtgatttattcaactctgttctaaagttatctggaattgtcatgctgcctcaatttacagaaatctataatagatttctatagaaatgtataaagacgtagcagtcattttgttgtttctaaatagataacatataaaaataaaggctttgttactttagtatttcagtagaaaaacaccagctcattctatagaactatacttccaaaacttagcaggggcattctggcctttcacttatcctttagttggaattgtctagggatgaaaagctggtggacatgacctgtataatcacagctttggtcatatttgcacataagagtccacaagctcttcatgtcatgatagcgtttatgcagccttttggagtgctgggagagtctcatcacccaaagataatgtttgctctttttttaatctttacctgatggaatagcaccaaggcccacacaaaaagtatgataacctctgtcacacatatcacagaacatcatttcttcttcatggtggggttgtccacatataatgcatgttttacattccatacactgccatgggtaggtcttaatcatagaaacaagctccattgtcatatccaggcaagaaggatggcctaaatcaaaaccagtattagtggtatctcacataagaaattttaacttaatatggcacataaaatactagtttgctttaggacttccagagaatggctataatgtcaaatcgccaaagagaaatgaatatacaatgtagaggaaaacacatgggctgtgtctatgcctcacaagctaccctgtgtatttaatttggtgactctttggttgaaatctgcctgaaactataaattctagtttttgaaccaataaatacggtggttaaaattttaaaaagacatttcaatacttaccactattctcacattgggagcagtgtataagtgattcagcctttcctttcttgttggactccttacccttcagacaaattccacatatagcatttggaatgacctttggctggaagggtagaagagggctataaattcatgccagaagagcttactatgggtttaaaaggaattctgttactttattgccctatttttacttttggtaacttgctaatgaggaccattttgaaagacaaaacttgacaggagtctgcctacaatgtaagactgcctactgaagaaagcattaatttcatcataaaatttggtaaacagcatgatctcgtaagattaaatgtagcattctatactccctacatgcacagtaagatttgtttaatgaatggaaggaaagactaaatacaatgtcaaatgtcactattaattggacaagaaaatccaagtagcaaatgaccattatgtgtaagacttactctaaaaagaccattttaaatagctcatatattaattttgtttaaaacctgctattttccaaaactgcaaaactagagctataaaatctaagttaaaaaatcagcttatcctcattggtatagtggtatttaaaaaaaaatcagtttaaacatttttaattgaaagatgtctcatgcatacattggcgtgtacataaacgtttgtggaaaactt

SEQ ID NO: 14179 - DNA, 386 bp, Homo sapiens
aaagagtatggagagaaaaagaggcacacctggacgcagagccctgccagcgccctcctctgctgttgcagctgcaaggagaccatgcctgtgggagccaggcctcgcttgcatgaagaaggaacgatgcctttttcaatggtgtctccctcccattgtgcagaagagcttttgttggcttctctcccgagcttgtgcctgattctgtggcccaaaacaatcattgttaacatcttcatgtgtttcattctgatctttcattcatatatatgatgcctagctaatttcattttaaaataaatgggaatctgttgtattctgattttttattagcaacactagattatgaggggttatctcctgttattaaaaagtcagaaaacact

SEQ ID NO: 14180 - DNA, 1532 bp, Homo sapiens
atatctgccacataaaagaagtccaggaaaataacacgtaataagactgttcactctctaagtaccctaaaggtatttggtgtattaaacattgggtttgccatttttctcttttttcttcctctgacttcgaaaattgttggtatacatttcaaccaaaatgacctcatttgaaatgcccaggaagtatttgttttgccattcttactagatcagatcctgtatgactttaaaatacattttaaaatatattttgcatctcagcagaaggttgagtgctgcaggaagagctgcttctgcagggagttttctggaatggcgtggcacatattgaagcatttctcagtgtcccgttcacggaagcgcaggcagctcccacgacacacggagagactgactgatacgagatttggaaagctatgtagacatctttggagctcttactgtcctaaactgtacagctgtgcttaaaaccctcatttcatataaatggccttaagttttctaattcaagcgggtttttggaaaaatttatggtctccattaaaatacatattacaactggggtagattatttgtggtccaggtgtctgtgatttaactttgcgttttgctatctgatttttatttttcacagggctaagcatgagctttcattctcactcactcttaatttgtcgtgcgtcactacacatgcacgtgttgcagtccctgaggccctgtgtgttatctgtgatggagtgtgaatgtgtaacgggcactgtgttacactctgaggtgttggcggggcggtcgcagacttcagggtcccctaacggaaaggccaggctccgcgtggacggccaactccctgcccgctccttcagcaggtgactgtctctgccacttcttacctgctgaaggatcttgctcagtagctggaacaatgctgctgtcacacagtctcttctctgaaacttcaggatgctccttggtcaccaggcaatgggagctgtagaccagccgcatgcacttgccccacattcactgctgactggcttcactggaataggttcaggtcaccgggacttctctcagagtcagcggcccacccaactccctcataccgtcgcatctgaaaattttcagagaggaattctctttgtagtcggcttgtcagggttttcaagtttttctatggttatttttaaatctctttttttaaatgctaaaattaatgtcctcattaatgcaagtaattttagagcacagtgtagccatgtacagtttccattatttaaaataaataaatgtgttggttcatttggtgtatggggggacatcatggtaactggaaatgaaagtttaatctttcacaaatgtgcttgataaagctgttaagaattgtctttcctaagtatgttaactgttgtatctaactcaactgtgagctaagtttaaaaactgcaatcatgaatgtttgtgatattttaaatatctactacagcacattcagccaataaagaatctgcctttaatgtaagttgtaattt

SEQ ID NO: 14181 - DNA, 168 bp, Homo sapiens
aaattcagccagcttagattttttttttaaggttttgatcttttcaaaactaaaacagaccctgagttaattgggttgaaaatttggaccttcactgacttatgcagggcgtatattttgttgagcccttcctcctttgcaaaatttatattaaagcattggtaaaac

SEQ ID NO: 14182 - DNA, 362 bp, Homo sapiens
gcagcgcctcggagcccggcccgccctccggctacaatccccgcagagtctccggtgcagacgcgctgcggggatggggagcggcgtgccaatctgcgggtcccctgcggcccctgctgccgctgcgctgtcccggccgcaagagcggggccgccccgccgaggtttgtagcagccgggatgtgaccctccagggtttgggtcgctttgcgtttgtcgaagcctcctctgaatggctttgtgaaatcaagatgttttaatcacattcactttacttgaaattatgttgttacacaacaaattgtggggccttcaaattgtttttctcttttcatattaaaaatggtctttctgtgaactagc

SEQ ID NO: 14183 - DNA, 701 bp, Homo sapiens
cgtctctccctgtaccaggctcaaaaggaatttcatcctttctttccattcactgcaatgagctctcacactcatttgaaatgtgcggcctgatgacccacacacctctcaggggagccatggccccacggctgtctccccctgaagatgtcgtccctgtctgagcccctcctcattacaggagagaacgagcacctgccagcaccggcagcccctcgatcctaacctcagatggcaccctttgggtgcggagtgggaaaggaagaagactcagctggtgaaggctcagtacttttccttttccgcaatcactaagtaattttctcatccttgaaagcaattttctgctgaaattcagaaagaacttattttgaagttacgccagtaaaagctctggaaactgtgatgggagcttgtgctggaagccgaggacagagctccatgctgattctccattcctcttatttatttgcatgatctgagctaatttctcagctgtaatctacaccacccaccacctagaaacttcccagaaacgtccagcaggggaggggtgggaacgagaaagaaagcacccaacgctctggcagggtctgcgcagccgccagactctgtttctagacggtcacggccgacttagtaattcacttagaagatctcctgaaataagcacaaaatgttggcagcaaatggtcaaaggg

SEQ ID NO: 14184 - DNA, 4263 bp, Homo sapiens
gaaaactgctgtggttgctgctgcttcgagaaaattttttgaaaaatcagcagttctgatgccttgacccctgtgatgacctggtagtcttagcagggggagccctcgaccctgaatgtgaacttgaactggagtgcctctgctgcgctcagaggaacacccagcgctgcggtctggtctcagggcgcaaacacatccctgcacccggtggtggtgatgttgggaagatgtttccctgccatcttgagattttttacttttttaaaaaaattttttgatcttagtcactggggcagggggtgcattatgtctgccatttctcaaatgactacagctgtgacacttaagattgattggagattttaaaactggaggatgcatttagagggagaaagctacttccagccattagactatgcctttggaaggggcaattagatggccagaaagaattctgactcccatgcacccttggagacttagtttcacagactctgtcattttgatttggtctgtggtcacgtgactacaatggataaataatttgtttgctggaacagaagccgtctttgaattctccaacaagaggcatcagccactgtgtctttcatttattctgaattgtccccagcgtgcgttttcttccatgtagctgattctgtttttcacatctatactccctgcacccttctgactgacagttcatccccacaaaacacattggttttgagaggtgatgcaaaaagtatctgtttatggttggactttgaaattctgacctttgaaataatgtcaacagtcacaacaggtttcctcaagccccatttgtcaactaaaagagacggatctgcacctcctggagcaagatagcactgagctttcaacattgaagtgacttgggaaataacattcaagcttctgggtaaacacatacaaacagtggcaaagaccaagtacagtctctcgcctgtgctgtctcatgggactcaatggtggtgaagaaatctcaatcggacaccagaggtgggggcaactctgcaagctcacctgctggacgtgagaatgttggaacgttccagttggaaggttcctatgcctagcctgtgtgccatttcatggcagatatgtaagaaaggaaatggccctactgtagacagcttatggggcccagaaaggcactgggctttaaagagcgaaatgagtgtgtcatttccacatgaaggagaggcaaggaaaagccccacaaaattcctgttacccgctgaactccaagctcaccaaccagattcatgagctttctcacattttccatttccaaataactgttgtgttgaatcagctgtgttaatgcctttattctttgttttttttttttagacggagtctcgctctgtcacgaggctggagtgcagtggccccatctcggctcactgcaacctccgcctcccaggttcaagcgattctcctgcagcctcccgagtagctgggattacaggcgcacgccaccacgcacggctgatttttgcatttttagtagagatggggtttctccatgttggccagaatggtctcaattactgttgtcgcaatagcaatgaaaggcataagaattacttggtggcctcatgagggatggcagtttcactttgcatcagctttcccccattatctctcagatccacttaaggaatccttacagcatgccgtgaatgtgtgcaacatccttattctcatctttaaggtaaggaggaagtagagatagaaggaaatacgtgatttggtgaaggccacatgcgaattttgtggtcgtgttagttataaaactgactcctttccagcctttgctcttacattatgatgcgtttctttttctcctttggccttgcatttatccgaggttggtttcttatgttcctgtgatgtgactatgcttaagtgtttaatttagtttgcttaaaacacacacaccacacacacacacacacacaaaaccctgtgactggagtgttatattactatgctatctttagctgatgatattcattgagcctggaaaaatacaagccagtgcatgcattaatacttagttagaccgcagagagctggcattcactcaaatgctaaacaggacacaggggtctgatttgaagcccctcgtggcagggcgttttctgtcctgtggtgtgcattctctaccaaatcaagcaggagatcttttgcacgacgtgcaatttgcatccaccttcccttctgactcaggttggcagataaactgtccccagaccctgccacacatggaagagacagctcaggccaaatacaggcatgatttctttgccaagttaatgcactgatgaccctgcagtgagtgggtgtgatttttgttttgttttgaggtttagaaaggagactgtactttgaaaatggatcttgtttgattctgtagttaaatttccacatttggaatgggaaggcatctccatgccagcagggtgccttttatatgagtgctgagggtagtttgcattgcagagttcatgattacagtctagagttacttgaaatgggagattatcagtctagtgttcatcccgcccctgctccatgtccttgtgtggctgctccagcgagagctggtaactaggtagactgctgctctaatggggaaagggggctttgcaaagccgaggaatcaagccagatgcgagcatggactcagaaaagctgagtctggctagaccagggctatggagatcaatttttccaacaggtcattaggatttgggaggctgtatttctcctccaccctcttaatggatggtatggctttgctcactcactaggcagttcccactttctttagcaaatggaggaaattaagcaccgatgtagcacttcccactgcctggagagaaataaacctcgcaagttattaaggagaaggcatgcctcattggtaatttggaagacaccaacacttacccagaatctgttgctatttaaaaatcagggagaggagggcacatgtccccatttgctacattacaaactttggacgagactctcatctgaactaacttggggaaacaatttctaggttgaagctggtaacactcatgtctgttgagtgccataagtttgttttcagttatttcctctaacttgatattaatttgctttctttcctcaaaaatgtaagtaggcatgttgccattgttgtggcttgctttgatgtatgtttggaaagatgtgtgaatacttaatttttatccattttatggaaattagcttagcaatttttttttctcttttaagaatcaaaatatggatttgatactaggaacagaatctgctctttatttcattccttttttgtctcttctgcttcctctgcccctcccccagccacgcagcacgggtgccagtgtgcatgcgtgtgctgggggccaaatgacagaaccccggttgaaagtccgcttgtaaaagcacaagtgagaggcagcatcaggcccctggagggctgtggtcctcggactcggttctttcctgtcccctggccgtcctgtcatccctgtgtgctgcagcatcaccacggcctacttcccaatatccacaaagcttcgcctttgcttttgcactctcttttacatttttttacttctttcctttttcttaagttcggatccaagtttgtcttcttatccatcaccatgctccctgaaagcctttttgagattaagaaattttcttaccaggaggcaactttccgtctgtcctaaagggaagtgggtgctggatttattagatattgggttcctggattaagatgacttcctcacatagcttggagtctgcagtttctcagttagaagtgttctatatttctttttgctccattttagtgcgctgtgctttgtataagtggtctttctatgggcagtttcaccttccatgaaggcttataactcaaccactactacccattcagaagagcagaaagcatctgctgtgtgagcgttcatatgttacctaatgtgtattttgctgtcgtctcagctgatagatgtcagtgagtctttctgactaggtttattggtgttgataagaaattaaaaaaaggattcataacgtggtgattgtgtctatcatgtatattttaaatttctgaacgtactttcatttagctgtttttctttgctttctaaagatgtataacaatcatgtatatgtattatattgaagaataaacatggaccttattta

SEQ ID NO: 14185 - DNA, 106 bp, Homo sapiens
aagaaagagactgtagcaatacaaaaatcaagcttagtgctttattacctgagtttttaatagagccaatatgtcttatatctttaccaataaaaccactgttcag

SEQ ID NO: 14186 - DNA, 2891 bp, Homo sapiens
agggtgcacttaccgtgcactcggccatttccctcttcctgtgtccccagatccccactacagctccaagaggatgggcctagaaagccaagtgcaaagatgagggcagattctttacctgtctgccctcatgatttgccagcatgaattcatgatgctccacactcgcttatgctacttaatcagaatcttgagaaaatagaccataatgattccctgttgtattaaaattgcagtccaaatcccataggatggcaagcaaagttcttctagaattccacatgcaattcactctggcgaccctgtgctttcctgacactgcgaatacattccttaacccgctgcctcagtggtaataaatggtgctagatattgctactattttatagatttcctggtgcttagccttataaaaaaggttgtaaaatgtacatttatattttatcttttttttttttttttttctgagacgcagtctggctctctgtcgcccaggctggagtgcagtggctcgatctcggctcactgcaagctccgcctcccgggttcacgccattctcctgcctcagcctcccgagtagctgggactacaggcgcccgccaccacgcccggctaattttttgtatttttagtagagacggggtttcaccgtgttagccaggatggtgtcgatctcctgacctcgtgatccacccgcctcggcctcccaaagtgctgggattacaggcttgagccaccgcgcccggctatattttatcttttatctttttctttgacatttaccaatcaccaagcatgcaccaaacactgctttaggcactggggacacaaaggggacagagccatcctcctttgacacctggtcttcagttctgtgcccaacgtatatagttttgacaatgaccaggttggactgtttaatgtctttcaacttaccacgtaatcctcttgtagggatcacatctttctttatgatattgtatttctctacctctaacagtaaaaattccattcaacccttaaagctcacttcaaattcttctttgagaagtttttcctttctccgcaaccagatgtacatatttgaactctctttgtacttggagggcacttctttcgtggtagttcttttatttttattaatctctgtatccttagatagtcctccaacaaccaaaggttgggactctgtcttacatatctgggtgcccctcatagtgcagtaataagtaagttgattatatacgagctatgtaacttatattttttaatggttggatatcactgagtttttttttttaagaatttttttattgaggtaaacttcacataacataaaattaactattttaaagtgagaagttcagtgccacttagtattgttaacaatgttgcataaccaccacctttatttaaagttccaaaaaaaatgttctcctctaaaaggaaaccccatcccattaagcagatactctccattccttccttcctccagcccccagcaaccaccaatctgctttctgtctctatggatttatctattcttgctattttatataaattgaattgtatgagaccttttgtgtctggcttctttcacttagtacaagtttttgagatttatttacatagtagcatgtatcaacacttcatttttatggccaaataaaattgtattatgtgtttatagcacaatttatttatccactcattcattgatggactttgggttgtttctgacttttggctattgggaatagtgctgctatgaatgtttgtgtacctgtatttgtttgaatgcctattttgcattctcttgggtatatatctaggagtggaactgctgggtcatatgttaattctatgtttagctttttgaggaacagacaaactgttttccacagcagttgaaccattccacattcccaccagcaatgtatgagaattccaatttctgtccacttcctcaccaacacttattattttccttttcctttttttaaaaaaaataagttatggccatcttagtgggtgtgaagtggtatctcattgtgttttttatttgcatttcctatgtaatgagctagaaactaaagtacaaactagatgggacatccagtccctttgatagataatgctgagtaaaaaatgagatgaaagacatttgtttgtttttagaacacgagtgacagtttgttaaaaagctttagaggaggaatgaaaacaaagtgaagtacacttagaaaagggccaagtggacatcttggatgtcaagtgcctagttcagtatcttttttttttttttttttttttttgagacagtgcctcactctgtcacccaggctggagtgtagtggcatgatctgggctcactgcaacctcctcctcctggattcaagcaattctcttgcttcagcctcccaagtagctgagactacaagcacccaccatcacacccagctaattttgtatttttcagtagagacggggtttcgccacattggccgtgttggtcttgaactcctggcctcaagcgatccgcctacctcagcctcccaaagtgctaggattacaggcataagccactgagcccagccctagttcagtatcttttatgtaaattacaaacatctgcaacattatgtatcatatgcagatacttattgcatttcttttattagtggtgaaagtgttctatgcatttattggctcttgaatttcctcatctatgaattgtcattcatacacctacttttctgcttcgtttttacatatgtctttgcctattaaagatattatccctctgttttatattttctctcattcttgtattgccttttaaattttgttatgatgtttcattaataaacagtgttttgttttcctctat

SEQ ID NO: 14187 - DNA, 139 bp, Homo sapiens
ggacagggcagtcttggtgtgcagcccctctcctctctgtcccctgacactccacagtgtgcctgcaacccaagtggccttatccgtgcagtggtggcagttcagaaataaagggcccatttgtgggatgccgcattca

SEQ ID NO: 14188 - DNA, 193 bp, Homo sapiens
aaacttctcagatcaatcgtgcatccttagtgaacttctgttgtcctcaagcatggtctttctacttgtaaactatggtgctcagttttgcctctgttagaaattcacactgttgatgtaatgatgtggaactcctctaaaaattacagtattgtctgtgaaggtatctatactaataaaaaagcatgtgtag

SEQ ID NO: 14189 - DNA, 470 bp, Homo sapiens
atgcccccgcgagacgggttagggaaagcggaggaggaaagcgagggggtggggggcttcccgggacgataacctggcagtggaaggaaagaagcatggtctactttaggtgtgcgctgggtctctggtgctcttcactgttgcctgtcactttttttttccttttttgtaatattgatgacatcaatgtaacatttgagatatttctgaattactgttgtaatggctaaaatcacataaacgtttgtgtcggaatggtgtcctctctttctcttcctttttctctttattaacgatttaaatgtaactttctgaacacattgcattgaattcttcctttaacaaaaagcaaaggcgtaggtaaaagctcaaatgaatttattctttcggtatggtaaaattgaaccaatcacagttaagatgagagatcaacctgagttttaaaatacctttaataaatattagttgaa

SEQ ID NO: 14190 - DNA, 3597 bp, Homo sapiens
cccggcctgcggaacccggggctccagggtctggggcagcttgggcacaggtttacagaccagggaccgaacacgcagccaggggtgggaaagctgcctcagccaagctgagcctctcaactggtgtggggaaatcctgtctttccaaaagtccaaggagcgcgggtcggaggagacaaactctttggaaataaccctttcaagactttcttttctgccgttaaatgtgtgtatttattttggtcatttttacgagaagcactttattccctctccctctcactgatcacaaatggaatcacctccctgggcagcgagacgcagttgctctgggaagatgccacagtgaccagggccatggccggtccctctggggagatgggacacggctcctggcagcacccaggagccccccaggctgcctgcctgcgtgcagaggcaggagaggaccgtggagcgtttccgggactgcattttagacggagtgaaatgtacatgaatttggcttttgctagagtctgtgtatggttttttaaggtcctttttccctttctgtttgtaaggtaagagcttctgttcgtgtgcagggaaagcagctcacagacgccgttaaaaccagcttcatctttccttcaggatcatccttttgtacttgatgctggaagctcttggagaaaaagcttaaacatttcaccagaaatcttaattgagcagcagtcatatcgccacagctttgtgagtacacagctaacagatgcgtcgagacctgagatgtgctcgtttttattcctcctctcccagattggctccagcagaaaagtccctcgtgcacaggcagctcttgtgccggcactacttgaaaacatggctactttctaagctacaaaccattagaaaataactcaaaaagatggcagaggcaaatccacagaaggggggctgccctccacacacacacgcccgtcacccacaccttgagcacacaccatgaagatcaccagcttggatggccgtcacctcagacatcactccagggagcacccgcaggagctgggccccctcacgcctgccttcctgggccagcttcctgcttgcagtcactcgcatagcacagaggtggggcttcgggcagggagcggagattcctcataggtgagtccaaatgacctccagcctctcgaaggcatcaagacaaattgaaagaaagcaataactcaccaaagctcaacgctgcccctgcctcgacctccatgggtctcttcgtgttcctcgtttcaccccagaaagtggaggtttcctcttggcattttcggaggaaacttgtaggacacccaaggcgactaagagacagcctccttggcaagggcaggcaccactttgtagcaacttgggcaccagcttttctggacagcctggcttcttactggcattgtccaactcatcccttctcgaagcatgtctttgccatgggctgtgtccttccagggaaattgtggtctcgggcctgggtgagacaatgaagtgacttccaaccgacagttgctagaattcacagggcagaaaaggggttgaccttctccccttctggctttccacccggcctgctgcttgctgtcgccactcatgtctcctccacatgcggtccacacatcagtaagggcctggagatgtgtaaagacacagcaaggggcaagcagactcttggccacgtgtttccagtggctggaccacgccgacacctgggatcttgagatacccaggaagggaggctgtctggccagcctctccctgcctccacttgctccacgtccagctcctcaccttccctcttttttaaagtcacatttccatgtttcaacattagtttgcattcacctttacaaaggcctttctttagatctgtgcagcctttgcgtgccaaacttgtgaaattccttttaccttttttggagtacttgctataaagccacctgtcaacaaacccccattatgtacagaataggacctatccagtagccaggccagtaggcagttggggaaggtgggaaggatccagcgaggcccctgagcctgcacctggacaggtgtacgtctgcacccatcaccctcagcaccaggccaccctgcagtccacttactgtactgtgttgtggaaggatatgctaagtgatgaaagttgcgagcagtctcactggtcgtgtaaacttttttttttttttggaaattgaagctgtagagtgctgcccgaaatctctaggaagttggtggcaagggacagcactcacactcttctggtcatgatctctgatctccacctcaaatgacaataaaaaactggtccaacgaagacactgctcagcacttcagccatcaggactaatccatcgatgactggaaaagaggctagctttgaggaaaacagcctgggctcttgggagcagagtccagtgggtgtgaggctgacttgccgacggtcggcaggtaatggctctcagccggcgaggcggtcccacagctctcctcccagggcagcctgaggaggaggaggccgggtgcctgtttggtggcagcttcagcctagggatacctgaagctgttgagcaacacctttatgaaatgttgccagagcagcaacacttccctgtgggcacagccccgggaaatccggtaccaagtgagcaaggtggcaggacccacccaagcctgatacgcatctgggcccgccgggctcagcaggggaggctgctacggctgcccacttcccagcaccgtctgtcacgcttgaacccctctgtgctgttcccttcctggctaatagggagacccttcgcaggcacccactgtttcaacttgaccctcccaccccctgctactctcctccacacacccctccgttccgctagcctaccctgtcagcctttcaataaaagttatgcacaaatgtgaacacctgagatggagctgaacatttcttcactttgttctttttctgaagtcaaactcttatcaaatgccctaaaattattaccacccaagagaaacaggaaaaaggttacatgtttttgtttactgagagtaagatcacctgcatctggaagacgggctggtaaattggtttggctacagaacagaaagaaaacaaaaacaaacctcgtaagggaagtatcacactcagacaccaccgcttcctagagccaaatgagcaatcccaaactgcaagtgccataagtgggcctgtgaggtcacaccgcccggcccgaggtatcgcatgtgcgggggaggtccacactacagctgtcctctcgtctagaaggcaccacctcgctttcatgtcccgtgtgttttggaaaagcagtatggtgtgtcatgtctagcggcgaacacttccctccctgtccttgaggttgtaatataaaaactgtgtttctgtacgtgtgggtgggaattctctgacggtgctcgttcatagcacaagcttacgctgagttctgaactgtcgttcacagctgcgtgtctgcatggtgtcgcatctgttgtacctttggggaaaatttgtatgtaaatgtacagaaataaaaacgttgccccattaacaga

SEQ ID NO: 14191 - DNA, 999 bp, Homo sapiens
acctctctatcaggcctcccccgcctcagctgttcactgccagctctgatgctgtccactgtgctggcccccatggtcacagctgctgccccagctctggaactcccagacgtcccaggccccactgacgccaggaggcctgggtgtcctgcaagtggagcagcaggggctcctagtgggccaggctgaccgcagagtctccagcaagctgaggtcacagccggaggccacagggcctgtgttctgagggtcttcactccctgcttggtgcccacagggctgcgcactgccagggcagggacagttcctgtggggctcgctctcactgctactgcttcctgggaggtgcatccctcttggtgaagtggcctagtgccccccagccaccctgactccccaccattccctcccacggcaaacgcacaaaacgtcttgagggagattttgacaagtcacccattccaggtgccacaggcaggggatgtttagtaatccaggatttctctgagaactgggatatgtggcctttttttttttctttttatcttttatctggaaactgggtttgggtcaaccccaggagtatttgcagaaggcccagcacagtggggggtattggctgcagggcagggaaggcattgccgactagataaccgtgtgagcttggactgagcgttggtggttcttcccaaaggaaaggaatttcttcccggcctgccaggtctctgggccttcagcgcgggtcctggtgctgcggccacaccaccctggggtgctcattgacagagctgccataatgaacttgaaaggacgggaatcacgagggaagctggggctcccctgcccacaggagaggatccccgttcttcaagcttctctgctcagtgtctactaacgaccgacatttgctaatgtaaataatagtaaattattgagaattctaattcttttacacagtctgtttttaatctattttaattaaataaaatctatgactct

SEQ ID NO: 14192 - DNA, 328 bp, Homo sapiens
ctcttttctttcatacatctcaatgtgaacacatctactctaagaagcccaactaagatatggttaattattccaagacacaggtactattaacagtcccccaaaatcaccaaacagttgcttgatgtgatatggagtagaacttgtgaaaagcactgctgagatgtctatatataaacccacaggcttctatactgacatatttcacaatcttttgcatgttgtgtttcaagtaaatggttcacttggtagactattctattcaaaaggctactcttttttcagtgattgttttccagtataattccatcaataaatggtataattg

SEQ ID NO: 14193 - DNA, 180 bp, Homo sapiens
tgaccactacagcagagtaaagcatgtccaaggaaggatgtgctgttacctctgatttccagtactggaactaaataagcttcattgtgccttttgtagtgctagaatatcaattacaatgatgatatttcactacagctctgatgaataaaaagttttgtaaaacaagcttaagaattc

SEQ ID NO: 14194 - DNA, 31 bp, Homo sapiens
aaaataaaaattaaaaatcgtgtttacttac

SEQ ID NO: 14195 - DNA, 1003 bp, Homo sapiens
caagccggggaccagccaccagtggcggccagggaccaccttcagcatccactctctgtttgagatgggggctcccaaaaccagcttacaatagccttttgcgctgcctgtcctgtgggagctgataaaccaagtcacatttgcattctgttgcaggcttagtgaaaaaggactgctgtctttccttggttcaagtgttagaatggagagctggagttcgttcagaatagtgctgtgtgttaccacgtctcccctgcaccccattcctaccttgtagctcatgaccattgtgtatagcatttctacactttgtttcttggtccttggcaataaaaagaatgatctccctgagcctttgaccccagataaacccctcccaattaatgcattttcatttcctactgatacaaggcctggagagggctgttgggggccctcagggagggttcaactctgagacgagaactgccttggtgaaggcaagttcaagcaccacttgagactgggggcagcatggagtagggcagggctacggggatacacggtgcaccctgcaacttatacctgagcccagtacaacaaaggtgacgggtgtgtaggtacacacccagagatggagcactgcagatcagcaacctcagccccacctgggaatttgctggaaatgcaggctcaagcccctccccacacctggtgaatgagagagccccagcctgacccaagcccagggcgactcccataccctgaagcctggggcatgctgggcagcaccggtgcccaaatctggctggtggacagaagcacctggagagttggagagctttttaaaaagacatctctcagcacttccctctctgcagattctgactcagtaagtgaggggtgaggcacagtcatttttctctattctgaagctctcccactgttttcaatgtttaaccaactggggacccctgctctttaagtatattacaggtaataaagatattgtttgtatgctttt

SEQ ID NO: 14196 - DNA, 974 bp, Homo sapiens
gcgtggggccagctccccccgcgcgcccacccacactcactccatgctcccggaaatcgagaggaagatccattagttctttggggacgttgtgattctctgtgatgctgaaaacactcatataggattgtgggaaatcctgattctcttttttatttcgtttgatttcttgtgttttatttgccaaatgttaccaatcagtgagcaagcaagcacagccaaaatcggacctcagctttagtccgtcttcacacacaaataagaaaacggcaaacccaccccattttttaattttattattattaattttttttgttggcaaaagaatctcaggaacggccctgggccacctactatattaatcatgctagtaacatgaaaaatgatgggctcctcctaataggaaggcgaggagaggagaaggccaggggaatgaattcaagagagatgtccacggacgaaacatacggtgaataattcacgctcacgtcgttcttccacagtatcttgttttgatcatttccactgcacatttctcctcaagaaaagcgaaaggacagactgttggctttgtgtttggaggataggagggagagagggaaggggctgaggaaatctctggggtaagagtaaaggcttccagaagacatgctgctatggtcactgaggggttagctttatctgctgttgttgatgcatccgtccaagttcactgcctttattttccctcctccctcttgttttagctgttacacacacagtaatacctgaatatccaacggtatagatcacaagggggggatgttaaatgttaatctaaaatatagctaaaaaaagattttgacataaaagagccttgattttaaaaaaaaaagagagagagatgtaatttaaaaagtttattataaattaaattcagcaaaaaaagatttgctacaaagtatagagaagtataaaataaaagttattgtttg

SEQ ID NO: 14197 - DNA, 1541 bp, Homo sapiens
atgcacaggaagctgagatgaaccctggcatttggcctcttgtagtcttggctaaggaaattctaacgcaaaaatagctcttgctttgacttaggtgtgaagacccagacaggactgcagagggctccagagtggagatcccacatatttcaaaaacatgcttttccaaacccaggctattcggcaaggaagttagtttttaatctctccaccttccaaagagtgctaagcattagctttaattaagctctcatagctcataagagtaacagtcatcatttatcatcacaaatggctacatctccaaatatcagtgggctctcttaccagggagatttgctcaatacctggcctcatttaaaacaagacttcagattccccactcagccttttgggaataatagcacatgatttgggctctagaattccagtcccctttctcggggtcaggttctaccctccatgtgagaatatttttcccaggactagagcacaacataatttttatttttggcaaagccagaaaaagatctttcattttgcacctgcagccaagcaaatgcctgccaaattttagatttaccttgttagaagaggtggccccatattaacaaattgcatttgtgggaaacttaaccacctacaaggagataagaaagcaggtgcaacactcaagtctattgaataatgtagttttgtgatgcattttatagaatgtgtcacactgtggcctgatcagcaggagccaatatcccttactttaaccctttctgggatgcaatactaggaagtaaagtgaagaatttatctctttagttagtgattatatttcacccatctctcaggaatcatctcctttgcagaatgatgcaggttcaggtcccctttcagagatataataagcccaacaagttgaagaagctggcggatctagtgaccagatatatagaaggactgcagccactgattctctcttgtccttcacatcacccatgttgagacctcagcttggcactcaggtgctgaagggtaatatggactcagccttgcaaatagccagtgctagttctgacccaaccacagaggatgctgacatcatttgtattatgttccaaggctactacagagaaggctgcctgctatgtatttgcaaggctgatttatggtcagaatttccctctgatatgtctagggtgtgatttaggtcagtagactgtgattcttagcaaaaaatgaacagtgataagtatactgggggcaaaatcagaatggaatgctctggtctatataaccacatttctaagcctttgagactgttcctgagccttcagcactaacctatgagggtgagctggtcccctctatatatacatcatacttaactttactaagtaatctcacagcatttgccaagtctcccaatatccaattttaaaatgaaatgcattttgctagacagttaaactggcttaacttagtatattattattaattacaatgtaatagaagcttaaaataaagttaaactgattatatttgca

SEQ ID NO: 14198 - DNA, 2293 bp, Homo sapiens
atgttcctttgtgcaacaattcggtctttacttaacctgccctaatatttttcggcctgatgggaattagtgcagagaagccatgtcaccatagaaggcaactcctacttgtgtgtggactgagcaatcagagtctgtggcgataatattgctgaaaatgcactgcattcatttttctaaagtaacaaatttggtttttttttaaaccattaaaatctatgtgtgtgcgtgtgtatgtatgtgagcagttggtcttaccagaatcattgttgaactacctgaaacaagtctttagaatactaaatataatgctgttgtctcttcctttttgacattttctgattttttcccccaaaactcagttaatatttacccactatgattattgatgtcctgccttgaacagttttaaagaaaacaatttttggaatagctcaaatttcaattgatggcacaaatcagcattttgttgttgttactgtattacaattagtattctaaaggcagaagcagaagtagctgctttttagcaatagaattgtttcagtattttgctgctgtttaatgcgcatcttcagaaaacttcccagtggcttcaaggaatttggggatctctctggcaacaaattgtgaaacatgaaatttctgctgactttaatatatgaaacctaatcctacccccttttttaacaaaaagaaactagtacatttgtgaaaattgtgttgtgttgtccattgttgctctagttctgacccagaggtagctctggagtgattttagacctactcactcagttgtgtgtaggtttttttgttttgttttgagagagaatttttctctccttaatagaagcatcctttttaaagagaagttgccttggtccacacactaagcagaaaaccaagttatcaggacagagatatttcccagttactcctaatcaatgaagaaagtgagttggatatttttaaagcagttaactaattttttcttacctaatcttttgggagttttgcttgttgatataacctttttagttaacctgaaagattccaaaaattgttcttaagtgcttgagactggaaccaaaattaaattgtacttcataaaatcctcttatagagttactcttgccctagattgtaaattaagtttggcattattgtcagactggatggagggtgaagtaaaatagtatgaacaattaagaggctctccccctcttgtctttaagccatattctcctacatgtattttataagaaaatgttaagtcaaattttagtggctctttaattcctgacctcttcattctccttttcagtataacctcccctatgctcatgcccacacagacaaaaaaacaaaacgaaatacacacagaaaaaagtctttccaaactgtttaagtatttaaacatctgagccaaagcagatagaagttattgtataattgttaatcactttgcaaataggggctatcaaattacctatattggcattgctggattataaactctatatctgtaatataaagtgtttgagtttttaattgggctgttatgatcagtagttgattttgagaaagctctatgagctctaagtaactgcatggttttttgtttaatgtaatataggagacccttcacattcccaaggaatatattccaaaacatttttgtgaatatctaagtttgtgaaactactagggcatgatacagtaaggtgtaattacagaatttacgaaatgtaaatggcctctacagagttttatggaatacctggtactaacgtaggcagctgcaaaaccacactgagttacagctgtcagccctcctcattcctaaataacttgccttacatatcagccctcccacttctgaagttcaaattagtgcctcggaaatgtagaatttattatttgtcatttttttttttttagcatagattgagaacagttgaactcttaaatcctcagatgccaggggtctgctctagcatcagtaagtatttagcagaaactaactccgtaatgaatggaattcaattccacacatggtttgttcaagcacacttaataagtagcctattttttaaatgtctttttaaaatgtaaatatttggatgaagtttttctttgttttgatatattcatttgctacaccaactatgttttcagaattcatcttttgaacaacttggtttcagaatatgtaaaatgactttaaggatcttgtgtatcaaacctatccccggatgtgtgagaataatgtgttcataaagcatggatctcg

SEQ ID NO: 14199 - DNA, 202 bp, Homo sapiens
acaagcctgaagattaaacagtaatcatttttgtcaaccactccaggaagagtcattactacatatgctagccaaatcaatccatgcagatgatatattaaaatctgtataaagggtaaagtcttacattccaaagatgtgattacttttcttctaatttcttcctgtgaataatcaaatatattctatttaacataaacag

SEQ ID NO: 14200 - DNA, 1665 bp, Homo sapiens
gaacttgaaccacaacaatcacaaactaatgagaagatgttcacctctctcctgaaaactattcccaccagaccgtttagcctctgcttcaagcttagcaatatattcagtggcactcttatatcagaagaaagaagtttctactggcattctgattggatatttaaagaagggtgccacatttttccagctttaagtgcctatatatgattatttgaatgaagaggagtaggaaggaaaatggaatcaatatactctttgttagtcagaattgatcatcttttccattgattagctcagagaactgtaggtatagacttcttagaaagataatttcattcatttctatacagggttaacaatagtttattattgtggcttaatgggaaggtatagaagctacctgtcatagcctccttggctgttggaaggatgtataaagtgttactgcatgagtaatgtagacaaaaaaaaaagccagctgtccttggagcagagatcacatttcagagaggtgagagtgaacacattgtctctgctgtggcaaagatggccacgctggtgtttgagctgcctcttgggaagcgttgcatattttacagtgcagcataatgccatgggcttccgtggatgggaagacacatgttaagttttgtggccttccagcacttactattttcagctttttaaagcatgcttagaaggaaaagcttaccaaaaatatattttgacatttagtttttccaagagctataatcttgcccatagtatttacctcatttttgtgtctgttttgctgtgggtaagctttataagataaataatgtctatacatgtttcgactgtttaatgagtaatcaacaaaatctgccagagagtccctctggaaccatataaagttcctggctttgaatgaaccagaagtgtttgcccacacagcaaatggtccatgttaaatgtaaatcctttttagtgttaatgtctgttctcataagcaggtatattatgatgaaacatgtaccagttctgtcatcactgtgatctttaaaaacctgcatttaacagtctaatttgaggctgggtgcagtggctcacacctgtaatctcaacactttgggaggccgaggcaggcggatcatttgaagtcaggagttcaagcctagcctggccaacatggtgaaaccccgtctctactaaaaatacaaaaattagcccggcatgttggtgcacgcttgtaatcccagctactcaggagtctgaggcacgagaatcacctgaactcaggaggcggaggttgcggtgagctgagatggcaccactgcactccagcttgggtgacagagtgagactccatctcaacaaaaaaaaaatctaactgaagaactaagttgattttttatttgccataaaccaagcaaaagtaaatgcaataatttcgagatttatggtaaacaaatttgaggtatggataaatctttcacatattttttattgctctttagtaaagaaaggcacaagaaagaaaatatccagctctcttgtgttatctcagtgtggcgactgcagaaaattgacaatgcctgcctgtgtaaatgtatggcttactgtcaaagcttcattcttggctgcatgttgaaaatgtgattaaagttaatagaggagatg

SEQ ID NO: 14201 - DNA, 1623 bp, Homo sapiens
gaacacagttggaggtcacctctcctgcccagctcccgcaccctgcgtttaggagttcagtcccacagaggccactgggttcccagtggtggctgttcagaaagcagaacatactaagcgtgaggtatcttctttgtgtgtgtgttttccaagccaacacactctacagattctttattaagttaagtttctctaagtaaatgtgtaactcatggtcactgtgtaaacattttcagtggcgatatatcccctttgaccttctcttgatgaaatttacatggtttcctttgagactaaaatagcgttgagggaaatgaaattgctggactatttgtggctcctgagttgagtgattttggtgaaagaaagcacatccaaagcatagtttacctgcccacgagttctggaaaggtggccttgtggcagtattgacgttcctctgatcttaaggtcacagttgactcaatactgtgttggtccgtagcatggagcagattgaaatgcaaaaacccacacctctggaagataccttcacggccgctgctggagcttctgttgctgtgaatacttctctcagtgtgagaggttagccgtgatgaaagcagcgttacttctgaccgtgcctgagtaagagaatgctgatgccataactttatgtgtcgatacttgtcaaatcagttactgttcaggggatccttctgtttctcacggggtgaaacatgtctttagttcctcatgttaacacgaagccagagcccacatgaactgttggatgtcttccttagaaagggtaggcatggaaaattccacgaggctcattctcagtatctcattaactcattgaaagattccagttgtatttgtcacctggggtgacaagaccagacaggctttcccaggcctgggtatccagggaggctctgcagccctgctgaagggccctaactagagttctagagtttctgattctgtttctcagtagtccttttagaggcttgctatacttggtctgcttcaaggaggtcgaccttctaatgtatgaagaatgggatgcatttgatctcaagaccaaagacagatgtcagtgggctgctctggccctggtgtgcacggctgtggcagctgttgatgccagtgtcctctaactcatgctgtccttgtgattaaacacctctatctcccttgggaataagcacatacaggcttaagctctaagatagataggtgtttgtccttttaccatcgagctacttcccataataaccactttgcatccaacactcttcacccacctcccatacgcaaggggatgtggatacttggcccaaagtaactggtggtaggaatcttagaaacaagaccacttatactgtctgtctgaggcagaagataacagcagcatctcgaccagcctctgccttaaaggaaatctttattaatcacgtatggttcacagataattctttttttaaaaaaacccaacctcctagagaagcacaactgtcaagagtcttgtacacacaacttcagctttgcatcacgagtcttgtattccaagaaaatcaaagtggtacaatttgtttgtttacactatgatactttctaaataaactcttttttttt

SEQ ID NO: 14202 - DNA, 484 bp, Homo sapiens
aagctgtccatgccatacagaagatctattaaaaatgttttaaatggaaaatgtactctagaccacaggactaatgtaaattaatatacagtcattcattatttgttgaagttgatagaatttttgaagtgtaaacttgtgtctgaatgttttatttgttctttagctgaagttttgcaatttttatgtcaaaattcaattgctattaaacaagttgagatccagttataaattaaccttgtttttagtagatgacatttatttcaataaaagttgcaaatcgggcttaatcttaaaattggtggtcatttcaatggttgacatatttggctatttattaacctctctttcatattctaaaattcattttccccttatggatatttatggtagtttgttaagaactgataaattgtgccaaggaagccaaaagggaagacagatggatttgttttaaaatatttatgtgagctagtaaatgtgg

SEQ ID NO: 14203 - DNA, 475 bp, Homo sapiens
acagtgattgtcctatttaaaatagaattttaagggaacaatcatcaattaattaactttccaaagggactgataaaaaccaaaggatctggaggcattgctatcccatttgtggacagatttcatatgaagttgttttgcggtgtcagccttttcttcagagcatttgtttgactgacttccaaagcaatcaagagagccacgtctagcagactttacaataaaatgtcaatatgaaggactgtaattcctagcagtttattgagaatttcactggaaatggaccatgtgttgcaagactaattggctataattatatcctatcaaagaaatcgatacgtaatagcagattgttttatattcattccattttgatggtgttatttaaattgattctctgttataagagtaaactgatgagttgaagtctggagagaataacattcattataaataaaattattctgtgatcttt

SEQ ID NO: 14204 - DNA, 172 bp, Homo sapiens
aacccattctcaggtcagtgctcgcaatgttcttatgttcactgtgtcgggaagttccatgaacacacaaggcaacatcataagtaggaaaaaccttcagatttggtgttagaactcagagctgtcatccttgattcagatatttatgtgaacttaaacctctttgtaaaat

SEQ ID NO: 14205 - DNA, 1733 bp, Homo sapiens
ggctctcctcccgccccgcccctcccacgcctcaccagccccccgcgcgcccaccctccggcgggtgacagctccgggatcagcaacccttcctgctgctgctactgctgctgctgctgccgccgccgccgccgccgctgcccttgggtccccccgagtctccgggactgccctctcgactgtcagtggggcagcctctccgactctgcacccgcctcgacctccccacccgctcccacacccctgtgccctcatgtggagcctaagagaacagaacaggccgtgaagccagcagagaaaagttctgccaagtttgtgaacccttttttttttaaacaaaacaacaaatcaacaacagcaacaacaacaacaaaaattaaaaacttttttctaaaaaaaaagtgaaaataaaaaaaattatatgcgcttcatgggactgagtcaccaccttcccttacatacttcagttcagattgtagccatacttaaaaaaaaaaaaaaagccaaaagatgatgacaacatttttatcagtattgtgaataaacttgaacacaaatacacgaagttccatgtcatgtcttcagttgtagaagtttttcctctttaaggtaaagcgaccaacttgaactttctctggcaacacgattcgcagttatataagggaatcagtgttcacgtctctgtatatatttatttatgtgtaatttaatgggaattgtaaatatggtgagtctgttttaagcctttttttttttatttatctgatcttgtttacctcttgtttagtgggttttgaatcttccctattagttcttcatgtggttcatggtactgatttagaaatccagtgtttgggggatttttttctctgggattcatgaatttagccctgttgtagcatgttaaaggtgacaaacagctggacaaatttttaaaaagtaaaataaaattttatctataattagtattattacatttagcttttcattgaaccgaaagaaaaaaagtgatattggaccctggaaagattttgaaacttgagtggtttgataacccttctatgtattgtagggagaaaaaaaaaagtttattttattccactgtcctcccttaaaagcatcatttgagcaataaatgaatattgtctttaaaccaagggttagggaattttcctctctctctctctctcctctctctttctgttcaaagaacttcaaacatttgggaccacctggtattctgtattttcactggccatattggaagcagttctagttgcattgtattgagttgtgctggcagtagtttccatgcctgtcaatgtatcatagtcctttgttgcccagataaataaatatttgatacgctttatgtcgatttttttttattcagtggctgtctttacccaggcgtatttttgttcttggcagtattttttattcagtatggttacagtaattgagtttaactctcccttggcaattgctccttgcaataagcagctgaacccattgtttccctcaagtataataaaaacttactttcaacttggagttcagagcagggtatcatttagatattccactgtgtctgtattcagacaaatgacacaataaaacccaatgtattcttttggataaaagattgtttgtactgctaaaggaatgacatactgtcttttccttactagaaacattaattttattattaaaaataaagttttattttattt

SEQ ID NO: 14206 - DNA, 453 bp, Homo sapiens
gcgtacctaacctgcgaatgctgtatagaaggtgctaatgaacatgatttagctttaacactcagttttctaaagggacacgtgggggcagcaaatgtttaggcaaaaacaattccagttctagcctctactgtctacatatgtgtatacatttgggaaacgtttgggaaagggatatttgagagcttctttttcttttttgtggtttagttatttgatgatattgagattgtttctgagccatgtgcttcaacatcggattggggatttcagaaaaagttttagtcactgtgattccatttagcttccaaatgtgtctctgctaagagacttaaaagcactcataaatagcacgtgtgtcttctttgcagtgtttgctaattttgagtcacatctttttagaaaatcatgagatttggtgtcacagagactggaataaatatagtcaaactt

SEQ ID NO: 14207 - DNA, 1727 bp, Homo sapiens
gagtctatggtgtgaaaccctacagcattgctccgtagagtacgtgcaagttccttgaccctgggaaatgtctacaaatgtctatttctactgagttctggaagaaatatgcaaaagtgggtacttggaagggcaaaaatcatcccctattttacttatttccaagaaatgcattttcttagcatcattgcccacagtgttgatatatgggtaggatgttacaaagtattgaataaactatttgccaaagtatgaagtatttgatctacaatttaataaatagtaaatccaataagaacccttaaaaaaaaacaacttccagaaaatgtttagagtgttttagttttcatttgttgtatgtgcccaaatggtttagtagttcttcactttgctgtggttggcttaagaggtttgtcttttgtttttgtacagcagttgggccaacctttgctggctgtcagctgtggttcttatttgactaaggctctgcgctgccattttgtcaatgacagaaagattgcaattatttgtttttctactttgaagctatgggagcgatggtaatttcaatcttgagcaggatatctttttttttttttttgaggcgatgtttcactcttgtgtccaggctggagtgcagtggcactatcttggcttactgcaacctccacctcctgggttcaagtgattctcctgcctcagcctcccgagtagctgggattagaggcgtgtgccaccatgcctggctaatttttgtagtattagtagagacagggtttcaccatgttggtcaggctcaggctggtctcaaactcctgacctcaggtgatccacctgcctcggcctcccaaagtgcagggcttacaggtgtgagccacagtgcccagctttttttttttttttttagaaataaatttatctttaacatagagaatatcaaagttatgccacttgattttagtggacggcttgtgttttgatcttgaccagtacagttcccatgaattcaaggtgacaatcaagcccaatggcttgatgacttcaatagtaaccaagtcaaggttctcttggctggacatcattaagaaagttctggaaactgtgtttgtttgatgctggttcattggacttttcaaattgttttgtttctgtgtccctaccagacacaaagatgaagtgtgccagctggttcccccaagccagctcatgctgctgaccactgactcagctctgaccttcacatttgctctgaagcaagtgcgttcagctgctggggcagtgatatcacatagtacatatattatttccttagtttatttccaaactggtattttaaatagacacttcgaactttgggctactctgtttaaatctgccactttctggactggaccttagtactgtaaattctttttaaagaataataatgttaccaactgctgagatttttatgtattttgtgactttgtaacaactgctattgtaataagtgtcatcttgtgggcattatacaaaggcatattataaaataataatgatatttttgtatagaagagtcaactgttcagatgtaagatgttgaaaaatgttaaaatctaaagagtaatttatcctagtggtaatggttatatgtatttgtacagtttaaattaatgtctcaaagctgtgcagtcttttgttactgggacacttttaaactctgaataggcattaaaaaaaatatggct

SEQ ID NO: 14208 - DNA, 764 bp, Homo sapiens
aagacaatccaggggacataatagcagtgtgcatgcaggcaggaggcagggaaatgtgaaatggcaatgatctcttattgagttgggagattcaccttgtgtgcaaagaaacacagatagtagtaaaaattctgagtaactgagaaaataatcagttggaaatgattagataatatgggaaatttcacacagcattttgaaactggctacaatacatagaagtagtgaggaaagtgtgagtctctcaaatgaacaaataagcaaactgtaggaggttaaatactgacctaagttcacttagcttattagcaggagtagaagtcaaggattctggttcttattctaggacttttcccattagagcaccttagggaatttcacatccctagaggctgccaaaatagcttcaggaagaaatttttacaatcttatcacctgagtcatttcatgaaatttttgtttagcatttagaacctgttaaactagcttcaggaagtaattttgattgttttatctccaacgtgtgtatctacagcttttcaaaaaatctctagcaatggtaaagttcagttgtttttaaaagattcaatattagcttttcataacatgatagtttcctaaccttttcataaccttttcataacatgatagtttccataacagagacagcctaacaatgatgagttgtatttaatggattaccattgtactaaatacattttttttctgattaggtttcagaattataattaaaatgttttgct

SEQ ID NO: 14209 - DNA, 3019 bp, Homo sapiens
aaatgagtaacagaaaaagcacatatactagcctaacagattggcttgttttaaagcaaagactgaattgaaggttacatgttttaggataaactaatttcttttgagttcataaatcatttgtacccagaatgtattaatatattgctattaggttaatctgttaactgaatgctttgatcagcattgaggtgatgctcacctccgaggacctcagaactggtgcagcttctctctccctccctcccacagactgaacctttcgccagaagctgtccttataacgccttatacgcatacacagccaggaaacgtggagcattgtttctcacagagagtctccaaataaaaagggttttgttcagattaaaatgtttacaacaaaatgttaattatattctaaatacagggtatgttctaatctatattaagcaataatgccagtgcataatcattccatttgttcctttagcaatcaaccccagaaaatattaaaatgggatcatacacagaagatagaaaaatctagcaaaacttctctttctgtaagccagagtcttgtctatcagattcccacaaccactcctgattctaaatttagtgatatggtaatgaaattggtatttattttaaatattagttattctaaggagaaaaaaatgcttctgcaagattttcataattcaggggctgtggataggattgttcctctgtttccctaatcattcatctgttcatgtctccctcttgtgccagtcagcctaggttatacagatgccatgctccacaccacgagcagtgtacaaatctggctgcccgtttactttctgagcaagcactggagtccactccgacctttttctttgaacatgcatgctgctggaatatgtataaatcagaactagcagaagtagcagagtgatgggagcaaaataggcactgaattcgtcaactcttttttgtgagcctacttgtgaatattacctcagatacctgttgtcactcttcacaggttatttaagtttttgaagctgggaggaaaaagatggagtagcttggaaagattccagcactgagccgtgggccggtcatgagccacgataaaaaatgccagtttggcaaactcagcactcctgttccctgctcaggtatatgcgatctctaccgagaagcaagcacaaaagtagacaaaagtattaatgagtatttcctttctccataagtgcaggactgttactcactactaaactctaccaagaatggaaacaaagaatattttctgaagatttttttgaagattaatttataccctataaaataaaacttgttagcttcgatgaagtcacttcatcttctctcctgccttatttttttaaataagtttttaggtcctgacactgacatcaaatacatgcacaccagaaaggcatttccaccaccgtccccactcattagcgtccagagtgcctttctctctcggctttttttcccccctgagctctagttttaaactttctcctgttaaaaaaattgtacttttatttcatgtaaactgcccctctgaggatttgggcatattttttggaaggtgcctaatgcttaggatagtctctagggtgatgcactgcacctgcttccttcccttcagtgcggccgacccatttctgttgaacagatgtctcctgtgtgatgcccctgactcttacatttatctttctaaatcattttctgaagctgacttgctctagggtgcttcatcaccacttccatcttgcatcaccttataactgttctgtcttgttctctcccagcaatttattttaaaacaagggctagcttcaagcatgactgttaatggctcctctgtgacaaaacacaagttggaccaaggagaaagccctttggagaaactggaccctagttcagtttagatctcaaatataggctgaaatctcttaccaaagtgcgttccagataaaaatgagacttagaagacagactggtctaatatgctcactggtcatcacattcagcttattcttacgtgccagtgaggccctaaggtctcagtgcatagcatacctgccactctggatgttttcctgggcttcatatctgtatggcaaggagggagctgtccttcagcagacaaagtcaagcagctttaagtacaaggcagcttgaaacctctctgatgaaagtgaaaaatgtgggtagcttatactttcaaactaatgccagtgactagagagaggtttcattcatgatgtgtatttccaatttggtcttcaattcaagagatgcttcataaaacacttatagccttaaaccattcaagggctaattaaaaaaatagttatgaaatcttagccacaaaaaataaatcaggtaaacattttaacctgtcgttaagtgttgtaacttcaaaaaaccaaaatgcttattttaatgtgatttttctaaaactattgaaaaattaatatttctataatctattaaaaaaaatggagaatgttttctctcaaatttcctctgacccatgggaatgaaaatacttaaatactgtaaagcatatctattaataattcccccaattttttaaactaacaaaatggaatgttaactgaatggaattaaacatagcaattgtcaagccatcaaaattatatatcgaaccacttaggcatgttacggggtaaagtcctcacccctgcatttgagaaatattttattatttttattttaaggcaaaacagtgtttactgtgatgggcagaacagccttttgtatctaggagtccatttgagttctttccaatatttccatatcgttcataaatgtgtctgggggcttccttgtttggaaaatatggatatcgctttgttttcctttgaaagtaattatatcttaagaacatagtatcatgaatggagtagacagggaggctgcagaagccatttctctttgtagataaaaagcattatctatgattgttgtataataaattgatttttacatt

SEQ ID NO: 14210 - DNA, 1203 bp, Homo sapiens
ggaggacccctagactgctcgctagtggaacacgacagaggcgaaatcctgccccgtctcccgtggacctggctggatatggtttttgccaatccacagagccatcctgccctgacagctagcaagaggccaagacccacagaacaaccactacagcccctctgtcagcaggaagcagttaaagaagactgaccttcgtccattttcccagataattgggtcttggactcttgagggggggaaatgttggagcaggtagctagtcagacatgagcagggcaggggagggccccctcaccaggaatgtcaggcaaccatcaggtgatggtgaggcagttgttaagctgtgtctctaacataataatgagtggcagctggcgccagggaacgatggcctcccaatagataggaaacacctgaagctggtgatcagccacttcctgataagatctcaggagttgggtgcgcaggctcaagcatgcaccctaagaggcaaaatagtggcatttaactcatatatgaccttcctttaggaaggcttgactggtaagggaaaaactcctccagtgaacacgtgcacaacttcagtaaaaacactgcacatgcgtcccctcccaagtgctggcaggccactgtgcatgcagacagcccgccccaaagaaaaatcagaggaggagaaatggaaaccccggaacaatgccaatgtataaaaccccaagtcaagggcctaccaaggcaattggatctctcaagtcacccgcttggctctcttcaagtgcactttgcttccttttgttcttgctctaaaacttttactcctgctataaaacttgccttggactatcatgctaccttacgcctccccggccaaattccctcctctcctccggggggcaaggatggagtctgctgcagacccattggatttgctgctggtaacagttccaccatttaggttccagcaccaagcaaactaacacccgactcagtgtaaacagccaaacaagcttaaccaattagaaaccaccatctaacctctaactaggtcctttcaactttaaccaagtattttctttgtcttgcttctgtgggaaccttataaaattttcccccttgtacctctgtagtagagacccagttgcttgcagtttggccctgcctgttcatgaatcacccttgctcaaataaactctctaaaatgct

SEQ ID NO: 14211 - DNA, 1861 bp, Homo sapiens
gaagaaaaaaaagaggaaggggactgcgttaacggttactaaggaaaactggaaatactgtctggtttttgtaaatgttatctatttttgtagatattttatataaaaatgaaatattttaacattttatgggtcagtcaactttcagaaattcagggagctggagagggaaatctttttttttccccctgagtggttcttatgtatacatagaagtatctgagacataaactgtacagaaaacttgtccacgtgcttttgtatgcccatgtattcatgtttgtttgtagatgtttgtctgatgcatttcattaaaaaaaaaaccatgaattacgaagcaccttagtaagcaccttctaatgctgcattttttttgttgttgttaaaaacataccagctggttataatattgttctccacgtccttgtgatgattctgagcctggcactcccaaatctgggaagcatagtttatttgcaagtgttcaccttccaaatcatgaggcatagcatgacttattcttgtttggaaaactcttttcaaaactgaccatcttaaacacatgatggccaagtgcccaaaagccctcttgcggagcaaatttcagaatatatatgtggatccaagctctgatagttcaggtgctggagggaagagagacctgtgtgtttagaggccaggaccacagttaggattgggttgtttcaatactgagagacagctacaataaaaggagagcaattgcctccctggggctgttcaatcttctgcatttgtgagtggttcagtcatgaggttttccaaaagatgtttttagagttgtaaaaaccatatttgcagcaaagatttacaaaggcgtatcagactatgattgttcaccaaaataggggaatggtttgatccgccagttgcaagtagaggcctttctgactcttaatattcactttggtgctactacccccattacctgagggaaactggccaggtccttgatcatggaactatagagctaccaggacatatcctgctctctaagggaatttattgctatcttgcaccttctttaaaactcacatatgcagacctgacactcaagagtggctagctacacagagtccatctaatttttgcaacttcctgtggccagtgtgtataaccccttccactatctcacagatagtcacagcgtccattccatagtctgtctcctcacatctgttagtattgacacagcacagacaccacaagccatcaggttcttcatggggcaggtgaaatacttctaccccatgggtaaatgtattcacatattaccaagagaagaagcacattatctatgatcttttggcccagttcttatttagcatttttattccagcctacttggaaacatgtttttatttgcaatatatgcctgactgaattaagcttgcttgttttaaacaaccaaatcattggaacagaaaaggatttaaaaaacaagaatgcatgatctcagagtgattaaaaaaaaatcagtggaaataaatgatcatagaaggtgcttttcaaaacaactgctattataattctcaaagtcctactctgccaaaagaagattaaaagtcatacattacattacaaggaaatgttcatgtgggaagagggttgctgaaaatcaacaacgcttgaagttaaaaagtgtgtctttgtagatttcattgtataatgtgtatttcttaggagatggctgacttgattgatctacgctaagtggagacatttcacatttttaaaaccaaatgttcaatctgtattactctttgccgtcttgtatgtagaggctatttttaaatcattaaatttttagatctctgttttc

SEQ ID NO: 14212 - DNA, 607 bp, Homo sapiens
acctccactgaaaagatctcatctgatgagcattttaataaagtgtcctgagtttggaggcttgccgtctttctcttggataaatatcttcatctcctagacttggaaaaacacattttctcctggggtttcccattggcgtgtcttgagctgctctggtgataaccgtaataatgccaatactgatacgaacagcagaaaacagtaaccccaagaactctacagatgatcatcaaggaccactgtctcttaccatttgctgctttggtttgaaattctcactgcctcgtagatctcattttgagcactatacattcctaaagattgatttctttctatctgacttaaatttaggaatgattaaatcttcatttctcccatgatttgatcctaaaacattttgaaaggaaacagccttgagatctgtgattactaagacatacataacattcttatcacattagaaagcaagaattgactgttgcttgtcttgttcctgttgtcttgtcccctgaattcctgtttatctttgattgtatgtgggacattgtattttcagtacatttgtagaaataatgtgaagcctataaagatgttctctgcctcc

SEQ ID NO: 14213 - DNA, 802 bp, Homo sapiens
ttgcacaccattttccaagaaccaagaaagaagaaaacacaagagatttttctcatcttttttttttttttctggtggagggaggtggtggaggaacatagcaaagtaggagggacagagagtgatacttaaatttaataagaggttcgtgaaggtagcttaacttgagaactcttggttttttgaaaggttgactgcacatgccaaaaacaactcctgctatctcagaattaattatctttgaccttcgtggaggatggtctctggttaaaatctggccaaagaaactcacataaacttggtgttagagaacatctagagagagagagaggaacttagagtcatttaaactcttcagtttacagagaaggatgctgaggacctagatgagaagttacctgcaaaaggcaaaagggttacttagtgtcagaaccaaggcaatgacttctctctcccagatctcctagctactggtcctgggccatttttttttttttaaataatcccaactttctttaaaagacaagcatttcagtaagctagttattttcatgggttgctcatccatttttttcagtgatctaaaaatgtagggagatggctactactgaagttgtctgtctacttgggataatagcaaattaattgaagacaatgggaaagtaagttataaaaaatactgggaaatctgtttctcttctgagcaagcattcagggcaggtataaacatcaaacatagtgacattgtcaaaacctcttccatttgaacattgattaattcatcaaataaatggtatagtaa

SEQ ID NO: 14214 - DNA, 147 bp, Homo sapiens
acgcacccgctggttgtggaccgtctgccaggcaccacagtgagcattgtgttcttggcatgtgatctgggaaactgattgaataatacacttttcttgctttggtgctcaaagtggtttttttcccccaataaaattatttaattg

SEQ ID NO: 14215 - DNA, 1156 bp, Homo sapiens
cacagattgagaacctcggggacttgagccttctgcaggggatgtccacagagagggaagggccgaggggagagggtgaccatggggaatgtggggatcagggaggtggagggacagtgtgaataaatggcatctaggaaggtaaactccaatcccggtgaccgaccccaaaccagactgttggtgggctgagctcctagcctggaagcattcaggagagcctgccattcctgggatgatccctgctgggtatttgcacgagagtggtttggtttagctgcctctgctgccctttactgtgacaagcaaggaggggttgcttccctccctacctcatccatcccacacaccttggccttctgcaagccaagtggttctgcaaggtcaaggcactagtatcagatggcaagctcagtgcccgggatacccactgctggcaggagaaggcccattttcacagtccacagaagcgtgttaggctggggttgggggtgggatgggctggtgagaaagttcaaattccaggaagccactttttattggatataaggtatctaacggcaaaagtacttagtagcaaagtggccaccttttgattgattgggcttcctcataggaagcactgagggtgtgtctttgtacttggttcattgcccttcacctggtagagaaagagaggtcagaaatagcaagcaaaaagcaggactcccaggagccacaagaaaagagcacaggctgcaccaaagcaggggcagcagagaataaaatatccctttgaacttgtcaacaattaaaaaactgcaaggagtcaccttataacactatttccagtaaaggtggaattgagtatcagagggattactgcggtgttaaggtagccctgccacgtggctctccaggcagggccaagaagacagcacaaagtatgggtttggccataagctcatatgctgcccccaaagactggggagagctgtgtgcctcagtgttgcagtgtgaattcctaaatagagggtaaagtgagcctagccaggaggtgtttggggctctatcgcgcatctctcctaccaagctgggcaagagcttttaggagattcatccagctttgtggatttagaaaggaagccttcagttccaatcagaatcctctttcctt

SEQ ID NO: 14216 - DNA, 593 bp, Homo sapiens
tacgagtgttactcatttacgtctcatggccaacctccaatgtggacatttagcatctccatcttacaagtgagaaatttcactgtagagaggttaaatatcatgtgtcattgattctgtgacatgtattattttcacatttgaacatctgaaatatagatatgtctaaaagggcttttctttcttggtagtaagataactgtaggtctttgcagtagtgtcttagattatgtgaaatatggtattttggcaagtgtacatggctaagaacaagtggaatcagaattcaacttaagtttgcttgactccaaagcttatgtgttttccagtataatgtgctgcagtatcaatggtctgtatgaacaaaggccatatcatttttattgacaaagtatagaaacggggaaatggtgactgaactggaacttgcatcatctaattccataactgaggagacaatagcctggggactgcatgtatcccacaggatgttaaaaaattgagaaaatgttatttcatgatcttcacttctctgttgattataacttatttttgaagaggctaaaataaatggcaaactcttgtatggataa

SEQ ID NO: 14217 - DNA, 863 bp, Homo sapiens
ctatgcatttcaagagctcacacttatattgtggcatatagtcaacatggaagtagaccagctctgctgatttgaaatttagattttttaaattatgtactggggacaggtttttgtcgctttacattgcttcctagtttacagcatgatgcaaatgattttctaacttagtgttaggagaaattattttccatctttaacctcttagttgtctaagagttaaatattactgaatttcagacgttcaaattgatcatcacaaatcctttaaaacaattacctaaaagaaaccaaaaatcctgccttctttgtgggggaggggggagagaggggaaggaaatggaacaagttgtgtttgtgttagcatgtgggtgatgtaaacttcaaattgggagatgttccgacccccactcccatataagcattcaatcagtgtaacttgcaaaatgcataaacatccgacagtttgaatttatagtgttgatggaagaaatcatttttaatgtgtactgtaaaacttgaaatactcaggagctgagtgaatatgtttgttgctacttacaatcccgacctgttagtcccagtagttttgttttaacatggtctttttcaactttgtttcctgtttaactacagatgacttctgttgtagactcacaagtttaactgttgtattataacagtattacatgtcaacggtgtggttatgacctttatttatataaaaaccaaatatttagtcaatttaccgtgtcttaatttaatctttgtacaccttccatttttaagtgcttaaatgagtactatattgcaataaaatgtagtgatataattaaccagccattaaaaatttacttctacag

SEQ ID NO: 14218 - DNA, 20 bp, Homo sapiens
taaagtgtctatttaaagtg

SEQ ID NO: 14219 - DNA, 848 bp, Homo sapiens
acccccaagctcacagccagctcctggctccctaaccccacggttccacacggctgtgtggcagctgcaacagtggtgtggttccgtcatgaattcttctcaaagatttgacatgctccactccggtaactttggtgagttgagagctttcttgtttgttttccctcctttaccacccagaaatccatttgagtctgctccttgtggttaaggactggcgtttgcagggaggtgcggactctcctgcggggctcacgggaaactcttccctcttcgtgcgacaggcatttaggggcgtgcctgccatgggcaaagccatggtgtgtgttcagctcttggcctgtgttgtaaacttagttgcacttcagttcctttcatcccttcacaaaattttgtttcacattcatgcagcaaatatgggctgaggtgccagacctgtacctgggcttggtgcgtttcaaatttcagaccagttctttgggctgggtcaaggcaaagctcagtcgtcccagcagcacctcagccatctgtagaaggttctaccattaccacggtttcagcttcctctaaacttctcacccgcttctcctggcaatctgtcagaacggtgtcatcctggggaagagaaggagcttgggtgcatttgccctcatcctgagaaggccagaatactggagaccagcgtgaaccctcacccagagtcaggggaagatttagaaacagtgacacctgcatatagaattttgattccttgaagagcctatttagttccataaaattggagaactgctgaaggtcagtaattccgactttctcagcagtggtgtctctgaattactgcaaagggt

SEQ ID NO: 14220 - DNA, 167 bp, Homo sapiens
attgggacatgggcgttgtctggccacactggaatccagttttggctgtatgcggaattccacctggaaagccaggttgttttatagaggttcttgatttttacataattgccaataatgtgtgagaaacttaaagaacagctaacaataaagtgtgaggacggtaa

SEQ ID NO: 14221 - DNA, 7216 bp, Homo sapiens
aggcagcgtgggggaaaggaaacgtggctctcccttatcatttgtatccagattactgtactgtaggctaaaataacacagtatttacatgttatcttcttaattttaggtttctgttctaaccttgtcattagagttacagcaggtgtgtcgcaggagactggtgcatatgctttttccacgagtgtctgtcagtgagcgggcgggaggaagggcacagcaggagcggtcagggctccaggcatccccggggaagaaaggaacggggcttcacagtgcctgccttctctagcggcacagaagcagccgggggcgctgactcccgctagtgtcaggagaaaagtcccgtgggaagggtcctgcaggggtgcagggttgcacgcatgtgggggtgcacaggcgctgtggcggcgagtgagggtctctttttctctgcctccctctgcctcactctcttgctatcggcatgggccgggggggttcagagcagtgtcctcctggggttcccacgtgcaaaatcaacatcaggaacccagcttcagggcatcgcggagacgcgtcagatggcagatttggaaagttaaccatttaaaagaacatttttctctccaacatattttacaataaaagcaacttttaattgtatagatatatatttccccctatggggcctgactgcactgatatatattttttttaaagagcaactgccacatgcgggatttcatttctgctttttactagtgcagcgatgtcaccagggtgttgtggtggacagggaagcccctgctgtcatggccccacatggggtaaggggggttgggggtgggggagagggagagagcgaacacccacgctggtttctgtgcagtgttaggaaaaccaatcaggttattgcattgacttcactcccaagaggtagatgcaaactgcccttcagtgagagcaacagaagctcttcacgttgagtttgcgaaatctttttgtctttgaactctagtactgtttatagttcatgactatggacaactcgggtgccactttttttttttttcagattccagtgtgacatgaggaattagattttgaagatgagcatatattactatctttaagcatttaaaaatactgttcacactttattaccaagcatcttggtctctcattcaacaagtactgtatctcactttaaactctttggggaaaaaacaaaaacaaaaaaaactaagttgctttctttttttcaacactgtaactacatttcagctctgcagaattgctgaagagcaagatattgaaagtttcaatgtggtttaaagggatgaatgtgaattatgaactagtatgtgacaataaatgaccaccaagtactacctgacgggaggcacttttcactttgatgtctgagaatcagttcaaggcatatgcagagttggcagagaaactgagagaaaagggatggagaagagaatactcatttttgtccagtgtttttctttttaagatgaacttttaaagaaccttgcgatttgcacatattgagtttataacttgtgtgatattcctgcagtttttatccaataacattgtgggaaaggtttgggggactgaacgagcataaataaatgtagcaaaatttctttctaacctgcctaaactctaggccattttataaggttatgttcctttgaaaattcattttggtctttttaccacatctgtcacaaaaagccaggtcttagcgggctcttagaaactctgagaattttcttcagattcattgagagagttttccataaagacatttatatatgtgagcaagattttttttaaacaattactttattattgttgttattaatgttattttcagaatggcttttttttttctattcaaaatcaaatcgagatttaatgtttggtacaaacccagaaagggtatttcatagtttttaaacctttcattcccagagatccgaaatatcatttgtgggttttgaatgcatctttaaagtgctttaaaaaaaagttttataagtagggagaaatttttaaatattcttacttggatggctgcaactaaactgaacaaatacctgacttttcttttaccccattgaaaatagtactttcttcgtttcacaaattaaaaaaaaaatctggtatcaacccacattttggctgtctagtattcatttacatttagggttcaccaggactaatgatttttataaaccgttttctggggtgtaccaaaaacatttgaataggtttagaatagctagaatagttccttgactttcctcgaatttcattaccctctcagcatgcttgcagagagctgggtgggctcattcttgcagtcatactgcttatttagtgctgtattttttaaacgtttctgttcagagaacttgcttaatcttccatatattctgctcagggcacttgcaattattaggttttgtttttctttttgttttttagcctttgatggtaagaggaatacgggctgccacatagactttgttctcattaatatcactatttacaactcatgtggactcagaaaaacacacaccaccttttggcttacttcgagtattgaattgactggatccactaaaccaacactaagatgggaaaacacacatggtttggagcaataggaacatcatcataatttttgtggttctatttcaggtataggaattataaaataattggttctttctaaacacttgtcccatttcattctcttgcttttttagcatgtgcaatactttctgtgccaatagagtctgaccagtgtgctatatagttaaagctcattcccttttggctttttccttgtttggttgatcttccccattctggccagagcagggctggagggaaggagccaggagggagagagcctcccacctttcccctgctgcggatgctgagtgctggggcggggagccttcaggagccccgtgcgtctgccgccacgttgcagaaagagccagccaaggagacccgggggaggaaccgcagtgtcccctgtcaccacacggaatagtgaatgtggagtgtggagaggaaggaggcagattcatttctaagacgcactctggagccatgtagcctggagtcaacccattttccacggtcttttctgcaagtgggcaggcccctcctcggggtctgtgtccttgagacttggagccctgcctctgagcctggacgggaagtgtggcctgttgtgtgtgtgcgttctgagcgtgttggccagtggctgtggaggggaccacctgccacccacggtcaccactcccttgtggcagctttctcttcaaataggaagaacgcacagagggcaggagcctcctgtttgcagacgttggcgggccccgaggctcccagagcagcctctgtcaccgcttctgtgtagcaaacattaacgatgacaggggtagaaattcttcggtgccgttcagcttacaaggatcagccatgtgcctctgtactatgtccactttgcaatatttaccgacagccgtcttttgttctttctttcctgttttccatttttaaactagtaacagcaggccttttgcgtttacaatggaacacaatcaccaagaaattagtcagggcgaaaagaaaaaaataatactattaataagaaaccaacaaacaagaacctctctttctagggatttctaaatatataaaatgactgttccttagaatgtttaacttaagaattatttcagtttgtctgggccacactggggcagaggggggagggagggatacagagatggatgccacttacctcagatcttttaaagtggaaatccaaattgaattttcatttggactttcaggataattttctatgttggtcaacttttcgttttccctaactcacccagtttagtttgggatgatttgatttctgttgttgttgatcccatttctaacttggaattgtgagcctctatgttttctgttaggtgagtgtgttgggttttttccccccaccaggaagtggcagcatccctccttctcccctaaagggactctgcggaacctttcacacctctttctcagggacggggcaggtgtgtgtgtggtacactgacgtgtccagaagcagcactttgactgctctggagtagggttgtacaatttcaaggaatgtttggatttcctgcatcttgtggattactccttagataccgcatagattgcaatataatgctgcatgttcaagatgaacagtagctcctagtaatcataaaatccactctttgcacagtttgatctttactgaaatatgttgccaaaatttatttttgttgttgtagctctggattttgttttgttttgttttttaaggaaacgattgacaataccctttaacatctgtgactactaaggaaacctatttctttcatagagagaaaaatctccaatgcttttgaagacactaataccgtgctatttcagatatgggtgaggaagcagagctctcggtaccgaaggccgggcttcttgagctgtgttggttgtcatggctactgtttcatgaaccacaagcagctcaacagactggtctgttgccttctgaaaccctttgcacttcaatttgcaccaggtgaaaacagggccagcagactccatggcccaattcggtttcttcggtggtgatgtgaaaggagagaattacactttttttttttttaagtggcgtggaggcctttgcttccacatttgtttttaacccagaatttctgaaatagagaatttaagaacacatcaagtaataaatatacagagaatatacttttttataaagcacatgcatctgctattgtgttgggttggtttcctctcttttccacggacagtgttgtgtttctggcatagggaaactccaaacaacttgcacacctctactccggagctgagatttcttttacatagatgacctcgcttcaaatacgttaccttactgatgataggatcttttcttgtagcactataccttgtgggaatttttttttaaatgtacacctgatttgagaagctgaagaaaacaaaattttgaagcactcactttgaggagtacaggtaatgttttaaaaaattgcacaaaagaaaaatgaatgtcgaaatgattcattcagtgtttgaaagatatggctctgttgaaacaatgagtttcatactttgtttgtaaaaaaaaaaaagcagagaagggttgaaagttacatgtttttttgtatatagaaatttgtcatgtctaaatgatcagatttgtatggttatggcctggaagaattactacgtaaaaggctcttaaactatacctatgcttattgttatttttgttacatatagccctcgtctgagggaggggaactcggtattctgcgatttgagaatactgttcattcctatgctgaaagtacttctctgagctcccttcttagtctaaactcttaagccattgcaacttctttttcttcagagatgatgtttgacattttcagcacttcctgttcctataaacccaaagaatataatcttgaacacgaagtgtttgtaacaagggatccaggctaccaatcaaacaggactcattatggggacaaaaaaaaaaattatttcaccttctttccccccacacctcatttaaatggggggagtaaaaacatgatttcaatgtaaatgcctcattttattttagttttattttgatttttatttaatataaagaggccagaataaatacggagcatcttctcagaatagtattcctgtccaaaaatcaagccggacagtggaaactggacagctgtggggatattaagcacccccacttacaattcttaaattcagaatctcgtcccctcccttctcgttgaaggcaactgttctggtagctaactttctcctgtgtaatggcgggagggaacaccggcttcagtttttcatgtccccatgacttgcatacaaatggttcaactgtattaaaattaagtgcatttggccaataggtagtatctatacaataacaacaatctctaagaatttccataacttttcttatctgaaaggactcaagtcttccactgcagatacattggaggcttcacccacgttttctttccctttagtttgtttgctgtctggatggccaatgagcctgtctccttttctgtggccaatctgaaggccttcgttggaagtgttgtttacagtaatccttaccaagataacatactgtcctccagaataccaagtattaggtgacactagctcaagctgttgtcttcagagcagttaccaagaagctcggtgcacaggttttctctggttcttacaggaaccacctactctttcagttttctggcccaggagtggggtaaatcctttagttagtgcatttgaacttgatacctgtgcattcagttctgtgaatactgccctttttggcggggtttcctcatctccccagcctgaactgctcaactctaaacccaaattagtgtcagccgaaaggaggtttcaagatagtcctgtcagtatttgtggtgaccttcagattagacagtcttcatttccagccagtggagtcctggctccagagccatctctgagactcgtactactggatgttttaatatcagatcattacccaccatatgcctcccacaggccaagggaaaacagacaccagaacttgggttgagggcactaccagactgacatggccagtacagaggagaactagggaaggaatgatgttttgcaccttattgaaaagaaaattttaagtgcatacataatagttaagagcttttattgtgacaggagaacttttttccatatgcgtgcatactctctgtaattccagtgtaaaatattgtacttgcactagcttttttaaacaaatattaaaaaatggaagaattcatattctattttctaatcgtggtgtgtctatttgtaggatacactcgagtctgtttattgaattttatggtccctttctttgatggtgcttgcaggttttctaggtagaaattatttcattattataataaaacaatgtttgattcaaaatttgaacaaaattgttttaaataaattgtctgtataccagtacaagtttattgtttcagtatactcgtactaataaaataacagtgccaattgc

SEQ ID NO: 14222 - DNA, 1059 bp, Homo sapiens
aggtcacattggtgttgtactcaattttaacaacagctggtgccctgctttcagatactggattgtactttgtgctggggttatctgaagtcagatctgcctaaggacttctttaattttggaattttcctcctttctctttcgttacagaagccccaccctgcctcacccacccttttttaaataaataaatagctagactggtgactgattcttcagcaaaaatattttatgatccagcagattattcactgatttgacatagtctggctgtacccaggaatggagcctgcacggtgaatggctttgtatagaacctctttgtctacaccattatgtgcgctgataagcgttcatggaacgcgttgaaattgtaattatatctgaggaattctgtatagattagaattctgtatagattagagagtgttgaaacggatgatttctatgctgagtttgtgctggtgtatgtgtgaagtgagtgagttgggtgtattgtgcgctaaacttttctgatagaggaagcctgattaaagaatggtccgtgctaaggacttgttagatctagttcactctccatttaataattatatgctatttctatattttcattctcctatcacctgtcttgcctttttcattattttattatgaaacttgtgtaaatacaattttgtttctgtactttttggcataacataaatctgtgaacttgaaatttgaattttgtgttagagatttttttgttgtttgtttagtcttgtctcagattttattatgtaaatcccattattcaaagttgcctaaatccatttggaaatctttaaaaaaaaaattggggattcttaaagttgaatttattggcttttctgatccagttttgtttggaccaaaaaccagtattgtacaaagtattaagcatatatttttatatttactaaaatggactgtggtgactttggataataaggaaaagtttaatattaaagccatgtttattacagtataattaacatgttaaaccatgggataaatgccatcaataaaaaattatgacat

SEQ ID NO: 14223 - DNA, 415 bp, Homo sapiens
gtatgtctaactgtatgtcaaccccagaggcccttcaccgcaacaacttggtaggaaagattcatccagttgtttgtgacagcaaagatgagcccacagagaagcaggctcacttcctgcacagctgtctctgtcggagagcaagtctgttttgggaactagaacgcaattgtgaaattataagaccagtggatttttttacctggcacatgggttggtgttgaatgaagtgttcagatggataaggatcaatctcatattcattccctgggatgtttagttaccagttttcccaaagtgttctggtagcatctaccatatttcatcaaatctgtgattcctttgattattatatgaaccattattttatgtatcattaagaaaaaatactgccaattaaactctgtcatatcaa

SEQ ID NO: 14224 - DNA, 2352 bp, Homo sapiens
atgagacatagataaaataaaatcacactgacatgtttttgaggaattgaaaattatgctaaagcctgaaaatgtaatggatgaatttttaaaattgtttataaatcatatgatagatctttactaaaaatggctttttagtaaagccatttactttttctaaaaaagttttagaagaaaaagatgtaactaaacttttaaagtagctcctttggagaggagattatgatgtgaaagattatgcctatgtgtcttgcagattgcaagatattttaccaatcagcatgtgttacctgtacaattaaaaaaatatttcaaaatgcaatgcatattaaatataatacacacagaaaaactggcatttattttgttttatttttttgagatggagtttcgttcttgttgcccaacctggagtgcaatggtgcaatctcagctcactgcaacctctgcctcccaggttcaggtgattctcctgcctcagcctcctgagtagctgggattacaggtgtgcgccaccacgcccagctaattttttgtatttttagtagagacagggtttcaccatgttggtcaggctgatctcgagctcctgacctcaggtgatctacccacctcggcctcccaaagtgctgggattacaggcgtgagccactgcacctggcctgacattctttatgaaatttagaattgttgaagaactataacatttcagtagggttcaaggtggtcccaaaagttatataaaagattagtttttactataaacccttgtcttttactcagatcctagcatcccttttcacatggtttctccatgtatataacagaatcaagaaacaaattttaattaaacaatctgtaacagaatcaagaaacaaatacattttaattaaacaatctatatggaacaaacattcccaaattctaagaataaatttttctttaagttttctctgagtttggcaattgttgttttttataatttaatctgtttaaatcatcaggtcttataaaatataatgtacttagagctggattcatggctgtttattatgaaaggttagatttctcagttcttctttaaccacattttgttatatcagacagtcctctataactctgtactacccaacaactaaatggtttagattgtttagctcatgttaataggatggttgtgtattataaaaaacgagttacgtgtgtgtgtgcacgcatgcacgcacatgtgctggcttaaaggttgttaatgcaaggtttggggtcccctttaacactggtgaaagctacggtactctccccagagatatgtcttgtcagcctctctagttccccttggcctgcatgtacaaacttctaccctagaagctctctgccatcgatgtattctaatagatttgtaaggctattaatttgaagcaactccttgctcacagtgattcttgcttctctgagacctgctcccagtcgatactgtgggcttcagaagccatgactccccaactctgcctgtatcaccggttgaatggacaactaacccgagctggaccaacacaattctctccagagacttttgattttacttttatgtagagacagggtctcactttgttgcccacgctgatgttgaacttgacgtgaggcctcaagcagtcctcctgtcttggccacccaaagtgctaggattacaggtatgagccattgcgctggccctcttcataggcttttggacttgggaatagaaaagcaaccccgtctctactaaaaatacaaaaaaattagccaggcgtggtggcacgtgcctgtaatcccagctacttgggaggctgaggcaggagaatcacttgaacctaggaggcggaggttgcagtgagctgagatcatgccactgcacgcaagcctgggcaacagagcaagactctgtctcaaaagaaagaaaaagaaaagaaaaaaaagaaaggcaagttgactgctgaaaggggaatctgtgtacgcctgggagctgtggggcagccacattccagcacatggatctgagaaacagaacgctgatctgcagaaagagatgagaaccaaagagaggccacctgcgtcctgggtccattttcatcctccctgaagcccagctgcccagggtggggagaaacaccctgtgtccatgggatagagtcctttccgcttgcagttgtgcccaaagaatcttaaatacaaatgagatatccttaggtagttgatcatttatgtaatatgtgtcttcactggggaatactgacttcctaaaatctcaagatggaagatataccacatgtaaattattttagagcaattaaattgttttcaggattttcc

SEQ ID NO: 14225 - DNA, 1548 bp, Homo sapiens
gatagaggacagagaagatgactcgttcccatagatttgaagatctgatttataccattataccagcaaagagaatgtatttccttttctaaatccttgttaagcaacgttagtagaacttactgctgacctttttatcttgagtgttatgtgaatttgagtttgctgttttaaattgcatttctatgccatttttagtttaaaatcttgcatggcattaattgttccttgcttttatagttgtattttgtacattttggatttctttatataaggtcatagattcttgagctgttgtggtttttagtgcacttaatattagcttgcttaaggcatacttttaatcaagtagaacaaaaactattatcaccaggatttatacatacagagattgtagtatttagtatatgaaatattttgaatacacatctctgtcagtgtgaaaattcagcggcagtgtgtccatcatattaaaaatatacaagctacagttgtccagatcactgaattggaacttttctcctgcatgtgtatatatgtcaaattgtcagcatgacaaaagtgacagatgttatttttgtatttttaaaaaacaattggttgtatataaagtttttttatttcttttgtgcagatcactttttaaactcacataggtaggtatctttatagttgtagactatggaatgtcagtgttcagccaaacagtatgatggaacagtgaaagtcaattcagtgatggcaacactgaaggaacagttaccctgctttgcctcgaaagtgtcatcaatttgtaattttagtattaactctgtaaaagtgtctgtaggtacgttttatattatataaggacagaccaaaaatcaacctatcaaagcttcaaaaactttgggaaagggtgggattaagtacaagcacatttggcttacagtaaatgaactgatttttattaactgcttttgcccatataaaatgctgatatttactggaaacctagccagcttcacgattatgactaaagtaccagattataatgccagaatataatgtgcaggcaatcgtggatgtctctgacaaagtgtgtctcaaaaataatatacttttacattaaagaaatttaatgtttctctggagttggggctcttggctttcagagtttggttaatcagtgttgattctagatgatcaacataatggaccactcctgaatgagacttaattttgtctttcaaatttactgtcttaaatcagtttattaaatctgaattttaaaacatgctgtttatgacacaatgacacatttgttgcaccaattaagtgttgaaaaatatctttgcatcatagaacagaaatatataaaaatatatgttgaatgttaacaggtattttcacaggtttgtttcttgatagttactcagacactagggaaaggtaaatacaagtgaacaaaataagcaactaaatgagacctaataattggccttcgattttaaatatttgttcttataaaccttgtcaataaaaataaatctaaatcactggtgtttt

SEQ ID NO: 14226 - DNA, 932 bp, Homo sapiens
tgggctggggtgggtccctggaatcagaagcactagtgctgccattaatgaattgtttaaccctggataagtcacttaaactcatctatccaggcagggataattaaaaccatctggcagacttacaaagcttgggacagttattggagattaatctaccatttattgaatgcatactctgtgcaaggaaatttgcaaatattagcttatttaatctgtactatccagtgaggtaatttcttcccccccaagatagagtcaagctctgtcacccaggctggagtgcagaagcatgatcacagctcactacagtttcaacgtcccccgctcaggtggtccttccacctcagcctcccaagtagctgggaccacaagtgtgcattaccacactcagctaatttttgtattttggcagagatggggtttcaccatgttgcccaggctggtctcaaactcctgagttcaagcaatccaccttcctcggcctcccaaagtactaggagtacaggcatagccacttgctcagccataatttttattattaatctcattgtacaagtgagaaaactgagacccagagagcttaagtgacttcctcgaggtcatagttacttactgccttagtcccaatttgaattcaattctgattccaaataagttgcgcttaaataagacaacagatgtgggaaaaatatgtgaatgtgtagtgttgctatgtgtactgtctttacaagtagctaattattttagcacaaagatgtgcaaagaaaggagactttatggagagttcaggagaaaaaggattttgtggtggccatcactttcattcaatttgcgactgctctgatggcacattagatgaagttactgttgatcctgagttacgtgaataagaaaaacaattgaactgcttattaaaaaagtaaacatgt

SEQ ID NO: 14227 - DNA, 151 bp, Homo sapiens
gcccacatccatttcatctatttctgagaaggtccttaatgatccgttccattgcaagcttcttttagttgtatctcttttgaatccatgcttgggtgtaacaggtctcctcttaaaaaataaaaactgactccttagagacatcaaaatc

SEQ ID NO: 14228 - DNA, 2974 bp, Homo sapiens
aacatttttaaaaagagagtatatggatcgcaagaaaaatgaagggttatcatacttgaaagataagcacatagttattgctgaatataatgtgacactatggtcgaatactacctacgaattataacattagaagcctagtggaaagaccagataactttaaatggctactaaaggataattacttacttttattgcatgtgttttaaaagtcatatagaaatattaaataagacggacagaggagaatttgcactggaagacaattgccacttgtaaaggatgaaaaataggatcactcttattgtacgctttattataagtttagaaggcagtttattctaaataatttttctctaggaaggcgtagaattttaaagaactggtaataggaaagcatgtactattttcttaaagcaataaactcttgaatgaacagattgcgatttactttcagacataatttggagatggcagtagatcaaaatgtgtccatgacttgttaacatgcctttctttcttcctccttagccaaaatccacctttgaactacaaagacagagcaaggcgttcattttggtgggaggaagcattggttcagagtgttagtgactagtatcgccatgccgtcacttaaatgctttcaggcttgcatgcttgtggctccaatggcgcacactcaggaaggaattgtaaaggagcacccagttatattataaagcctggatgtatggtttgcagataatggaaatcctgtggattttcactgatccagtctatctttaccaatagtatctctctcttctcccttatgttattagagaacctgatattggctattccaaagattaaattattttcaaatagttttcaacaaaaataaaagtgtattaggaagaaaaaagtagactatatgaagagtttgtgactgctcaatttaacttgttttttgccttatttctattaagactgttttactatgtttttgccctagggatatcagcaaatatttatttttcctagcatgatatagttagaatttcaagcagatttctttgtaattagaaggcatctgatagaaattgtaaaactttagaagttattataatgaaaccaattcctgaatcacaacttcatggactgactaaattgatttatagttgccttgtgaggtatgtatggggaaaacataaaaacataattaaaacataatttcgtcctttttatgaattcttaagagatgttcttccataaatatagaaataatatatttttcttaaaggatatatttttaattatgtggaagttgtaagcttgaaattttaacttctagtgcttttctaaaattcacaattacaagtttaaaacattttttctcttccaggtttcatttggaataaagagttggcagttatataaagcacttaataatactatagaaaatagatgtgttttttcttaatatgattttggtattttccacagatcagaagtgtaaacagagagataatgtaacagtatttggaagagataatgacacaaggatatagtgatctgggagcatgaattagaaacagggtactatgtttctggtgtaaaatctaaattgtgctttctactagcgttactttttcaaatgggatgatataaagcactgtgggctataagcaacaatcttgggttggtaggcaaatagaccaattgatctttattattattattattattattattattattttttgagatgaagtcttgctcttgtcgcccaggctgggtgcagtggcatgatcttggcttactgcaacctctgcctcctgggttcaagcacctgagcctcccgagtagctgggattacaggcatctgccaccacacctggctaatttttgtattttttgtagagacagatgtttcaccatgttggccaggctggtctcaaactcctgacctcaggtgatccgcccgcctttgcatcccaaaatgctgggattacaggtgtgagccacagcacccggtcccagttggtcttttaatattaaatttgtgcactattactgggtctggagttaatgatttcaaatagtttctaaaaataactgattaaatgtaagaaattataactaattatcaaggtgattctcttttgtttcttcaatggagagtttctctttctcttttcctcctctaataaaaatatttctttttttcctgtccttttattcattatattatgaaacttaggttttaggaaacaccttaagcgtcattttaatgaagcacaacattgatattttacatgaataataacgtttggtattttaaatatacttcaagggggtaataagccacaataactgtaccaaaaaaacttaaaaatggggacatattcatcccttgtgtgtgcatattttaccacttgttgacaagatacaattgtgacctactttgaggggatgaataacgacttatcactttaagacactttgcaaacatgttactaaaaaaaggtgcctagccaaggaaaaaaccattcacttggaattaaaattgtggatgtcacttcagagatgactttaacataaatgctgaaagttcattcacctcacaaatgtggcagttttctctgtggagaatggtggtctccgtggcagactggctctccaaattaaatgaaactcattgacagacctgggaccttttatgtgagtggacagacaagatcttggtttggcttcatgtactgttttctagagagagtgctacgaaaaacttatgatgcttttatgtgataaccaatataatgctttaatatgttaattctttgtgatgctatatacatagtttttatagttttatgaaaccactttgttaaacttatctggattttaagacacttgtaaacaaatggtttgttagtaaaattggggcattaagagttttacagagcaaataaagaagattttgacaaaagtc

SEQ ID NO: 14229 - DNA, 855 bp, Homo sapiens
agatttcactgcatttccccactctgcccacctctctcatgctgaatcacatccatggtgagcattttgatggacaaagtggcacatccagtggagcggtggtagatcctgatagacatggggctcctgggagtagagagacacactaacagccacaccctctggaaatctgatacagtaaatatatgactgcaccagaaatatgtgaaatagcagacattctgcttactcatgtctccttccacagtttacttcctcgctccctttgcatctaaacctttcttctttcccaacttattgcctgtagtcagacctgctgtacaacctatttcctcttcctcttgaatgtctttccaatggctggaaaggtccctctgtggttatctgttagaacagtctctgtacacaattcctcctaaaaacatccttttttaaaaaaagaattgttcagccataaagaaagaacaagatcatgccctttgcagggacatggatggagctggaggccattatccttcataaactattgcaggaacagaaaaccaaacactccatattctcacttgtaagtgggagctaaatgagaacacgtggacacatagagggaaacaacacacactggggcctatgagagggcggaaggtgggaggagggagagatcaggaaaaataactaatggatacttagggtgatgaaataatctgtgtaacaaacccccatgacacacctttatgtatgtaacaaaccagcacttcctgcgcatgtacccctgaacttaaaagttaaaaaaaagttgaacttaaaaataacagattggcccatgccaatcaaagtataatagaaagcatagtatac

SEQ ID NO: 14230 - DNA, 478 bp, Homo sapiens
ttcacttataatgacatcactactgtgctttaaatatgtgtgtctttaatattttgctggttgcatgtattttctatttaatgttgcagttcatttagagtagagatgtacctcatttaacatagagatgtatttctaaaaacttgtgtctatatgtatttttttgttaaaaaattctacactttgttgttgacatgtcataattttagaaaaactttacttatacattgggttaaaattcattagctagtgtctcctactttcctaatactttagctttaaactagtaaactccaccttttgcctgtagtagtaaattgcttttaaatatttaaactaggtggtgaatggtgtttattaaacccttatggtcgatatttccttaaagtaaaacaaaaaacacctttggttatatggccagttctttcttaatttatatgtttcactaactaagatttttaaaagataattttttctt

SEQ ID NO: 14231 - DNA, 3061 bp, Homo sapiens
tggcgcagttcattgtaaagtggaaggaccccttgaatccaagaccagtcagtgggagttacagcacaaaacccactcttttagaatagttcattgaccttcttccccagtgggttagatgtgtatccccacgtactaaaagaccggtttttgaaggcacaaaacaaaaactttgctcttttaactgagatgcttgttaatagaaataaaggctgggtaaaactctaaggtatatacttaaaagagttttgagtttttgtagctggcacaatctcatattaaagatgaacaacgatttctatctgtagaaccttagagaaggtgaatgaaacaaggttttaaaaagggatgatttctgtcttagctgctgtgattgcctctaaggaacagcattctaaacacggtttctcttgtaggacctgcagtcagatggctgtgtatgttaaaatagcttgtctaagaggcacgggccatctgtggaggtacggagtcttgcatgtagcaagctttctgtgctgacggcaacactcgcacagtgccaagccctcctggtttttaattctgtgctatgtcaatggcagttttcatctctctcaagaaagcagctgttggccattcaagagctaaggaagaatcgtattctaaggactgaggcaatagaaaggggaggaggagcttaatgccgtgcaggttgaaggtagcattgtaacattatcttttctttctctaagaaaaactacactgactcctctcggtgttgtttagcagtatagttctctaatgtaaacggatccccagtttacattaaatgcaatagaagtgattaattcattaagcatttattatgttctgtaggctgtgcgtttggactgccatagatagggataacgactcagcaattgtgtatatattccaaaactctgaaatacagtcagtcttaacttggatggcgtggttatgatactctggtccccgacaggtactttccaaaataacttgacatagatgtattcacttcatatgtttaaaaatacatttaagtttttctaccgaataaatcttatttcaaacatgaaagacaattaaaacattcccacccacaaagcagtactcccgagcaattaactggagttaattgtagcctgctacgttgactggttcagggtagttccccatccacccttggtcctgaggctggtggccttggtggtgcccttggcattttttgtgggaagattagaatgagagatagaaccagtgttgtggtaccaagtgtgagcacacctaaacaatatcctgttgcacaatgcttttttaacacatgggaaaactaggaatgcattgctgatgaagaagcaaggtatttaaacaccagggcaggagtgccagagaaaatgtttccccatgggttcttaaaaaaaattcagcttttaggtgcttttgtcatctcccgcagtattcatcctcatgggaccatcttatttttacttattgtaatttactggggaaaggcagaactaaaaagtgtgtcattttatttttaaaataattgctttgcttatgcctacactttctgtataactagccaattcaatactgtctatagtgttagaaggaaaatgtgatttttttttttaaccagtattgagcttcataagcctagaatctgccttatcaggtgaccagggttatggttgtttgcatgcaaatgtgaatttctggcataggggacagcagcccaaatgtaaagtcatcgggcgtaatgaggaagaagggagtgaacatttaccgctttatgtacataacatatgcagtttacatactcatttgatccttataatcaaccttgaagaggagatactatcattcttatgttgcagatagccctctgaaggcccagagaggttaaataacttcccagaggtcatggccaagaagtagtggctccaagaactgaatgcaaattttttaaactgtagagttctgctttccactaaacaaagaactcctgccttgatggatggagggcaaattctggtggaacttttgggccacctgaaagttctattcccaggactaagaggaatttcttttaatggatccagagagccaaggtcagagggagagatggcctgcatagtctcctgtggatcacacccgggccacccctccctctaggtttacagtggacttcttctgcccctcctccttttctgtccttggccatctcagcctggcctctctgatccttccatcacagaaggatcttgaatctctgggaaatcaaacatcacagtagtgatcagaaagtgagtcctgtcttgtcaccccatttctcatcagaacaaagcacgagatggaatgaccaaccagcattcttcatggtggactgcttatcattgaggatctttgggagataaagcacgctaagagctctggacagagaaaaacaggccctagaatatgggagtgggtgtttgtagggctcacaggctaacaagcactttagttgctggtttacattcaatgaaggaggattcatacccatggcattacaaggctaagcatgtgtatgactaaggaactatctgaaaaacatgcagcaaggtaagaaaatgtaccactcaacaagccagtgatgccaccttttgtgcgcggggaggagagtgactaccattgttttttgtgtgacaaagctatcatggactattttaatcttggttttattgcttaaaatatattatttttccctatgtgttgacaaggtatttctaatatcacactattaaatatatgcactaatctaaataaaggtgtctgtattttctgtaatgcttatttttagggggaaatttgttttctttatgcttcagggtagagggatttcccttgagtataggtcagcaaactgtggcctacagcctgtgtgtgcacgccccatgagccgaaaagtgggtcttatgttttcaaatggttaaaaataaataaaaaaatttgaaacatgtgaactatatgacattcagatttgtgttcataaataaagttttattggaacatatcc

SEQ ID NO: 14232 - DNA, 810 bp, Homo sapiens
aatgcttttcaagtgtgggttttgccctgattgttgcaaatacaatttccaccttctggaaaggtaggtttgctgtggaggaaataatgtactagatcattgtcacagaaaaaccaactatgatttatggttgtgttttcagaattcaacattaaagattaatgtttatttaaacgaacacattcctgcattcaggatgtgaggccatttaataaaaagggcacaaagcctgtcagagttttcaacggtgcttatagctgccagctggattccaaacaggtaccacattgtctctgagctaatgtttatatttttccattcaggcaccgaaatagttaatatttgaaataagtcttcaaaagaaaacataagagattattgagttcttgggactggatcctttatttcataagttcagatcatcttaaatgaaaatgccatgattatctgcagttaagtagatgacagctattctacatcagacttgatttttgtcagctaattacataattggtaagctataattgaaaccttatggcttaaaattccttaactcctttttgattcatgtttgtagtcatgttgtcaacagaggcaaagttaagcttgatgatggttaaaatcggtttgatagcaccatgggacatttttctaacaaaaataaatgcatgaagagacatagccttttagttttgctaattgtgaaatggaaatgctttacaggaagtaaatgcaaattacttttaagtgtgctttaaagaaaaatattttccccacaagagaaatttaaataaagaattttatttgttt

SEQ ID NO: 14233 - DNA, 1198 bp, Homo sapiens
agtactgaccagcaaaatggagaagatcagagaatgcagcagcagttttttttcttgttttcttaccactttattctttcagagtttaaagaaaatggactcatgcacagaacactatgcattttgaaacttgttcatcctggatttttttaaatcatttttatctcagaacttaaacaaaaattagatgtcgtgcacggactgtgtgaaagaagatgctttgcatatttgctgcactgcatcagtatcttactaaaaatgtgaaatgaaaggactattgtacactgaaatgcttaaatgtatctgaaagcacaaggtgatactcatttttatggtcttcccatttgtgctggtttttgcctctttgacatctgtcatcagtatttagagggtgagaagtgaatgtaacaggtataaataacatttttaaaaacaataactttgctataatcacagttgttccagagcactgtcagatacattctaatgaccagaactggtttaaaaaaagaaaatacaaccatgggaaagaaatcttaaatgaaaaacgcatctcattgtaggcatttttgcctcatattttactgggccatgtttgtttcctggtactcatgtattttttttttccagatctctttccccaagttgctattgtaagagtattctgctgcgtgtggatgcagttatacacattaaagcagatctggagtctgaagtagctataaagcagctataaaacagaaatacatgcatagctgcagaaaccatgataggtagaggacttttcttttggttttgttttgttttgttttgttttgtttttggttttacagagaagagatttttattacaaagaaaaaaattccagtgaattgtgcagaaatgctggtttttacaccatcctaaagaaaaactttacaagggtgttttggagtagaaaaaaggttataaagttggaatcttaaattgtaaaattaaccattgagtgtcaaagttctaaaagcagaactcattttgtgcaatgaacataaggaaagactactgtataggtttttttttttttctccttttaaatgaagaaaagctttgcttaagggttgcatacttttattggagtaaatctgaatgatcctactcctttggagtaaaactagtgcttaccagtttccaattgtatttagcttctggttggaatttg

SEQ ID NO: 14234 - DNA, 225 bp, Homo sapiens
agaagatcctctaatggatcccagtgtgcccatccctcaacctcctcagtgatcaactcatggccaatcttgtttcctattcttcaacctgctgacttccctctggattcttctgcaaccagtcccagatattgtgccattttatccatggttgtacttcttttttggatataaagatttttaaatgcattttttaaatgctaacaaaaaataaaaacttgaaac

SEQ ID NO: 14235 - DNA, 68 bp, Homo sapiens
cttaaggttgtcattggtaaaaagacttctgtgtcagaaaaaacaaaaggctcttttcagagccacct

SEQ ID NO: 14236 - DNA, 321 bp, Homo sapiens
tgtgaaacagagcacttgcagagcctgggacaacctccttattgaagggaagagggaccagcacatgaggctgaggctgaggggcagtcaccagcaccaggaagaaggtggtaggaggagtcctaggggccagttttaccctcccacatatcctgtgtgcatcgttttttaacatgtgttgtttgtaacatgtaatatatctgaattttaaatgggggtggtgatttatctcagtcttcctctctgcatcagttgctttataaatgattgtcaaaccaataaatacacacaagataaaattttattctaaggcttcatgaa

SEQ ID NO: 14237 - DNA, 282 bp, Homo sapiens
aggtaaaggatagtgattttatgcatggttatagccatagaagcagctgaagttttaaattctatatcattttcctttcttagttatcccaccttggatggaaaagtcattaggcaccgtattgcataaaatagaaggcttccgtgatgaaaataccagtgaaaagattttttttttcctgtggctcttttcaattatgagatcagttcattattttattcagacttttttttgagagaaatgtaagatgaataaaaattcaaataaaatgataactaagaa

SEQ ID NO: 14238 - DNA, 533 bp, Homo sapiens
atgtggtactgagcatgaactttttaaacattttttacttctctccatattcctgaccatagactcagcagttcttaactctggctgtgtgttagtcttccctggggagcctttataagacactgatacttgggacccactccagagattctgaatgaattggtctggggtggaacccagatactactaatttttagatactccttagaggtttctagcatgcgcccggggttgacaacagctggacaaacttgaaaagtcaattcatgtggcctttgaattttcctcattggaaagtactaaataaataaaaattcatgtgaaaatgatcactgataaatatcttcatggtggggcaggttattggatgcagagaagatctgctcggaattgtagccatatgttacagatctcagcaccgatcggaactgtaaagctataatccccagaattaaagtttttattattttttatacattgtaaaacatagacgtttatttatgtgattaaattctattaaaatttacatgcta

SEQ ID NO: 14239 - DNA, 52 bp, Homo sapiens
attcagttagaagtttcttctagtaacccaacggctcttttaagagccacct

SEQ ID NO: 14240 - DNA, 44 bp, Homo sapiens
tcttttcgtcagttttcttccaatggcccttttcagggccgccc

SEQ ID NO: 14241 - DNA, 61 bp, Homo sapiens
atgtaaagtcactttttcatcagtcttaaaacccaaaggctcttttcagagccacccactt

SEQ ID NO: 14242 - DNA, 84 bp, Homo sapiens
agagttaacgcttcatgcactgctgtttttctgtcagcagacaaaatcagcctaacagcaaaggctcttttcagagccacctac

SEQ ID NO: 14243 - DNA, 49 bp, Homo sapiens
gtgcttatgtaagcacttccaaacccaaaggctcttttcagagccacct

SEQ ID NO: 14244 - DNA, 60 bp, Homo sapiens
atgtgtgcttaggtgctttaaaactcaaaggctcttttcagagccactcaagtctcacat

SEQ ID NO: 14245 - DNA, 55 bp, Homo sapiens
aactggcgggacgttcccctttgaaaattttaaacggctcttttcagagccaccc

SEQ ID NO: 14246 - DNA, 47 bp, Homo sapiens
gcgaacgcctacttctaaaacccaaaaggctcttttcagagccacca

SEQ ID NO: 14247 - DNA, 57 bp, Homo sapiens
agagctttccgggaggccaatttggaaagaacccaaaggctcttttaagagccaccc

SEQ ID NO: 14248 - DNA, 57 bp, Homo sapiens
acattccaagtaagcgtcttaacacctaaccccaaaggctcttttaagagccaccca

SEQ ID NO: 14249 - DNA, 54 bp, Homo sapiens
gcttacctctacagtacactaccgcaaaaccaacggcccttttcagggccacct

SEQ ID NO: 14250 - DNA, 67 bp, Homo sapiens
aacgagaactcttatattggctttttaaggaagcagtcttaacaaaggctcttttcagagccaccca

SEQ ID NO: 14251 - DNA, 55 bp, Homo sapiens
attgtcttgtgaatgtgtgctaaccaaaacccaaaggctcttttcagagccaacc

SEQ ID NO: 14252 - DNA, 69 bp, Homo sapiens
ggctttggcggttaagtgaggccaggcctttccttgcaatatcgttaatggcccttttcagggccgcgt

SEQ ID NO: 14253 - DNA, 53 bp, Homo sapiens
gttgtactgagggtgtgcgccaacttaaaccaaaggctcttttcagagccacc

SEQ ID NO: 14254 - DNA, 55 bp, Homo sapiens
aggtttccgggcagtaattctatccaacttaaaaaggctcttttaagagccgcct

SEQ ID NO: 14255 - DNA, 61 bp, Homo sapiens
ggctcctgcttgctgcactcttattttcattttcaaccaaaggcccttttcagggccgccc

SEQ ID NO: 14256 - DNA, 2962 bp, Homo sapiens
ccaggcgagaagctgtaataccaatattaaaaattatttatgtatcagagaactcattaagatgaggacaaatctcagactttgctcagagctcagaattcagtggggaccagagagcctgcaattggaaatatgagaaattctttgcccagagagctgccctaacagaacacttcatcctcactccaacgagaaatctacagatgcccagaggttttgaaaacttaccgtctgagctcaaatttgatcactcacaagaggattcatacaagtgggaaaccttagaaatgcactgagtgtgagagagctttctactaatgctcagcccttctcgttgtaagagaattcacaccggagaacaactttttaaatgccttcagtgtcagttgtgctgcagacagtatgaacatctcattggacctcagaaaacccaccctggggagaagccccagcaagtgtgaaaaaagcttctaacaaaactctgacttacccatcagagaagccatactggtgaaaaattgtatatttgtcttaagtatggcaaaagcattcgttggagagccttacttgggtttgcacccaaaaaaaaaaacccaatctgaggaaagactgcaagtgtctgaatgaagagtgcttgtcaatgatcaactcttgtggtacatcagggaactcacataggtgaaaaaacccatacttaccttgagtctgagaaaacctttggtagaagctcctgtcttatcaggccccaaaaaacctgttctgcagtgagagatttaattgtgggtgagaatctatgtacatataatatgtatgagaagactgttctcatagttagttgactcatatggtagagaggactttacatgaaatcagtatgaaaatagttttttagatacccagaagcttgttctgggagaagctagggtgggtcagagtagacctgatgggtaactcaggtaaagatgcttttcttttatctgaactacttaatgattgctttacttttactttttaaaaaattcagaaatccaataaaggaaaggacggtaaccttatgatagaaggtgtggcatgtgttactgttgggggaaaggagtatattgactttgccttggttgatatttttatgcttgtctaggatgggactagagtgttgatagtaacatggcagccttttgctggcagtgaaatgaacttaagaagctagggagtagctatcctagatcaaaactctcctaatagtttttcctttgcaggaccaatcttataaagaaacagcatactcagctttttacttagtgtcagttgaggcatactctcaaaagttttttcccctaaaatatctttcaagttattactggtatttgaaatttcaagtttagaaattcatttctttttaactcaaagtgcaaatttcatataatgattatgatggttttagtgtccatatttttgtggcttcacttatcatctctttcagcagtagctacccacagtcagctcctagtaaaatggctacaggaaaactgaaagaaaagtttaagcctgagtaggcatagagtaaaaaatgcataatgatgcattattaatataagagtaaggctttttttattttgagtatcctaactccaaacctagtgttcttttcactccattatcctgctgtttatagcaaatcaagacccataatgatacgtctttcatttatttcagttctgccaaggaaagagaaaataccttttaatcccagggaaaggattgcaatcaccacattataaggtatatggcgtggaatgcagaattctaaatactagaagggaaaagtagttggcagattcatcagaggcttaaggataagtacttgtttccaatttaaaagtataattaggattgtctttaatgttctctagaaatactataattaatctagagatctatcaatggtcacatctcagtttttttcttccctgagattcaaagacgtgtaataccaatacttcagattcctatagtatttgggactttgtagactagtgaatagatactttgttgctagtccaaatcctctgattttggtttgatttgtcctagcagatccctgaacttcagagagtattgccatttggattcatggagttggcgaactgctacactgctaccttgtgtatggctctaagctttgatcctaatgactggttgatgatcatgataatattagggccagtgaatatagctcatagtgataataaggattctagggtatttttttttcttttagaaaaagatcctggaagtttatttgatctgacatgtttttgtaatatttagaaatagctcttgtatcataaaaagttgcccagtataagacacacaagatgtattttttttctctggtgaaaatcatgcctatcactagtatatgtttgacatttgtagtatacttaaaatagtattgggtgtgaggcatggtggtgatgaaaagtagtccttacggctacttgttagtcattagagagaacatggagaaggggtcaaagttggtatcattaacagggcaatgacttgacccttctttcaactgatcttactggtagttgtctctagtttttaagtaaattaatgatggaccatcccccaaacagagaactatgggggtatgaaacaaggctgaaggcttttaaccatgggagaaaaaggtgttggtattattcatatagcataacctgaggttggagaggaccacttgggagcctgtaaccaaaactagaaggtaacttctgggatggacggaggttcccttgaagcagtgccaacctaaatctacctcaggtaagtagttagattaactttttcaagatttcagaccaaacaagacaacttgtattcagttgatgtattcctatgctttaatgtttttgtttgcccttaattattaaataaacatttgttctgaaaaactcca

SEQ ID NO: 14257 - DNA, 53 bp, Homo sapiens
acagtgagttggttgcaaactctcaaccctaacggctcttttaagagccaccc

SEQ ID NO: 14258 - DNA, 388 bp, Homo sapiens
ggagggactttctctggaatttcctgatatgaccaagaaagcttcttatcaaaagaagcacaattgccttcggttacctcattatctactgcagaaaagaagacgagaatgcaaccatacctagatggacttttccacaagctaaagctggcctcttgatctcattcagattccaaagagaatcatttacaagttaatttctgtctccttggtccattccttctctctaataatcatttactgttcctcaaagaattgtctacattacccatctcctcttttgcctctgagaaagagtatataagcttctgtaccccactggggggttggggtaatattctgtggtcctcagccctgtaccttaataaatttgtatgccttttctctt

SEQ ID NO: 14259 - DNA, 555 bp, Homo sapiens
caattctaggaacatcataaatttaggggagatatttactttagtttgtccttttgttaagtactgaagaatcagagtggatttagaaactgccttgaaatcttttaaattttcactatcatgttatggaatggaaagtacattgggctgaactaatccaattgttattaagccactctgtgacattagaaaactctactgttttaagctttagtttcctttatggaatgaaggatttggagtagattatttcaaaggtagtttggagttttataatcagttttgtatatttacaatattttcttgaatgggtttactatacatcagcattttgctgtgttgcatctagaatgtgtatgtttatgcatgttttgccaatagaatttgtgcttcagtaactagatcggggatctagtatgctcctggtctaatgcatttacattgtttaggtaactggttcctaataaaaagaattataaaataccctcaaattaacaattcaattgcatataatagcctaactcagtaagaatattaaaacttactattattctt

SEQ ID NO: 14260 - DNA, 47 bp, Homo sapiens
attctcaagctcttgtccaacccaaaggctcttttcagagccactca

SEQ ID NO: 14261 - DNA, 51 bp, Homo sapiens
agaccgagttgaaaagcgcataaaaacaaaggctcttttcagagccacttc

SEQ ID NO: 14262 - DNA, 41 bp, Homo sapiens
gcgtccctttctatcaacaaaaggccctttttagggccccc

SEQ ID NO: 14263 - DNA, 66 bp, Homo sapiens
cggggctggagcagttcattactcatacctcggtccaaaccaaaaaggttcttttcagagccacct

SEQ ID NO: 14264 - DNA, 56 bp, Homo sapiens
gaagctggcgtgtgaaaaccgcaacaaagccccaaaggctcttttcagagccaccc

SEQ ID NO: 14265 - DNA, 59 bp, Homo sapiens
atattcctatcagcccaagaagtctgtccaaccccaaaaggctcttttcagagcccctc

SEQ ID NO: 14266 - DNA, 50 bp, Homo sapiens
gtgttttacttacttacacggttcctcaaaggcccttctcagggccaccc

SEQ ID NO: 14267 - DNA, 66 bp, Homo sapiens
tcccctgctctatcttgggtttcttaattgcttccaagcttccaaaggctcttttcagagccactt

SEQ ID NO: 14268 - DNA, 57 bp, Homo sapiens
gggctgaactttaaaaatgtaaacttacaagacaaaaggctcttttcagagccaccc

SEQ ID NO: 14269 - DNA, 404 bp, Homo sapiens
cccatggtattcatgccaacattggtgctcatttgtcactgaactgaagccaccctggagcccttaatggttacagaaattgtggaccagggctttatttaccactatacatcatcgggtattagaaaatgtagtctggctgagacgatgagttatcttctacattctagaaagtgattggaagaagtcatttgataagaggccatgggagagtggtctggaagttgtaggacctaaaatagtttgttctcacccagtgtatttaaatggccttctggacttgttaattgccctcagccagcactttaggacatctggttggatggctctgatgtggggggctgctgctctgaccattcattttgcctctaatgaatctttcacaaattggtcagatccatgag

SEQ ID NO: 14270 - DNA, 1428 bp, Homo sapiens
gggtgatgagtttgggaaagccttcagtcatcattgcaaccttattaggcattttagaatccatactgttccagcagaactggactaattctgtggaccctcagacccctaaatggggccgtcttggaaagtaagattttcaagtggcttattctgttcttataaaatttattttgtattgcattgaaccacttgtctacaaaccaggtgttggtgtctcctgtgtggatgactgtgattgtagggggttgctgggtggccttcttattccctagcctttggtccatttcttatgatttcctttaaaggcaccaaatcttatctggaaataaattgttatggaggggctgtttttgagcaatactgcatattgaacaattctaaaagaccagtatctatgtatacttttaaaaaaaagatttgctaagatcaaaggatattcagaggtgcatctttttctgtaagagtgacattttaaacaaatgtaaggttttggggaataagaatcgtccacattcccacaggaaatcattgctatggtctcccctaggaatgtgatagatagcttctataattatgcagcattatccatagtatgaaacctgtagttttaatggtttagaaatctatgtctcatttcatatctaactcatgtttttgatacgaatcaatatatatgttgatatcatgagttaatatgagtttgacatgaatcatcaacatagtatatacatatcaacataactatgttgatgattcatatcaaattctcaatgcaggtcattactgtaagttttccatttttgttacaaataataagtaagatgatactttaaaatctctgttcttcacaaggtacctctttaattcatagccttttatgtcagcattattcttcttttgggggttggtcagcaactttgagtgccattgcaagcagcatcatttaagtagttttataaagaaaagaagtctgatatcttgggcagcttgctgcttactggggagaccagcatgcttagacacttattgccagggttaaacatatgctctggcaccaagttcaaatctttcctccccatttgtgagctgtgggactttaggcaagttatctaaatgctgctatgctatagtctccccacctgtaaaacagaggatgataccaataccttcctcatagggtacataagattaaataaatacaaacttgtacttaaaatgtagctctcaataaatatgcattatgatttacatacgaaataatagcatttaacaaatgtaggtagaattttaagtatcatgttaaaattaggatacgaaatgcctctgctgacattcttgttactcttttctccacagtcaaaacctgaatcagaatatttcaaaagagaggaaataaaagttcagcttaaaactgttctgccctaa

SEQ ID NO: 14271 - DNA, 996 bp, Homo sapiens
gaagggctagcgactgacagaaataactaccctgtctcccacctgcaggaatgtctaacaaagcatccatcttcctccttctttgctccacactcgtgcctacccagcctcctgatgaccaaaccatcctgtactacccaagcacctgcttagcatgtgtgtgtagctgtgtgtgtgtgtgtgtgtgtgtgtatggatatgtagaattgtatttgttggtatatgcataggtgtatgtatggtgtgtgtgtgtgtgtgtgtgtgtgtgtttgaagattaaggaaaagaacacctatctctccaactctctgatcctgaaatatctattccaaaggaaaatcatattttagggtagatgaatcagactatcctgtgtccctaaaaaagcaatcccgagaagttgtgacatctatcccttccccttcctgaaagttttaaagaaagcaggagctggccgcaagactctaggcctccttcatagcctctctcctctaagataggcatgcattgttaaactcttttctccttaattctcctttattcccctgccacccagtagttctcatgtaggacctctgaaggcagagtgagagcagaaaccccacctcacatgaagggaagggcatctccatgatggtggatcccaaaacccctctgggtcgcaccctgccagagccttccttggtgcctgtcccttagtgcattcaggtcatggcacctgggcaggggtgtccctgtattctgaatgatgggctttctcctcaccctgagcctcctcaactttaagcttattttgatcactgtctcaaatttaaaaattctgcagcaacctggctctgtgtggtgttttcccagtcccatattatgtccagtcatacttcttctttctctgtcactttgtccctgctttcttgattcccttgtcttgttcttcagtattttgtttttctcaaaaatgctctagaactttccttggcacatataaaagcacggctg

SEQ ID NO: 14272 - DNA, 280 bp, Homo sapiens
aagctttaaatattgatatgtaaggtattggttcaaagtatgcatataagcattgagtgtgaggaatttgctatttcactttaaactttctgtctagttacagttatggaagtatgagaagttatgagtgaaacagcaattttctatataaattgcctatatgtatattttcaattaagaatgtgtacagtttttataattctatttttcctcatatttgtcgtatttattaaaatataattttaaatctgttgattctaatattaaaacatttgatctt

SEQ ID NO: 14273 - DNA, 1067 bp, Homo sapiens
ggaggtgaattcaggccaaaagggctgttggctgtaatcctacgccaggcacaaggcatcttgttgccttgccacgtcctgtcacagctgggtatccttaccatgttccacgcccttgcagtgggagacaggatgtccatgttctctaccatccttttccttcccatgcagattgtgaaatgtaatgagatgtatcaagatatcctagaaataaaaaccagatgtccacctccagtgtttcatactttctggttttacacatcgctggagggataaagagtatggataatctttggatttggagagccgttcaagatacttccagcttcttggctcagcctggcttcctctggttcagccccacataatgattatggctatttgctgtcatttctgggctagggctcctttctaacaacctagactggaataaggccctgtcagcatggctccctttatcccagttttccgtctgggaacagtacctctgcccctgattcccaatgtgccatagttttattaactccattaaagaagcctgtatgtgttttggttagttacagttattttacaataatggtgggtaatggccccacctctgttatgagataatgttctaatcaatgtctctgcctttgtatcttttctgagggctttgtctgttctcttcattctaatgaaaggtgtattctagtgctgggtgcatatcatccaggataatattctgcccaactccatcctctgttactagatcccttaccagtcacatttgtggactggtggccagtcgtataccatccctggaaggattctgggacaatattccagggattcattgacttcttggctccttttctccatttcctttgggggaagggggaattgaccatgcttaagtgcatcctatcaaggggcagctccgtccccatggccattggatcatgagacactctgaagtcagaaggctggggcagatcacttcaagcaagcccccatgatggttctcagtcctgcttctctgtgggtacgtgcccctctgtttaaaaataaactgaatatggatgttt

SEQ ID NO: 14274 - DNA, 184 bp, Homo sapiens
gtataacgattctggtgttactttctgtttttcctacctcttaggctggtccttctgtctcttatattagttattcctgatttcctgacccttaattgtgagattccccaaagacattgtcctttaccttcttattcactattttttcagtgagcacatttacttccaagagtttatcaatcac

SEQ ID NO: 14275 - DNA, 913 bp, Homo sapiens
gactaatgagggatatctgatttctattaagactgatttccatcacttcactgtaagaaatgatttgtttacctggtttatatttttctttcaaaaattttgagcacatattatattaggcagtgtagtaggttcaagaaacacaggagcaagcaaaacaaattccataatgtcatcaaacataaagtttaatgtgatggaggccccaaataaccaaacgcgtaagtacatatgtcaggataattcggtggcaaggagaactaaggaggtaggaagtatggggagggttagagtaggaatctgctgtgtaaaaaagaatgtggcatttctcctaggacaaaaacctttggaattttccaagtaatagaagtatcttactgaaattccatatgagataatctttatttttgcctattttttttccttttgtgtttccttcagcaggaaagtactgatgataatttttctcacaacagtttttatctagaatatcatttttgttaatcttaattcttgaagagaatttttaatgggtatttaattttagggagagatttttctagccattgaaaatatcttgtttttccccagcttattgaagtataattaacaaataaaaattgcatatatttaggcttcacaacatgatgctttagtatatgtatacattgtgaagagactaccacaatcaagctaaacctacattactgtccctgcattagtttactgttgaatactagaagttcttcattctatctaactgcattttcatacccattaagccaatgtgacaagctctttgtttcagttggagtgtttgcacaatttaaatttgataaatttttgatagaattaaatttaaatttatcctccaactaaatttttgatagaattaaatttaaatttgtcctcc

SEQ ID NO: 14276 - DNA, 1189 bp, Homo sapiens
aggagagtaatgaagatgttattttggacttcggacacctccactggggactcttccaggatgggttggagaggagtaactttgtcttattcgaccattctctttgaactcttctgcagttatactaaaaatgaaaatgatagggcaacaattttttaacttttattttaagttcaagggtacatgtgcaggtttgttacataggtaaacttgtgtcatgggggtttactgtacagattatttcatcacccaggtattaagcctagtactcattaatcatttttcctgatcttctccctcctcccaacctccaccctcaagtaggattcagtgtgttgttcccctctatgtatccatatgttttcataatttagctcccacttatgagtgaagacatacggtatttgattttctgttcctgtgttagtttgcgaaggatagtagcctccaattccatccatgtcaaataatcaaaattatttaaactttgattagttctttattaaatatgtcataaatatttaaaaataatacagcaataccaaaataaacctagaaatattgttttttatattattgttgtatgacatttaaaaatttctttctatgtgtatttatatttatacatacaagttggatcatggagtttgtaatctggttttccactgaacactgtgtcacgaacaactttttctattaacaagcatctatttctttattcttctgggcttcatcgtatggctaaacatgatttgttattctattttgggaatttttagttgtattctattcttttactgtacattgtttacatctggattttcctgtaataaacttttagcacctaaattgcaagatctaaggatatgtgtttttaaaaatctaaagctgaattccttttcttttaaacttcttttcttgtagaacatttcaaacatacataaaagagaagagcacagtgaacccccatgtactccatgtagccaccatccagcttcaacatcaacattttgctaatcttattttaattagctacagctccttgtttgttagttttcatggaaaattttagggcaaattccagatgttgtataactattatgttgtgtaagttatgtatgtacatattccacatatgtatttagtataatctgtgactaataaagacattttaaaaaaccatgcccac

SEQ ID NO: 14277 - DNA, 245 bp, Homo sapiens
ccaccctgggcatggggtgttggcaggggtcaaaaagcttatttcttttaatctcttactcaacgaacacatcttctgatgatttcccaaaattaatgagaatgagatgagtagagtaagatttgggtgggatgggtaggatgaagtatattgcccaactctatgtttctttgattctaacacaattaattaagtgacatgatttttactaatgtattactgagactagtaaataaatttttaag

SEQ ID NO: 14278 - DNA, 1488 bp, Homo sapiens
aaagaggagcgtgtctctgaactgcgccatcaactccagtctcggcagcagctccgctcccggcgccacccaccgacacccccagaaccctctgggggcctgcccaggggaccccctgagccccccgaccggcttagctgtgatgggagtcgagtgcatttgctttataagtgagggtagggtgagggaggacaggccagtagggggagggaaagggagaggggaagggcaggggactcaggaagcagggggtccccatccccagctgggaagaacatgctatccaatctcatctcttgtaaatacatgtccccctgtgagttctgggctgatttgggtctctcatacctctgggaaacagacctttttctctcttactgcttcatgtaattttgtatcacctcttcacaatttagttcgtacctggcttgaagctgctcactgctcacacgctgcctcctcagcagcctcactgcatctttctcttcccatgcaacaccctcttctagttaccacggcaacccctgcagctcctctgcctttgtgctctgttcctgtccagcaggggtctcccaacaagtgctctttccaccccaaaggggcctctccttttctccactgtcataatctctttccatcttacttgcccttctatactttctcacatgtggctccccctgaattttgcttcctttgggagctcattcttttcgccaaggctcacatgctccttgcctctgctctgtgcactcacgctcagcacacatgcatcctcccctctcctgcgtgtgcccactgaacatgctcatgtgtacacacgcttttcccgtatgctttcttcatgttcagtcacatgtgctctcgggtgccctgcattcacagctacgtgtgcccctctcatggtcatgggtctgcccttgagcgtgtttgggtaggcatgtgcaatttgtctagcatgctgagtcatgtctttcctatttgcacacgtccatgtttatccatgtactttccctgtgtaccctccatgtaccttgtgtactttcttcccttaaatcatggtattcttctgacagagccatatgtaccctaccctgcacattgttatgcacttttccccaattcatgtttggtggggccatccacaccctctccttgtcacagaatctccatttctgctcagattccccccatctccattgcattcatgtactaccctcagtctacactcacaatcatcttctcccaagactgctcccttttgttttgtgtttttttgaggggaattaaggaaaaataagtgggggcaggtttggagagctgcttccagtggatagttgatgagaatcctgaccaaaggaaggcacccttgactgttgggatagacagatggacctatggggtgggaggtggtgtccctttcacactgtggtgtctcttggggaaggatctccccgaatctcaataaaccagtgaacagtgtgactcggc

SEQ ID NO: 14279 - DNA, 844 bp, Homo sapiens
gtctcgtctccaactagaagtttggcccggccactggccctgcagctgctttttgggggtggaattccccactcatttctgggaacacattcacacgcccattgcaggagtattaatagcaacccacattttcgccccaaaataatgagacctcacctggtctccacgtttccacgtccctgctcaaaaccaaatccattcctgccttctggctctcagaatcttctctcccctacagctactacagtacttcctgacttctcccattcaaaccattctaggcctgcaatggggaacaggccctccccatcagtattggtaaagtgaccatgattcctacatagaggctctgctggtcaaatacttgactcccactcttgccactcctagctccagaagggctcagggccttccccacagatctaaggactgggctaccctgcctgtccactgaggtttctcctaaaacaagaggcttgactctggtctgggccctgtggccctctgggaagctttgtacctcttttgcaggatctgggggtggggagggacaagctagttccccaacctcctatgactgctttctatgctcacagccttttttccataagaaccttcttgaaacttctccccgcacatactcacggaaaggaaccaatggtgctatttcccctctctcctcctcaacctgggaatacttcagacatctccaaactcatccttgtgtatagtctcacacccttccccataagtataaatgggcccatatttaacacattttgtgattttgggttatttattttgtgcatctgtggcaataaatgagatctcagtggtggtatgg

SEQ ID NO: 14280 - DNA, 637 bp, Homo sapiens
gccagctcagagaacacggggagcggtggtgctacacggacttcggagcatagagtggcgctgagtgagtggctgagaccgaccacggttcttgacttagtggaattgggtcgaaggagtggagaatgggagggctcgggctactgagagtggagatgggggcgggggtggtggtgaagagagttggagaaggaatggacgaattcttgagcaaaaggaggggaagagacaatctccagccacccgccccacgcttgacttcttatcactttggctgtggtgccgcctagtggaaaaaggaagtccctgcagcagtccccgcactctttaagcagctgtttaccgaaggcaccagttcagccaggagtgaaatccggagaggagcaacgccagcctgggtcacagtccatcaaaccccatgagcccgaccactctcgctcttccttacattcccacgtcccccttctctcccaacccctcatatcagcaagggaaattaattaatgagatttgataaatcagtagatagaatgaggtccccattctgaaatatttagcagactggaaccaccacgcaagcctctgtagggggtggatggagacacttctaactttaataaactgcgactgaacgtgg

SEQ ID NO: 14281 - DNA, 2020 bp, Homo sapiens
gaaggagcagttacctactctcctctaagtacaggactcatatcaacccaagtaccatgtggacttgatccctggctgaatcacctggatgacttggaatagaaatgactgctttagaagatgggatggggccgggtggtaagggatagaagagaggactctcaatctactgatcaagtcctttccccaatgcccagtggatggccagggtacctggggactcaggctgctgccagttctgctcaccaccatccgtgcttggcacagaagtagctgcatagaaagggcactggatttgaagtcagaagacctgggttcttgaaccagcctgtcaaccagttgtatgactttaaacaaggcatctcacctcttttcatcttgttttcttccaataatgttagagttcatgtaatcacattctctagaaccatttagtttgtgttaactatgaaccaagcagtgtggtggccactggtgacttgaaaatatagagaaaaaaaaaacctgctctatatctgaaagagctcttgggaagacagagaaacataaagaggaaattacagcacagtgtggtgggtgttacgggaagtccaaccccagcattatgggagttcaggggaaggggcatagcccagcctggaaggagagggtgagtgggggatggctttctgaaaagggtggtctaaaggatgcctatggtcaatagggaaaagaggggaagaagcatcttaagaagaggaaacagcagagaactggctggatgacctgtgactctggagcactgggttgtctccattgtcattatgggcagatgtgtgccatccccagccgacgccactcactgcctccttcctcctggtgttgccacttctgggtgagattaaggtgcagggcctgggggcaggaggacataaggtatagccataaatcataacccagggaccacactcaaccctagggaaattgtcttcctgatcagttgattaccatctgaggtcaagaaatgagatagtgggagcaaatgggtcacaaatagctcagctgtgggctcagaaactgctaggtaaaagaattccagaaggaggccagggcataagttggatgacctatgaactttagtctaaagaattgagactaccgtaattgagactactgtagtgacatctgagaaatgggatggaagagtgaccatgttttattttcttgttcttgtcactattgtattttattttgcataatcatgcccttcactgacagtctccttaacatcatctgtttactctgctcagtgtaaactacaatgctctgtcatctccctactgggtctcctgggaggaggggagccatccagggtgcaaactcaaaggcagagggcacagcgtgcttaggcccaagcttagaattcaattgagaagttctgttgttcatccttacctcagcaggtagaaaagaggtggagatcagaagccagggattagagattgaattgctttccctgggagtgtgcagtatctcattaaaatgttgtatattcaaaaaaatacagacacacacaagtgcctatataatgataaaacatatccaaagcacccaaacctgtgattccagaaaagtagatcctatttttgtttatttttattggctttagctgtgtcttttgaaaggactattatcctctaaaatgtatgtgtatgaagatcctggcttgcagctcgggagctttacacaccttgtgtcactttatcttggtaacgagccaagatcatgcaaccagttcatccatgtctgacccaagagctcttaactgctatgctgcactgcctcattcagagatagatgcctgcatgggtcctggcgattattttaatgctggctacacccccacaggtgacttggattcagaaatacaatttatatttcttctttttaaattgttttattttatttttcttttaatagttatatgtcagtgagaacaatttatatgtcttacactgagaaataaaactgctcataagtg

SEQ ID NO: 14282 - DNA, 1419 bp, Homo sapiens
gccctgacatctgcccccagccccaaccctcagatgcttcacttctttggaattccaggactctcaatggggggacgggatgcctggcctaagcacctggagcaggggaccccatatccactggtagccacctccccattgctgtggccccctgaaatctcactcagtgctgttgctccatctactgccctaatggggctcttttcccacctcctgctggtttcccgagggaacttctgaccctggagtccatgagggctcctttcctttttgaccacgaccttggccccagctctgcactctctggaataagggcccgatgcagcattttcttgcccagtgtggcaagacctcagaaaaaccagtcaattacgcctaagatcattttgctgtccttaaaccccccaggttccttcttgcacaaatccactctgctgcccaccttccctggcattttaaacagacctaccccaccccaactcagagttaagcatacatggcaatgctgaaaataaacaaaatccactgaggcttcccaggccatttaaagcctggagtaccagcgcatatcatctcatggggtccagagtggagtccaggcttctctgaaaccagggctgagcatatttccatagccaaggaggtgggactccctggagctatctgtggtcttagggaaggatccagacatacacggctttggggtacaagctgtgatcactgatcaataaattatctctagattggtccttgtgaggggagttttaagaatccagaacatcttgctcttgatcagcacatccaaaaacaccaagacaaacatccagtggagcagaacctctcctgcctcgggagttctgaccgggttccccagcagggtgttaagcctctgtctctggccctaccagcatccaggttccactttcctaggagagagtggagatgggaagacagggaaaggaaggcagcaggaggccacaagcccaccaggtcttcatgtcaagagagggagtaacatgtcttctcattgcccacggacccaacctctgtccaggtgcccctcatcatcacagtttaacacaagctcccctgctccagccaaattgatctcccagtcttgtccttacccattccaagtgctctgccagcccctgttcatccaagttttaagtcctccaccctgttctaagagactgttccaacggctctgggcctcagtggtcacttgaccaccattgtctcagagctgcccactttgtgtgtgtcacatgctgcctgagtcacatgtacatcttatttctgcctctagttttgtaagctcctggagggcggataacatcttatactactcttgtattctcatggcacctagtgcagtgctgggcacagagtaggtgctcaataaagacttgttgaatg

SEQ ID NO: 14283 - DNA, 153 bp, Homo sapiens
gttcctcgcccagcgccatcttccctcccagtatctttgcttttggactgacctgggggtatctcccctctgccaccccaattgtgaataaagattgtttgctttgtagccccttccccagatgaactgaggtgagagcggctgttccaggct

SEQ ID NO: 14284 - DNA, 1143 bp, Homo sapiens
ggaccatttgcctgccctgttcacacaacccctgtggactgcagcctcgctctttccaccctgttatggcttctgtgaggcccattttcccttttccccagctgatgaggagccggccccctcagttcccacttgcttgggttcctgggggttttctgatcactggtgcgcattgatgtacatattttcctccagtctggggaggagagagactggaaacgttcctggactgctgaagaggagacccagttggcttcactttttgagaagattcgccctgtaccccaaacccctttccagtattacccttaatgcttgagaacctaaagctggttatcctggcgaacacccctacccttctattgcgggtccccacatgcacacagaactctgacacaggatcagctgcacttaagaaatcatcccagctaagttcattattcctcatggggtggggagatgctgaaaggggtattgtatatcccactgcactgagagggctcaatcagctggatttgagttctggaacacacatcatccccacccctcccccagcgtgggctcaccattcttagtcctttctcaagtgggaccttcaactttctgtgaacacccagtctgcgtcctgggtctgctaggttcgatgatggcgaactcgtatctgcatccggtgcaagttttagctggcagaggtgagaccggtggtgctggtctgcctttgccaactatagccagtctggagacttgataaaatacttcagtgagaccagcttctcatcaacttgggcccggcgtgctgggcctgaaagtcacactacatgcactgcctttgggagtcagctcactccctgctcccacctggaaccttgccagcgtgaaggaggcttccaggtacttcaccctgtcaaccacctctgaatccccaccaggcgccttcctgggtggattcaacaagatgattttgccctttcccagttctctccttcactttggcatcagttgttttctatgaaaacagtggattggttgggttttgtgcagggtcttgggttagagccaaaatggatttgaggatgagtatttttttttttggttttgtatattttgtacattaataataaacagtggaaagagaagcagctt

SEQ ID NO: 14285 - DNA, 112 bp, Homo sapiens
gagaaggacgtaaacagaacctgacaccagctccttttccttctatacattatttaatacctattaaataaaattatttttggaataaagcttgtgggaacatttgggatct

SEQ ID NO: 14286 - DNA, 611 bp, Homo sapiens
ggagctcactctggttacaagccctgttcttcctctcccactgaattctaaatccttaacatccaggccctggctgcttcatgccagaggcccaaatccatggactgaaggagatgccccttctactacttgagactttattctctgggtccagctccataccctaaattctgagtttcagccactgaactccaaggtccacttctcaccagcaaggaagagtggggtatggaagtcatctgtcccttcactgtttagagcatgacactctccccctcaacagcctcctgagaaggaaaggatctgccctgaccactcccctggcactgttacttgcctctgcgcctcaggggtccccttctgcaccgctggcttccactccaagaaggtggaccagggtctgcaagttcaacggtcatagctgtccctccaggccccaaccttgcctcaccactcccggccctagtctctgcacctccttaggccctgcctctgggctcagaccccaacctagtcaaggggattctcctgctcttaactcgatgacttggggctccctgctctcccgaggaagatgctctgcaggaaaataaaagtcagcctttttctac

SEQ ID NO: 14287 - DNA, 658 bp, Homo sapiens
gaactccactacccttttccctcccagaccacgaattagaagatatgtggaagaaagaactcagggcgttagaaaggattggggtatattgatacaacttgtcctggaacatgggtgggaccagaaatctttatgaataaatgaaaagataagggatttggaagccacaggttgttttttgtttgtttgtttgtttttttaatggccattttattttatttgtatttatagttttttatttgtatagatttaggggatacaagatttcttacatgcatgtattaaatggccattttaaaattagctagtttcatgctcagatgtcataagtggcagctatctttagccagactgttgcagttattgctcgatgccactcatggtgtcctacctcctatttggaaaccatctctatttttttcttactgagattcttactttggggtcaggaacttgaagggatgcttggagtgagtagatttgagggtccagttatggagtgctactaaaacattttcttctctcctggcctctggaagcatctttagctttgactttgggcaagtctctgtacttttctggccagcttttccaggatttataaaattagagcttcggcttgacctctgtgataaataaatattcactctgtgcctta

SEQ ID NO: 14288 - DNA, 380 bp, Homo sapiens
gccttcagccctcacagatgcccagcctcatagctgaagttgcctgaatgatcctcctgttgcatgtaacccactggcctccctgagcatgtccattgacagtgaggtcccacccctcatctctccttgccaaatagtttgtgccttgtcttgaagggggttgctccccttgccaacctcacactgctatgattgccaactccagcggtcccatgtcagccttctgatgatcccactccaccccacctcaacttatttaacttcctaattaaatcagactgtttgagcctgttgtctagaatattttcctgaccaagactgagggatgggctggaggttttcaactttgctacccaaataaattgctgtaagtaagtact

SEQ ID NO: 14289 - DNA, 737 bp, Homo sapiens
ctgtgactccccgcactccccaaaaagaatccgaaaaaccacaaagaaacaccaggcgtacctggtgcgcgagagcgtatccccaactgggacttccgaggcaacttgaactcagaacactacagcggagacgccacccggtgcttgaggcgggaccgaggcgcacagagaccgaggcgcatagagaccgaggcacagcccagctggggctaggcccggtgggaaggagagcgtcgttaatttatttcttattgctcctaattaatatttatatgtatttatgtacgtcctcctaggtgatggagatgtgtacgtaatatttattttaacttatgcaagggtgtgagatgttccccctgctgtaaatgcaggtctcttggtatttattgagctttgtgggactggtggaagcaggacacctggaactgcggcaaagtaggagaagaaatggggaggactcgggtgggggaggacgtcccggctgggatgaagtctggtggtgggtcgtaagtttaggaggtgactgcatcctccagcatctcaactccgtctgtctactgtgtgagacttcggcggaccattaggaatgagatccgtgagatccttccatcttcttgaagtcgcctttagggtggctgcgaggtagagggttgggggttggtgggctgtcacggagcgactgtcgagatcgcctagtatgttctgtgaacacaaataaaattgatttactgtctgca

SEQ ID NO: 14290 - DNA, 149 bp, Homo sapiens
gcagctgacagttggagggaaagccagcctgggggctgggaggatcctggagaagtgggtggggacagaccagcccttccccatcctggggttgccctgggggataccagctgagtctgaattctgctctaaataaagacgactacaga

SEQ ID NO: 14291 - DNA, 416 bp, Homo sapiens
gacagctgcctgtgtgggactgagatgcaggatttcttcacacctctcctttgtgacttcaagagcctctggcatctctttctgcaaaggcacctgaatgtgtctgcgttcctgttagcataatgtgaggaggtggagagacagcccacccccgtgtccaccgtgacccctgtccccacactgacctgtgttccctccccgatcatctttcctgttccagagaggtggggctggatgtctccatctctgtctcaaattcatggtgcactgagctgcaacttcttacttccctaatgaagttaagaacctgaatataaatttgtgttctcaaatatttgctatgaagcgttgatggattaattaaataagtcaattcctagaagttgagagagcaaataaagacctgagaaccttcc

SEQ ID NO: 14292 - DNA, 423 bp, Homo sapiens
cctgagacagctgtcttgtgagggactgagatgcaggatttcttcacgcctcccctttgtgacttcaagagcctctggcatctctttctgcaaaggcacctgaatgtgtctgcgtccctgttagcataatgtgaggaggtggagagacagcccacccttgtgtccactgtgacccctgttcccatgctgacctgtgtttcctccccagtcatctttcttgttccagagaggtggggctggatgtctccatctctgtctcaactttacgtgcactgagctgcaacttcttacttccctactgaaaataagaatctgaatataaatttgttttctcaaatatttgctatgagaggttgatggattaattaaataagtcaattcctggaatttgagagagcaaataaagacctgagaaccttccag

SEQ ID NO: 14293 - DNA, 138 bp, Homo sapiens
cagccattgaagcctgtgtccttcttggcccgggcttttgggccggggatgcaggaggcaggccccgaccctgtctttcagcaggcccccaccctcctgagcggcaataaataaaattcggtatgctgaattcaataa

SEQ ID NO: 14294 - DNA, 156 bp, Homo sapiens
agcacgatagagggaaacccaacattgggagttagagtcctgctcccgccccttgctgtgtgggctcaatccaggccctgtcagcatgtttccagcactatccccacttttcagtgcctcccctgctcatctccaataaaataaaagcacttatgg

SEQ ID NO: 14295 - DNA, 932 bp, Homo sapiens
gaagtcaactgttgtgtgtgtgcatgccttgggcacaaacaagcacatacactatatcccatatgggagaagtccagtgcccaggcatagggttagctcagtttccctccttcccaaaagagtggttctgctttctccactaccccaaggttgcagactctctcttatcaccccttcctccttcctcttctcaaaatggtagattcaaagctcctctcttgattctctcctactgtttaaattcccattccaccacagtgcccctcagccagatcaccaccccttacaattccctctactgtgtggaaatggtccattgagtaacacccccatcagcttctcaactgggaaacccctgaaatgctctcagagcacctctgacgcctgaagaagttataccttcctcttcccctttaccaaataaagcaaagtcaaaccatcatctggaaacagtggccacttttcactgacctttcttcgacatctagtcaacccacccaatatgccactgggctctcgctcccaattccaccccaccctccattacagagctcaccacgccctcctagatcaccgtccccaacacacccattgcctctcaaggcccttatctcagccccttcctgtggccacttccctcagtgctcagatgattccctgggtgagggagacactggggcaccctcagaggttgaagcaggctccctgctgtccctggatcctggacagatggctcagtaaactgtggggactaggtgcagactttttgccttcttggagtcctgggtctcctctgagagtctgggtggtgctcttcctacgcctctagaggtctctgtgttcctcattttccttcaaaagcgggctgtgtttctcttctaccttccagctgctcccacagaggaggaagacaataaatatttgttgaactg

SEQ ID NO: 14296 - DNA, 415 bp, Homo sapiens
tggagtcccctcagccgttctgttcccaggcatctccaggcacccacgccctctccaccctctgattccccgtgaattcttcccaatttagcctgtctccttaaacctcttcctcattccctcggttttattctgaacccgtaaggtggtgttctcaatatttcctgtcccctcctgagatccatacttagtcctcacatcgcccgttttttcctctgacagcctaagcctactctcctacctcgcctccaggcctcggccgcacctacctcccacccggtcttcctgcccgcgcgatcgctggggcagggctatggtactgtgttcccttctgccacctggtggccggcggcaggaactatcagtagacagctgctgcttccatgaaacggaaaaataaaaatcatgttttctt

SEQ ID NO: 14297 - DNA, 263 bp, Homo sapiens
ggtgcctgcccttctaggaatgggggacagggggaggggaggagctagggaaagaaaacctggagtttgtgccagggtttttgggattaagttcttcattcactaaggaaggaattgggaacacaaagggtgggggcaggggagtttggggcaactggttggagggaaggtgaagttcaatgatgctcttgattttaatcccacatcatgtatcacttttttcttaaataaagaagcctgggacacagtagatagacacactt

SEQ ID NO: 14298 - DNA, 213 bp, Homo sapiens
ggaacagagctggattccttgtgcctcatatgccccaatgctggtctcagtaaaacactgaggtggaagcttacacatctccctcagcctctggtttttcagcacttgggattggggttaaacctttaaaaacggctgtcaggtttgatctcagtgtaacaacatggccagtgcctgttccccactcccttgccccaaaaggatctggaacac

SEQ ID NO: 14299 - DNA, 213 bp, Homo sapiens
aagactcgcccattttggaatgtgaccgtctgtccttcaggagaggacaccagggtgggggtgaaggagacactactgcccccacccctgacagcccccaccccatggcttccatcttttgcatcaccaccactcctgaacccccatttctgatttgtcagaatttttttttaacaaaactaaaaatgaaacacatgtgtctgtggtatctat

SEQ ID NO: 14300 - DNA, 943 bp, Homo sapiens
ggccaccgtagggcctgactccttctgccagttccctccctcaaagaaatcctccaatcaaaatcacctcccaccataatccctgtcttctttccatcccctagaaatcctgggaggcaggatccaataattttcctgtgacacttataaatatcctgctcacatctgaatctccttgttgttctttaaccctcactgggactttgtaaacttccaagtcattctcacctaaaccctctgtgaaatttgtaatatggggaagtaggaatgtggaaaacatcctgacttcagtgtctggccgatgtgggtccctctcttgaccctgtcacttgctggctgtgaaaccaggacaagctacttaacttggtagcctcgatgtcctcctctgtgaaactgggatgataataatgcctaccttgtgagggttgcttcaatgattaggaatcattctgtaaagtctagcacagttccttgcatgttgtagcagtgattcagtaagtagcaaccctgtgatactattaccaccacctgctcactggtcaaaacctacacagctgtttcctcacgtccatcactggctctctaattccacttgttcattctgtgaccctagttattttctgaaaaattggttcttctcttttcccagagaccttctgatctccaaaaagaggagatgactacatttagcccctctcttataattccaggtagataactgcattttgtagcctctctttgtttttcttttgctgatctttgtctttattagattttcctcctttcctatttccccaaagacttatcagatgctcattgctttctaagatctaaaatgatactgtgttccctcatatgcatgcccttcctttctatatccttgacaccttactttcccattgtaacaataaaaaaagtatcaataaaataattattggcaaat

SEQ ID NO: 14301 - DNA, 603 bp, Homo sapiens
gcgctccgctgaaggggcaggggctaggctgggagacgacgaaggaacaggcgtttctgacgagcgggacgcagttctcggacgccgaggggctggcgctcccgcaggacggcctctattacctctactgtctcgtcggctaccggggccgggcgccccctggcggcggggacccccagggccgctcggtcacgctgcgcagctctctgtaccgggcggggggcgcctacgggccgggcactcccgagctgctgctcgagggcgccgagacggtgactccagtgctggacccggccaggagacaagggtacgggcctctctggtacacgagcgtggggttcggcggcctggtgcagctccggaggggcgagagggtgtacgtcaacatcagtcaccccgatatggtggacttcgcgagagggaagaccttctttggggccgtgatggtggggtgagggaatatgagtgcgtggtgcgagtgcgtgaatattgggggcccggacgcccaggaccccatggcagtgggaaaaatgtaggagactgtttggaaattgattttgaacctgatgaaaataaagaatggaaagcttcagtgctgccgat

SEQ ID NO: 14302 - DNA, 172 bp, Homo sapiens
gcctgattgtcctgagaaatgggaaggatcagatatgactcctccttggcaactgccctttcctgccaggcccacacataccctcttctggctgttaggggagcttgggtccctgaacactgtcattcacccaataaattactatttgaccccagagtgggtggaagggtga

SEQ ID NO: 14303 - DNA, 103 bp, Homo sapiens
ctctttgctctatggcccttcctcatcaggggaccgtttcccccctcttccttcacagtatttaagaaataaaagtcggatttttctggctgctttctctcta

SEQ ID NO: 14304 - DNA, 765 bp, Homo sapiens
ccgtggggtgggggcaaagggtgaagagagtgtgggctttaggagaaaagtgtgaggcatgacccaaattgtaagcatagggacctcagggatggggaagaaacccgagtacgagggtgcagggccccccttcatacacaggagagaacagaactatttagggtgtttgtgtttatggacagtgagggcactgctcttggattcaccagctgttatttttgcttttacttttctcccaccttcagttttttttttttttccacctccactttttaaaagcaaaaaaaaaaaaaagtatgatggtggtgaataaagaccaaagggtcctctctacctttgaaaactctcctggggtggaggagaccagggcaggatagacagacctctgcagtaagagagtggttgggaaacccagggtgttccttggatctcaggatctgagccatcgagggaagagtggggctgctaggcaagtggattagggggtctggatagggccccacaggtgacagggagcctgcagggcggatctggtgatcatgggagccagagggagtggggacagtgcaggcagtattggcaggagggccagtgcagaagggctggtagctcaggcagtgtgggggaagcactgaagcctgtagtccccacttgggggctaggggtttgctcactcagcaataaataactgtgtcacatcaaatcctaaatataccactacaaagtgagagttactgccactctgttcttactgacaccgtccag

SEQ ID NO: 14305 - DNA, 180 bp, Homo sapiens
ctttggtaaagtctgaccctagtctgctgctgaagtctgaacttgggcctctgacctgggccctttgacttccccttcctgggatctgctcagatgcagatcctgaagtttttggtcaataggctctgtcttcgtgagagacgggctgagagtcagaaataaatcaaccatttgtggttt

SEQ ID NO: 14306 - DNA, 273 bp, Homo sapiens
tgtgactgcagcaaactttggtgtaaaattccaccagtttccagccaccttcctgacttctatctgggcttggccaggacttctagtccctcataccagccctccttgcctccctccagccactggaccccagccttggctcttcctcttggttgacgcccttcagcacacttactgctactctgtacccccagccctactgcccaccaggtttcctctcttgtcccctagtccctggatgtttctcccaaataaatttgtgtgtaaactgtt

SEQ ID NO: 14307 - DNA, 253 bp, Homo sapiens
ggaccaactgggactcattatggaagaatggggtgagaggagacatgaggaaagaccctcttatttgtgattctctgtgttcatgttgctgtttatagtttgtggaaagtgggggaccatcccccttctcaccactgttcctcttgcacgtttcccctcattcatgtggctgtacttaaccttctccaacatacatcctgcattacatgaatggattattcctaataattaataaaaaggtattttttctact

SEQ ID NO: 14308 - DNA, 447 bp, Homo sapiens
gactcattccattggctgcccctcctcccacctgccttggcctgagcctctctccctgtgtctctgtatcccctggctttacagaatcgtctctccctagctcccatttctttaattaaacactgttccgagtggtctcctcatccatccttcccacctcacacccttcactctcctttttctgggtcccttcccacttccttccaggacctccattggctcctagaagggctccccactttgcttcctatactctgctgtcccctacttgaggagggattgggatctgggcctgaaatggggcttctgtgttgtccccagtgaaggctcccacaaggacctgatgacctcactgtacagagctgactccccaaacccaggctcccatatgtaccccatcccccatactcacctctttccattttgagtaataaatgtctgagtctg

SEQ ID NO: 14309 - DNA, 196 bp, Homo sapiens
gggcctggccttggggtactgctggccaggggtaggatagtataggaagtagaaggggaaggagggttagatagagaatgctgaataggcagtagttgggagagagcctcaatattgggggaggggagagtgtagggaaaaggatccactgggtgaatcctccctctcagaaccaataaaatagaattgacctttt

SEQ ID NO: 14310 - DNA, 259 bp, Homo sapiens
gcccctcctgggactccctcaaccccctccattttctccacaaaggccctggtggtttccacattgctacccaatggacacactccaaaatggccagtgggcagggaatcctggagcacttgttccgggatggtgtggtggaagaggggatgagggaaagaaatggggggcctgggtcagatttttattgtggggtgggatgagtaggacaacatatttcagtaataaaatacagaataaaaatcaagtgtttttacgc

SEQ ID NO: 14311 - DNA, 72 bp, Homo sapiens
tccaccacccagcttcacccctcacccccagcggctcaccatggggatggcagcaataaaatattttcccac

SEQ ID NO: 14312 - DNA, 358 bp, Homo sapiens
tggctcctcctcctcttcccctccctctttcattggtgacccataaccccaagtcccagcccagaacccctaacccccaatacttgaaggggttttgtttttttactaatgatggttttgtgggttttttttaagggatgagtggatgagaggagtaatagggaacagctatcctctcttgagaaggggaggataagtaggctgggaaacttcaaagccttcccagtccccagcacctgcctttctcactacttctctggagatggtaggagagtttcctaggtctttccagggcagcatgtgattcatttggggatggaaggaatctgtcccgcatcgggaataaaatttatgatgc

SEQ ID NO: 14313 - DNA, 428 bp, Homo sapiens
ttctttttagaactgaagcatcctaggatgcctctacatgtatttcattcccctcatcttcaaacatcattattattcttgaccagacctgaatctaagttaccatcccttggaaattctggagaaggagtctcatgcaccacctatcacactccctcacatcctgtttctgactttggaatggactcaggaaaactaggcccctctttaaaccgtgtgatgtatttgaatgtctgttatttccagccaccctaacattcttcttcctgtgtggatgcttatttgtcaatcagtaaatttgttcgtaaagaaaattacttctggtatttaggctgtgaatgtaccttgaaggggagagttcatggagagagcatgtgttctctgattgtgaggtcactgtgaatgattaaattggtaagggtaaagta

SEQ ID NO: 14314 - DNA, 543 bp, Homo sapiens
gctgtgccactgccacaggggtattctgccttcaggactctgccttcaggaacacgggtctgtagagggtctgctggagacgcctgaaagacagttccatcttcctttagactccagccttggcaaaatcaccttccctttaccagggaaatcacttcctttaggactgaaagctaggcgtcctctcccacaaaaaagtcctgccctcatctgagaatactgtctttccatatggctaagtgtggccccaccaccctctctgccctcccgggacattgattggtcctgtcttgggcaggtctagtgagctgtagaattgaatcaatgtgaactcagggaactggggaaggctgagcctcctctttggtgttgcggtaagataaccgacagggctggtgaaagtccccagatggcaggatatttggtttcagagtaaggactaggtgcaccaccatgactgactatcaatcaaaatgtttgtaacttaaaatttttaatgaaggataatgaatatttgtagagtctctatggttctgtcaatgc

SEQ ID NO: 14315 - DNA, 434 bp, Homo sapiens
cagctccggccctgatccaggactgcaccccacccccaccgtccagccatccaacctcacttcgccttacaggtctccattttgtggtaaaaaaaggttttaggccaggcgccgtggctcacgcctgtaatccaacactttgagaggctgaggcgggcggatcacctgagtcaggagttcgagaccagcctggccaacatggtgaaacctccgtctctattaaaaatacaaaaattagccgagagtggtggcatgcacctgtcatcccagctactcgggaggctgaggcaggagaatcgcttgaacccgggaggcagaggttgcagtgagccgagatcgcgccactgcactccaacctgggtgacagactctgtctccaaaacaaaacaaacaaacaaaaagattttattaaagatattttgttaactcagtaa

SEQ ID NO: 14316 - DNA, 322 bp, Homo sapiens
gaacggaccacaccctctctccccagcatggatggccacagctcagccgcctcctctgccaccagctgctcgcagcccatgcctgggggtgctgccatcttctctccccaccaccctttcacacattcctgaccagagatcccagccaggccctggaggtctgacagcccctccctcccagagctggttcctccctgggagggcaacttcagggctggccaccccccgtgttccccatcctcagttgaagtttgatgaattgaagtcgggcctctatgccaactggttccttttgttctcaataaatgttgggtttggtaat

SEQ ID NO: 14317 - DNA, 309 bp, Homo sapiens
ccgcgcaggcgtggaggccaggaggctggggcccctgggctgcgtggaaaaagggctctttggcccaggagaattggggggtggggggtctggggcagaaaggtaagagtgggaggctgagcagatgcacacatcctgagagagggaagatgattccttggagagacttgctcttgagagtgcaagaatctggagctgggaaaagggttcttggaggccaggggaatacggggtcccagagaaagatttccttctcttagaagtgcatgtatatgtggagggagggaaaagggtcctatagaatgaggg

SEQ ID NO: 14318 - DNA, 66 bp, Homo sapiens
taatgctttagagggaggcagtcatatctctgtgtgcagataataaaagcatatttctaagaggtt

SEQ ID NO: 14319 - DNA, 194 bp, Homo sapiens
gctgctgcccacctctctcgcaccccagtatgactgccgagcactgaggggtcgccccgagagaagagccagggtccttcaccacccagccgctggaggaagccttctctgccagcgatctcgcagcactgtgtttacaggggggaggggaggggttcgtacgggagcaataaaggagaaactgaggtacccgg

SEQ ID NO: 14320 - DNA, 471 bp, Homo sapiens
cctctgccattcacactgacttagaacggggggagggggtaccaggtggccaggtgggactgtttcaaatttccctgatccccaggcttggggcaattggtaaaggaaagagcaggtgtgggggttaagcacttatttgaggtgggggtgttcacctctcttctcatcccttttcagaatatagggctcctctcattcctgtgaacccccagtcctggcttctttgtttgaggggattgtgtgaggttcagttgtggggtgggtggtgagctgctgcatattttttattttgtttctctagtgttatggcagtggaggtgggaatttagtccccaggtgggacaagggaagttttttcattttggagctagttactgggagtaagggagggtggggtgggggggagttcaggtttatgtgtgtgcatttcttttttattattattaaataaacaacttggagggagttgaa

SEQ ID NO: 14321 - DNA, 21 bp, Homo sapiens
ttaaaagttaaaccttaaaag

SEQ ID NO: 14322 - DNA, 858 bp, Homo sapiens
aaacgcccctggtccggccccactctgcgcccctcgatctcccaggctctttctgcagtcataccgcggacccaatgggcgccctgcacacccgtttctggggccgtcagacttggatacatcgtaaactccgcctccacggaacgtctcgccttgcgagcaagctcggaatccagttcctcaggaacccctccaaaacccacacccccagggacgccgctttccgggatcccggccaaacgccggaccctcagtcgctccaggccccctcaccctcaaagtgtagcgcccccaaccgagcaacctcggtttggtccctaaaaccccgcctcctctataagcaccgccccagctctgacaaaaccccgcctccaggtcggcaggctccgccttcttttcttctccgcggggtgattcagtccagtgattgggtttgtggctccaggcctcgcccacagacggacagacccctccctttcttccggcaaaaggaccgagccctggggtagtaaggcccccacactcctgttttttgcaagtacatttttgtccctcctccacccaggtatctgcctattttcttgctaatcccagaacctttccttttgctttttttaaggacatttgggaagttcctggtgtaggacccttctccctgggataagaaacctgcctgtaaacgctctgtaaatactcccttccacccatcccagcccctgggcagccgggcagaagggaatccaggctatggacctcccaagtccccgctccccgctcccctcggcggccccgccttgttctgatctgtgtgtgagtgtgtgtgaacttctgaaagacaatattaaagagacttagttg

SEQ ID NO: 14323 - DNA, 1063 bp, Homo sapiens
accctggctctgagctctcctcccatctgtccccatcttcctccccacacctacccacccagtgggccctgaagcagggccaaaccctcttccttgtctcccctctccccacttattctcctctttggaatcttcaacttctgaagtgaatgtggatacagcgccactcctgccccctcttggccccatccatggactcttgcctcggtgcagtctccactcttgacccccacctcctactgtcttgtctgtgggacagttgcctccccctcatctccagtgactcagcctacacaagggaggggaacattccatccccagtggagtctcttcctatgtggtcttctctacccctctaccccacattggccagtggactcatccattctttggaacaaatcccccccactccaaagtccatggattcaatggactcatccatttgtgaggaggacttctcgccctctggctggaagctgatacctgaagcactcccaggctcatcatgggagctttcctcagcaccttcaccttccctcccagtgtagcctcctgtcagtgggggctggacccttctaattcagaggtctcatgcctgcccttgcccagatgcccagggtcgtgcactctctgggataccagttcagtctccacatttctggttttctgtccccatagtacagttcttcagtggacatgaccccacccagccccctgcagccctgctgcaccatctcaccagacacaaggggaagaagcagacatcaggtgctgcactcacttctgccccctggggagttggggaaaggaacgaaccctggctggaggggataggagggcttttaatttatttctttttctgttgaggcttccccctctctgagccagttttcatttcttcctggtggcattagccactccctgcctctcactccagacctgttcccacaactggggaggtaggctgggagcaaaaggagagggtgggacccagttttgcgtggttggtttttattaattatctggataacagcaaaaaaactgaaaataaagagagagagag

SEQ ID NO: 14324 - DNA, 205 bp, Homo sapiens
ggcaggcgagagtagtactggagggccttgaggggcccacagacagatcccatccatcagctcccttttctttttcccttgaactgttctggcctcagaccaactctctcctgtataatctctctcctgtataaccccaccttgccaagctttcttctacaaccagagccccccacaatgatgattaaacacctgacacatcttg

SEQ ID NO: 14325 - DNA, 1649 bp, Homo sapiens
tcttgcccctcagggtcacaggggtgggggctctcacaaggcgacttgaagaggacgcaggcttccagaggacaaaccccaatacaggagaagcacaagacagagaagggccaatggggtcatcccctccctaacgagactctctgtgctgggggtgctaattacatggcaggaagaatggggcctctaaggggagtgtggggtctgtctctcccttttttccatctttttcctctctcgctttctttcttacacagaaacatacacataccgagaaacctatttctcagacccctttttctcctctgtctttctctctccctctcccacacctcacacacacatactcccacttgcaactattctgtttctctcctgggctcccccactttcccttccccaccccacttgtatgctctggaatctgtggagacgccagccctgcccaatcagagatgccaaaaatggggacatgacttctggacagaggacatgggccacgcccccatgcatccccacccccgcccctccggacggcttacttacctcatacgcagctcatcttaaaccaatagaatcgctcggtggacgagagtgtctgactcagatatctacctcggagggagtttctgctactttagggaattattgactgggctttggggttgaacttttttttttttaaagaaagaaaaagaaaccctgggatccatctgttttttttgttgttgttgttgtttttgttgttgttggtggtggtggtggtggtggttcttaatttttaatttagtttggggaagtagcttgtttttttttttataaatatgttgatttcttgtctttttttttttttatttcttactttcccatattaggggtgatagccaaaggggttctggtaagagaaagggggacaaacagaactggtaaagaggcccccctggctccaggcctgtccatcaggaagtaaattttacagggcaccaagctttgccccctaaaatcccttaggtgttctttgttcatgcaggcaggtttctgccgcatttgatgtggaggcagtgaagggcttgccctgctggcctctcatcccccttcttcccacaacccttgggcagggctggactcagtaattttgaggaaattgaagatgccatcttcccctgtgagtgacatgtctttaattttttaaaaaactactatttgaaaattggagggggaagaatgggaagggagttattgccaaatatgttaaatatgggttggggtgcttgtatatgtatcttcctcaatttccccataaatgaggtatctttttgtcacaccaaaatcaaggggtagggagagggaggaggttgcaaaaagccagatgtgggggaaaagtaacatcaacactgtcccatcctcagccctgaactagctaccatctgatcccctcagacattctcaggattttacaagactgtcagagtggggaacccctcccattaaagatccgggcaggactggggacaggttggaagtgtgatgggtgggggggtgggaggcatgggccgggggcagttctctcctcacttgtaaacttgtgtagtttcacagaaaaaaaacaaaatgcagttttaaataaagaaatttcttttttccctggg

SEQ ID NO: 14326 - DNA, 599 bp, Homo sapiens
gacttgagccccaaccagcccttccttgccactggtctcaaagctgggcagcccattgcatgccctcaactcttgcttggcaggggtaccagagactgaaagacacggcacaaatctcaatattcatctcccacatcaccttccctgggaactggacagggtgaaagtcctcaaactctgggaacaggcgagatggaacagggatttaactccccgcccacaggtccatgggagcttgaggcagtaagggggatcccaggcacccatctcaaggagtggctgggagtcttttccctaacttgtggggacaccaccagttgtcaagctactaggcagtagggtctgagggctcaggcctccacctgagaggttataacctgagagacagctctacccttcctcccagtaagaagggaaggtgggtgggcacctgagagattaagactattctcccagtcccactaccagcacccccgatccctgagactgaggggtttacgggctgtgaatggaccttcagccctgcccaccctccctccccactgctgctgagtctgtctgatgttttggttgtgtgaataaatataattcccctctgg

SEQ ID NO: 14327 - DNA, 593 bp, Homo sapiens
aagaatacatggtagggaggaattccaaaaatgattacccattaaaaggcaggctggaaggccttcctggttttaagatggatcccccaaaatgaagggttgtgagtttagtttctctcctaaaatgaatgtatgcccaccagagcagacatcttccacgtggagaagctgcagctctggaaagagggtttaagatgctaggatgaggcaggcccagtcctcctccagaaaataagacaggccacaggagggcagagtggagtggaaatacccctaagttggaaccaagaattgcaggcatatgggatgtaagatgttctttcctatatatggtttccaaagggtgcccctatgatccattgtccccactgcccacaaatggctgacaaatatttattgggcacctactatgtgccaggcactgtgtaggtgctgaaaagtggccaagggccacccccgctgatgactccttgcattccctcccctcacaacaaagaactccactgtggggatgaagcgcttcttctagccactgctatcgctatttaagaaccctaaatctgtcacccataataaagctgatttgaagtgtt

SEQ ID NO: 14328 - DNA, 283 bp, Homo sapiens
ggataaattttttaaaggcccataagacaagtgattattatgattcccatactccagatacaaaccatatcccagccattgcctaaacagattacaattataaaatccctttcatcttcatatcacagtttctgctcttcagaagtttcaccctttttaatctctcagccacaaacctcagtttccaaatatttgttttataagttaagacgtatatgattccgtcaagaaagactggatactttctgaagtaaaacattttaattaaagaaatatatagtaa

SEQ ID NO: 14329 - DNA, 355 bp, Homo sapiens
agtgcagatgaccacattcaagggggaaccttctgccccagctttgcatgatgaaaagctttcctgcttggctcttattcttccacaagagaggactttctcaggccctggttgctaccggttcagcaactctgcagaaaatgtccatccttgtggcttcctcagctcctgcccttggcctgaagtcccagcattgatggcagtgcctcatcttcaactttagtgctcccctttacctaaccctacggcctcccatgcatctgtactccccctgtgtgccacaaatgcactacgttattaaatttttctgaagcccagagttaaaaatcatctgtccacctggctccaaagacaa

SEQ ID NO: 14330 - DNA, 321 bp, Homo sapiens
aatgcagatgaccacattcaaggaagaactttctgccccggctttgcaggatgaaaagctttcctgcttggcagttattcttccacaagagagggctttctcaggacctggttgctactggttcggcaactgcagaaaatgtcctcccttgtggcttcctcagctcctgcccttggcctgaagtcccagcattgatggcagcgcctcatcttcaacttttgtgctcccctttgcctaaaccgtatggcctcccgtgcatctgtattcaccctgtatgacaaacacattacattattaaatgtttctcaaagatggagttaa

SEQ ID NO: 14331 - DNA, 354 bp, Homo sapiens
ctcctgaggacttttgtctgggattggtcatcactcttctgtaatgcccacctgcccctgcccagaattcctagctgcctgtgtcaccctgtcccactgaggtcagagtcctacagtggctcatgcagccacaggtcaccttctgtgatccccatcccaaggcactggtggtgactctgcttcctgcactgacccagagcctctgcctgtgcactgcaagctgtgtctactcaggccccaaggggcatctctgtttccattctccccccacagacctgtcaagagaagcatgacaaacaaaatcatttacctgactttagtgctttttcccataattaaacctgattctgagtt

SEQ ID NO: 14332 - DNA, 452 bp, Homo sapiens
ggtcctcactgaagcttctctctctggagcctgaagtagtgatgagtagtctgggccctgggtgaggtaaaggacattcatgaggtcaatgttctgggaataactctcttccctgatccttggaggagcccgaactgattctggagctctgtgttctgagatcatgcatctcccacccatctgcccttctcccttctacgtgtacatcattaatccccattgccaagggcattgtccagaaactcccctgagaccttactccttccagccccaaatcatttacttttctgtggtccagccctactcctataagtcatgatctccaaagctttctgtcttccaactgcagtctccacagtcttcagaagacaaatgctcaggtagtcactgtttccttttcactgtttttaaaaaccttttattgtcaaataaaatggagatacaaaaaatgt

SEQ ID NO: 14333 - DNA, 3444 bp, Homo sapiens
ggccccagggatactgggccctcttctcaggggcgtctccaggacccagagctgttcctgctttgagtttccctagagctgtgcggccagatagctgttcctgagttgcaggcacgatggagatttggacactgtgtgcttttggtggggtagagaggtggggtggggtggggtgggggctgtctgtgtccaggaaacttaattccctggtgactagagctttgcctggtgatgaggagtattttgtggcataatacatatattttaaaatattttccttcttacatgaactgtatacattcatatagaaaatttagacaatataaaaaagtacaaagaagaaaagtaaaagtacccattgtttcacttcctggagataaccatagttgctattttgctgcctgtcccatcagtcgtttatctgttgtttgagatagaaattaaccaaaaatgacataaatattcatgagattgccttcctatatccttccttgttcctaccagtgtctgctattttgaagaagctagggtctggagggacagagaacagttccctgattaacagtattaatagcgacattggtaacagctaccatttatagagttttaatgggagtaggagctatgctaagtgtttttcatgtattatcgtttttaatcattatccccaaccctatgaggttggttattatccccattttacagatgaggaaactgaagctcaaagaggctcaatgactttcccaaggtggtcgtagtggtggagttggagtttgaacacaggcctgaccctagagtccacaccctgacccaatcaattatattgcatcttgggtccataaaccctaatccataatcccatcaagaaaagctctgctgctcttagctctaaataattcagaatctattctcttctctccagtcccgttgttatagtcttcactcatagacttaagatgatcccatcaccagagaggtttctctaccattagcttccctcttccggccattcttcacaaagtcatttttctaaattctgtgtcacatacgatgatggcatttctggaaattccttcaggtgctctcaagccctgctgcagagatccttttcagagcacacactgttccagcccatctgtctcaccctctcctgttgtatccagctccacgacaaacttctgccttccccaacacctttgtgcctttgcatatggtgttttcttgcccattttctgctcgactcgcccctgattttcaagttcaagacttaactcagggttcaggtcttccaggaggccttacttatgtcgtcagtctggggaactctccatgtgcttctatcactgtgcggttacctctttcacagcccttttaaagttctatcttccctttcccaccttttttgaccttccactagaccatgagcacctgggcggaaagccatatatcttattaagctttatatctgctacctggccgagggcctaattcatagtggagaataaatagtcaattgaataaatgaataaatatctccaccatcgtactaatcttaatcctccctgcccactcccaccactgaaaatgcaacattgtacacatcactggttgttgggagggacttaccttggaaagttgctattctaggaaagagaaaccttcatattcctggaaacagcaggtagtttccagtgctggcaatgaattccccagaactgctgttttggattttttcttgcctggcagctgttgggagcagggtgcagtgaggatggggtgagagtgggcagtttcttgtgcagatttgcctttctttcatcctggggctgacttgcagctccacacccatccatctctcaaatttcacagagggtaaaataggcatttggagagaaagaactctggcctgattcctttctctcccacaaatgtcctttattcataaaacaggaataataattcctgtatctcccaactacatggaagctgcagccctcacagaagaagatgatctgagaaattctttgatttcctcagtacagttatacccatgcatcataatactttaagcctggaaggcatcttaaaaataatgcaacagtcaaacctaattttacagagaaactgacatgaaatcacgcagctaatcatgataaagctgggtggaaaacttatcttgatgggcagtacaggaagatgcagtagaccttaagatgtcctgaaagtttcttatctcaggggaaactcccaggtaggctttatgtcagggacacagaaaaatgctccctgaaagtcaaaatattcgggctagacagacaaattcctgtaagtgtggtttgtctgggaaccacagatgtcactaatcctggtttgctccagagttctttttgttcactcctaccccccatcaccatttgattgatctccttaccctgtaatttccccttcttgtcgcttacctgcagtatctttcccacccaggcatgccttattctttctaaaggaaagtatgaatggagaggggaaagcttgggaaactgatagatttccttggatgccaaaacacctccatagcctgtctgcccggccctatgtggaaacagcattgagtttcaagtcctttatgcctccacccagggatagccacttgtaatccacatggcaattgtgaaacaagcaggaaatgcgtaattgtcagaattttgtggggaaaggactagggaataaggaaaacaaagatcttccttgtgttttagagctgtcagctagaggagcacctgcttgagtctgatgccatctaatggtcccagaagaaactgggttttgaacctagagttccatggactcttaggaattagactactactactactaagcattcactggtgcttactatgtgctattgctgtgccaagtatctgaaacctgtcttcttaccttatttttcaagataattctatgtggcaggtattactatctcaattctaagagtgagaaaatggagttttagaaacatttactaacttgcctgggtcacatagctaaggaagaggtggacttgcccagctttgcataaaactcctcaaaagagttgcctatactccctgactccacttatcttcctactatcctctttttaaaatatattatttatttatttaaataagcaatatatgaatgtggtttgaaattcaaaagacacaaagaagtatacagaggaaagcctcactctcaatccttctcaaggtttgctaattcctcttgcataggcaatccgttcttccagctttgtgtttatctttccagagaagtttactgtgtattaagcaaatatgtatatctttattcttgctcagtattttcgcaaacagcagctgtctaagttcactgttctgaactttattttttaaattaaaaatatatggctatgtagtattctatttt

SEQ ID NO: 14334 - DNA, 456 bp, Homo sapiens
atttcaatggatatttcctgggaataatgagttcaaatgaacgaatatgtggaacaaagcatcaccaacatttattttttcaggatgaggtgatggacaaaaccatcacagggaaattgaggcaaatagtacatgtaaaacaatacttcgggtgagtccacctatcccaaagtcgtatcaaagaagtggctgcagattggagcccaaagcctttggttcctcagtttccaaatggattctcactaggtgggatcatgagtttgctttggacaccccaaattctaactatttcttttgtttcttacatcctttccctcttccccagccccttcccctcatgttacacctcttgctggtttgagacgtcaatcaccactgagaaagaattaaaccagtattttgagctggcaaaattcttagcctagtacaattccttcaattaaactgtagctcaac

SEQ ID NO: 14335 - DNA, 237 bp, Homo sapiens
tggtggtggtggcagctgggcaggtctcctctgggaggtcttggccgactcagggacctaagccacgttaagtccaaggagaagaagaggcctagcctgagccaaagagagagtacgggctcagcagccagaggaggccggtgaagtgcatcttctgcgtgttctctatttgaacaagcatttcccccagggaagtttctgggtgccccactaagtagaataaagaaaaacggttat

SEQ ID NO: 14336 - DNA, 369 bp, Homo sapiens
aagccttctcagacctgcgcactccatctccctcccttttcttctctctgtggtggagaaccacagctgcagagtaggcagctgcctccaggatgagttacttgaaatttgccttgagtgtgttacctcctttccaagctcctcgtgataatgcagacttcctggagtacaaacacaggatttgtaattccttactgtaacggagtttagagccagggctgatgctttggtgtggccagcactctgaaactgagaaatgttcagaatgtacggaaagatgatcagctattttcaacataactgaaggcatatgctggcccataaacaccctgtaggttcttgatatttataataaaattggtgttttgt

SEQ ID NO: 14337 - DNA, 332 bp, Homo sapiens
aggcagaatcctacaacttccactccaagtgagaaggagattcaaactcaatgatgctaccatgcctctccaacatcttcaaccccctgacattatcttggatcctatggtttctccatccaattctttgaatttcccagtctcccctatgtaaaacttagcaacttgggggacctcattcctgggactatgctgtaaccaaattattgtccaaggctatatttctgggatgaatataatctgaggaagggagttaaagaccctcctggggctctcagtgtgccatagaggacagcaactggtgattgtttcagagaaataaactttggtgg

SEQ ID NO: 14338 - DNA, 245 bp, Homo sapiens
ttcttccagaccagagtttgatgccagcagcttcggccatccaaacagaggatgctcagatttctcacatcctgcccaggatctcctcttagggtagaagtctctgggacatccctggggtgtgtgtgtagatttcccacctggggactctgctgtccctgggcttgcatcccagggatcccagagtggcctgcctatcacaaccacatcccttccccccacaaggcaataaatctcatttcttt

SEQ ID NO: 14339 - DNA, 2653 bp, Homo sapiens
tgatccttctgagagaaatgacttgtgggagacaccctgcagatcctcatgggtttgtgacagcccctgcgtgctcagtgccctttaagtgcatcccgctgtgctgactttgagtgggatcaacatctgtcctacgggtcccctcttttttggccccagtattcatggcagggtttgttggacacctactagcttcccttcccattcaacacacacacacattcttgctctacccaaagctctggctggcagcactaaatgctttggtggtgtttgcactgtgtcctttccaggccttggccagttcttccaggggtgaggcatgtggtgctggggattggcagccatcctggggcccacacaggtgtgtcttgctccatttggcccattgtgtgttactttgtgaatgagccatttcacatggacttcatgaaatttgcctcctgagttcaggtttaccctgaaagggatgcagattatcctgttcctcacgaccccctcagctaacaacagttctgaagggtgctgggacaggacaggctcatggggactccactcctgcctgggtttactctgtatgaagaggccactggtatcctgccatgatgttatctcctttttctacttttccctagagtcccatgcatgataaagagaggcccaaggcttggataaggtggccacttccctcagtggagtcagtcatgttaggtaggaggtggtagagtcggtctgcgaggtatctcgtaagaggggaggtccacctagacacactctaaatatgtggcctagaagattttggtctacttttctgtgaacagaatttaaaacatacaaagagataaatcaccataccacatagtttatgtcaggaccaaaatgagcaatacagattacggttttcaaaccagaatgcacataagaactgcttgggatccttttaaaagtacaggcattggcctggtgcagtggctcattcctgtaatcccagcactttgggaggccaaggggacaggactgcttgaggccaagaggtggaaaccatcttgggctacatagagagaccccatctctacaaagaaagatttaaaaattaaccaggcatggtggctcgcacctgtattcccagccactggggaggctgaggccggaggagtgcttgagcccaggagttcaaggctgcagtgagccaagattgcgccactgcactccagcctaggtgacagagtgagaccctgtctctaaataaataaataaataaaatataaaaataacagtcatcacccagacctactgaattagaatctcgggagtgcagggggcagcaacagggaggctgtcttttctgagatggggtctcactctgtcaccaggctggagtgccatggcatgatctcagctcactgcaacctccacctcctgagttcaagccattctcctgcctcagcctcctgagtagctgggactacaggtgtgcgccactacactcagctaatttttgtattttaagtagagacggggtttcatcatgttggccaggatggcctccatctcttgacctcgtgatccacccaccttccctcccaaagtactggaattacaggcattagccactgtgcccagccgaggctgtcatttttaaccggctctggatgactctgatgcagccatcctggaccttggctgtggtctggtaactggaacccagtgacgtaatcaggtgccatcgggggtcatgggaaagggggatccccaaggtctgaggtggactaggaaggctttctgaagaacctgggtctgttagggcatcagccaatcaaggtacaagtaaatagaggcaaaatgagggtttgaactgtgagcagttggtcctggaaaagaaagaaaccaagagattatggggactcaatgggcttcttaagagagaataagttgaaatcaatgaccagaagaccctgatggaagtggaggagaatcatctcaggcaaactttttgtgtgccagtaacagaaaccctctttgtgtgatcacatgcaaagtataggatatttgcaatatagccatggggaggagtgcagggcccaagggtagattttagccaggcctcccaggaacagaactcggatccgaaaagcccagagaagctagagctgcccctccaacactctcggatccacatggtctgtgttctctagacccccctgcatgttagcggtgttctctctctgtggactgactgtccttctcagtgaacatgtccacccgacagctcctgagtttatatcatctcaaccctcacaacccacagaggctgtgtctcctagtcacagctttaaattactggaaaaataaatgactggccaaacttggagcaggtgtccatcccagccctgtgtagttagagcaggaatcaagatctcaacacaaatgtggctgccaagcactcagccccggggcgaggggtcaagttcttctcagagaaagaggaataagttggttctcagaagacatcacaagatacgtgtgtacccaacaatctctgatctctgctgatcttttgcttagacgttaacttgatgcatcattggaaaggtgtttctctcatctctgtcctaaggcttgataaagtcattaaaattgtgttcttttgact

SEQ ID NO: 14340 - DNA, 331 bp, Homo sapiens
gtgacaaaatatctgaacagaagaggacttaggagagatctgaactccagctgccctacaaactccatctcagcttttcttctcacttcatgtgaaaactactccagtggctgactgaattgctgacccttcaagctctgtccttatccattacctcaaagcagtcattccttagtaaagtttccaacaaatagaaattaatgacactttggtagcactaatatggagattatcctttcattgagccttttatcctctgttctcctttgaagaacccctcactgtcaccttcccgagaataccctaagaccaataaatacttcagtatttc

SEQ ID NO: 14341 - DNA, 986 bp, Homo sapiens
gaccgtctctgtctgatcctgtccattcggaaccaggcccacctggaatcccacaacatcagctctgtgccacctcccaagagggctcctcactatctagggagccctgggccagggcgtggagagccctcagtcggggcaggccaggggaggggtgaagtggttgcctggacaccccacgggaggagtggcatctggggctcttggccctcccacctggagcctgttacccgttagagagctgagacccttatttaaaactcacctcccaatcaccccaaacaaatggaagagaagagaaaggacatggcgtattttgtatttaaaagtaattgtattaattatttaaagtgtggaaagcaaaataacaaaaaagagaaacgccaacaaaaatcagcagatgttgaagacaggggtctcgggggtgggctccggcacccacatcctggagtcaggactttcctcagtgactgtgtgtaggggggtttcagggctgaaccccacctccctcccaccttcctcccacctcacctgtcgcacccactgtgaaagttggaatatgtggtctccctggcctcagggctctgactctgccagggtggggctctctaacccacaggtgttggctgcctggcccatgtgcccactgtctcttccacttggtctgggtttggcaggcactgcctgctacttgagggccaggatgctcccccagggaagaaacggaatagtgtggggtgtgtgcagggctgcatcccgcagatggctggaatattaaaattcttctatattggctggtaaattgccatggccctgagccactgagtatgttcattgccacccctgtccctcccctgggcacccctcactttccctgatcctgcaattaaagggttaatgtgtggcatatggaagggactcccaggaccctgtgcccagcttccatgctgactgatggttaaataatgtgattgtctcctcccagg

SEQ ID NO: 14342 - DNA, 1093 bp, Homo sapiens
gctcagacccagacgtggtgcttctcacactggaggagcacacatccaagagggactccaagccctggggcagggtggggggccatgttcccagaaccttgatggggtgagaagtacagggcagaaccaagaacataaaccctccaagggatctgcttgatatcccaagttggaagggaccccagatacctgtgaggactggttgtctctcttcggtggccttgagtctctgaatttgtcgggttctcccatgatttggggtgatttctcaccctctgtccttcccccagcacaaagcactggccttgcctccaggaccttgcttccttctcatcttgcctcattttgcttcccatctgaagagtggaaatggggaactcccccagaggtggatactggggggcaggcctcccaagctgatggacatgagagtagggccctgacaggccttcctcctctcaaacctggcagatgggggcctctctggaagagggaggggccctgtcactgtccagagtctctttttacacttcacctccttctgcagtcagactgaaatataaaaaaggtggtggtggtggtgaaggggctggtggagatgtaggaaccgatctgctatttttaatttcctgtgaggatagagacttgcagttagactcaaagaagtactgtactttcccaggttgactaagaaatgccagtggtggaggtgggtgtttgggaaaggcagggccctgaaatggcctgtccctagggctctccaagcactagccttcccagcttcccgccgccccccctatctcttcctgtctaacttggggaaggggcctgggctgtgaggacagggcccccacaggggatggtttcacgagtgtagtcccggaggccttccctttacagctctcctccagccctgggcacatagcataggctggggacacaggatcctggcctgagaattgaggggaggtggccagcccgcagaggtggggtgctggggctgcatgatttttgccctgcgtcccttctctttggggctcctttcccctctcatacataaaatcgctttcaaattaaaatcgctgttttctgg

SEQ ID NO: 14343 - DNA, 568 bp, Homo sapiens
tgtgccagaaaccgccctgagatctgccggtcatctccatggacttctgcaccccattccatacccttcttcacctggggtaccccttccagttttccccttgcttcccaggcccttgacatggcttacctgccttcactcccagcaccttgcccaacaggataagctggatccccttggccttctgaatatcccagtgtcttcaggtttcccaagaccacttccctgtgggcttccaaaatggcctttatcatttctccagtctgtcaccctcctttcctgctcccatacacccaaggcttgtttcttcccctgtaaaaaccactgcctcaatctctggttcactcaactagtcaccatgtcctgaggcatgaagcctcctcagctcttggaattgctggcaaggggtgactgcctctgagtcattgtgtttttcaaagtgatttcttttctgtagctttttgacctaagatctcagcaatttgaacactaacctctcccctcctggctcaagaattactccgaagtcagtctgcagaaaataaatatttagtatgacatgacactt

SEQ ID NO: 14344 - DNA, 167 bp, Homo sapiens
gccagactccagggttgcctgggaacagtctctccccaagatcacctgtagggaaatgagtgttccctggaacaaggaggtgggggcagtgtggccccttccccaactgggggtggacagctgtctcctggggtgggttggtattaaagaggaaagcgattttttgg

SEQ ID NO: 14345 - DNA, 441 bp, Homo sapiens
ggaggaagccccgttggcttacagaagtcatggtgttcataccagatgtgggtagccatcctgaatggtggcaattatatcacattgagacagaaattcagaaagggagccagccaccctggggcagtgaagtgccactggtttaccagacagctgagaaatccagccctgtgggaactggtgtcttataaccaagttggatacctgtgtatagcttcccaccttccatgagtgcagcacacaggtagtgctggaaaaacgcatcagtttctgattcttggccatatcctaacatgcaagggccaagcaaaggcttcaaggctctgagccccagggcagaggggaatggcaaaatgtaggtcctcgcaggagctcttcttcccactctgggggtttctatcactgtgacaacactaagataataaaccaaaacactacctg

SEQ ID NO: 14346 - DNA, 2063 bp, Homo sapiens
gggcactcactgccatcctgtggaagccaccatcatctctggcccaagcttctgtagtagctccctaaaataataccctatcatctgctcctaatccctccaatctctctccactgagtggctggaatgcttttttttttttctttcacttatataagggataatttttcttttttttttttttttgagacggagtctcactcttccgcccaggctgcagtgcagtggcatgatcttggcttactgcaacctccgcctcctgggttcaagcaattctgtggcttcagcctccggagtagctgggattacaggcacatgccaccacacccagtgaatttttgtatttttagtagagacggggtttcaccatgttggccaggctggtcttgaattcctgacctcaggtgatctgcccacctcagcctcccaaagtgctgggattacaggcgtgagccaccacaccaggcccgagaaatgcttttttaaaaaacacacatcttatggcattcaccttcttggagctctaggacagtggttctcaaaatttttttctctcaggacctcttaaaaatcatcaaggaccccaaaaagcttttgggtatgtgggttatagctatcaatatttatggtactagaacttaaaagtgagaaaaatttaaaacacgagaatacataggcacacattctattcatcgtgggaaccatggtgtcaatacatatcatgtagcttctgaaaaactccactgtacacttatagaatgaagaaggcaaaaaacttttttttttttttttttgagacggagtctcgctctgtcgcccaggctggagtgcagtggcgcgatctcggctcactgcaagctccgcctctcgggttcacgccattctcctgcctcagcctcccaagtagctcggactacaggcgtcctccaccatgcctggctaatattttgtattttttagtagagacggggtttcaccgtgttagccaggatggtctcgatctcctaacctggtgatccgcccgcctcggcctcccaaagtattgggattacccgcgtgagccaccgcgcccggctgcaaataatctttctttttttctgagacagagtctcgctctgttgcccaggctggagtgcagtggcacgatctcggctcacggcacgctccgcctcccgggttcacgccattctcctgcctcagcttcccgagtagctgggactacaggggcccgccaccacgcccggctaactttttgtgtttttagtagagacggggtttcaccgtgttagccaggatggtctcgatctcctgaccttgtgatctgcccgcctcggcctcccaaagtgctgggattacaggcgtgagccaccgcgcccggcggcgaaacacgatattgtactaacatcttaattttgttataaaatctcacaaaccccctgacatagtctcagagatctgtagggccgaggttacatttggagaacccgtactctagggccaaatccattcttcttgccctggctcacttgtcccccccaccgccccgcgctggagccactgcctagttcttcagccctagatggtgctcgccagacctcctctcaatgctcatcacacacagggctattcctttcctccaatgaaccaaacgcctcccgcccacctccaggtcccagtcctctgttccctttgcctggtccacccttgccctccctgggtcgcagacgaggtcggcctcgtcattccccgcagaccgccgcgcgtccctcttgtgcggttcaccacagttgtatttaagtgatcgtgtgagtcgtcgttaaatgcctgtctccccgcggatcatgggctcctcgaggacagggactggcctgtctgtccactgctgtaaccccgcgccggcatagggacctaaggcccactggagggcgctcatcaagtagctgctggatgttgacgaaggaagcggcggcgcagctcagggatctccgagtcaggacggtcggccagacccacggggtaacgggtctaatcgtgtaggaataaagctgtattccagtgcttcc

SEQ ID NO: 14347 - DNA, 1316 bp, Homo sapiens
agggtgggcactggattgtggggaccgtaatagggggagggatgatggataagagggtgcctgggcaagtaagtagagatagaaagaggttcctgggagttagaggggtaatgggaggctagaagtttcctggaaatttgaggggctttgacatgggtatttctgtgacgcaccaatggagagacagtgggttccctatttcaggagaagaaacctaaccttctttagttctgaggaagccagcaggcaaactgagggtctcttagggaggacagtatggactgatttccctatgctcatttcgtcctctttccccagaaccccccaaagtgtccctgatgccagcaacccttgcacgggccgccccaggggaggcacccccggaattgctctgccttgtgtcccacttctacccttctgggggcctggaggtggagtgggaactccggggtggcccagggggccgctctcagaaggccgaggggcagaggtggctctcggccctgcgccaccattccgatggctctgtcagcctctctgggcacttgcagccgcccccagtcaccactgagcagcatggggcacgctatgcctgtcgaattcaccatcccagcctgcctgcctcggggcgcagcgctgaggtcaccctggaggtagcaggtaagagctgggagctctgcggaatctgagccagcacccaggaagacaggagctcactctcaccccttctgcctgccaggtctttcagggccctcccttgaggacagcgtaggccttttcctgtctgcctttcttctgcttgggctcttcaaggcactgggctgggctggtaagtgtcagccctaccctgaccatgacctgaggttggtggactttccccacctactcccaagagcctgacacccatccctctgccctccacctctaccactccagcatcccatcccttctcaatctttccccacagctgtctacctgtccacctgcaaggattcaaagaaggtacagtgctccacctctctgtatctttcccttgtcactttatctcctcatcctatctcaaaacccatggagggaggctgctggtgtggtaggcagaacctaggcttggaattcacactgatctgggttaaaacctggcactatatcctaactgtaggactctttgagcatgctacttaatctatatgtttccttgggtgtagggattttaaaaagttacttaggcagtgctgtccaatagaaagataatgcaagccacatatgtaaatttaaatactctagtactcacattaaaaaaataagcagaaacaggt

SEQ ID NO: 14348 - DNA, 593 bp, Homo sapiens
aggggcaggctactggggtggggtagctttcgggaaagggaataaggagcacgatgcaagggcgctgtggcccccgggtgatctcccaccacacttactgtcttcctttatctctgtggacttgtatatattctggaaggggaaccacagtttcaccatcgcccgcccattctactactcaacccctcccccccaaggtatttccagaactaaacccttcctttccctctgatgggtacactgaagcccctgctccacagagtagattgcacatggagggagggagagggggcgtgttgaacatcctgcagtcacagggtcaggggtcaggtggttgtagtctgtgcctgaagtctgtgtttgtgttgtcgtggagacaaggcctttgagccccacccttgtcctagaacctaccccctctcaaggatgcgctctttatttctaccctgtctctccccgccacccccgacttcccgtggaaattcccaactcggttctcatggaggagtgggtggagacaaggagggagtaagtcgtaggagtacaaggtttttattttttttaacagtgattaaaatatttattggtcattt

SEQ ID NO: 14349 - DNA, 119 bp, Homo sapiens
ctgcctccccttctccctgcctccagaatgttctgggataacatttggaggaaggtgggaagcagatgactgaggaagggatggactaagctaatccccttttggtggtgtttctttaa

SEQ ID NO: 14350 - DNA, 108 bp, Homo sapiens
tgagccctgttcctgctcatcatgaagatccccgcgatacttcaacgccttctgacttccaggtgatgactgggcccccaataaatcccgtctttgggtctctctgcc

SEQ ID NO: 14351 - DNA, 1508 bp, Homo sapiens
agaaactgaggcctctactcaacctcacagagcaagctaatgccagactaaaacctctggcctccaaaccccatgccctttctttttgtaagctacacagactgtcagggcaaatgtccactggataaaagcatgagatgatgaatggacggaaattaaccaaaaaggtcatcaacacattttcaacagatccatcaatgtgcactcaaagaagctgagacaggcctaacctttaaaggctgatgtcaaggaaggggagcagcaggatggtactcggtctgacccagcggggtcgctcccctgagcctatgtgtgtttggagtggacgagaatgggagagagattagaaaaacagcagcatcatgtgaattacagatgcacaggaaagcttacagcctgtctagacaaattcacttatgttacagatgaggaaactgaggctcagaaagaggaagggacttgcccaaggccacatagcaaaggaatagcaaagttgagacaaaaataatggacattgtgactctgagtcaagtgagaaacagagagactgatggagaagtgtgtgtgtgtgtgtgtgtgtgtgtgtgtttatgtgcatgcagtgtgcactcactcagggggccagggtcctgaatttagaaacactaccaccaagaaggcattatgcctaccctacccaggcagtgggggctggagccagggcctgggggctggaaccagggcccagggcctggaggggatggtaagcctccagccccaccttctccaggaaggggttggtggtctggcacgggccaagcgtacctggccatccacaatgctcacctccaccacggtgatctctggccgggtaagcagctctcggccctcttggctgcctagcttccagaggcgggactcttgctgcattcccagaagcttcttcaactccgactccaggaaacctgagagccagagagatggcaagggacagggagatggcagggaacaggcaggagtaggatggagcagcccactgggaacccaaggacccggaggtgcaaccgctccctgagcctcatcccagctctgtgtggttcctgctcaccctcagccacagccctctcttcttccaggacgtagagccagccaggtaccacccctccttcgccctgccttccccaggaagctcactctttgagggccttctctggcagcggcagcatgagagcctgcgtcttcacccactggggacagcatgcaaagggcaggtatttgcccccaccaccaaccaactcaagagcctggatctggaacccaaactgcctgcactcaagtcccagctctgcccatcactagctgtgtgacatcgggcaagttctcactgtgaactggagatggcaataggacctacctcagagtcgtaaaatgcaggattttatgaaaagtgcttaaagagggtctgccccattaatggctatgtaaatgtgaaccacgattttcatcatattatgtatgctatcaccact

SEQ ID NO: 14352 - DNA, 84 bp, Homo sapiens
gctcaggccttacctcgtgcacatacctaggtgtggagtcttgtacattgccatcgtcaataaaactgccccagtttccccttg

SEQ ID NO: 14353 - DNA, 1053 bp, Homo sapiens
aacttcctgggcttatctggattcttctgggctatagatctcaaatagagacctgttggttgctagggtagtccagacaccccttagatgtcttcataatagtcctatctaccttcaaaaaccatctctatatatggcagactatattaacagctgctgaacaaatcagctctggaggtgattccacatcccctggcattatgctctaatgctgctcatcggagaacagacagccaggataaagtggcaccttctggagtacactggagggggcagcccaagttagaggccagcattgctgacattctggaatatttgcatctaaaaatgtttactcgttgccatgctgcagtccgcacaagctgtgaggcagaaaacttgacttgaagcagccttgaagagtgagttcatgagctcatggtttttctccttgtatggactgctcgctccaagggcaggcagagctcatgaatgcctcttatcttcctaagcggagttttaggtgacacaggatgaagcagaagagatctacccatctcatctgctctgcacccagcttctaagtggacaaagccaagcccaggcatgagctctggcaaagcaagaccccagattctccatttttgcctgtggaaaggagggtccctttacaggcttttttttcctttttttcccccaaaatctcttaaaatgaggaatctcttagcagactttggagttccccattctgccacattctgaccatgagacgcggcttgcagtgggggtgaacgcacataaaaagggaccactgacgtcctgctctactctctgctttctatttatttattttgggggtgggttggggagtcagaagaacctggaggacggaggaaaccaggggcaatgtttacaagactggtggacaagtgtaaatatggaataagaacaaacagttctaattaattccttcttctgcagtatggaaacctattacgatgcccttgagtcaagcactgagatacgttacccaattagggaaataaatttgttaataaaattgctgaggtcacc

SEQ ID NO: 14354 - DNA, 1414 bp, Homo sapiens
gccccgggcggggacttgttcccggtcagcctgtcccaggacagcccactccagaggcacaggagggtcaccaggcctgcggtgctgaattcacacttgccttgactttcagtctcgtcctgacacgattccaaaggtctgccatactcttcagaggagttcggctcgcaggaaaatgtgggcttcctttaaagggagggggagaagccagggtgatagcccagactctgccctgttgtgctggcagaaacggggagaagggttgagttttcatgaatagaaaacaagagcagcagctgtcaggcccagctgacaagcgtggggctggtgggctggggcatggccacgccagggagtctgtcacctgggaggtggggcagggatggtgtttcgggtggcgggatggggagcagcttggtccatgtgccttcagggggttgttacttgagagctccagggtgaagggagaaagcctgtgctctggctggctgggcctctatcctgaagagggaaggtgctagaaattagaacaagtgactgtaggggggaccgtctagaaacaccaggcccagacacacggtccctcaggtcaggaggagtgagcagccggcacagcctcctgggaggatcccgaagtagggactggggctgagagcagagaggagggtcgggcagccccagggcgggcgggcccgcctcagtgttgcttctcacagaagctgcgactctagaccaggcctgcagccagaacgccgattccgggagcttgggagccctgcgtcagggcccagagcctcgcacttgctgtgtgcgaagatcgccttgctttactgtgaccacagccccgacgcggggctgtttaacaagaacttcagcgcagccggcgtttctgttaccccggccgcggctcttggcggcgggagaggcgcagtggctgcaggctgccccctgccggccacaagggagcagcgtccgcgccgccgcccaccggccctcccgccagctcctcagcctgctccctgggaggcaggctccagaagcaccccgacggggggccttattaagtgcgagaagcctctccagcgagtcttccccgtgtgtcctcatctgcggcaggcaggagagggggagcaaacaggaaattccacagctgcctccagaaacattaaccacccctctctagtcttactggtattttttgtttccttaataaagctccagtctccctcatttgagcaatactctcatttcctctgatgtctggatgatcggcagggcaggaatctgagcgctggccccgtggtgaggccatgttctcataatcaggctccagccagaaaaataagaaacaccgcaacaggcttcagtatcagggctgaaactgctggatgaataaactatttattaaaaacgg

SEQ ID NO: 14355 - DNA, 153 bp, Homo sapiens
tggccacgctggggagaaggtggacagatttgggaggcccctcctgcccaagtgaggccctgggaatttacagagcctgccagctgggcttggaaggaaaacaccctttccaaagcaaattcccctccagcaaataaagcatgaaatatacag

SEQ ID NO: 14356 - DNA, 969 bp, Homo sapiens
cgagtccatggagctgagcagcaggaggaggagccgtgaccctgtggaaggtgcgtcgggccagggccacacccaagggcccagctgtcttgcctgcccgtgggcacccacggacgtggcttggtgctgaggatagcagagcccccagccatcactgctggcagcctgggcaaaccgggtgagcaacaggaggacgaggggccggggcggtgccaggctaccacaagaacctgcgtcttggaccattgcccctcccggccccaaaccacaggggctcaggtcgtgtgggccccagtgctagatctctccctcccttcgtctctgtctgtgctgttggcgacccctctgtctgtctccagccctgtctttctgttctcttatctctttgtttcaccttttccctctctggcgtccccggctgcttgtactcttggccttttctgtgtctcctttctggctcttgcctccgcctctctctctcatcctctttgtcctcagctcctcctgctttcttgggtcccaccagtgtcacttttctgccgttttctttcctgttctcctctgcttcattctcgtccagccattgctcccctctccctgccacccttccccagttcaccaaaccttacatgttgcaaaagagaaaaaaggaaaaaaaatcaaaacacaaaaaagccaaaacgaaaacaaatctcgagtgtgttgccaagtgctgcgtcctcctggtggcctctgtgtgtgtccctgtggcccgcagcctgcccgcctgccccgcccatctgccgtgtgtcttgcccgcctgccccgcccgtctgccgtctgtcttgcccgcctgcccgcctgcccctcctgccgaccacacggagttcagtgcctgggtgtttggtgatggttattgacgacaatgtgtagcgcatgattgtttttataccaagaacatttctaataaaaataaacacatggttttgc

SEQ ID NO: 14357 - DNA, 133 bp, Homo sapiens
ccctcctgggctgggcttgggcacaaatccccaggcaggctttggagttgtttccatggtgatggggccagatgtatagtattcagtatatattttgtaaataaaatgttttgtggctaggggttttgatttc

SEQ ID NO: 14358 - DNA, 528 bp, Homo sapiens
ctgaagacttcctgtaagagaaatggaaattggaaactagactgaagtgcaaatcttccctctcaccctggctctttccacttctcacaggcctcctctttcaaataaggcatggtgggcagcaaagaaagggtgtattgataatgttgctgtttggtgttaagtgatggggctttttcttctgtttttattgagggtgggggttgggtgtgtaatttgtaagtacttttgtgcatgatctgtccctccctcttcccacccctgcagtcctctgaagagaggccaacagccttcccctgccttggattctgaagtgttcctgtttgtcttatcctggccctggccagacgttttctttgatttttaattttttttttttattaaaagataccagtatgagatgaaaacttccaataatttgtcctataatgtgctgtacagttcagtagagtggtcactttcactgcagtatacatttatctacacattatatatcggacatataatatgtaaataaatgacttctag

SEQ ID NO: 14359 - DNA, 50 bp, Homo sapiens
aattggagaggattcttttgcattgaataaacttacagccaaaaaacctt

SEQ ID NO: 14360 - DNA, 471 bp, Homo sapiens
gtgcctggcccagggcctgaaacccgccctcaggggcctctctcctgcctgccctgcctcagccaggccctgagatgggggaaaacgggcagtctgctctgctgctctgaccttccagagcccaaggtcagggaggggcaaccaactgccccagggggatatgggtcctctggggccttcgggaccctggggcaggggtgcttcctcctcaggcccagctgctcccctggaggacagagggagacagggctgctccccaacacctgcctctgaccccagcatttccagagcagagcctacagaagggcagtgactcgacaaaggccacaggcagtccaggcctctctctgctccatccccctgcctcccattctgcaccacacctggcatggtgcagggagacatctgcacccctgagttgggcagccaggagtgcccccgggaatggataataaagatactagagaactg

SEQ ID NO: 14361 - DNA, 3270 bp, Homo sapiens
acgggtgtcagcaagaagaaaaattaacaaaagacagaaggcctgactttggggggttagggcaaggggttcctctggattgcagaccacatcgcacagacccctggctctgaccccctctcatcccggaagaagaggaagaagcagaacagactagttttgagtaaactcagtatgcatgtgtgaatgctgaatcacaggaatggtgttgaggctaccaagaagaaatccatgcagccactttgggttttgttataggcatcagtctaacaagtcattaggtcactcgggaagggggaaaaagtttaaaatgggggaaaaaaagccatctttttaaacaaaaattattttgcctacagaaaggttgtagttttgagcacatgttaatttttttccctctttccccacttttatttttttaaataagggataacatattctttatagaatagtgcttgttctggaagagattcaggtgaaaagttggcgtggcatgtttgaggactctgcggatcagtgctacaggagtacatctgccctgccacatgactccagaagtctctgaccccatttgtttttaatggcatcagccaatgagttatcacccttttcctcctcttttctctttaatcttctgttgatttacacctttgacatttgtattcgtcaaccctgtggcttgttagcatcagaacctctctgaagaccaaacttccctgtgtggccagcagaggaagccttgaggatagatctcgggtgacgtgggattttctaagcctgagaggtgtccttctgcacacccttgtaacaattaaaattgcttttcttccatgtttctcttggcagagagaaatgccatcatgcttactgctcttttggattcttcatgcagtggcttcccatttgctctgggaacagtgcctctgtgctggttatatgtatgcaccacatgtgcacacacgggtgttggtgcaactcaccagcaggtgtgcagtaggcaagcttgaaggtggcccatgcttctctgttgtcacacaacacctttccctgtttctcttcagttgtcctctgatattttcacagcctgttagtggcggctgatctgtagaggtatgaaaatacagccccaaagggggaatttgtcatggggaagggccagccactgactacttgatcttggagaccacatttagatggaaatgagaggacctccacagccccgcctccctgccaggatgctagattattggctgggaggtgggcaagtggcagcccagctgaagcaagaggctgattgactggctgctcactcaggcaggtggcctgccctggcatcctgtagattctgagcaggttgagatgtggatatctccatgggaagcttgaaccaggctagaacagctgtctgccaaagatacaagaatatgcaaagtccctcttacccccctccttccctcaagtcttagttggtttgagagccagggatatggatccagggtgctgttgcagggtcacctgcctgttaccacacccccatccagctgggtggtgggtgagggtgtgagacaggcagggagaccaggtaatgagtggctgcaaggagtcatatagcctgggtgtgggtgagggtctgcctgcctgtttctgtctgggtgtctgagttccaaaaaatgtgtgttgtttgttcctcctcatcctcttctgagactgttgtttttttagagcttgattgtgggagaaaagcttgtgtgaaattccctcttcacctccccaccccccaaaaaataaaagggggcataaactttattccactggagaagccctgggggtggctggagccagcctgctgagaagcgtggtgcagctgggtctgggacttcactagagcttactctggagcacctattttctgtgcacatgggagtgctccactccctagcagagcagagggaagtctctgccaggtacccacgccacaggcctcaggatggctttttgtctgagggcctcattaggcccagactgctgctgctggtaccagtctcctgagacactgcctccctggagcccatgcatgcccagctgttcttactgcttagtagccttgaagcagcacatctccactgtccctggcaggattgtgggaggcttcacaacccctgctttcctgacttcctcttctgcccaacactgggtgccccttcccagtttcccagcaggggcttcatgggccaccgtcagtgggtctgggcctgccagagtcgtcttgctcttcctcttgcttctaggcaaccacacttggcaagttaaatgtcccaagcaccttgtctcccttcccaagaacaaaccatttctgtgcacatccttggaggcgagatgagctccttgcagagggccagagtaagtgcaagtcatggagtgcaggcagaggggtccatggcttccccagcccagggagggtatcagtatcattcattctctctcccctcactggtatgggttcagagcaatgcctagggcccctctctgctcccctgcctagtggggtggtagtggctacctctcagccccaatagtccctgctcctcttagaatcttcaccaagtggcaggccacctctgggcaggaccacctgcgtctggcacccaggaggtgaggcagacaccatggttaggtgatagggtctgaacccagttggggagacagaggggttcagacttgggaagaatctgtcagtgtgcatggagtgaggtgtgtgtgtgtggatggatgtgcacgtgtgcatgctttttttctttttgccgtgaggacagttgaatttggggcatttttctacaagaagcagtcagccttctctcccccataaggactggctgtaaccttaagcccatcaaagttacttccagcctggagagaacctcaccaaacagctggtgtggcctgagggtggccatggtgggaaatgggcatgagaataaatacctccccaaattcaatctgagcccagcaggagaggatggtagggttgccagggctcagaagtgcaagctgattactcaccccaccctgcctcgccgcacctttcctttgtttccttgggtgaatgcaggagcagcagtggctgcccttcccacctggacagtggtgtgtgtagaaagccagctggatgtttgtggtggggcctcatggtgcctaggaggagataaagatgaggaggtttttccttattgtataaatgaatatttgtatgattaaattaacacacacacc

SEQ ID NO: 14362 - DNA, 812 bp, Homo sapiens
accaaagtctagaaaggcctatgttactgacggaagaagtattggttccagacttcctataagactgtctgcattggtgctttagtatctcaggcctccaaggattccatgatgattttaatgtctttctcaaaactctgatatttgtcacacctagaaagtatgtagcctgattgatacttgccttgactaaattttgggacctcttggggcattttgaagtatttaactgtcttgaccagttggaagaagatacgtgggccataagcatcttctggacaggggaactgctttcagagagaaaacctttccaagagagttttgttttgttttggtttcgttttgtttgagatagggtcttgctctatcacctaggctggagtgcagcggcatgactgcagccttgaactcctgggcttaagtgaccctcccacctcagtctcctgagtagctaggactacaggcacacactactgtgcccagctaacttatttttattttttatggagatggggtcttgctttgttgcccaggctggtcgtgaactcctggcttcaagcagtcctcctgcctcagcctcctaaagtgctgagggctttaatggtttcacattgaagcctgaagttgctaagacttaggttgtttcttatatctggttttaagtagatgaaacaaccagaaacttttacttgtgatactctaccatgaaggatgcggtaatggcaggaatagcagaataattggtgcttgtaaacatttaagattctcctgtggattttggtgagtgatcattaaactgttttccaacttgc

SEQ ID NO: 14363 - DNA, 197 bp, Homo sapiens
tagcgtcggctcagagccctggtaccttggacccaagaggaggcccatcatcttcctggagtaacatcaccagtgaccagcagacagtgagcttctatcccaggccctgcagccagtacaccaaggctgtagggatcaagcatgtaaacaccaactggtccatacccattcattaataaacttcttaagtgcaagaa

SEQ ID NO: 14364 - DNA, 1447 bp, Homo sapiens
ggtgccctctgcgcctccttaaggatgcagggtgagcatctcctctccacacctgcctggcacccctgggggggtccaggattgaggattcatctacctgccaggcctcaggcccaggacccaggaggcctccccacctaccccagcacacacactccctgccactgttctgcgctttaattgtgggagaagagaggagaggagggctcagcggtggggcagcctgtccggggcgctgacccaccatcaccctgctctgcccagcctcgcgtgacctcagagaggtggggataggggacaccttcagcctccagcatgtgtggccactgtacccccacccacccttgggggagcatgatgggcaggtgagggcaggatggagaccaagggagtcagtgagcagaggccctgggagtgtccggttggggttggactgaggacagaggggcccacacttccttgcccctttgtgtcccaggcctggtgcccagactccttgcatggcttgtgtggtcctcagactccgcacagcgagcgtaggtctctgggtttcagatgaagtgcccaggctccaggaagttgagggacccacaggagaggtgggcagagctggagttctcatccagggctgcttgtccccagagcccaggtttatactacctccctggggcgggggctggccgcagggtaggggagaggctctgcagtgtggagtggagcctcatcgaggggcgctgggttaggggagcacctgtttcagactgggcatgaagaagggagcacagcagctactagaccccattagcacctcattagcccacaagccagccaggggccccaggaagatggggcaccccccagcaccctccagattgagagcaaggtagaggaaggagtcccagcctctgggcagaccagaggcccagagggagagagtagcagaaggcttttgatttttctcttgcctgaggcttgaatctgacaaacccttggtgggcactgctcccttaggttcttccccacctcaatctacctgcctagagtagcagctcccagacccagttctgggactgaaggttaacccttcacctgctgtcccttcttaacacccaggcccccagagccagctgggcctgtccagcagccacctgtgggtatttatgagtttcatatgaagtactgtgccccttcccttcctcatcccgaccctgcccgagcttcctgaaggtcctcactgtttgcatatcgctcaggccacctccaaaccccacctaggttttataatgtatattatatatttttttgtgtatttttaaaatccagctgtgatgggttatatcataaatgcagcttggggttggagcaggggccctcaaaggcccagctcctgctcaaaaaaaaaaaaaaaaaaaaattaaagttatttgtttgtgggtcagtcatgtaa

SEQ ID NO: 14365 - DNA, 450 bp, Homo sapiens
ccccagcagcccctcagcgcccccagagcccgtcagcgtgggggaaaggattcagtggaggctggcagggtccctccagcaaagctcccgcggaaaactgctcctgtgtcggggctgacctctcactgcctctcggtgacctccgtcctctccccagcctggcacaggccgaggcaggaggagcccggacggcgggtaggacggagatgaagaacatctggagttggagccgcacatctggtctcggagctcgcctgcgccgctgtgcccccctcctccccgcgccccagtcacttcctgtccgggagcagtagtcattgttgttttaacctcccctctccccgggaccgcgctagggctccgaggagctggggcgggctaggaggagggggtaggtgatgggggacgagggccaggcacccacatccccaataaagccgcgtccttggc

SEQ ID NO: 14366 - DNA, 2244 bp, Homo sapiens
cgccacgccaaggagggaagagtcccagtgaactcggcccctcctcaatgggctttcccccaactcaggacagaacagtgtttaatgtaaagtttgttatagtctatgtgattctggaagcaaatggcaaaaccagtagcttcccaaaaacagcccccctgctgctgcccggagggttcactgaggggtggcacgggaccactccaggtggaacaaacagaaatgactgtggtgtggagggagtgagccagcagcttaagtccagctcatttcagtttctatcaaccttcaagtatccaattcagggtccctggagatcatcctaacaatgtggggctgttaggttttacctttgaactttcatagcactgcagaaacctttaaaaaaaaaatgcttcatgaatttctcctttcctacagttgggtagggtaggggaaggaggataagcttttgttttttaaatgactgaagtgctataaatgtagtctgttgcatttttaaccaacagaacccacagtagaggggtctcatgtctccccagttccacagcagtgtcacagacgtgaaagccagaacctcagaggccacttgcttgctgacttagcctcctcccaaagtccccctcctcagccagcctccttgtgagagtggctttctaccacacacagcctgtccctgggggagtaattctgtcattcctaaaacacccttcagcaatgataatgagcagatgagagtttctggattagcttttcctattttcgatgaagttctgagatactgaaatgtgaaaagagcaatcagaattgtgctttttctcccctcctctattccttttagggaataatattcaatacacagtacttcctcccagcattgctactgctcagcttcttctttcattctaatccttgctattaagaatttaagacttgtgcttacaatatttttgacctggagtggatctatttacatagtcatttaggatccatgcagctttttttgtctttttaagattattggctcataagcatatgtatactggtttatggaactttatttacactcctctatcatgcaaaaaaattttgactttttagtactaagcttaatttttaaaaacaaaatctgtagggttgacaaataaatagttgctcttctacactaggggtttcacctgcaggtttgacacgcagttgctcgcttttcctgccctgtcaagcttctctgttctggcgtgagttgtgaaagagttgaagacagcttcccatgccggtacacagccagtagcctaaatctccagtacttgagctgaccattgaactagggcaagtcttaaatgtgtacatgtagttgaatttcagtccttacgggtaaacagattgagcatggctctctattccctcagcctaagaaacactcatgggaatgcatttggcaacccaaggaaccatttgcttaaacctggaacatctcacctttttaaatcctaaaaaacactggcagttatattttaaattagtttttatttttatgatggttttatcaaaagacttttattattagattgggacccccttcaaacctaaaaatcaagttatttccttttataatacttttcttccccatggaacaaatgggatcaatttgtgagttttttcctttaatgataactaaaatccctctaatttctcatttatgcttttgtcttttttatgaaatatttcttttaaaagccccagtctcacctacgaaatatgaagagcaaaagctgattttgcttacttgctaaactgttgggaaagctctgtagagcatggttccagtgaggccaagattgaaatttgatactaaaaaggccacctagctttttgcagataacaaacaagaaagctattccaagactcagatgatgccagctgtctcccacgtgtgtattatggttcaccagggggaactggcaaaagtgtgtgtggggaggggaagggtgtgtgagtggttctgagcaaataactacagggtgcccattaccactcaagaagacacttcacgtattcttgtatcaaattcaataatcttaaacaatttgtgtagaagtccacagacatctttcaaccaccttttaggctgcatatggattgccaagtcagcatatgaggaattaaagacattgtttttaaaaaaaaaaaatcatttagatgcacttttttgtgtgttctttaaataaatccaaaaaaaatgtg

SEQ ID NO: 14367 - DNA, 163 bp, Homo sapiens
gactgcccacccactcccacacctagcccagaatgctgtaggccactaggcgcaggggcatctctcccctgctccagcgcatctcccgggctggccacctccttgaccagcatatctgttttctgattgcgctcttcacaattaaaggcctcctgcaaacctt

SEQ ID NO: 14368 - DNA, 2269 bp, Homo sapiens
gcccctgcccagcaccacagcagagatcacacactgaccctccgcccttccccttcaagcattttcctcttcccttttcagggtgaagctcttccttcaagagtttctagatcttgttttttttttaatccaacatgttcatttgggtttgcttacttgaccctgtggagatccccacagccattgggcatcctaggtgaatttggccttggttgggctctgccaaagactaatggactaaaatgtgaaacagcctcttgccctgtacctttccttcccattaggacatcctttaaattataagcatcctttttgaaaagagctatgaaggtgtatgagcccatccttttattcattgactctaagagtcaaattttctagtgcatatcctattgccagcataaggatgaggagggggaaagggtcttaattctatgtacagcagagacattaaacttgctgtgtccgggctgcatcatcttcctggactgtttctgttgttctctgtgttcacattttttcctgcaacttttaagctactgtcttttttaaatagctatatgaacaccaaatttgggtaccattttatcactgttcaaagcactgtcaaattcctttcatcctttaatagttaagatctttgaatcttcagtctgatttttaatgtaagcaaaaacagaaccattgaatagtaatttcttgagaacctcaggtgttctataaacagtcctttcctgtatgtcttctattaccctaagaccagagttattttggttggttgttttgttttattttttgtttttgtatccatggctggcactttactcattgcacttgagtttattgccccataactaaaggatcaggatgatggtagaacggagatctgggtttcagagctttcccatttaagaaaaatagatcttgagattctgattcttttccaaacagtcccctgctttcatgtacagctttttctttaccttacccaaaattctggccttgaagcagttttcctctatggctttgcctttctgattttctcagaggctcgagtctttaatataaccccaaatgaaagaaccaaggggaggggtgggatggcacttttttttgttggtcttgttttgttttgttttttggttggttggttcgttattttttaagattagccattctctgctgctatttccctacataatgtcaatttttaaccataattttgacatgattgagatgtacttgaggcttttttgttttaattgagaaaagactttgcaattttttttttaggatgagcctctcctagacttgacctagaatattacatattcctccagtaagtaatactgaagagcaaaagagaggcaggattggggtcacagccgcttcttcagcatggaccaagtgggccttggggattgcagcgttctcgaagtggctgtaggactcgaatttacagaaagccacagaggtgcaacttgaggctctgctagcaagccaccagtgaggctattgggtaaccacctttctatacaggagattggaatctactttgtcatttatccaccacagtgacaaaggaaaagtggtgccgttatgcaatccatttaactcataaacatattactctgagtaactggccagccattcatcggatccttcattgggtactcctgaaatcagacatgttcctgtagaaagaattttaagttaggctttctatgcacctatcaagaatcaagagaatagattgtatcaaacaacggcagggaaatccttcagcaattctaatccactttgggttttcagctgtttttacatctaaagcaatagactagaactgaattatcttctacatagtaaaatcacaattgtggaattacaggaattctggtgatattaaggtgaaataacaaaacacaaaaggccctattttaacagttgatgtgacagtaagttttaatagaacctgtaacttcattttggaaatgcttctccaccaaataagggctttttcccctatttaaggagccagatggattgaaagatgtggaaataggcagctgtagatcttgatcttccaggtaccccatgtacctttattgagcttaattataatactgtcaaattgccacgatctcactaaaggatttctatttgctgtcagttaaaaataaagccctaaatacatttttattctttctactgagggcattgtctgttttctttgtaaatgccgtacaataaacaaattatttaataacct

SEQ ID NO: 14369 - DNA, 382 bp, Homo sapiens
gagatgaactagaaataaggggtcagataatgctggcaaatcctcctacccaaaaaggggtcaattgtccagagacctagactggatacgaactagcagtacttccttcctgactgtgactcctactacctgccagccttcttccttgctctgcgctgggatcatactcccaaatcacattactaaatgccaacaattatctctgaattccctatccaggctcccctcatttcaccttcagcatatattctagtcatgaatttccttcttcacacaccccacatctctgggctttgtgccagaccatctctaacttaatcctctcatccctgttcccctttctccaaagagatgaagctcaaataaaatgtataactctagt

SEQ ID NO: 14370 - DNA, 1598 bp, Homo sapiens
aagctgtgtcttgcactcaaattcccttgaactagccaaatggttcgcagctttagccaggagaccctgaagatgctctgtgatgtcccaatccctgcttcacaaacgtgatggaagacaagagcagacaatcattctgtgtccataccctagtatctgagaagcacagagcattcttccacaaggcaagacacagaggccatgtctggggaaatcagcactggactgggaatgaggaagactggggctctacctgctgaacctaccccagacttgctgcatgaccctctacacattccccctcctctccagactttggagtctaggatcccacccagaaggcctactgatattttctcagatgttcatgttaactgagtctagtttttaaactaaatttttatttaatctctaaacagaacatccacatgcatccaaacagatatgcatcgaagtgtatcccatcatttcttcagttgaccagtagttcttcatgctcatatggatttgtagatgcctcccaggaactctgcaggcccaagatggaaaaacctagagactggggacacttggtctctcagaatccttctaaccctgtgtcctgtcattctatgactagagaaatggagctgataccttgcacctctcccatctcatgggattggctaggagtcagtgagaaaatggatgtgaagagttctgaaaattacctagtgccatgtccatgtaggcactatagcttcttttgggtagttttcaggaagtggaggagggcttcaatgggctggactgccatggattgttgcacaggggtgcactgctcaagagcaccatactccaggaggtactattcatgtcctagacattgtggatttgtagatttatcatgacagttttgcagctggtagcagtaacatgtcttgagaaaagggctattttttgtatttgcacaaaggtgaagtgtgggggtgccagaggctctgccttctgtatagctcaacagtttcaatagcttgactcaggtgtgaaatttgccacatgttcatatctatgtgcaggaaggacaagactgtagacagacagtcggctcccttggacactgcccagaacatgtggtcatgggggaaagggtgttaaacctggatggcaagtgagatcttgtgacccttggggacatggtattgccgtgttgaacctgctgtcgcaccatggggtaggactggggaggaggagcagtctagagcggagaggccctgggtgcttatatgggactggcctccaacctgaggcactggcttcataagctcaactcagcctatccggaaagccatttagtttttattgctgcttctgagaagtgggggagaggtgagctatttgtggatttgttttaggcagtgttcacaatcatagcacctaaatatgaaggatcagaataagttatgaaatgaaggtcaggaaccttttgtacatagtttcttatttggaatgatgttctttaagccctatgagtatttggtatgtgctcctgatgctggcatctgagtctcatttttgtaccgtgttatttgagcaaataaatacattaacttgcacaa

SEQ ID NO: 14371 - DNA, 450 bp, Homo sapiens
ggggcaggtggactccaggcacccggtaccgatggggcagggaccgagtctcccatgaaggcagactcctcctcccagcagagcagcaggatccccagccagactctgtacccacaggattacagccattgcttgggaaggctgggaggcctcccatccaggacactgggggcaggagtgtcatcttttgggcagggcaatcctggggctaaatgaggtacaggggaatggactctcccctactgcacccctgggagaggaagccaggcaccgatagagcacccagccccacccctgtaaatggaatttaccagatgaagggaatgaagtccctcactgagcctcagatttcctcacctgtgaaatgggctgaggcaggaaatgggaaaaagtgttagtgcttccaggcggcactgacagcctcagtaacaataaaaacaatggtagctg

SEQ ID NO: 14372 - DNA, 1216 bp, Homo sapiens
aaggaaagtaaaggtcaagtggtcaagttctgttttctttttaccctctgagaaacatgaatcccactgggacagatgggaagaacacccttctccgtctccctctttttgtacccatcactgttggtctacacccagtttgttgaagaactgcgggttcacgagccatttgtctcttcggaggagctagctatgagatgtctgcgatcacatcacggtaaagcccaaggagtaattaggaccccaggaagccttgctgcccagaaaacaccagcgctgtggatggtcccagggctccttgtgaggaaaccttgaacatttccttccaggaatgaaagagaacctcgtcctcaaactaaaggccacagaaatgggcactacctcctggcccactccctgggcaccatgccctctggtgacctgttggctccactcttgtcactcatgtccagatctgcagtgccagcttctccttctcggtgacatgtcacctccctgccccaatcctggctccaaccctctctggaaaatcgaagtgaaacatttgtctctaatactcaaattcaacatatggctcatctcatctaccttcccatttccatgcctagaggccccactactaccactagcaccgttgggtgtttccttctcaggctctgattctacaacatttacgttcttttctcacctttgatcccctcactcctctgtgacccccttcaagtcttccttcaccactccagtgttttcccataccactcgaccctgctcgaaggtatctttccctgctctgtcatcctcttttaggcatgcctgcttaaaatcgggagtgcttagtccttggccaacagtcctgccttctagaagaatgtaagacctgaaagagttatgaatctatcactaggcaaaaacttctcttttcctattgctggatggttttgctattattggttggtgggccctttgcctgtggaatgtatttcactcattctctcctgcacgctgttaggcagttctttcacctgcatgcttcttcttttacctttttgtctacctcatagtccctctctcccctcctttaaaagaattataaatattaggaaagcttgttgttataaattaaaagtttacatatgtatcttgagttcttcataggggaagtgttattttaaaaaattctaaaaatgaaataaatattgttattttattgagcatg

SEQ ID NO: 14373 - DNA, 1889 bp, Homo sapiens
tactcttgccacggaatcctatgtggagcagagttctttgtataacatcatgcttttcctctcacactcttgaagagcttccaagaagttgatggaacccaccaatatgtcatagtaaagtctcctgaaatgtggtagtaagaggattttcttccataatgcatctgaaaaactgtaaacaaagacaaccatttctactacgtcggccataaacagctatcctgctttggaagagaagcatcatgagccaatttgataggtgttttaaaaataacttgagttttcctaagttcatcagaatgaaggggaaaaacagccatcatccaacattattgagattgtcgtgtatagtcatcgaatatcagccagttcctgtaattttgtgacacgctctctgccaagcccaccaagtatttcctttatagctaaaagttccatagtactaaggaaataaagcaataaagacagtctcagcagccaggattctggctgaaggaaatgatccgccaccctgagggtggtgatggtagtttctacccatacctcagcctcaggcgagtggcttatagcctccattcatggtgcactttatttatggtactaagataaagactgtcaatccattgatttatctcctcctgtcccccatctaaaatacccatgctgcttttctgagtgttgatgggggttaccagcttgatccactgttgctcttagaaggcccagaaagtctttgggcattgccaagaaatcccggattatgtggaaaaccctcactttctcttcacggctgtaccagaaaatccctaagacagatcttgccgtggactagcaatacctgcaagtgctgccaatgggaactcaatttattcctgggaacctaacgaggagagcccaggcctaggcaggaggcctggaaccctcttggctaaggtgctgttcctgttcctgcaaggtctccagaacccctttggaaatggtgaaggaaccagcccaatagaagtacagagccagctgacaagtccttgtaaagctcactcctcagtccttggcacagccatgttttgtcttctctcttggtatttcttctctcccaactttagccattttgccttggaatcatgattacaattttttcctttgcagatgccttcctgggggatactcctccccaccctaaagggtcgcctgcaacttaggcggattgggtctctctgctgtggcgttctctcttgagagaccctctgaattttagcacaaagtgccttctgtttcacagctgccaccacctttagaggaatttcgtcagaaaaatgtggaggctccatattaatgcattattttttaaaaagttttgataactcttaaagcatcatttgcacctatgtgggaactttgcctgttgcaaagtattgtggccgagctgcagctgggagcctgctttctgccagtcttgaggttctgaagatcagctttgaaaggaaagtatgtcctagcttagccattcagaagagaaaaatggaatatcagagttacagttgtcagtgaaactactttggattttaacctcttagaggaagaaaaaaggttagggaagtgtcaactctggatgaaggtgatgtgtttgcctctcagtctttcattcatagcctgctagtgaaaaggaagtaaatgagattcttttgtgtgactttgtagtctctttgtattaccaaatagttggggtgttgactcctgtgtgttttgcaagaatgtgtggtaagcctgggtaaagagaaggaactgcggtgttgggagagtctttgtgttggggagtggcaggggatgatttgtttcaggggaaaatgcccacattttaacttttaaacttctgaataaactgtgtaaaa

SEQ ID NO: 14374 - DNA, 1490 bp, Homo sapiens
acctggtctcagcaggcaggtggctggggcctgggagaggccaggtgaatgggaggccagggccccagactccccgaagttggcctgcccggcctttgggacatctgtgtgcctgggaggctgccagggggtggggcttctgaagacccctcctcaatttcttggcctcacttattgcccaaacccagggagttaggggggtacgggtgaaagaggggtacacagggacccagcccttctcttcttccccaatacctggctctaacccagccaggaaggtgtaaacaataagggtgattggggtccctgtcgcccacccccggcaatcctatttgcttacctgtcaccctgaagcctgggcttggcctcctccagccccccatctccgtcccatcctcccatggtgtctactcctgtccctgagccccgccctgtggtctatcctgtgcccgatttccagtgaaccccatgaagctgatgggtttgcaggaaggcctgaacatgtgcaccctcccagggacactggatgcgctgggagccccggggaccccatggggtgctgtaatcatggaccgtaggccatgtgatgggcctgaagtggaggctgctcagcacagagccctttctggtgcctctcgaactcagtacgatgcaagttctagacacacagatggcctgtggaggcctctccctggtgtgggcccacaggtacttccatggttgactcctggcttcaggaatcccttcctccctccagaggcttcccagggccctcggtgcccacgcctctgcccatctggaggcctgagtaaggagtggctcagccccacgttcccacactgctcctgctctttgccctgtatcccatgaggctaggagacaggagtcctgggtttgagccctgcctccccccactgcctaatgtgggaacccaagcaaggcccttctaccttttgggcctcagtttccatgtctgtaccacaagagggttgaccagatggccccaggttttcctttaggtctgacatcctgagggtcattcatcccatgcccagttccccccatcctactcctaacagatgtgaccctacttgaggccgccttggcttttgggtcaccctgtctcatcccatcaccccaaacataccctagtccttcagcctggggctctggcatctgagcccgagctcctgcccctgctgtgggaaaggtggggaagaaggggatctccctcccgggcccacccagctgcccagcctttgcccactcggggagcagatcatgcatgccaatccctgttgccgcatggagctcctcagcccactgacctctccgtgcctggtgcaggccaggcccccgtcttccgcctgcctctgcttccccgtcatgcatggtggtggtgtttctacggtgtctggttctgtgcccgtctctgagacagtctctgtgtggaatttgccttaaactgaagtaaatttggttcttttagt

SEQ ID NO: 14375 - DNA, 981 bp, Homo sapiens
acttgctaccctcttgagcagctcttctgagatggccccagtgaaccagcttctagatgacatagaatgacatgtaatgctaaattcattttggctttgcaagtcatgaagcttaggaggcctggcatcttgggtgagttagagatggaagtacattttaataggatgcttcttttctcttcccccagtgcctaggttgccagagcatttgcacaaatgcccctgtttatcaataggtgactacttactacacatgaaccataatgctgcttcttgtgcatgtctgctctgatatacgtcgaacaatgtagcagccactgtcatttctcagtggttttgcctaaccaaacttcttcctaaggagatttatattctggcctacacagcagtccttgatggctgacagccacagaattccaaaccaagtagtgtctgtcagccctcttaactctgtgcacgccctatttcagtcttttacatttgttcttctagggaatgtatgcatctctatatatattttccctctcaaaaccagaacatcaacagtgctgtttctgacacttcagacatcccacgcaaagccacattgaatttttgccaaatgaaaaacacatccaacaatcaagtttctaagaaggtgtcaagtggggaataataataatgtataataatcaagaaattagtttattaaaaggaagcagaagcattgaccattttttcccagagaagaggagaaatctgtagtgagcaaaggacagaccatgaatcctccttgagaagtagtactctcagaaaggagaagcgccactcaagttcttttaacccaagactttagagaaattaggtccaagatttttatatgttcagttgtttatgtataaaaataactttctggattttgtggggaggagcaggagaggaaggaagttaatacctatgtaatacatagaaacttccacaataaaatgccattgatggttg

SEQ ID NO: 14376 - DNA, 761 bp, Homo sapiens
cctgaatcatctaaaaaacacggtctcaacctggccaccgtgggtgaggcctgaccaccttgggacacctgcaagacgactccaacccaacaacaaccagatgtgctccagcccagccgggcttcagttccatatttgccatgtgtctgtccagatgtggggttgagcgggggtggggctgcacccagtggattgggtcacccggcagacctagggaaggtgaggcgaggtggggagttggcagaatccccatacctcgcagatttgctgagtctgtcttgtgcagagggccagagaatggcttatgggggcccaggttggatggggaaaggctaatggggtcagaccccaccccgtctacccctccagtcagcccagcgcccatcctgcagctcagctgggagcatcattctcctgctttgtacatagggtgtggtcccctggcacgtggccaccatcatgtctaggcctatgctaggaggcaaatggccaggctctgcctgtgtttttctcaacactacttttctgatatgagggcagcacctgcctctgaatgggaaatcatgcaactactcagaatgtgtcctcctcatctaatgctcatctgtttaatggtgatgcctcgcgtacaggatctggttacctgtgcagttgtgaatacccagaggttgggcagatcagtgtctctagtcctacccagttttaaagttcatggtaagatttgacctcatctcccgcaaataaatgtattggtgatttgg

SEQ ID NO: 14377 - DNA, 816 bp, Homo sapiens
gaggtgctctggtaaaacaagtataaaatgaatgtcaggatgttctccctcatggtgggcatcttctctgtccttaataccacccagttcttcatctttgacctgaaccagaagacacacatttgctatgaggccaagttcagcatctacgtggactcaaagtcggagctagtcacttggaccctgttccacagggctaatatcagcactggcctctccctcaccaccatcatcatcggctgcttcctcttttattgtatccacaagaatatctacatggggctgctgatctatgccatgtggatcatcacttacgagctcatcaacttctccatagtcctgctcctcaacgggatcatcaaagatcacttcaagacgctgagttatttgcactggatcttccaaatctcacacatgctcctgcactttttctgtctgcccttcatcgtcaagcatgcatacaacctttacaaggaatcccagactgtgggcaggaaacgccgccacaggctctgctccaccattgcagtgaactcatgactacctgtccgtctgggaatgttgtaccggaagttaaactgaaccatgccagatgccaggaaaggtgggagggaatggtgttcctcaacaatggaaccctccctaccctgcctgtcttctgttgatgctgcttggtttgtcagggcttttgagttttacgcactgaggaatgattctcgggagagggcaggttgtgcggatcaattattttacagatgtgttgtgtgacttgttttagcagttaatgatatgtggccttgtgcttacttaaccatc

SEQ ID NO: 14378 - DNA, 4860 bp, Homo sapiens
tgagagctgtgtggccacccccccaaccttgcccccggcacaccaaagtgtccacattgtaccaaagactgacccccgccagctggggtgcccaggggcagggccggcccgccagggagggggcctgcattggctgcaaggatgagcagagaacaaggacagaggccaggcactgaggccctggagacagctgttccacttgcacacacgcacacactcatgctcacacacacagagatatattaaagcacaagtttctatctgacctgccagcaccttctttactgcaaagacaggggacttgcctgaatggcatccgccaacccagggacctcggcgcaacataggccttgtccttgctgcactcgtggtgtgcttctgactttaccctgtcccctaagtcaaggccgaactccagcctggtggctttgccagaagggagccagaagtggggcagacatggagcccctcccttggtcagactctgggactcctgagatgggagaggcagggatcagaggacgaacaggtgggactttgcgagctctgtgactgtcccacgtccaggagacaaggaaggtagggcacctgctgcacacgattctgtccagagtgagcactggatggtggagaccataggtcaccccagattccttgacctatttctgggacaccatatttccctcctcagtgtgcaccctttgaagggacccagcacagggtcttgggcctgggcagtctgaagactgataacttccccactccaccctacaagcagtgggactcctgagaacacggttctctcctagcctcagcccccagctgggtctcagaggagctgggggagcggtggccagcccattttctggggtgaggcttgacttggagaaaggcagaagagacgtcccgcttctgtgatttggtgcccccatatcagacaatgaatttggaagtggagaggggccttcatttcttatctacttggcatgaaagggtgccctggataggagggtgtgtacagggcaaaatgccaaaaagcactgtctagttgaaagttcccttctccacccaggggcagtgaaggaggaggggcttatagagctgggattggtggagggagcaggtgccagtcccctcactctctgggagctgtgaaagggatccctgtccttgggtcctgggttaggcacctgagattgacatgatgggatctagatctttcctccttgacatcacctgagcccccacctagccatccatgggagagagaaggcccagccccttctagaatgactctttaggcatgcgtgcatatgtgtgtatgtgtttgtgcccgtctgtgtctaggtaccaccgtgggtacattgttgggcaggagtgtgtgcaaacacaggtctgtgtgtgcaatctcacatatctgcctgtgagactggattgagacccattcgtttctatgaatgtccgtgtacgtcagcgtgtgtgtccaccttcctgagtgatgtgttcgcttgtagggtgctggctgaatagactctgtccagccctgttctgtagtctcaagctgcctgcgatggcctgaaattccacctttcatcccctatggatgacggagagcttacagatgaccctattgaatgcaagcacctttggtgaggagcatcacagggctccttctggagcatttggtggggacagctgcagagaagaggcctggaactcgggcagcactgcagtgccaggaggcaggcggggaaccgaggcaaaggctgcccatctccccctgccaggcctgtgtgatcattatcaccaacagctggtgggtggccgggccaggatgcagcggggccttctgatgcccaatcagcacggctgccttcctgacccagtcaaggcctctgtctgaaatgagtcgctccaggttctcagcatacacttccatcgcgtctgtcgggtattgttccttaactgtcccatctgtgcagagtccattgccccaactagactgtgagctcctcctctgagccttccaagtcccccctccaccttcgccacctcccgctcgtgcccagcacaagtgagcctggtgtggaaaccactccattgcccggtggaatggattctgtaatcagtggttcctggccttgcctgcagaatagaaccaccagagtcctttaaaaagtattgctgcttggttcccacctcagaggttctgagttaattggactggagcgcagtcggacatcaagaaatgttgaaaagctccttgggttctcctgacagcaggaaccactggcctggcaccacctgggtgcttcctctgtgccctcgctggggtaggcattggagcaccagagatgaatagccccaagtgctccctctttggggttcccaaggcaccctgtgcctgcttccctcagaggaccttccaatccatttgccccgcaaccctggctgctccgacaggggagacttgtctcccttgttcccctcaggatccatagagtggacagtaaaggtgctcagtacatgttggctgagctgaactgcatacatgtggcccccaggttcctggtctttatggacgaagggcacaaggtggaggggggatggggggatgctgctggaggtctcagtgggtgcagacagccctgccttgaggatggcttgacctgggattgacaaaatgtgtctgctgaaatgctgaggtccccacgtgtgaatgggtgaggctgatgtggatgtctgtgtgtgccagcaggtgggtgggggatgtgggtgtcagtgtatgccagtgggcactgtaaatgtctaggcatgtgctggtctctgtgtgtttgtgtgttcctcagcaggaatgagtgtctttgtgtatcacctggtgacttgtcagtgtctgtgtctgtgtgtgcctgtgagccagcatctctgtatcagtgttgctcatgctgtgtctttgtgcgccatggtgtgtcagtgtctgtgtgttgatgggtggcccatgagtgacccccgccaggggagaccaggctggctggatccagcacatctccccagtggcagcctcgccctctgggtcagggtgactgaggcattttgtggccttaaaacggggtgttcagggtcagccctcagggtgctggggcccttccatcccttgtccccttcaggttggtgaaaaggactccgggggccaggtgctgtatagcagcttatggaagtctcagctgggctatcctgcccttgggagcacagacaggctcctagggtgctgagtgaagcctgaagaccaagccccctcctcctggaatgctccttccacccctacctctcagagatgggcctgacacctctttctcattcattctccttttccctgtgctctgggaaagcccctggctcaggctgtcagagtgaggatggacctcaaaagtttgatcccctcgtgcagatgaagaagctgaagcccagagtggggaaggggagtggcccaaggtcacacagctagtttgagtagagccagtcttgggagagccaagtactacagccctgggggtgtcacaccgcttgtcactgcccctgaggtctcctgccaaacaactgcagggagtttggctaacagtcctgtgtccagggtgccggtggggatgttatagatgttgctgggatcctgccctcggctccaaattctggcctctcatcccaggctgcagacccttctgccccatgacaggcctgggtgccacacagaggtggccaccctcccaccacagtgtctgcagctgctgcccttctcccaggcccccagacagaagagaccctgtttcccctcctctcccctgtgacttcacaagagcttgggctaggagtgaaggtcagcatgttctcatgtgctcatcctcttggtttccccaaagaccgggagggtcacggatggggcgtgcagaatccttgtgttttttctcgctgggcagcttgaggggctggggagtattcccagggtctttgctctggagagtccctgcagagccactggctgaggttgggttcagggttcagcggagtcctccatgcttccaaaggccgggaagcacccgcctctctatcgagtcagtgctgtgcgtgtgtgtctgagaatgtgtgtgatgtgtggagtgtgcgtgtgtttgtgtgtgtgtgtgtgtgtgttggggcagaaggaccactctttcctggggatcccttgacccttataactagaagggaccttagggagcatctaagctggtgcccccattgtacaggcgaggtccagagggatggcatctgcccaccccaccccttgccctcttgttgcctgcactcatttcccagggaccctcctaggataggactgccctccttcctggccccctcccgccatcctcccagccacccacataatcaccatctcagcccaactctggtggccctctaggtctccatgcattcttcctgccctagagtagccagctcaccaaggcctttatccccagcccaggagaagggtcagggagggaaggggctgcaccagccctgagacctcaaagacttgggagaaaagccaaaactcctcatgcccaggcccacatgtctgaccaccccagcccaccccgccaccaaggtaaaagcacaacaggagacccccttattaatgggtgaaatgattggggttgtttttttagtcacacagccccatcctcacccctttgccttgctgtctgtctccaccccagcctctgttccccatttgcctctctttcacctccaagcccccaaatgtaacctctagttgcggacgcggttgttctatcaataaagctgcagtgttctagcgctcagcgt

SEQ ID NO: 14379 - DNA, 263 bp, Homo sapiens
gcctggcacttccccacaaccagcacaggcttccacttggccccttgatcaggatcaagcaggcacttcaagcctcaataggaccaaggtgctggggtgttcccctcccaacctagtgttcaagcatggcttcctggcggcccaggccttgcctccctggcctgctggggggttccgggtctccagaaggacatggtgctggtccctcccttagcccaagggagaggcaataaagaacacaaagctgttcccgtctgctgagt

SEQ ID NO: 14380 - DNA, 6534 bp, Homo sapiens
aggaggcagcgggcctggtgtgacttggtgggctcgggcaacggcaggaaacggtctcctccctgagcaggggtctctgttgactgcccccacctctgcccctttccagggaggagccgacctagctgcaaaagcagacaccgaacaggttttctcccaaggacagaaaggggctgctttgttcttctcaatttatccaaatcaggcaggtctcaagggggagaaaatgggtcttcaatcttcatcaagtccaccattaacaccctacctctctaatctagcccaggcgcagggaacaggaggaagtcatagacaggcctgtgttggaatacaaaaatggcacgcaaacactcaggcggaggagaaagccattgggcctttgctacctggaggcaccctttaggaatgggcctccatagagtgttcattctgctggaatacattgccctggcaactaaatgattttttatttgttttagttattctccactcagtgaatcataggtgttccggatctatttgaaatgctcaaacagcaaatcactagttttaatcccttttgatgctataattttccttccttggttttgaacggttcagcttgcggggacagagacccatcgtgcatgtctcctaaatgagacacggatgcagctcatcctggcacttgggccacagaggaagtgccacaaatgcacacaagcaaatcaacctgtggacactggagttaatagtcactcgtgtggctgagttactcacctgtcattcctgacatggatccagcctttaagcttgggaggctgacaaggaaatagttactatgcccgctgctaattcactgttccgaagtccatgtagataaacatataccgagttctggcgtggccaaacctgccggggactgccgtggcttagctgcccctccagttgtgtttatcgaagcattggagaggcagccacctgcccatcagcgtcaggaacgcagaactgggactccgtgcttcccccacaccacagtactcaactggggactgaaaaatagcagttccaagaagcttttctcctaatcctcatcaaaaggacctcatttgacgatggtggcttgatgtggctccgtctcctacttagtgatttccattccagtgctgcctgccctgggtaactgcgcacaacattgcctgcccctccgctgtccccagagctccggcctctgtcgccatcagcatcagcctgggagtctccccaggacggcatggcacgtgagcagcactgcagtccttgggtcttcggcgccaacctgcaaccctgatcaaaggagggtgagggcgtgggagtttcctttcaggtgtgtcaaagacatatcagctgcgctctagaaagagccaacgggtcagccgcttcctcctagtttaacttgattttgagtgatttgtccatatggaaatagtagggtagcatcaaactgcgtgattaaattggaagactgtctttccgtgtgaacacaggatggcagacatcagagggctaccggggcagggtggacacgttcctgaggagaagccagggtctgcagctctccatcctccccggtagctccagctgcagggctgagctgcttcctatcccctcagctctgatctctgccacttccctgttgtgtgggagagtggaacactcctgggatgccaggcatttcataatgggaggaggctcctgtaaggaacggtgggcgcccgctcacagtggggggccctccagcatggttgctgactctgtcagcccccagccccgggttgccaattagccagagagctcctgcacacacagcacttccttccccagtgtgttttctacccagatggggacaaaggagccagacagtcatatcaagggcagagttcaaacattttgaaatgagccattcacatgcttctttttaaacatgggcatcacctgcccagaggcccttggcctgaagcagcatgctgctgaccttgggaagagagggtgggctggtgggggtgctggaggagctgcccggccctgcatctgcaaccctccagtcccctgcccacagagcacgcagagccctcctgtgctccgggaacgagatagcagcttggcagctcggcctcgcatctgaaaaggaatacgctgcaaagcctcggccctagacccacatctgcagctccctggcctgtggcggttctttccttcggggcatgcccttccagatctctgtccctcctgtcttctagcactttaaagatgccccttatcatcagataaagagaagtatggggacgatggggtggcactaacagtagatgtcattggtgaggactgatggcaaagtctcattccctcacagccgcgctgccagctcgcctccccctcgctttgctgggagcctgccctggactccaaaaggacacgggttcacctcctttcccaggctggaggggtactgcccttccctgaggggccttctgactggggcaggaactcttttcgtgtgtccagctgggcctggaggccaagtcaaggtgtgtcacaccacacaccagggcaaggacctcatctccagggaacagggacaagtgagtggctaccagaaagtccccgggcagcctggagttccccagagcctggctggtcctacagagcacttctcccctgggccaccaggaccaaagcgacctaaacacttgaagctaaaagcaagtgctgatgatgggatgggctggcacgtggctgggagggctcctgggcaccacagagccctcagcccagcagagagtggaggctcagtccgtggggagcgggggttgtgaaggagacatggccaagcccctggtcggggagataagctcccccatgcccaggccagccccaggggcaacaagccaacatggagagaggtggcaggtgaggctgacaggtgggtgcctgtggcctgggcccatgagggcaatggtcctcagtaaccaatggaaaggacacaagggcgccatggtcaccaccacccaggcaaagaaatgggaggtggccagcacccccacccttcacttttcattattattattattattattattattattttttttttttttttttttttttttttttttttttgagagtagaaaggcaacttcattggagcttttggggaaaaaagccttcaaagtcaccttctggcagctctggggagggtcatttggggtggactgagagtgtagggcaggtagggtgtgtgctgggcagcagctgtgtccatgcagccagcacccagcagggcagtctcacaggagccgttgtgagcactttggacttgaagcagctatgaaccaccccccgcccccaccgtctctccctctcacacacacacacacacacacacacacacacacacacacacacacacacccgttttaccattttctcagtgctttttctgctttcattcctttgattttagttagaagcacaagccatgatggatgtgggactcttctcaattgctctttaaattgtcactttttaaatcctattaaatgaagtgtcgattcctgacaaatacattaaaagtgttttattcctagaagagttgggaaaagaaattattttcagcaagagtaggatgtttgttaaactgattccttggcaaaaaagagaaaaaaagcttttgaattgtgcaaaaaattgcccagtattatgctgtcgccccagttgtcaaactgctgtgcagatggctccagcccagtcaacttcaccttctttttaatttagaagataacaaaattgtaatcacttatcctttccagagccaagggggaaaaggaaggtataatctacaataaaaagcgagcgttctgtgtactgaggccacttggtgataaagagatggagcgctcccctcacagacttcaattaagaacctccctttggacagggaagaaaggtgtcaaagaggaaaagaaaattaaatttgcttccttccaggagtttttcctcattagtgcttgcttgtcggtgttattattttaatcttaccttctatgtggtgaccagctcctccgagcgatgcccaggtcgggcacggcccgggcagggcaggtctgcagcgatgccgtggcagaggtgggcatactccatttgttttggcagctgcagccattgattctgcatatttttcctgacaacagccccggcaggagttcagttaggaatttaaagtgcagttcatggttctgtgccaccgtggcttttattattataatattaaattagaagttgtcctagtgcctggtgtttgctcagagtttccagaagagagggaagggcaaggtttaaatggcatgcaggacaactggaatgcccccatctctctcgctgacacggatccagtcatacctggggctggacgggatttggaggccctggtcatttgcagagtgaatggtgaagggcgcggaaaaggtttgcttggaggaaagaccggttgcagaggcgaggcggagggaggaggggcggaggcagcaggtctttgtttgtggtaggtctctggcttccatcagggaggaggaaagaggctgtgcccttcctggctcttggctgcaccactgaggacgctccgagggacagcgtgctcacccatcctttgcacagtgctggccccaagccccacggccttccagctaggattttctgctgggctcatgcagaggcaggggacaggtgcatggaagagccgccccacccgacacaccattgtttgaaaatcactgttctctttactcacttaaaaaagtgtacagggaacacctgttcctggcataatgctccaacctcgcggaaggggccaggtgcccttcatctggctctggctgcttccgacctgggcccacgtcatcgttcacgtcctctgtgaccaccactggtcacggtgctccctggcccagcctccaacccacccagcaccctggcatctcccaggccagtctgctgcacccagcgagcttccagtcagaagccaggctgaacggccctcctgccccatcagcttcgtgtcttcttttttttaaagaactgaaatagtccccaagaggcctcatggcctgaagactcacaatcatccacctgtaatttatgataaatgtctgggagcatttaccatttgcgtccgtgagtatttatagccctgaatgggcgggggggagggggggtggaggaggccctgcagccaggagctacacacctgtccccactagtgtcccctggttgacagagccccctcagcctccccaaggctgtcactgcggctgtgacagctgaggagtgccgcctttgaaagccagtggacagtcgctccactagggggagaggccctggccctggcgcagaggaggcgttgcgaggcgggacgggggctggaggggctgagcagccttcagggcagggactgggccctgggtcactggagacgttgatattagtccgtctgctgccaaattgctccccaccacatgagccccaggggtttatgtcccaggaaggcgagggtgcccatctgagcggaattgggaggggacggcaccagctcatctccctcagggcctttgcctcctggtgctgccctggtggctgctcctgcaccacagcccctgatggctgctgctagtcctgagttgctgggtttacccccagcccacacttcccacctgggcctgagggtgcggccagtgccctagtcctagccactacaggagtcattctgagacctgctggaggccatggggtcttcccaggcccctcaatcagctgcttccagggtcagcagggcagggtgctgccagtaaggtcctcagggagcacagcccggccgcccaggctgggggatactggggcagagcttccaggtctgtggggcctgatctctccccaaggctctccaggccttggtgcgccctccacagtgaccttcagagaggctgcaccccctcagaagaacagtgagaaatctctccatcacacgctccctggtccttatgtccctgaggccacccttccccaccccccagtgcctggagaagcgtgagactctggaggggcgccaggaggccaggggtcctcagggctaggcctggagctcggcccaagagctgcttttgcgaagcctgtcttgaatccggattcaccagagaacaagagcctcccagcctttggcgtttctgggcctgtaaagatgtgtgtacctcccaggccactctgatgcaagggcagggaccatgccaggcctgggttgggaatggctctgtgactccagaagctccgtctaaaactccaaagatgcccaaaaggctgtgctgctatgtggaatgtgtattatttgtgagcacgatgcggcttcttcctcattttgcagagcaacctaagcgggcagatgtacaaaccgtgtgttcgaaacccctgagtccatgtgtgtgaaaatgcaggttttctcttagaaataaagtggtgacttgtgctgta

SEQ ID NO: 14381 - DNA, 1367 bp, Homo sapiens
tgctgtgagaattctcctttgagatttcagaagaaaggaaacaatgtgattcaagatatttacataccagaagcatctaggactgatggatcactgtcccgattcaaattattcttcagtccatttccccttcctatttcagctgttccttttcacctaactgttcagtcattctggttttcaagcagtgctttatctcatgtccttgaatatagttgtgtaactttattttttaggtaataattagaacagttcccttcagaggctgcatttgccttcttctgccacctaaatattacttcccttcaaatctgcctttgaatcatcatttttaaaaaaaaattaacatgtttttgttgtagttatcttctggggtttcaattcctcagaaacaacttttttcacaacggaaaggaaagaacactagtgttctttcagtaaagtacaaagtgtttattttacaaaagagtaggtactcttgagagcaattcaaatcatgctgacaaggatactgatagaaaaagtgatttcttcttattataaagtacatttaaagttcaaggactaaccttatttatttgggaaaggggaggaggaaggaaatgatatggtacccagacactgggctaggctgcaactttatctcatttaatactcccagctgtcatgtgagaaagaaagcaggctaggcatgtgaaatcactttcatggattattaatggatttaagagggcatcaatcagctcaactcaagatttcataatcatttttagtatttagattgtgcctcaaagttgtagtacctcacaatacctccactggtttcctgttgtaaaaaccttcagtgagtttgaccattgtgctcttggctcttgggctggagtaccgtggtgagggagtaaacactagaagtctttagtacaaaactgctctagggacacctggtgattcctacacaagtgatgtttatatttctcataaagagtcttccctatcccaaggtcttcatgatgccagtagccatatatgataaattatgttcagtgataacttagttatcagaaatcagctcagtggtcttccccgccatgattcacatttgatgagtttttaaaaatcaaagtgattttgaaaatctctaatggctcagaaaataaaaacatccagtttgtggatgactatatttagatttctctagactctagtggaagacctttggaaaggccatgccaaccgtgcttgtactgctagaagcactttatgtttcctttttgggtgaaatggatttatgtgagtgctttaaacaaatagcaatacttatagactgaaataaaatgaaacttcaaataagactatgtttaatttgt

SEQ ID NO: 14382 - DNA, 1368 bp, Homo sapiens
gacccagctgtgctgtcatgcagctaacctctgatgtggtcttcctcaccattggctatggatttgatttcaggtgtataggactaagggcagcttgcgggttagctctgtgactgcatagtttttctaccttctttccctgatcttttgctgccatttgatctttgatagttttggtgaaactctctaaaatacattcactgtgggtccgacgcaatttataaaaattatgtactcaagaagggagacctgtttgtttcatttctcatctgtttgggagatgattttagagcactagaaaggcactggggagattctcagcttaaaacatccagcagtttgaagtatgattaggtacatcagggctgcattgtcaatgttctctttaagtcttttaacatttatagcaattttttttttcccggagagtttaggttgcaagttttgggtttcttgtttgtttttgttttgcttcctgctttaattctttaattttcagtcattactggtattgaaaaataaaatatctttaaaacatctcctcttcagaaataggtccctcttcattgcccatcaccatcttccactctcctattattttgccactactcagtaaaggaaggtaggaagagacaaacgcctaagtgcaggtgtggggagggatttcacaagtggttattaacggccagttcagcaagaagtgttgagtgtgtacaaaggggagggctggaagtgttaactccagacccgttggctgcttgagttgtttcttatattctaaagcagcagtccctaacctttttggcaccagggaccagttttgtggaacacagtttttccatggacggggtggtggtggaggatgaaacttccacctcagatcatcaggcattagagtctcataaggagcacgcaacctagatccctcgcatgcgcagttcacaatacggttctaagggctttagagtaagcagctttttcacctgtgggcctctggtgagaaattctgtaaattgtgataatcaggctggattttaatgctgcttttccagtacaatgttagagtttgggttcattaaaattaggcaaactcccattgggttagggcttctctcattccattttgtggctaaccttactgtgtttcagcccttgctgaaaattcttctgatatgtgttgcccttcctcacagccctttggccattgggagtttggctgtccctcagagccatccggtcaagcagatggtctgttctatctcacagaaaagtcttttcttccatgagttctgtctgaactgaacatgtaaaaagtatgggaaacagatgaatccctattaaacatgaagttttgattgtatttaagat

SEQ ID NO: 14383 - DNA, 1918 bp, Homo sapiens
ggcagggccggctccccaccccacctttgatggcctcttcccccctcaccctagggtgtcccgagatgaccgggacgcctggcccctggtgggggggcagcctcggaactgggagtggggggccaggggccttcctaaccttccatcatcctcagctagatgtatgcccgggacagggcctctgttctccagctgaaccataccctggctgtgggggcatctgtcctgagcttggctggtgtatctcacaatgcaaagacatgctggctggcgggacaggtgggcaggactgaccctgaggaggccttgcctgcagggtctttgtctcaccatttggtggagtatcacacggttctctgaggtctggggcctcagctgtttaagtttaccggtattactgagctcggcatttggagagggagctctgaagtgtctggggaggtaccgctgtgcgtggggtcaggtgtttccgtaccacagcaggagcagggcccgcccgcatcccagctgtgggcctgccggtcaggtcgggcacctactacaaaccgtagtggggtggaggctgctggaggtgggagtgaggagatgagggcagggtctcaaacagtcctgactcacagggcctggaaacaagtcctatgtgggcctggggcctggggtcctcatcctccttgttggtctactcaggcccagcccagagctgtgttccctgtctcaggtcaagcagtggcagacgcaaggctttctgtgggcccccaagtggtaggagggagagtagcagagcatgggttactggaagccgggactgctagggctggtggccagggagctgcaagagtgaggctcagctctggctggttctgcccttacccctcctgcccgcctgagaactgcacaccctgcccgctggccccaggacctgcactcccaatcctgctgtcttctccttccctgtgccctgaacaaggacctcactgcccgccttcccctcccaccagcccccttgggccaggcagggtgaggccaaattgctcttggcccacaaatgggtgatggtcagatatgtgaatcaagctcctttctctagctagtgtttgatgtgcacgtgtgtgtgcacagtgcgtgtgtgcacacgcacacctgtgcactcgtgtgtgtttaagaaaggaaaggatttgggctggggagcaaaagataatgtgaaactgttggtggactctctggtgaggggtgggcagaacttgctgctactagagttcttgggttctccatgatgttcaccctggggctggcccactgtgtcctgaatgtttttgttattttttgttttattttttaaacaaactgctgtttttatatacctggaatctgttgttggcttcagagccagtggttaaagagcagggtcccaaggattgggagatctagtgtctgccctcctgccctgcaactcaattgggcctttttcggtgacctcatccaaggccatgatgtcaagggccatgtccccaagcagaggtggagaaggggacactgaggtgagcaaaagcaggaaggggcatccactgcgggtgactggaggccgggcaggaagcaagtcatcagagccgctcagctccgttcactctctgccttctgccccactactgtggggcagtggggccagagcccacctccccaacatgtgaagacagtgatgggcacgtgcccacacccccacttctctagccgtttgcagaggccgccacccagcaggggcctgaaaaggagcagcctcgtatttttctgtgaaatgttttaatgaaccatgttgttgctggttgtcctggcatcgcgcacactgtatgtacatactggcaacgatgtcaaatgtaatttattttaacatttttacaataaaacatgaggtggacaggcc

SEQ ID NO: 14384 - DNA, 425 bp, Homo sapiens
ttatactccattctttggtcgtcgtcctcggtagcaagacccctgattttaagctttgcacatgtccacccaaactaaagactacattttccatccaccctagaggctgggtgcagctatatgattaattctgcccaatagggtatacagagacatgtcctgggtgacatgggatgtgactttcgggtgtcggggcagcatgcccttctcccccacttccttactttagcgggctgcaatgccgccgatatgatggctgggagctctggcagccatacggcaccatgaagtagcggcaatgtttgagcggcacaataagataggaagagtctggatctctgatgatcacagagccatcctaacaaacggaatatcacccgacctcctttatgtgagagagaaataaacatcttatgtaaaatacc

SEQ ID NO: 14385 - DNA, 296 bp, Homo sapiens
ggacccacggactcttcacacagcctagacgcttcctccactccaggtagagggatttcgggggccttctcagaagcaaggagtggacaagcctcttggttaaggctcctcttacctcccaagctcatggacaagtggcaatcagctggggtccctcttttggggtacaaaggaaaggacagaggtgtgggagacccaaggtggtcttgagattgacagacagcaagtccttggagatagcccccgagtccaagaacttaggcaggggccccaagacaataaagttggtctctact

SEQ ID NO: 14386 - DNA, 377 bp, Homo sapiens
atttccaggaaatatccatccatgaattatgccagcaagaatgaagcacagatgaaggcagcgcccctcacttgctctggcttcagaagtgaactatgggctgctgggagcaactagtgactttgattcccatggaggggactgtgtttctttaaggatgctgacctggaggccaccgagaggctggggctggggctgaccacaacatccttcctgtggttgctggagctgctggcagggccaggcaaggccagagtgctaggggcagggtgaaggcttcagctcactgttgtagtgacgttttgtgtagatctttataagcttttgagaatgtgaaatagcaccatcaaaatataatgtcagaggatgctcacacc

SEQ ID NO: 14387 - DNA, 1734 bp, Homo sapiens
agttatttttgatgttccccaattccccaccagccaatccaagcattttctcctgggacccgctccatgttcagggtctaagacccagaatgagtttctccagccaggtggccactttatggaaaggatgcagggtcccccagacccctcctctagcccagcagcggctggggtctggctcctttcagagacactacacttcccgtgcagactcagatgccaactcaaagtgccttagcccaggttcctgggcttctgctgccccctcaggaccccagctaacctcagaacaactaactcatgtggactcggaaggacgggcagctatggtagatgtgggcaggaagccagacacagagcgggtggctgtggcttcagccgtggtcctcctgggaccggtagccttcaagcttgtccagcagaaccagctcaagaaaggagatgccctagtggtggcccagctggctggagtccaggcagccaaggtgaccagccagctgatccctctgtgccaccacgtggccctgagccacatccaggtgcagctggagctggacagcacacgccatgccgtgaagatccaggcatcttgccgggctcggggccccaccggggtggagatggaggccctgacctctgctgcagtggccgccctcaccctgtatgacatgtgcaaggctgtcagcagggacatcgtgttggaggagatcaagctcattagcaagactggtggtcagcggggggacttccatcgggcttagcacctgcccttctcacccatggcccacccaggcctggagctgggatgcaatgtaggctgagggaaagacgtcaggttcctttaatcacagtcactgtttgtttaccttgagcagtaaacccgaagtcagcctgctctactactaacaaacaggcctgctgctagatgatctctaatgaccaatggggcttcctttctatagggaggataccagcaggcccttaagccttccaggacactaaggtcgtgggagcgggactgcaacaagcaatgccagataactgagaaatcatgttctttgtggactatttcagacaaccaggttccgacagtccagcccagaacttttccttctcattttgggttttctcttctcctgctttcctggggagagattaagcgctcattaagcagaggagcccactttgaggagagcaaagcacaagcttgcctgaagaatggatcccaacttctccccggcagctctgcctccctaagtctgtgaagccgcagccctgccctgtcctgtcctgtcctgacttcatctctccttctgcccaagtctgtgtcccatcagacttgcagcctttcagcttaacagttgcccggtcctgctggccccttttcctctggcccccctcttctgaaacaggatgtgcacacatgggccatagccctaaggactcctgccagaccacacagcccacacctggccctgttcacggctgttccacccacccctctttattctggagcatatcagggaaagaaaagttgatgatagattgccttcaccctcacagcgcacaaataaagctacgatgccaactttgcagatgcaagaatgaagacactgtgtgggtagggcactgagctgctgcagtttcacagggaaggctgcacctatcaatcaatcaatcaatcctatcccaagacacagttccctgagggaagaagaggagggacctggaaag

SEQ ID NO: 14388 - DNA, 87 bp, Homo sapiens
cggtgggtggtcctaaacttcttttgtctaggccctctgatccctctgtaagtcgctatttcccttattaaatctctttctgctgga

SEQ ID NO: 14389 - DNA, 309 bp, Homo sapiens
gtgggggtgggcatgctccctttcctgtgcgcagggtgggagaaggggaaagaatctcactggcaagtgtttgtggagtttccatggtgatgtttacatccagggacagtttcgtctccctgtcaatggcctcgtgtccccccctaccccgcaacacccacatcacctccccaccacccggccggggtgtgctcagggaatgtggactcgctcaaatgccggactgagccctgagtgtttggaaaggcgagactccgcctttctaatcacaaatgtagcctacaagcaagcggctttggattgcttatg

SEQ ID NO: 14390 - DNA, 1340 bp, Homo sapiens
gcgcccagcgggcagggccggaggaggtgtaggggcgagaggggttgttctcctacgcctaagaggaacacagcagctgttcctggctgtgcccaccacccttcccagaaccctcggacggtgccagggccgcccgcgtcctcgccagcctcccagcagcaggcgcgcccttccggccgcgagctgtcccgcgtgcgggtcccctcctggccggcagagggcgcaggagcccaggagatggcctcagcgtggccagcctgccaaactgaccaggggacggccacggtccccgcgtgcactttagggccggtcaggccctaaagtattcactgagcacttaggaagaccgggcattgggctggtgtcatgaagaatactggaatataggaggtagggtctggagccctgacaagcacacagttcttttgcaggagtcaagatgtgctcataggagccaagggcaaactcgaaaacagccctgccctgtggttaggggaggtgggtgtggctttaggagttgagaggggaagagctgagtgcgggctggagcagcgagaatgcttcacggaggatgttggggagagaggatttgatttgccgagtggtttggagatctttaggggcgggtaggggaagagggtggctggacttaaggtaggagccgaaagtgggcatgggagcccatccccgtgggtgtgaggccggggtaggaccaggcttcccggctaggcacgcctggctggctgcctctgcctctactaacttcctttgtctctttatcctcctgcttaggccgtgtcttcctctctctctgccattttctctatcagaaaacattaaagctgagtagaaacttcaagatgatcattctggcccagcccttttatctctttatctccaatggtgtgcgttttaagtttctctgacttggtttttctgtccctgtctcccacagttgttcccgctctgcacctgtgtttcagttactctctctctctgtcttagatctttttgtttctgcctagtctctgtgccctgtctttgtgtgtttctttctctgcctgaaaccctccctcttttcccttcaggcatatgtctctaaaccaatgttatgtatcaaagactgttgaaagagacagggctactctaggaatggatgggtggggatattttccccatggatcaagatccagtttagggttgggaaataaaggatagggataaaagaggcaccccattcagtcagcagatacttattcagcacctactatgtgtttgatactgtatacaaaagacatgaatgggctgggtcctgaacagagaataaagggtttgactcc

SEQ ID NO: 14391 - DNA, 542 bp, Homo sapiens
accagtgaacattttggatgtttccgtgttctcctgtgtcatctctactgggccataggaccgggcaaacctaccttaaaataggcagaggaaagtttcatgagaagtagtgtgtttaacaagacagactttggttgctgtattcaagtatttggattatgactgtggaggagggcttgcttaagatatgtggttgtgtttttttgtggaaaagtaaggagttaggtggcttgataataggcagggaaaccagattgtcgggactatgacctttttctccagtatgctacctgatttgtttggctggccactaggtggcagcattggttctacttctctgctttttaagagaaatttcaggaaggatgatcattccagttagtttggcattttttgtcgtttgtgcacataacttggtgttatccttatgtcatcagattcctcctaggggagagtttttgttttaattacaaaattaaattctacattgttaccaagaaatttgtggtgataaaaatggaaaaataaaaatttggggagtt

SEQ ID NO: 14392 - DNA, 249 bp, Homo sapiens
aggaagatgatgggaggaaaagcccaggagaagtcccaccagggaccagcccagcctgcatacttgccacttggccaccaggactccttgttctgctctggcaagagactactctgcctgaacactgcttctcctggaccctggaagcagggactggttgagggagtggggaggtggtaagaacacctgacaacttctgaatattggacattttaaacacttacaaataaatccaagactgtcatattt

SEQ ID NO: 14393 - DNA, 1937 bp, Homo sapiens
ggccacttaagcatggggtggggagcttctcccagagtggccccagggggttagaggaggggtgaagattggggccagtatcgatcttatgaagctggaggacttgtgcagtgctggactcacccaggacttcccaaacccagaggctgccatcctaagcagccccacagcccagtgttctccttgggggcaggaacctggggaggggcccagagcaaagggcatcagggagaaagtcccgaggaaatgtgaccagtggtttctgctcggagctgcagaccccagggctcttggtggaggcaggggaaccctgagagtgctgtttacagagaacctcagctcccgtctgcctcagaaaccctattgggctgagctgccctccccaccagggccactgtgtcctctgcttccctccgttctgcttcagcttcccctaaggttagggaagaaagaatcgggctcacgaatgccagaggcagtgatgtcccatcctggaggagaggaaacagtgactaaaagctggggacccacagaggggttggcagcttctcttgtcgggacaggtgtcctttgctgggcctctggatggccctgccctgactggggctgctcctccctcctgtcctgggaccgcgcagagcccacgctctcactgctgcctcctgctggccgctgcctccttagaaagctgtgaccaggcagctaagagcctctgggctgcagggtcagcctctcccaagactgaagtgcagaggctggacttggggctctctcccccagcttctacacctgggctccaagtctgagttcccacaggggacccagcagcctccaggaagtccataccctggggtggctgagaccttggctctgtatggaggctgctcaccccacagacactggtggggagaccatggctcagaggaagggtggagcaaccctcctcctacccctcaggatagagagagaagacacacttgggacacagtgaagacagtaacttggaactgaccacggcctggaggactggcccaggcagggggacagggaaaatggagcccaagtagcctctggccagggacccaatgtcccgaggaatctgcctcccacccactgactcagggctcagactcagcctctattgtccagagcactggcttggcgtccagcaatgaaggctggagaatgcagcctggattcccctacacacacacacacacacacacacacacacacacacacacacacacacacacaggtgtctactgacctggagtgactggaatagcacctggggataaatgtgacaactgtgcattgaaccctgggtcagggacgttccaatggccaagagagtgacacagccaggaccctggtggacagccagaggggccacttcaggatggatgtggggagagtggaagaggcagggagtaatcctgggggacagcagggaggaggcacttcttccctatgtccaggagagggcaatagagggaagactgaggctgaagaattgacggctctggacccaggacagacagacagacagacagacagacagacagacagacacgcacacacacccatctctgtctagcaagcagcctcctaagatagctgttctccctatcatgacggtgtagccaccatcctgttgtatactaggagagaacttaacccacctgggggaaaatagctccccaagagctggcaccagtaccactgatggccctgcttcctctgagtgagatgcccaggaggaggagccctagggaagaagtcagggacagggaccaggataccactctgtcactgtgtgaccctcagcaagtcactaacccttggcctcatttttcctgtcttgtgaaagaggacaataattcctacttctcaagattgttttcaagataaaataacattagcattgtacaatg

SEQ ID NO: 14394 - DNA, 151 bp, Homo sapiens
gcccacgaacccacgagaatgtcctctgacttccagccacatccatctggcagttgtgccaagggaggagggaggaggtaaaaggcagggagttaataacatgaattaaatctgtaatcaccggctatttctaaagtcagcgtctcacctt

SEQ ID NO: 14395 - DNA, 620 bp, Homo sapiens
ccctggctgcccctgtgccagggaacaggggccggcctgggggctgggagggccaggggcacctccctcccacccttcaggctgcactgtgtgtgaagtagccacctgccctgcctccctcctccccgttggcccctgtttggacttagtgcctgtctggcagcctgtggggtcaggagaagcacccccagggcagccctcttgactggcgcagtgggaagaggccttcagcccctctcccggagatggaatcgcggggcagggaggggcagggtgttctagaggtgagaagagggcctggtggagattccctgtcttctgagcccgagcccctcattaccagtgaaggacatgcttgaggggttcgggaagctcctcatctgaggcaactggtcctgggggtgctcaggcctgcctttttgggactcagatggcaggaggtccaccccgcagcctggtcctcggctctcccacaggtgggcaccccccactttggtgctaatagctctccaccaggtggtgtgagcgcgggggctgccagaagcgggaggggtcactgccggaagagcagctgccctccgacccctcactttgtgcctttagtaaacactgtgctttgt

SEQ ID NO: 14396 - DNA, 138 bp, Homo sapiens
acttgctgcctcgacacgtgggctcccctcttcctcttgaccctgcaccctcctagggcattgtatctgtctttccactctggattcagccttctttttctggactctggactttctctaataataaatagttcttct

SEQ ID NO: 14397 - DNA, 443 bp, Homo sapiens
ggacttcccggtcctcaccaccctctgccccaccatgatccagcctctgcctcacactcctgtcctctgaacccaccctccccagggttcagggttgctttgcagaaggcatggaggtgggaccagatgcttccctgtgctggctggagtccccagagatatcagccaccgagtctcctggtctgtctccaggctggggagagaagggtgaccaggcgaggagggagccgagacgtcaactgtgaagggttcctgtgattgcgtttagcgccctcccgttctgtccatttgtcttgtctgccgactgtccgtgtgtgttttttttggttggaattttgaaacattttgtacctgttgattttatttatcagtttatttttctatttattgttttaaatgtaatttaacatatttattattaatataattatttttaaattctg

SEQ ID NO: 14398 - DNA, 1031 bp, Homo sapiens
tttgtccacattttattgttttccttttatttccatcccatggattacctagagggaaattacatacatcaaaaatccagtggaaagaattgtgaaaattgggttgggcgccgtggctcacacctgtaatcctagcgctttgggaggccgcggtgggtggatcacctgaggtcaggagttcgagaccagcctggccaacatggttaaaccccgtctctactaaaatagtacaaaaattagccgggcgtggtggtgggcactggtaatcccaggtactcaagaggctgaggcaggagaatcgcttgaacctgggaggcagaggttgcagtgagccaagattatgccactgcacttcagcctgggtgacagagcaagactcttatctcaaaaaaaataaaaagaattatgaaagttggattcaaattttgggtatattactaagtaacaacatatggttgttctaagaattaaaaggaactgacatgtaaaagtgcttagaacaggacctaggccctgtgcaatggctcacacctgtaattccaacactttgggaggcagaggcgggaggattgcttgaggccgagggttcaagactagcctgggcaacatagcgagactgcatctctacaaaaaatttaaaaattatccaggtgtaatggtgtgcacctgtgatcctagctacttgggaggctgaggtgggagaattgctcaagcccaggagtttgaagttgcaatgagctatgatttcaccactgcattctagcctgggcaacagagtgagatcctgactcaaataaataaataagaagagcagttgcctaccacatagtacttattcagtcagtgttagaggatattgtagtattatcaaaagtattggttattgataatattactgttttgtggtaatgctacttctgcacaccccagtttccttcttggttatgcagaaacagtagaacctgtgtaacctcaaggagatattgtatgaatctcactagccgcagcttataataaagccgagaacattt

SEQ ID NO: 14399 - DNA, 1717 bp, Homo sapiens
tgatgagcagctgccagctgagctctgtcaccaggggtactccacaggaggagcaggtgctgactttcaggtccctggaccccagaaacccagggtagacatggactctactctccttctctggttctcagctgtggcttttgttctggggctgagtcccctccccaaccccctgactctcacacatagccccccatcagctgttttactccgtgccttactggatttggcctgtcctcaagaatggtaattatgaagagtggagaagtttggaccttgcctcctttaggggaaaggtaggacaggaatgtccctgcctggtactggtgggggaaatagtccgtatccccaactattaaggatttgtcccaggccaatggtgaacatgctgcattttatgtttggattgtgctgtaataagagcctcttccttccctcagaggatgtggctgggcttctatcctagagatggagtagaaggcacaactggtttgatagttactattttctgacctgtttgctgaagtgatttgcgaattgactttcctagggtgttgcctgagtcctttgaaatctccttctgacatctttcccttctgttgtgaaatatgttaagccacaggccaaactgctataagatcgaagtttgtttttttctcacctaataatagagaggtaatcagatggtctagggcagatttaactctacaaggttatcaggaactttgtttccttctgtcttattcagccattcccagtatgttttcttacccataagatcaaagcagactcatcagctccatatctgcattccactggggaaagagagagagaaaagagcagattttaaaaaaaagatatgactgagcattgctcagatcactgtggccacactttgctgaaagagatgctgggacatagaacctcttatctgggcagtcatgtgctgagttaaaactcagggattctgtgactacaagatgaaagacaatttggttgctgagatgcagttaatggcttctgttacatggagctcaatggacgtgcccaggaatgcttttggctgttattttgcagttaatacctcctgtaactaaagcatttgtttatgagttgacttgagagaagggctgatctcagagccgctttgagctaagttggattagtcacactaggaagttaattccacacctttcgtctaagtctcagtattgaggcctctccagttctcatgcaccctgatcttagggttagaatacttgaccctgatacctgcaccatgcttcatggttcctgagctctttctcctgtttcatttgagcctccaaactacatatttggtcatattgcctgcctaccccatgcctgctgcagaaatattcatccaggttaaccttgatatacacagagatggtcttggagaattgtgaatgtatgtactgtattgtcatcaaggatactgtcccttatttgaaggcatctaaagagaaactgttttcagatccaagtgctcagatctaaagcctctgcaacaagtcaggtggtggtcatgtttcccttctagttttggctgacaggaagctcagttcagtaccataactacagaacctgtcatctgtattttttgttctcaccccgtttttgttattttgtttctggttttttatattgaggtatgttttagatatagtttacaaaaataaaacgcacagatctt

SEQ ID NO: 14400 - DNA, 1006 bp, Homo sapiens
ccctggagaggccctctggagtggccactaagcagaggaggggccgctgccacccacctccctgcctccaggaaccacaccacatctaagcctgaaggggcgtctgttcccccttcacaaagcccaagggatctggtcctacccatccccgcagtgtgcactaaggggcccggccagccatgtctgcatttcggtggctagtcaagctcctcctccctgcatctgaccagcagcgcctttcccaactctagctgggggtgggccaggctgatgggacagaattggatacatacaccagcattccttttgaacgcccccccccacccctgggggctctcatgttttcaactgccaaaatgctctagtgccttctaaaggtgttgtcccttctagggttattgcatttggattggggtccctctaaaatttaatgcatgatagacacatatgagggggaatagtctagatggctcctctcagtactttggaggcccctatgtagtccgtgctgacagctgctcctagagggaggggcctaggcctcagccagagaagctataaattcctctttgctttgctttctgctcagcttctcctgtgtgattgacagctttgctgctgaaggctcattttaatttattaattgctttgagcacaactttaagaggacataatggggtcctggccatcccacaagtggtggtaaccctggtggttgctgttttcctcccttctgctactggcaaaaggatctttgtggccaaggagctgctatagcctggggtggggtcatgccctcctctcccattgtccctctgccccatcctccagcagggaaaatgcagcagggatgccctggaggtggctgagcccctgtctagagagggaggcaagccctgttgacacaggtctttcctaaggctgcaaggtttaggctggtggcccaggaccatcatcctactgtaataaagatgattgtgaaataaaactggctttggcttcttgg

SEQ ID NO: 14401 - DNA, 1531 bp, Homo sapiens
ggagtctggggcccctccacgactccaggctcacccaggtttccagggtagtaggagggtccctggctcagcctgctcatgcccactcttcccctggtgttgacttcctggcaccccctgtgcagggctgagtggggatggggaagggctgctgggtttgaagtggccaacagggcatagtccattttggaggagtccctgggatggtgaagggaattcagttacttttcctgttcagccgctcctgggaggactgtgccttggctgggtggttgtggggctcccacagtttctgggtgttctcagttggaagcaagagccaactgaggggtgagggtcccacagaccaaatcagaaatgagaacacaaagactggtaggaggcaggggtgggagggtgttgagactgaagaaaaggcaggagttgccgggcacggtggctcacgcctgtaatcccagcactttgggaggccgaggcgggcagatcacgaggtcaggagatcgagaccatcctggctaacacggggtgaaaccccgtctctactaaaaatacaaaaaatcagccgggtgaggtggcgggcgcctgtagtcccagctactcaggaggctgaggcaagagaatggcgtgaaccccagggggccgagcctacagtgagccgagattgcgccactgcactccagcctggacgacagtgagactccgtctcaaaaaaaaaaaaagaaagaaaagaaaaggcaggagttttggggggcagggggcagcaataattctataacttccgggatgctgaggggcgttcatggggaggaccctggcctcctcctccccaaggcatcctcaccagtggtgtcaacaggaaaaatggcagcaaatacgctgcaggctgtggtctttctgcctttgaaagggtcagctgtacttaaagggactgtttcagctctgcctgggtgctgctctgggaccccctgctgccaacccaccactcccccaacaatcctctctttccatccatatcccccagtatggaccttccacaactcccagccataagctgaatgtttctctttaaaggatggagaaaacttctgtctgtctctggcaagaattgggggactgttgactgggattgtgggctgggcttggcttctaactgctgtgtgacccaagacagccacttctcctccctaaccttggttatgtcttggcagcacagtgagcaggtcggactaggcgaacagttttggattattgtgtttttagatgtggaattattttttgttatataaactcttatgtgtaaccccaatatagaaactagattaaaagggagtctctctggttgaaaggggagctgagtaccctctggaactggaggcacctctgaaaaaagcaaactgaaaaccagtgccctgggtcactgttactcctataagacagtttaaagtgagacctggaaaaacatttgctttaccttgaatagataggtttttatgttggtatataagaaataaaactaacctattaaacctga

SEQ ID NO: 14402 - DNA, 1487 bp, Homo sapiens
agcctcagggaggccatttttgcctaaatttgaaatgagggtgggccagatgagtatgtttaagtggagagtgcttccagctgagatgatttgagtctgccctaactgctccattgagttctcgtgccctcatcagctgagggcagggaatggaactttaatggaagaaccacttttatctattctttttattcattgtttcagttctgatttcagcaaacatgagcaaaccactttgactgaaagcagaaagagtgaaaattctattttgttacgctactggtgttcaattattagtttgtaccatttttaatttatgtcagttgatgcatctgaaaataagtgcttggagtgttcgtacccttatttttttttaagattcctagaaggaatctttggttaattcagattgagcagttaaagtttttgctatttacctttgtgcaggctggcatatgctaatttgggggtggtaaccaaccgattttatctcatgtaagcattacattttgaagactgaatatacttcacagcagatcaaacacatttatggcatgcactgacctcttcttggagcccagaactttatagagttgcctaccagggttactgtaatggaatttatgatcttaagaaattactagttgtattatttatcctatgattcattcattcaataagcttttactgcataaactttacatccagcactgtagttaagtacccaaaattgaatagaaataatggcttttgaaaatcgcacaaagcaggccaggcacggtggctcacgcctgtaatcccagcattttgggaggccgaggcaggcggatcacgaggtcaagagatccagaccatcctggctaacacggtgaaaccccgtctctaataaaaatacaaaaattagctggacatggtggcacgtgcctgtaatcccagctactcaggaggctgaggcaggagaattgcgtgaacccgggcccggtggaggctgcagtgagacgagatcgcgccactgcactccagcctggcgacagagcgagacgccgtctcaaaaaaaaaaaaagaaaattgtgcaaagcataggtaaatatttttctttattaagcttctcactgagaagccctctttattttggtaaatgtcactctgtttgttaggagatgtctgcttttccatgaaatgaaatagtggctaaagccctgaaagaggcaagactacaatgggctgaaacagttggtatagcaaccccagagaagtgcttcattttctttttatagtagaagcaggtccatgtcttttgtggtttcctgcacatctttggagtagttatgacttctcagtttttccccccttaaactgcattgcctattcttttttcctgacatgctatcaggtatcagtgtgttgaatacatactgcttgtgtatcagacttacgttactgtcatcaccattaaaagaattgcagctttgtgccccatgaccttc

SEQ ID NO: 14403 - DNA, 218 bp, Homo sapiens
agccctgtgtgtcacttagagacagtgaaaacccacggcctccatcttcattaatcaggaaacctggactgcctgcttgttttgtaacccttttaaactacctgttttaaaagtggtcattttattcaggtttagaaaaaaaaatcctatttcttttccttttatttaaaaaaatttgtttttgtggggggttgggggaataaataattggcacaact

SEQ ID NO: 14404 - DNA, 1693 bp, Homo sapiens
gggccctggggcccctcccctcccgaacactgagaaatagtgcactccaagaaacgtggatctccccctcatccaactccgaaagtctgaatctcccaaggagggcaccatcttacagagactctccctgacggtggaatttaagtttagggtccctaaaagcatttgacacacagttgttgaatgactgacccaaaatgtgaatgaagctaatgtgaatgtgagtgaagctcccttcaggcccgctgccctaggatatgccctcctggtgactcgggggctgtctcagacgactagcccaggacccatctttctcacacggatttagtcccaccctatggccactggccgtatctgagggctgctccccttttagaatttacctcttatgagctccatgttgcttcactctatccaaagtgtcacttggtgcataagcacagaaatctgaaaaatggccatgttgtcttttttttttttttttaatgccaagattgacaggttggccgtttgcttaatgccagaagttgggggaaagttacgcttttctaagaataatggactcttaaggcattgagggctctaaacaggattctttaatcatggagcaagagaatttcaaggcaggggattttatcccccaccaaaaacacagtgaaaggcctgcttttgtgtcccattcacatgccctcggtcactgagtctggagtgaaccacgggttgaggaagtcaggctgttggcgtgtcccagcaccacaccacccctaaagtgccaggtgatctcctgtggctcatcggtggaagcagtggggtaggctgctgccctgctgtggaagaggagcaacaatcagacatgagtccaccctttggagaccaggcctcagctcttggtgggcccagggacacccacacaggtggccatcacagccccatggacaacactaattgtccacagcaaagggcaaggaatcctctgggagcttcttccgtttcttccccccagatacccatcttgaaaaacactatttctggaatgcttctgcatcaaaggagattctttgagatagcccatcttcctgagctagcaaatacaggagttttcactttctttaggaaagagaagctttcaggggaaggagagaatgattttgctgacttcccaagccctggtgaccagaccaaggcagggcccagcataattcctccagttggatgaacattcaagagagctcgttcctacctggctggagaccgaggccagaaggcaaaaaccagaaagggaacagtccataacttacctctgcttctgaccgatggtgtttgggaataggttactttggactgagtttgggttctctgctgtcctaagaacttcagtgtagagaaaataagacttctggtgctgctggggtatgttctgggcttaattcccccaagcagaagaccagatccaagatgtttggacaccctgtcagacgttggtcccaagtttaattagatttctgaatctcgttgaggccaaggaatgatccatactgaaaaaatgctgagccagccatctttggcaaaggtccctgagctcttgctatctctcaagagtgctgagaaccacggtgaaagtgctgctctaggcccacaagtgtaactatgctgttaacagctgtcaatagataattaaaattcatactgtatg

SEQ ID NO: 14405 - DNA, 536 bp, Homo sapiens
gcagttgtcactctgttcttcactcctaccaaatactttccacgttggactttcccccttattgggtctcgaagtttacttattgtcacactgtgtatgttttcagcattttaaggctagagattgtaatgggctcctacttgtaatttccattaaattcgtaacaggtataacactaaagcatttttgctattttcgtcatgcctttgagactgagtcttactccgtcccccagcgtggtggcgcgctgggattacaggcgcgcgccaccacgcgaacttgtatttttagtagagacggggtttcgccatgttgtccgggctgctctcgaactcctgacctcaggtgatccacccgcttcagcttcccaaagtgctggcattacaggcgtgagccaccacgccagggctttatttatttatttttaccacaatagtttgaagcagtaagggggaaggagggtgattatattgctttgtaatggtttgtgatacttgaaacatcacggtgcataataaagtaggtctgcagtaaat

SEQ ID NO: 14406 - DNA, 216 bp, Homo sapiens
ggttccaggtcctttgcggcggcgatctggagggcgtggctacaggacccgggatgccattcagttactcatcttttatgctttcgtcctgacctgtctcaactagacttgctcctgcaaccaccatgggggttttgcatttacatttgtggaccatgttacagttaagaaaaatcctgtttcagtccttatatgtaataaaatgttttatgatgt

SEQ ID NO: 14407 - DNA, 326 bp, Homo sapiens
gagccccccagggtctgggaccccgctcagcatggctgcaggtaccttgatagcccacagagagatctgggaaggaagggctcctcctcaggctgctgccaacccacctggaggccacctccctccaggagatcccagggtgcaaagtggcattgagacagcagcaacagctcaagagatatctcctgcctacttgcccctccttccaggccggctctaagagaaaggcccatctactcaggaagagggccagggccttgggttctggggattgggccctgagagggctagttctgtggctgaaaataaagcatgtcccgccccct

SEQ ID NO: 14408 - DNA, 239 bp, Homo sapiens
ccacagtgagagctgccttatattcctacattccaggccagaaccagcacaggactgaacacatccctggttgtaatgtccatttccatcttccccgtctccctttccacatcaaggcacatcagacttctcagagacccactttattcagttctgtacatatggggacatcggtccaagcccaacccaccttagcatgtatcactctgtggagaataaagcaccctatgtacacagcc

SEQ ID NO: 14409 - DNA, 70 bp, Homo sapiens
ccctagacttggggtcaggggaaggtagagctggagcttttacagaaataaaacccaagagtttgattat

SEQ ID NO: 14410 - DNA, 245 bp, Homo sapiens
tatccctgtactctaataaaatgccccccccccccgttttaatctgttactgtggttttgttttgggtgttttttgttttttttgttgttgttttttttttgcgggggaggggatggtacagactaaacgtggggaaaagaagtaaaaagtgtggaagagaaagtacaggacactgggtctgtccccaccccaattcccttacaagtaatggagccggggatggaaataaatgacgtccaaggtc

SEQ ID NO: 14411 - DNA, 331 bp, Homo sapiens
gcaccgcgcctctcccaaggggtaagggagctgtgagggtgtggatgggaggcagcttcacctttccctgccctttccagtgctttcggccatgatccggggagcagcagatggctctcggttccaggtgtgggactatgaggagggagaggtggaggccctgctggatcgatacttcgaggctgatcctccagggcaggtggctgcctcccctgacccaaccacttgacttaatctcactttcttaaattcttctattctcagacactgctctagtaccattccttcctcttagccccaggagcaaattaaaaggtacagttaaaatcct

SEQ ID NO: 14412 - DNA, 341 bp, Homo sapiens
gacgctcacaaaaaaggtcaccctaactcaggcctcccatcatgcccctcatggtccaatggaagctacaaaaatctccagtcccatgggggttggggaaggtgggatcttgggggcctgggcctaggctccatggtaggccagagagtctagactttctctgccaattttttccctttcccatttctatctggttagggaacagcccgttttgaagggtatcctcctcctggccatcacaacccctttccccagcacattctggagcttcaaggtactcataaaacttgtgtttattgaatttcagcctctgtggcttcttcaataaaatgttggctccc

SEQ ID NO: 14413 - DNA, 1088 bp, Homo sapiens
gaataaatacctagagctacttgtgagtgaatcattggcttctagaaatcagatgcccagatgatccaagactagtttgttatctcatctggaacctacaccaagagatgcagtcagcatcttaaagtaaatgttcatggaagctaaaaaatttacctcctttccttttccctttccccttaaaacaccagacaaatcgataacaacttatatatatatatatatatctgtaaaaatgtattttgttaatttttttggccaatttattttctcccactttgtcattaaaatcacatgtctaactggctcaccacatagtgtgctttgattgtattttggctttgactctgccatttctgaaatgtgggggaggatggaggcagctgacctctccagttgctgtgttgtattcctacccaatttcctgggcagttgatgcatctctgggaaaaacaccagaaagcttgctgaaatggaaaacttggaagaattgttcatctcttaggcttccatttggatgggcctgccttaacattgtttgaaatgcagcgtgagtagctcttttgtttactgtttacaccccttattggcatgtcaactcctgtacttcccttactctgttgcctttcttgagatgcattgtcctgctaacccacaaacctgtttggaaataaacatggaagaatatctggcaggcttacttttagaagacgacaaatcggtaaggcttattcatggttcattgccaggagcagatatgcttttgagatcacttttatttttgaaatggcctttgttcattgtattgtgatccaataacactttgtattaaattgtttagcagccatttgtgttgtgaaggggtagaagatctctgaaacttgtcttgagattgaactcattccctgttccacaaacccatatgtatcctttcctctacctcctcctttcccaattaatttcaaccatagtacgatgtttggggttgtatattttgttaaaaagattaaagaatttatgagttggcttggacaagtttaactttatttttaatgtgttaattacttggaataaatgcattaatctca

SEQ ID NO: 14414 - DNA, 185 bp, Homo sapiens
tggaggtgggggctttctggcccccttcctcacctcttccacccctcagactggagtggtccgttctcaccacccttcagcttgggtacacacacagaggagacctcagcctcacaccagaaatattatttttttaatacacagaatgtaagatggaattttatcaaataaaactatgaaaatgc

SEQ ID NO: 14415 - DNA, 269 bp, Homo sapiens
ctctccactgggcctctgcacaccatttcacttatctatgtcccgagcaccttgccccagatatcagggtcaggccctgggacttgggagggaactggggtcaggggctgcatgggggctctggcagctcctggcagtgtggtgggaaggaagctctggaagctgtgactgagcaacagccttggggggcacttgaacccacggcaatgcctttgaacttggcagctctggctgcaacccgctggctcggaaaagattttatgaactcc

SEQ ID NO: 14416 - DNA, 340 bp, Homo sapiens
ccccacctgaaattcttggccagtcctctttcccgcagctgcagagaggaggaagactattaaaggacagtcctgatgacatgtttcgtagatggggtttgcagctgccactgagctgtagctgcgtaagtacctccttgatgcctgtcggcacttctgaaaggcacaaggccaagaactcctggccaggactgcaaggctctgcagccaatgcagaaaatgggtcagctcctttgagaacccctccccacctaccccttccttcctctttatctctcccacattgtcttgctaaatatagacttggtaattaaaatgttgattgaagtctggaactgca

SEQ ID NO: 14417 - DNA, 1531 bp, Homo sapiens
atcaagcttttgggcatccttcctcggcctttcttgtcatctcttctttccctttgtagccgatctctaggcccttcttgcactgccacctcactttccaccactgtcagcctggaaagagatccaggtctggagctggagagaacaggccctgtgcaggaccagaagtaattatactaaagtatcaagaaagggagttagggcttaaactattctgtctagatgtcccagatagttcccattctacttggagatttggcttttccaagaaaagctagagcagagcagcccttctcccacaagccctcccacccccgtgcagccacatacctgtacagaatggtaactaagggtgctgtgcccaaccctgcgactagcaaggctcgcagcaagagcacagccctcaactacttgtgccagagtttctcttggaccactccaactcccactgagcccttttgctgctgggctggcaggaaactttccccactccctaaggggcatgtctgggttaggtgctaagtgctgaagagaacttggtcagttctctcaactttgctttgggcaagaatctggtcacctgatgggatccatggtacaggctactgctaaacttggcacagtatcaagtatagtacctccaaggaccagggctgggaagtctttagtgctaacatcccctttagagttcacacatcttgcccttccatgaatgacccctcagtctggcctccccagcctcaaggtccactcaggcacaagagccacagtaccctagatagtgtcacatgacaccgttgtcatccaaggataatacagaccaactaggctacatctgtgatgagcagctagcaaagccgctggtcttctcctaggactaagtccaggtgccttccacaatctcatggtctttcaggtccctggttacttttctcaaaggccatttccaaaagaatacatgccttcacatcacaacctgtactgtgagtccattctagaggtcactgaaaggccctgtaaagagaggacatggatacgggacctggccctgaggttattactggccgtaaggcagagttaatccatacagaaaccagtgtgtccatgtgctctgcacaaaaacagacctgttgtccatccagtccactgacaagagggtttccccgagagccgaagtggactgaagctacagtttttagctggtgcgggccacaggcagggtcagattgagaagaagcaaagctggggaagcagaagttgggagtcttgtgttgctccctcttcctgtgtggtgctctgggtttctgtggatcgtgaaggcgatctcaagagtgtttccctccaaacctgatagctgcctattcctgtctggttggggctgtggaggatgtagttgtatttattgcattgtaatatttttaacatcctgtgacttcatgctagaaattttctattgtttatagaaactttttgtagaaacattaactctaaagcacatctgcatgtcagtaaaaatctcagtttcgtacag

SEQ ID NO: 14418 - DNA, 1132 bp, Homo sapiens
acccttcaggcagggacagttctattgctgtccctacaatatataaggtgacttctggccatgctgccctgccattggcggctctgtgtgttaataggctagggagagaggggtgctgtctgccacttgctccctgccaactttctggagaggtgccaaacttggtgtggccaggaaagggcagtcctgagggagaagacaggattcagggcagtgctccgaagctgtgtgctcacctggttggctcatcaaacctggcaaccctgtggcctgtctgccggagctgactggatccactcatcaattcttcgtccccactactaagactgggcatgttttgctggtgtggtctctgcacttcaggaatggtcacaacagggggtagccctcaaaagcactcctttttctatacctcttctcaaggccatgtaagttgcccatctctacctggctgtggacaaaaggttatctgctcttggccatctggtggtggtggcggcccagagtctgaagaaatggcacagggacagtgaatggtagtgttgccaccctgtgctgaggcctgaggcctcttcctcagctttatctccctttccttcactcaagggccatttccccagtccctatctcccccatcccctcccggcttataggccccacaggtgctatttgttgtgctggcccaggcgtggggctaccaagcaaaggcttggcatataccaaaggccagctgcatgcccatcagtctggtctttttcctctgcggtcatgttggctttcatgctggatcaaatgttttactttcccagactggtggcatctgagttccccatcctaccactctcaccccactttcctgccccacctaaaccctcgttttagtaatttgtagtgactgttcccttccctctgttgcagggaaccaggaggaaagggaaagatgttgccatatttcctactctttaggcatggactctcctttccctttgttagtgtcctgggttcccatggactcagggatttgttggctaaggtttctctgtgcatatatatatatatacatatgtatatatatttaaatacacatatatattgtacagaataaaaatgttttattgaatacactgtgctt

SEQ ID NO: 14419 - DNA, 457 bp, Homo sapiens
cagagagcagtgcttccagagttcctcctgcacctgtgctggggagtaggaggcccactcacaagcccttggccacaactatactcctgtcccaccccaccacgatggcctggtccctccaacatgcatggacaggggacagtgggactaacttcagtacccttggcctgcacagtagcaatgctgggagctagaggcaggcagggcagttgggtcccttgccagctgctatggggcttaggccatgctcagtgctggggacaggagttttgcccaacgcagtgtcataaactgggttcatgggcttacccattgggtgtgcgctcactgcttgggaagtgcagggggtcctgggcacattgccagctgggtgctgagcattgagtcactgatctcttgtgatggggccaatgagtcaattgaattcatgggccaaacaggtcccatcctcttcatg

SEQ ID NO: 14420 - DNA, 208 bp, Homo sapiens
gttgagcccaggcctctggttgcaggactcgtgaatggagcagttctgagaaccacccttttgctaagggagcttgggagccacatggctgctcccttcacactgggtaacagtgtagtatcctgtgagagaataaatgtattcatttatgtgtttttccagagctttctgggatgtgggaaaataaattacactgaagcagttgaaa

SEQ ID NO: 14421 - DNA, 599 bp, Homo sapiens
gggtggaaagggcctgaggggtgaagtgaaataggaccctcccaccatccccttctgctgtaacctctgagggagctggctgaaagggcaaaatgcaggtgttttctcagtatcacagaccagctctgcagcaggggattggggagcccaggaggcagccttcccttttgccttaagtcacccatcttccagtaagcagtttattctgagccccgggggtagacagtcctcagtgaggggttttggggagtttggggtcaagagagcataggtaggttccagttactcttcccacaagttcccttaagtcttgccctagctgtgctctgccaccttccagactcactcccctctgcaaatacctgcatttcttaccctggtgagaaaagcacaagcggtgtaggctccaatgctgctttcccaggagggtgaagatggtgctgtgctgaggaaaggggatgcagagccctgcccagcaccaccacctcctatgctcctggatccctaggctctgttccatgagcctgttgcaggttttggtactttagaaatgtaactttttgctcttataattttattttattaaattaaattactgc

SEQ ID NO: 14422 - DNA, 1053 bp, Homo sapiens
agccaggcagggtctgggatcctcagggctccacctctccatctggaagccggagccataactgctgcagtttgggcccaggctatgtgctcttctggtgccctagggactgctgtggccagagcctggggccagccagtacagtcctgagccgaggaggagggactgcaagtggaagagagccagtctggaaggaagagctttccaggtggacagggcttcttggaagacccccaaagccccaggtatcctgggtgaagcctgtttgcctctcttgaaaatggcaggtgctcttgttttacccatgttgggtcagcctgaaactgccaaccagtaggaagcatggactctcctgagtgagaagagactgaaataggagcaagcagaaccctgagaggtgtcccatcttattgctgttgaggaccctgaaacaccgttgtttaaagacttcacacagaaggctctgaactgagccactggggaagggaagtttcagtaacatgacactaaaatggcagagacgttaaaaaaagtttttcccttctagagctgttttgcgcgcatgcatgtctgtgtgcattggggctttttagacaggcctgccctgtgactttgtggtagaggcagagagaaggaaattgtcccctgagcacggtagggccttgctgggtggggtcagaggccagtagttccaggcctttctctgtgtccagcacagacccttgtccttgctgtggaaatgatgagggatggagggacaagaggaagaatgagaggacacacgccctggagccctcaccactgccctgggggttgccatctggaggagcctggggataagggtaacccagggaggctgggcacgagggagctgactccacgtttttccccccgttcctcaccttcgagggccctgctaggtcacccctatgctggcatgaagagcatggggcaataaaccagcacagtctctgaccacttggagcgtctcatccagtgagagagacagccgttaaaagcataaacatccaaataaagatgcctttccaagtt

SEQ ID NO: 14423 - DNA, 16 bp, Homo sapiens
aatgacctgacttgga

SEQ ID NO: 14424 - DNA, 1821 bp, Homo sapiens
cccaggtccgcccagggacccacatggactaaaggcaatgccaggagccctgaaggagccagcagaaccttcccacatgctgaagcgaggactagaggctggaggccaagcagctgagccaaagaagatcacctgggccagggcctacgtgacacaaggagacatgggctagggaaggcagaactgggcccaaagacacacacccccttggtgaaagagaagacatggacaattatggctgtgactgcacattagaaattatttcactggccgggtgtggtggttcacacctgtaatccaagcactttgggaggccgaggcaggtagatcatgaggtcaggagatcaaaaccatcctggctaacatggtgaaaccccatctctactaaaaatacaaaaaattagccgggtgtggtggcacacgcctgtagtcccagctactcgggaggctgaggcagaagaatcgcttgaacctgggaggtggaggttgcagtgggccaagatcgcaccactgcactccagcctgggtgacagagcgagactctgtctcaaataattatttcacagaggatagcaagctccagaaggttctattacctttaaaaaagagtagttttgcccctcccagcaacctaagaccagtctgaactcacactgtctgaaaggccacccaggatccaaatcgggccatcttcattgccatgagtgttcggacaggctctgcgtgccaggcaacagtgggcagacaaagggctccctggctactgggaagatacagaaccatcctgtgaaaatcatttcagcactggagaccttctttgctattacttctttcattaacaatgacctctaatttaaattgggccctgctggtttgttgatgaattgagcaactgagaacgtggcgggcactaaactgacagttccttccttcatggagcctgcttcatgtggaggaaacaggaaataaagcaaaagaagagggtcaggcttggtggctcatgcctataatcctggcattttaggaggctgaggttggagaatcgcttgaggccagaagtgcaagaccagcctgcgcaaacagcaagaccctgtctacaaaaaaaaaaaaaagtaatctttatgcctcagcctcccaggtagctgagactacccacaccttggtcccagctacttgggaggctgaggtgggaaaatcactttgcccaggaattcaaggccgcagtgagctatgattgcaccactgcactccaggcaacagagtgagaccctgtcttaaaaaaaagaagggagaaagtgtcagatggtgatgaggtctgggggggaaatagagaatggggatcaggagtgtggatggtgatattccctcaccaagaggtgacatgtgagcagggagctgggaggtgagggtgtgacccgtgtggaaatcagggaaaagcattccagcctgagggaacagccaatgcagaggccgtgaggtggccagtgccactgagcagtgagctgggataggggcaggtgaggaggctggagagcggggtcagacaaacaatatgcttattaaaacaagttgtacagcacctgcctcaagcctgagctgaagctgaaaattggcacttcaaagcaggaggaagcagagatggaggaaagccctccttccctaccagaatgagtccacctcagacagccagactttggacctctgcctttgttcctagatctctgttgctagatgaaggaaagggcctcaggggatccatcttcaaatcaagggctccctggctaccaaattctgtctagtaaaaattattcgagcagcgtg

SEQ ID NO: 14425 - DNA, 1082 bp, Homo sapiens
tgtgacaactgtgatgtgcctgcaacaacaggaaaggcaatgttatattaaggtgatttcttgtgaacaaaataaaatacaaatttacctttcttttatctgagggagtgggctggtctgttgtgactttcaacttgctgactcctcctcttttccagcccctcaaccatcggtcttgtttactagatgggctgttcagctaattaatggcaggatgtttaggatagtctgtaggtggacaagaatgcagatcacacagttttgaaattttaatttgagtagatttactgccctcagctcacataccttaaaagcagtggttgcccccgtccagcgttttgtctgcattttatttgatatattttataatccaggtttggaacaaggaaacaaaattaaaaggacagtgagttttcgccttcccttacaccaccaactttactttccaacatttgttgacatgtgttttagtgacagctatccattttataaacttacagtaatcaaagatctaacagacctgataaatcacctgttcccacctcctttccccttcactccacttatagtatgtgtcattttcaatgcctgcttcccaacttcctgccatctgcctttcatgtgtgtttttcctcacacagaacctcttcctccatcttcatttccctccttttcctgttcctccaatccccagatccaccactcctgcacatgccatacacatttagaagccaagtattcagaatcagtagaaggggagcagagtgatttcttgcttcctcccttcaaagcactaccacacctagactggaaatgtgggctgggtaatttcttgctgttagcagccgagctacccttctggcatctatactttctccagtaaatgaggaaccgtaactctttggaacaaaccaaaatatagcagatgtaattgtacagttcctgattaaacttcagttgcaaaaaagaaagttatttctttaattctgtgggagttttgtataattttacttttatggtttttacacatacttgaaacactctttctaaagaattaataaaaacagaaatgagaaacatga

SEQ ID NO: 14426 - DNA, 4631 bp, Homo sapiens
gcacagccattttgccccatccccgctgcagaaggactcaaccactcccctaagactccagcttcatagactcctctgtatcactgccttgaggcgcactttttataatcaagcctcatcttgctggtatcatgggaactccagcctgctatctttcatgaaggtcagcaccatccctggcctcctcacataggaatctagcagaaatgatagacacagtccacctttcggccggccagcctgatctgggctcagcatgtttggggtcagtcagtgttggagagcccacatatgggattgccactagcttcttctgccaatatcaaaataccttctcagatgctttagaaacatgcaacaccaactccttttctaccctcctctccgtccatacctacaaggccaaggacaaacgccatcttcatccttcttagaaagagatctattaccccattaggggagacagagagagtgaatggaggagtaccgagctggctatggacttgggtgtctggcaaacacagcttcagtctcactacttctgacactctggttattgggcactaagggccagactggaaagtcacttgagacacattctcagtttgttgcagtgccaggaatgctgcgctgctgctgctgcgcacctggcccatgctgtccctggcttccatgccgtccaggccctgccagaaaaggaaattggcatgcaattctaaactgcagtgactgggatgggaggggaggggagcagtgttgatgccaaaatacccacggggtctaccagccatggggtttgcttgcttaggagtagttgtttcagaggtgattacaggcctgggtttgactgtgcttaccaatgagtggtttttgagctatgagaaagtggatgggagtgggaggaggagagatgggtgaagacaaaagagttctttatgagcctcgatgttccctggtaaacttttaaaaaggccttctctcatgatctaagtcttggactggtggcatcatgtaactgctaaccttacagtaaaaacccaagaatgggtcaaaaatgtcttcccagtttctccaagctgcttctggaatgcaggtctgtcggctgggtgctctccagcagctgctcctgcctgattcaactgtagcctgtaatgggtaaaagccacatttaggaggtggtctgatcatagaacaccttaggaagaaagtccatgagactttctgactaggaaaccatgtggtttgaacttgaagaaaaatgtagacccatctgggttaattttcctacaatctgactcaactgccaggtgaaaaaaaaaaggaaaaatttttaagctaatatttcactcttttgtcattctccttaagtttcatctcctaaaaagcttacccagcctgagcttggggacctgtgcagaggaaactaagaaaaatgcactcatcaactccttctcccagtgaacgcccggtgagaaaatccatttgccacaggcccttaccttcaacaatcccccttctatagtgttcgctggtaaagggtgaggctcccaagtgctggaaagcccctggacttggctcatttctcagcaagggcaggatagcacgggtcctttccatagaaatatcaacaaattctaacccaagcaatccctggacctacctgcctccagggatctctgaagaaaaaaagtaacccattgatcaaatcagaggagaggaagcaggaggtctcctagagcccattgaggaagaggaactttctcagtaggacactttataagcctgagaaagctttgaaaaggcggaatgagttgattcatttccacctcaaaaggaacctttccaggtccccctggaaattgtgccctggagatgtttaacaaggagaactggtgaggaaagagtccttttttactgtagggaaaagccccaaactggcctcctgggggatgagggctgaaatgatcccgaaggccttttaattagtgtgaaatcctgctgtactcagaaatccttccccgaatttacagcacaggcaggatgacctaagaggcagtttacttccctgagacccacagttgggctgttctggaaacacatctgtgaatcatagccaattgccacagagaaaacagaaccaagcctccggtgaggccactccaccccagagaagtctgcagaattccaaggactcggattggatgttcagaattcagcaactggaaagtccttaaaaacaaacaggccaaaccaaatcaatattgctgtttctagatgtcccttctgtggttgagctagttttacagagataaatatattaagacaaggaggtgggggtgttatatgatcaatgatagccatttgaaagagagggaggagtacagaaggaaggcacttctgggtacttaattcagaaatttctttatatttcagcactggattatcatataatgcaagtgactatggactaagagttagttatggtgtcttatgactagatttattatggtatattaaagtaacaataatattaatattaccttcctttttttttttgtttcaaaagagatctttctccagatgcttcagcctgtctggccttcttatcatatgtgcagcacatcatgtctcagcaacagtgtggtgaggtccttaggtgtcccaagaacaactcagggagcacgggagggtctgcagttgggaccccacaactatacagctatagggtaggaggcttccttttcattggtcctgaatgaatacaaatcgctcagaaagcattttggtggcacagaaaggggatgtatttgtgttgagatcttattttattttgtatttatttatcttctttgacttgcacagcactattgggggtgggggaagcagggtagtgggagacgaaggcagaagcaagagtcaaactcagaatgactgagttgaattcactgtctagtcagcaatgcctgcttctgagtttggcccagagagaaggtattgagtaagattttaataactgtaaaaagtaagctggataagtaaaatcatgatggatccaaagcacagtttcttcatctcctgataaagaaagtcaaatgcttgataaattcagagtcacagatgtgagcatagctatattcttttaaacgagaggtagagtgacctagcactaagcaaatgagctgaaatgtcggaaacagagtccatcagcttatttggccacacgatcccaaactagttttatcttgggaaatggccctgtcctcagcattcccttcttgtgctggtggggccagtgaagtcttgatcttatcagaaaaaggccacaccaagtgcgagttttcccaggctgactttccaggcccttatcaaatgaaacaacagaagctcttcacagttctgtgccccatggccactccacagacagacaataccaagcatcttagaactgtcataagataggtcatgcctgaaatagatcttgaccatatgagagtcccagaaatcagcaaggcctggacaaatagaactaagagagaggcagaggcaggaagctgcgggtctatcttgtaaagagtttagcatcactgtgagagtgtgtgtctaaaattaaattaaactagaagcagcaggtgagtatttggtaagtacttctgtgactcgcctcaattcccactggccaggggccatctcaactgcacggtgaatcaagatgctggtgtcatcctccttggaaaaaggaaatgttaactcatggttaaaactaagtacaatgattcccaagggatcactttcttatttttttaaatgacattaaggagaatcttaagaaagcatcagagaaagacatgtgcatgtgaagcaccctgattctgatgttaggaaaacttaagcgaacaggacctgctgcacacagccccattgtcttctatccatttctctttatcattcaaatcaagcaacatgtgccctcctcatcaacacacattcttcccctttgtcagtatgcatctcccagcttagtgtcaggatactttcgattcataattatgtatgatccaaagtgtgcataatttcatttaacgttaaagaaatagatccaattcctttcttgcaaccaaaaataaataaaatacgttgcctcaatataaggtttgggctattctgtgtttctatagaagcaatctgtttttggtaaaatgtacttttaaggatccagtcatctgaagtattttatgtagagttagagatttcacaatattgactatacatatatttaaaatataaattatccagctgatgtttgaatttgtcttactttcctggccacctcgttgtcctattttataagctggggagttaactagcttaacaaaagatgcttagcttttgtaaaagaacaagtgtttcattttacaaagacactccaaatgatagttacttgattttctcgagacctttaactatggtgatgaataacaggacttgctttcaagccttaataaatgtaaaatgccttttaatgaagatacagctgagtgttttcctcatgaatctgaaccaattaccaatttgtgttccagtcttgattggtattgactgattcaaataaagttggtttattttcaaatatt

SEQ ID NO: 14427 - DNA, 1301 bp, Homo sapiens
tgttactttgaagtggatttgcatattgaagtggagattccataattatgtcagtgtttaaaggtttcaaattctgggaaaccagttccaaacatttgcagaaaccattaagcagttacatatttaggtatacacacacacacacacacacatacacacacacggaccaaaatacttacacctgcaaaggaataaagatgtgagagtatgtctccattgttcactgtagcatagggatagataagatcctgctttatttggacttggcgcagataatgtatatatttagcaactttgcactatgtaaagtaccttatgtattgcactttaaatttctctcctgatgggtactttaatttgaaatgcactttatgcacagttatgtcttataacttgattgaaaatgacaactttttgcacccatgtcacagaatacttgttacgcattgttcaaactgaaggaaatttctaataatcccgaataatgaacgtagaaatctatctccataaattgagagaagaagaaggtgataagtgttgaaaattaaatgtgataacctttgaaccttgaattttggagatgtattcccaacagcagaatgcaactgtgggcatttcttgtcttatttctttccagagaacgtggttttcatttatttttccctcaaaagagagtcaaatactgacagattcgttctaaatatattgtttctgtcataaaattattgtgatttcctgatgagtcatattactgtgattttcataataatgaagacaccatgaatatactttttttctatatagttcagcaatggcctgaatagaagcaaccaggcaccatctcagcaatgttttctcttgtttgtaattatttgctcctttgaaaattaaatcactattaattacattaaaaatcaaattggataaaacaatgttttctttctggtagcgcataataacagagcacaagcatcttttagatttgagcatttgaagattcaaagttgcgaaagagcacaaaccatattaggtaaaatattggccactcgatccttgaaaagaactgtgtggagcctggaaaaaaaaattaggaccacatgtgagatgtttacaagacacccagaacagtggtaaagtgtgcatactagaaaaagcagcaaaataactctttgtggtaacaggtatcaaaacacgggagccgagatgatatagctctgtttcaagaaatatgtgaatacccacctaccaggtgctcagtggaatcaaagatgaatccaagttcacaaatagacttctacttc

SEQ ID NO: 14428 - DNA, 2409 bp, Homo sapiens
gctgcctgctccttctcgataatagccgtctcctctttatcatgctttttccccctgttgtttgtcaaaaaaaattgcctttaaattcctgggtgtttggttgtttgagattccttccttgttatcaagcctctcggacaaaagggctaggaaaaggtgatatgtctcctgatcatatcatacccattaagtataacccattatttagaaggttctagggaaaaaagtagtattttcttattaaacaatcagcacagcctatatctttgttctctcatgttgatccaagccagagacatcagtaacaaatagcacctgtgttgtttgtgagctgtttcagtcccagtcctgatgtgtgtgcgttgttctctcctggccacttaaataggaccatatgtaaacttgactttgactgcatgagatatccctatctggtctcactcagtcctctgcatcccaacattcccaggacatgcatgatcaccagcatttattttcattatttgaggatatcttataactcacagattgtcagcatccagccatgtcctatctagattaggaaaatgatcagaatattccagctcaacaagtctgggtatattcactattgtgagtcaatacaccatagctctgttgaaattcctggaggcaaaattgaccttggccccaaagatattcctcaatagatttcaaacaccactcccctgtagaactctcccagcctcgttggggaggcttgtccagggtgatagagactgatttcagacaaacctatttattacaaaagtttcatggtgtctgaatgattgttttctctctttgtatatttgtacaaatgtttcagctgtgcttttaaaaaatctggatgttttttatttagtgattgttcgacaattagctgcttcaaaacataatgtgcattgcttatgaatgccttcatatactaatacagatactctgataatattacactctaataaggataatgctgaattttgaaaggacacaaaacatctaatgccaatatatacatgattagccaacatctttgctatcaagaccacttgtttttaaataaagatgcaagtgtcagttgtagattattgggatgaagctaaatccccagaatgcagcagcagctgagcatgttaaaatggggaaggatgatagctacatgtatgccggtcctactcacgcgacacccgtgtgctcaaaaaagttatttgtttttgttacgtgtgatttttctatttctctagcccaaagtgcattacagaagatacacctatagaaccattaccttctgctatgtgtgccaggcctcatctactcctgtacattaatgaattactttagatgcaaacgcagattacaatggagtggggaagtactttcattacccaagcctcagaaaaacacacaagaacaataacacagcaaacagattgagggattgttgtggtttttgactaaggtgtatgttagtttcatcagaaacttaaaacatagactgatcactcagaaattaaagtccgttttactgtgaatatagcaatatagtactggacacagtactggtgaaactgaggagagcattgcttgtaaaatcctgagtttccataaggaaaatgaaaactccttttaaaaataaaatctgaggagtgtacaataagcatatgctttgactttcctttgctgtggaggtttttggtttttcattgatgataaacgactacagacttagtagtggagaaatggtgtcctctagtggaagaaatagtaggctccgctattcagatgcagagcactgcagcatccagcctttcaaagctgactcttctcaatcatctgtgggtcatttgacttgattttttaagctaccctgaatttccagaatgcaggttctaaagaaatctagatgagagaaagtatttgaaaatgatttttaaatgttttttaaaagacacatctgacatttttaacaacttagtaaaagttgaaatgaccattctgtgtagtcataaaagaaacacaatgaagtgtatggcctctggagttagtcttagtaaaacttattgctctgtgtcaatgttaacctgtctcagatcaagtaattctttcactaggttgggtttggggaggggggaaaagaggggcttttcctaggagaacgataagaaatggaaagactccttgaagtgttgcaagggaacctcctagcactgtgaaagtcagaatcgcctcagcatttccatgacgcacattatgcaaatctctttagcactattttaagtttgaaaactttaacaatgaaggggaaggggaagatttccaccaactgaatcatttgtgcacgtgtatagctcaaagagcttagacttcaaatatatctggtgaatgactctt

SEQ ID NO: 14429 - DNA, 657 bp, Homo sapiens
catctgttgggcctcacaaggaccagggccttctggaggagtggcactaccccacctggcagcacctagacctgagctctacaaaaacacactgcttcactttgttttaggacttagttcaagaacacattcaaatggtgcatgtgtttggtatcttcaacagtagaccaagaatctaacatcactctcagtaatatagagaccggaatacatggtttataggaaatgatcaaatgatccaaaaaaactccacattttttaagaagttggaatttgatttcatgcataactgtattaaaacattaaatagaaataatgtcatttgaatgaaaatcttatcacattaaattcactgtgaaggcagcatacttaaatttttattttgaaaagtctaaaaggcttagatttttaaaatttaataattatttctacaaattttctatttttcttgaggtgattctcaactagcaattggaactcctaggctctattaacataattctttattgtaaacgtatctaatgctaaaagtaataaaatggtagttttctgagacctgtgaggacaggaatggtgtcttacattcatttctacactttattatgctcaggattgcaccttctttacagagtatattcaataaatgtatgttgattg

SEQ ID NO: 14430 - DNA, 18 bp, Homo sapiens
gattaaaataggtttttt

SEQ ID NO: 14431 - DNA, 1484 bp, Homo sapiens
gaacaggataatccaacctacgtgacctcccggggacagtggctgtgcttttaaaaagagatgcttgcaaagcaatggggaacgtgttctcggggcaggtttccgggagcagatgccaaaaagactttttcatagagaagaggctttcttttgtaaagacagaataaaaataattgttatgtttctgtttgttccctccccctcccccttgtgtgataccacatgtgtatagtatttaagtgaaactcaagccctcaaggcccaacttctctgtctatattgtaatatagaatttcgaagagacattttcactttttacacattgggcacaaagataagctttgattaaagtagtaagtaaaaggctacctaggaaatacttcagtgaattctaagaaggaaggaaggaagaaaggaaggaaagaagggagggaaacagggagaaagggaaaaagaagaaaaagagaaagatgaaaataggaacaaataaagacaaacaacattaagggccatattgtaagatttccatgttaatgatctaatataatcactcagtgcaacattgagaatttttttttaatggctcaaaaatggaaactgaaagcaagtcatggggaatgaatactttgggcagtatcttcctgatgtcttcttagctaagaggaggaaaaaaaggctgaaaaaatagggaggaaattccttcatcagaacgacttcaagtggataacaatatttataagaaatgaatggaaggaaatatgatcctcctgagactaactttgtatgttaaggtttgaactaagtgaatgtatctgcagaggaagtattacaaagatatgtcattagatccaagtgctgattaaatttttatagtttatcagaaaagccttatattttagtttgttccacattttgaaagcaaaaaatatatatttgatatacccttcaattgccaaatttgatatgttgcactgaagacagaccctgtcatatatttaatggcttcaagcaggtacttctctgtgcattatagaatagattttaataatcttatagcattgtatattattattgctgttgtcactgttattattattgtggatactggcccttggtgtgttgcatagctccctatgtattctctgtttccatctttaagttcccagaccaatatacattaagagttttgcatggtctaaattgtgtttattccaaccacgtggaaagctcctggaaagaaattttacattcggttgttctgtgctcctaatgacacttgaccttgttgaacaaatggcagagcctttcccaaggatttgattgtttgtgaattatctgcatgtgtgcttttttttggtgtgtatttcattaaaaaatataaatatttatgaaaattgcacgcatattagagttaaccatgtactattgatacagcaacgctacattgcaaataaaagtccgatcccaaaaggagaatgagacaa

SEQ ID NO: 14432 - DNA, 565 bp, Homo sapiens
gctcactgcaaccctgcaacctctgcctaccgggttcaagagattcccctgcctcagcctcccaagtagctggaattacagacacctgccaccacatccagctaactttttttgtatttttagtagagacagggtttcaccatgttggccacactggtctcaaactcctgacctcaggtgatccgcctgcctcggcccccaaagtgctgggattacaggcatgagccaccacatctggcctaggaccttaaatattggaaagcattctcaaaactgtgggtcagtgagtagaactacaaaacaatagcagtagggcagaaacttgaaagaaggcaggagatcatggtgacagtggatgggaaaaagtgagggttggggataagggttgcgggttgtcgaagggtggattttctccttcagcaactacaggagatatgatgcctcataattcggagccagaagtggggctttgggtgagatatctttgcacagataacatgtatacatcatagttcaaaacccagtagtcattgtttacagcaaataaagaaatatttagtaaatt

SEQ ID NO: 14433 - DNA, 146 bp, Homo sapiens
ggcaaggaatcataaaatcaagaaaaaatttccagaacaacttgacatttagagacaaatgtcaatgaagaaattatgctcagtattcgatcgggttttctgatttaggggtctgggaataaaacaagaatgtctcagtggcttca

SEQ ID NO: 14434 - DNA, 1232 bp, Homo sapiens
aacatagggatactgcattctggaaattactcaatttagtggcagggtggttttttaattttcttctgtttctgatttttgttgtttggggtgtgtgtgtgtgtttgtgtgtgtgtgtgtgtgtgtgtgtgtgtgtgtgtttaacagagaatatggccagtgcttgagttctttctccttctctctctctcttttttttttaaataactcttctgggaagttggtttataagcctttgccaggtgtaactgttgtgaaatacccaccactaaagttttttaagttccatattttctccattttgccttcttatgtattttcaagattattctgtgcactttaaatttacttaacttaccataaatgcagtgtgacttttcccacacactggattgtgaggctcttaacttcttaaaagtataatggcatcttgtgaatcctataagcagtctttatgtctcttaacattcacacctactttttaaaaacaaatattattactatttttattattgtttgtcctttataaattttcttaaagattaagaaaatttaagaccccattgagttactgtaatgcaattcaactttgagttatcttttaaatatgtcttgtatagttcatattcatggctgaaacttgaccacactattgctgattgtatggttttcacctggacaccgtgtagaatgcttgattacttgtactcttcttatgctaatatgctctgggctggagaaatgaaatcctcaagccatcaggatttgctatttaagtggcttgacaactgggccaccaaagaacttgaacttcaccttttaggatttgagctgttctggaacacattgctgcactttggaaagtcaaaatcaagtgccagtggcgccctttccatagagaatttgcccagctttgctttaaaagatgtcttgttttttatatacacataatcaataggtccaatctgctctcaaggccttggtcctggtgggattccttcaccaattactttaattaaaaatggctgcaactgtaagaacccttgtctgatatatttgcaactatgctcccatttacaaatgtaccttctaatgctcagttgccaggttccaatgcaaaggtggcgtggactccctttgtgtgggtggggtttgtgggtagtggtgaaggaccgatatcagaaaaatgccttcaagtgtactaatttattaataaacattaggtgtttgtt

SEQ ID NO: 14435 - DNA, 450 bp, Homo sapiens
tatcctctttttgttttagcttttgtctaaaatattattttagttatgatcaaagaagagagtaaagctatgtcttcaatttaatttcaatacctgatttgtactttccttgaaagctttactttaaaataccttacttataggcctggtgtcatgctataagtatgtacatacagtttcacttcaaaaataaaaaaaaaatccctaaaaactctctatactctctataacaatactttatcaagaactctggacaatggtattatttttaaaaatcatggtgatgtatttattagaatgtttcttataaatctgtttactttttatattaagaattaaactgtacctaaaaaaactctgactattcccatttgtcagtttagcattacattgtcttgagcaccagaaaataaaatccatatattaataaaaacctatcttgaaaaacta

SEQ ID NO: 14436 - DNA, 629 bp, Homo sapiens
cttgacaatcagttccatggacatggtgaccacagccagctggaacctgaagtctaaacaccattcctgctctccagcttcctttcccattatccagaatcaagtccaaataaacaaaaagggagtaaccaaagagagtatggaccagagtgaatagatcctaagtcccaaatggccagtgtaaaaatgtccttatgtctgatgctgtctcttgctcttcaatgattaattgaggggatgttactcataaaacagataatcaaatagatcttctccaggattcccaaaaagcttttggcagtgagtaaatacagagtaaacatgtcagtttcttaatgtagacactatgtcttcaatcccaaaaattataaaactgaaacccatgaagcaagaatagatgtgagaaatctatgtaaaaaaataattaaagaaatgcatgtgtgtaaagtagtaatatgatgattttaggtagtgctttttattttaaaaatagtctagttagtaatgttgtatccttgcatgaatattattcttaattccttttgcatgttgactatttgcaacgagctcaaatgctatctgatcaaagtctattttgcataaaatgtccaataattaaatattgttat

SEQ ID NO: 14437 - DNA, 414 bp, Homo sapiens
tttacctagtgagcattgtgcaagactgcatggataagggctgcatcatttaattgcgacataccagtggaaattgtatgtatgttagtgacaaatttgatttcaaagagcaatgcatcttctcccccagatcatcacagaaatcactttcaggcaatgatttacaaaagtagcatagtagatgatgacaactgtgaactctgacataaatttagtgctttataacgaactgaatcaggttgaggattttgaaaactgtataaccataggatttaggtcactaggactttggatcaaaatggtgcattacgtatttcctgaaacatgctaaagaagaagactgtaacatcattgccattcctactacctgagtttttacttgcataaacaataaattcaaagctttacatctgc

SEQ ID NO: 14438 - DNA, 1346 bp, Homo sapiens
atacgcattacacaccgagtagggctatgtagagaggagtcagattatctacttagatttggcatctacttagatttaacatatactagctgagaaattgtaggcatgtttgatacacatttgatttcaaatgtttttcttctggatctgctttttattttacaaaaatatttttcatacaaatggttaaaaagaaacaaaatctataacaacaactttggatttttatatataaactttgtgatttaaatttactgaatttaattagggtgaaaattttgaaagttgtattctcatatgactaagttcactaaaaccctggattgaaagtgaaaattatgttcctagaacaaaatgtacaaaaagaacaatataattttcacatgaacccttggctgtagttgcctttcctagctccactctaaggctaagcatcttcaaagacgttttcccatatgctgtcttaattcttttcactcattcacccttcttcccaatcatctggctggcatcctcacaattgagttgaagctgttcctcctaaaacaatcctgacttttattttgccaaaatcaatacaatcctttgaattttttatctgcataaattttacagtagaatatgatcaaaccttcatttttaaacctctcttctctttgacaaaacttccttaaaaaagaatacaagataatataggtaaataccctccactcaaggaggtagaactcagtcctctcccttgtgagtcttcactaaaatcagtgactcacttccaaagagtggagtatggaaagggaaacatagtaactttacaggggagaaaaatgacaaatgacgtcttcaccaagtgatcaaaattaacgtcaccagtgataagtcattcagatttgttctagataatctttctaaaaattcataatcccaatctaattatgagctaaaacatccagcaaactcaagttgaaggacattctacaaaatatccctggggtattttagagtattcctcaaaactgtaaaaatcatggaaaataagggaatcctgagaaacaatcacagaccacatgagactaaggagacatgtgagccaaatgcaatgtgcttcttggatcagatcctggaacagaaaaagatcagtaatgaaaaaactgatgaagtctgaatagaatctggagtatttttaacagtagtgttgatttcttaatcttgataaatatagcagggtaatgtaagatgataacgttagagaaactgaaactgggtgagggctatctaggaattctctgtactatcttaccaaattttcggtaagtctaagaaagcaatgcaaaataaaaagtgtcttg

SEQ ID NO: 14439 - DNA, 283 bp, Homo sapiens
ttaatatagtgttacttccttctgttttctgtccatggcccttaagtcagcttaatgcttttacatctcgatgtgacttttgttaaaatctactcctagatcaagacctatgtaatggacaagcagcaggccatcaggaactcttaatatcagcacagcaattcattttagtttggtcacgcatttgcctgttcaagttctcatttgaacttcaccattgtgctatctagggaggacatattcttaagttgcctattaaagaaagtgagctgaagaaactgaa

SEQ ID NO: 14440 - DNA, 1169 bp, Homo sapiens
cccctgcatctactatgatgaatacttcgactgtgacatacaagtccattatctgggatgcaaccactcaacaactatcctattctgtaaagccacttgtctgtgtgacactgagataaaataggtctttgttattttcaactgttctatgctgtgacgatgaggaggagatgtctgttggattcatgtcttttgctatagttcagtagcttctgctaaatttcactgattttaatcatgctggagaccttaactcccatcctgatacatcctgaagtaacactgttttaaactttcttagtgctggagtaaaaggtcaagtccaacacctgccttaaatttaaatcatgtgatttatagtttttaagttggcataattcaacttatggtataactgggtccctcaacagtaacctgggctaaaataggtcttatgtggttcaactcccacccccgccttccccatattttcaaccactctgattatcttccctgcacaactaacatccagtaataattcttcacttttaaaattttacttctactttaaatcaatcattaaaggaatccacaaagcaaacagagttcagtctcatcttgcaaggtaaatatcatttaattggaagtagtttaaatgtctcattgttttattgacacatctatatatacatttgtgaagcaagaaacaataaaaaagcttcgtatgccattaatttaacaaaatatgtattcagtactgattgcatacaagatgcatgtttatatatatggaaggaatatagtttcatttcattgcaaaggcagtataaaagatatataaaatagcataatatgagaaattaagtccctaaagacatataggtcacatattattattgccagatgagcataaatagcttctgtttggagattcaggaaagccttagggtggaatgaggaacatcttctgagtaaacagggttgcaaaggttatgattatttcaacacaatggaagagcacagttaaggccaactaacgtaaaatgcactgaagccttagggaatattgaagggcctgacatggggaaagggaaggctaaaaatacttggtcaaattttaacattataccaaagttatacccagttctacctacttgtatatttctttactcatttcaataaagtgtttg

SEQ ID NO: 14441 - DNA, 133 bp, Homo sapiens
cgatgacagaagaaaagagtcacaagctccaagaagagagaccagcgttattaagttttcccagcacatccttcaaggcgtgtgtgtctctataatacacaagaactaaataaaaattaatgttgaaccattc

SEQ ID NO: 14442 - DNA, 3734 bp, Homo sapiens
tcagggaagttgggggcatttggcctgaaaggcagaatgttcccagtatttctggataataagctggggaagtgaggactgtcctgctgggacaactaagaagagagaatgtggactctgaatccctttttcaactttaaaatggaaaacagtcatataaatgcttacagactgaaaaatgtctcatacatattttgcagctatcatgatcctagttcaatgctaggcaaataatggcacttgttaattatttaccagtttttaacttaagcctgattttaacaacttgataatggtgtaatactgacttataccagcaggggttattattaagcattctctggattgaccacccacaatgctttgagcttcttttatagaagggatcatgaaaaggtctggtcagctacagtttaattccacactgttacagaaaagcatttctttatcctgtagtagcatttgaagggacagttcaacaccctgctccctgatctgtcagagcttaccttccaaccacaaggcaacttcctggctttttacaagtggattttatttcatggtttaaattcaatcattattgagaacctacagtagtgtgagcgtatcaaatttgcacttcatgaggatttacacatgaaaattgatattctcatgggctttgctgagagtttagttaaggacaaagatgtaaaaatgccaaatttgggaaaggaaattttgtatgaccactgttctatttttcagtgattctctctgttagtagctgggtcacatttacaactggaaaagaactacattgggagatcagagaaagccaagtggccaagtcctttatcaaaaagctgctttttggagaagatgatgcataaagctgtgatactaaggagaggagagattatgtcatatgcaactgctctaggctgtgcagggggtttaaatggagatcagaacaaaggctcacctggtattgatacatttggtaaggttgttaaaggcaatttcaccaaattcacacatttgtacggggcccatttcttttcaaactgaagaatactttaaacagcctgactgtgtccttggctctggatccagaaggccttatgctccaagcatgtaaagaaaagatcgcaggaatgtggagagcttccaaaaagagattgctctcagattttcctgaaaatcctgaaaaccaggattttccaatctctacaatgttaaggggttgttgtgtagttgcattggaagagagaaaggaaacacactctttcattgctgaattctaaataatgatgccctgaattagttctatgagaagtactggcagacagctgttatgtctgcagggcatcaaggggcaggtgtgtctcaccctactaagaattggcagaaatgttttaacctcttctttaggcatctggtgagtattgcagatcttcaggctgtccctaaaaggaggtaggtagccttctctgtggtcactgtgttggatttggaagaaaatataagtagatgttaaggtcagtgctctccaggagatttcaatccaggctatctgtgttcagggaatgatttgcaagaagttggtttatagacgtttactctggaggcacaagctggctgccatgctgagtaagtcctctttgtagatgatgtattttgcttgggcaccaacagaattaaaaacgaaaaacaaaaaaaaactcgaatgacttaggcagaacatgccttccctagtttaattagtccctgttataaccagttatttatctttttttgtagattctcggtcttgaagtcatttgcctttgcaatctctactttagtatactcattggatcctcaaagagccgtaagctttttggaaaaaaacatttcagaagtgaaggcttttgaggtttataaaatggtagcagtcttagtccttgccctgcctcagtttacctgcacatgctttctttcatttcctcggattctttcaccactttttaagttttttttccacaggtatttttcctgagctctataccatgcatttagctgcctagtgagaatatccagtaggttatcctatagttactatgaagttaacacagcccaaaaacctacttctccttgtgtttttttccaactcaatgaatgacatcactgcactcagaccagaaatctagaagtcagtcatgactcttcattctatttcgcccttcacaaagagttagctgccagctctgttatttctgccccttctttacccttcttccaatttttattatcttcttatttatcctctatgtgtcacaagaccagtctttctgggaggcatgttttatcctatccctctgcgtaggaataaccataattatcttactaattccatcccagaaaagcctgtgatccctgaggccagaattgactctttgggcctaaatagcagctataaacatcttcagtaacttgccaggctctagcatgtggcatggaattttggcatctagctaaaattcctcaacccatagttaagctactcctctttctcctaaaaaaaaaaaaaaatgagagaattagggaaacaccaaaagcaaagagagcagctctatgttcattcatgtctggagatgagccaatttgagcaccactgtaggccaactctaaatttattcagatcgttaacatgggtaacccagcaaatatttcccagcagtgacaatctacaccctttatctaaataaatattgagatgtgcttttttcctgtgttagttcaaagaatctcttcttgcctcccattgctgattttctgtattgatggactcatttctctcaagagattggacaagctaaaattctagagagttcaaaagtgtttgaaagtacattttaagtgttctcaccacaaaaaatgctagtgtgtgaggtgatacatatgttaattagttcaactgatccattccacaatgtatacatatttcaaactatcgagttgtacatgataaatatatacaatttttatttgtcaaataaagaacatctataaatatttatagatttcaaaattgagaaagaagtatatatggagccacggttgttttgaccatttctccatgctttttgtttggggagggggacattttttggggggcagggactgtgttcagggaaagtacctgaccaacagaacttcaagtctcttccagagtgcgagactcagcttatctgatcaaggtgaacttgcccttcaatagacttgcccttgttactgcccagtgaggccaccaaggaccaagaacagttgagctctctcagggccttcccctttcaacaatttagttgaatgactcccttccatctatcagtcttactccaaatatatgaaattactatacattgaaatgcctgcaaactatatgcaaaaatgagtatgaggaaatcaaatgtaaatcatatgcaaatattattcaaccaagcttctataaaattgtacgtgtcaataacagtaaagaattttaattaattctgtcatttaaaattcatgcattccatattttgctttcagaacttatagtctatgccaattttgaaaaaactataagcacaaggaattaaatactattgagtatagaactgttgatttcaacatacactatagcactttgactaattacagatatatttgatagaaaagtcacatttctacaaggtaattttcaaaaagaaataaaacatttctgtaaactt

SEQ ID NO: 14443 - DNA, 1137 bp, Homo sapiens
aggaggagcctgcaggaagctgaactttgaaagattaatgaggcagcaggaagcagggtgaagaatgggttggagcatggaccaaatggaaagacttgttaagacactgtttcaattgttcaaattgagaagaaattgattgaggactgggaggagattgatggcagccagaatggagaggatggtacagatcaaagaaatacaaaagagaggaaatagagtttgcttactcctgactttggggactgtggagagggtgtcaacagtgacaccattgtccgtagtcaggatatctttgggaatggaagttccagtagcagatatgggggagtaggaaagaagaggatggttgcttaagctttgcctttagtgagtttggggtacccactatatgagagaggagcaattcagatattaaattggtggtgttgaaatctttggaattagagctttggagataaattgcagctagatataaattatctggaataaagtgataggtgaaataatatggtagagaagccttattttatttctctcttctttaccaattatattgagatattattattattggcatattaatatattattattggtatattaataatataataatataggtatattatcaataatatactaatactaatataccaataatagtgggttattgttaataatattggtaaagaaagaacataaatgtaagtttattaccaagaatattggtgtggtaaagataacccatttatgctggaggttgcaattttttgaattgcaaaatcagaccttggccatgaccttaagcagtaggatataaataactcccatgtgcccagtgttccattattggaacagtgtgccattcttgtgcactgatggaggaaatagttacagatacagtgtgatttgaggaattggttcccccagagccttattgaccctcaaatacttcccttacccatgttatcatttcctttctatcctaaaattgctacctttgctgccagatcttttccttcataaagtcaatgtgacatttactcatttattaactcatttcttcaacagatacttattgggcatttactgtatgccaagtattgtaataaatgctgtatgtacaaaatgaca

SEQ ID NO: 14444 - DNA, 245 bp, Homo sapiens
gaggtgcatatccactcagctgaagaagctgtagaaatgccactccttacccagtgctctgcaacaagtcctgtctgacccccaattccctccacttcacaggactcttaataagacctgcacggatggaaacagaaaatattcacaatgtatgtgtgtatgtactacactttatatttgatatctaaaatgttaggagaaaaattaatatattcagtgctaatataataaagtattaataattt

SEQ ID NO: 14445 - DNA, 574 bp, Homo sapiens
ggaggcctcgtctctgaacttgggttgtgccgagagagtttgttctgtgtttcccaccctctccctgacccaagtctttgcctctactcccttaacagtgttgaattcaactgaaggcgaggaatgttggtgatgaagctgagttcaggactcggtggaccctttgggaatgggtcatgaaagctgccatggggtgaggaaagaggagacagtgggagaggacaatgactattgcatcttcattgcaaaagcactggctcatccgccctacttcccatcccacacaaacccaattgtaaataacatatgacttctgagtacttttgggggcacaactgttttctgtttgctgtttttttgttttgttttttttctccagagcactttggtctagactaggctttgggtggttccaattggtggagagaagctctgaggcacgtcatgcaggtcaagaaagctttctttgcagtagcaccagttaaggtgaatatgtattgtatcacaaaacaaacccaatatccagatgaatatccgagatgttgaataaacttagccatttcgtacacatggt

SEQ ID NO: 14446 - DNA, 5793 bp, Homo sapiens
ggccaaagtgctaagaacaggaatcctcttggtgggggccgagcagggggcaaggagcccaggccccctccctgcctcctccttcctgcctgtgatgctccgtctcaaacagccgaaacctgtcttgcaatggggggagggggcgtttcgctttccttcttcttggcttcctcttattcttccacaaaccattctcaataaagccaaaaatctttctctttctccccctcaggccacctcctgtcctcactcctgtcctgtgctggcttttctggaacgccaggcgcccatggctggcacctttctgcttgctctgtctcttgccttatggctgctgcttttcctttttacttcctattttcaccttatcttgcaatttttctgtctgatttttacaatgggaggggagctaagattgcagtcctgtccttcggtcccccagggcctgccggtcagaagcctggggctggtaggcccttggtggtcctcatgtggatgggcaagaagagagcggccatctcggatcataatctccttggtgctgattaactgacgagatatatgattccagttctgcatgtaccatcttgaggcacagcagccactgctcgttgtaaatgccaaggcatttggctttgggacgtgacaactcaatccagaaggatggtgtgaactcggttgggtcccgtgactcgagctcctaccagtggctggccgcggattggaagccagcctgctgtcgctctgtggggggggacacgtcttcccactgcttagagcgagagcagagcaaactgcgcagcaggcacctccagaaaggtaatggtggcagaacccacagtggagtcgacctaggcctttctccagcagtcccagtcgccattgctttttcagccattcacaagcattcaaaaccaaaccaaacagcagttcatatacctgcctgagataggctggtcctcacctccagagccagccagccccgtcaggggccaaacttactaccttgacttcatctctagctgcagaaacactaagtctcaagggcttcagccccatgctggtcccttggtgttcagggagggtcacttggaccgctgttcatctggccgcccttgttgagtgttctttggaattgtcgttttttgagcacaactacagcattttagactgcatgaaaccatgactgactgagagtcactctctgggtagatgataggcgcctttctggccccttccctcacagattctttcccctcccctccacctgaagagaaggcctccaagtccttttggtgccttgtgaggacttttagaaggggcgttcagctttaaaaagccggtcctaattacggccggacgcagtagcttacgcctgttatcccagcactttgggaggtcgaggtgggcagatcacctgaggttaggagttcaagaccagcctggccaacatggtgaaaccccatctctactaaaaatacaaaaaattaggtgtagtggcaggcacctgtaatcccagctactcgggaggctgaggcaggagaatcgcttgaacctagaaggcggaggttgcagtgagcggagattgtaccatggcactccagcctggacaacaagagcgaaattctgtctaaaaaaacaaaagtcccaattaagaacctccgaactctgttttgaggcaaaggggagtagttcttggtaggtgcaggaatagtagtgtcatttggaatactggtcatctttctgacatcacagtagaaaccaaaccttggatttagattcaaaaggggggaaatgggtcttttcatcaaggcaactccccttctccaagtcacttacatcatagataaattttagcttcccagtaactgagggatttgtttcctaacgccattggaggccttcatccctctctacgataaggttgcagaaatgggaagagctacccgtggttgcttttgattacccttaggaagtgagacagtgtttttgaaaatatgtatttcccccatttctccctctccttccctgacacttctctgggctgcacagcagaaacgttggtaaaagggcagtttggtttcaacacagcagacctgatatgggatcccttagccactttagtcaaacagccctgacagagtctataattgagttcaggccccccaccttgcctaataactgcaaatcgcatgttcagccagcagcctcctaagcccaccttcctcccccattagagaacacccatcctaggtgctctccaggctgtgtcattggcagggcttcacatgcaggaggcctctctcaggtgagtccaggttaaactgttgagttgtggcttcaacagatatgtatggcatgctgggatgtgccaggtgcctgcgttgtgccagttgctggagaggtagtgtgagcagagcagctgaaatcttgccatcaagcaaccctcattctcatgcctgtaggtttccattgctctgtcccaggacacttgcgtgccagagacgccacaacttcatgtccctgtctcttgcaagctccccgtgctgccagtacttcatgccttggatgtggtcccaccagcccagtggccggggtcagcttaggctctgcttcccagtggacgggtgtgctaagggtttattttatgtaaaaaaaaaaaaaaaaacaaaaaaaaaccctgagaccatgagtggggctggcatcttgccagcctgggcttcagggatgtttggggggggtggttagagggtagttgtagggtactttgtcacccccctccccctgccaccctccctggcacgtttatttcacagcagagccaagtctgtggcaggttgacacagactgtgttgccagagctgaaataattccacttcatcctatgagcgtgttgggctagcttgttctaattttggccactttggctgttttcttcagttttatgcattctctcctgccccaaagtgccaagccatttgtgaaggctctgccagacacctccaagcttgagagctcagcaccatgcaccaagagcaggagaaaagacgtaaacctaccccagcaactgtggcctctcgacagccctggctaactaacttacatttgtggggaagccaacagacacagcaggaggagagggaggtggcgctggtggaccaaggatctgtgctacccgctcccctccttggaggtgcagtgatgatgggagttatttttaccatccgggcgctgatagctgcactattaataaattgcatgtgttccttttgaaggtaggggatggttctgggtgagaggggagcaggctgagccggcgggggatctgctgtcctcccttttgagtcagttctaatcccatgtgtgtctgggccaccagaccgaaatggttgctgagaaacttgtctgttcatgtcccaaggcataacttcccaacatttaagaaaccccaatagacacctctgccctggccacgttcacagatccttctcttgaccggaaaccctgggaccctaagaacccctgaagcttggggtgggtgtgtgcttctggggtctcttttgggacctcctttgtcagtaccccttcttttttctaagcagctaataagaggttgggtgaaagagtgcatctcctcccaggattccacaacaaaattcttatcttccatggatgctttaattggaagtgggttgccgacccccttgtgcctagaaaaggccttcgcttgggtttcctttgtatgcttcagccttcctagttggtttttctaggcctggtgtgagaggtagggaagtctgcacataactaattcttttgcttaagggcctatggcacaagtgcacaaacttcaattcttgatgttctaagctctctcctctaacagagggagtgctgaaagcttttgagtcaagacaatggagtgctcttcctccctcactctgccttccgagcttatggttccttttctcaggagaggattttcaggattattggaggattaggtcattgtcagatgactggaaaacctaaataggatctctctccagctcaaggttgtcccagtgaggaagactttaccaacttctcactctaccccactactcacatgagtgttagctccaccttgcaaaggctgaagaccagttctccccagtgaaagctgcctcattcttttatggagttccctggagtggcagagctataaagacgagcattgggatttgcagtctccatgtagcctttcgtgcttggcaacccctgtagactttttgtcccaagcagattgcgtgcgtgcgcctgtgtgtgagaataagtgccttactttgctgtgtggttttcaacttgtactccgtggccagcccccagttgccagggctcgacggcagccaaggacaccatacctcagtatagttatatataaaagggacacggattgtgacagtttcaccccatttgtttctaaccccgctgcccaggattagggtctgtggtgtgttctgttttgtttttggtttctcccttgtgtcagttctcttctggcccagctgggtggctgtggaagtctgtgaggtggcccaaccacaagcatacctattaagagaagcccagagcttccagcccccacttcgaaaactctcctctggccccacatagcaaactccttctccgttattttccccacccccagattttttttaaaaggcccacttgccgtaacctcttttggtctattttgcttcccattcagcccaaagtttatatgataaaggtgtttacttttacttcccagtctccaagtgctaacacataaacacatacatgtctgactgttgcagaactgttcgagctcctaattcagtgttaccttgttttagtcgcagcaaccctctcccctaccccttgcccgcccacgtttttctcactcttccgggttgtgcaataactctcccagccagtggtcctttccacagcctttctgtcccttaaaacacctgcaactgggggagaaatgggacccatgggagggggagtcgtcatcccttacacaagaaatagccactttccttttgttgtcattcttgtgatcctgggtgggtttctgtggcactcttttagaacatgtagcatcatcttagaggtctatttttaaaaaatgtgttgaagaggaaaaaaccattctcacgatggggcttaagtcattgtccaggaataagattggcgtggtgcccatgacatcaccgtcactctgcctaaaagcactctagagctacttgttcacgtggagaggaaggatattttgcgaagcaacagccgcaggtggagagccctgttcacctgatagggtctagctgtgacagtaaatataataccgctgtttccttgggtacagatttgagtgttcatgtgatgagactgtaaacctcatttttcggttcctctgtttaaaaaaacatctgaaggatgaactaaggctgctggtgccctgagcaactgataatgcaaatgtggacaaagtgtctgttttctactctagcctgttcatatggaccaaatttcaacaaggaactcaaggaaaatttgtacctgccgtatttatgctttcatgtaaaaaagggttggggggaggggtgtctttttgcttttggtgaactttttttcaaaatcatttttccactgtttctgtctggttttaaaacaaattacagttttgtatggattttttaaatgtacattttggaacaaatgatcaaatattttctgaaataacaataaaaggcagaaaattatcag

SEQ ID NO: 14447 - DNA, 194 bp, Homo sapiens
taaaccagccatagaggtcaagaacatgcaagaccagtattctaaagttttgcaacaattaagtgctttacctaagtgttgattgtgcctgttgtgaagctaatgaactctttcaaattatatgctaattaaataatacaactcctattcacccacttagttaaaattgatttcttctcattaggatctgatgt

SEQ ID NO: 14448 - DNA, 103 bp, Homo sapiens
taaagcagctatggaggccaagaacatgccagaccaatattctacagtttgcaacaatgaagtgctttacctaagtgtggattgtgcctcttgtaaagctaat

SEQ ID NO: 14449 - DNA, 267 bp, Homo sapiens
taacgcagtcatggaggccaagaacttgcaataccaatgttctaaagttttgcaacaataaagtactttacctaagtgttgattgtgcctgttgtgaagctaatgaactctttcaaattatatgctaattaaataatacaactcctattcgctgacttagttaaaattgatttgttttcattaggatctgatgtgaattcagatttccaatcttctcctagccaaccattttcctggaattaaaaattcagtaaaaaaggaaactat

SEQ ID NO: 14450 - DNA, 159 bp, Homo sapiens
taaagcagccatggaggctaagaacatgcaagaccaatattctaaagttttgcaacaatgaagtgctttacttaagtgttgattgtgcctgttgtaaagctaatgaaccctttccaattatatgctaattaaataataaaaactcctatttgctaactt

SEQ ID NO: 14451 - DNA, 517 bp, Homo sapiens
aacaacacatccatgtgtgagtgacagtgtgttcctagagatggtattgtctacagtcatgtcttaatggatcccagctctgtcatggtgctatctatgtattaagttgggtcctaagttgggtcttttgtgtcaacgagatcatctcttctagaaatatcaaccttttttgtccagtaaataattgttaggggatctttattggaaaacttttttggagaggctggtatttaagttagatctgattgggctactcatgtcctgtagccagttcatcctcataataagaatgggcaggatctcttgttctctcctgagtgtctttctactctcctgagcgtctttctgctctccttatcctgttctcttatccttatcccctccagtctctgcctaatttttagtgtttaataacaaccgaatgtctagtaaatgactctcctctgagctgtaataaataaaatggtagtaatgaatgcaatcagtattagccaaaataaagaatttatgagtcatt

SEQ ID NO: 14452 - DNA, 3849 bp, Homo sapiens
ctgtctgccttggtgatgaatctcttcctagggagaagcaggatactttccctcagctgactggtgttctacctgcaagatgtgcagagggcataaaagcaaatcaacactttatagttattcttctgaactaagacatgtcaatattcttttttaaagtttttttttaaaatattgatttgaatgcagtaggcttttttgtataaaattattttattctaaaactgggtcccattattttcttaaacaacagcattttgtatatatggattatgttttagcattttatacagtcaactttgtaatgaactttttaaaaattaattgattttcctttggggttccagataatattttctacagattttgaaaaatgtaataatattaatgcagtattgcaacaggggtgcaatttaaggctatgtgatagagggttatttactcagtgtgtgcagatatttatgaagtggtgaaatttcaagtgtggctcactaggtacttcaggccttcttggactgttgttagaaaagtgatcctctgcttttcttagtaggtcattggtttgatttttggataccactctgctgttctaaaaggactattatattatataattcactttgttttacttttgttccccagatgaaagaactctaagtaaatacattttaaaaaatttttctgacaccctttaatgtggttgcagatctcagatgaaaccaagcttaattatactatgccattatattctaatttattccatttttgaaatcaagttgtatgtgtaccaataaaagagatttctgcttcaaaaggctctcaacatgaaggttaacacagtcaatcaaacttacattcctgccaagatgcatggccaaaaaactaagtatcaaagcagcagaaggtttttgattatagtaactgagatggaattttgtgcctagctcagttctccagatctggctaggagcagtcaatgactaatgttctgtcctagccaaattctcaggacaatttggggagcagaaagagttatggcagaggttccactcatctacaaagtcacagtcacatgccacatttgatctcctaaccctggtgtagtttctttcaagagtgagaactttatttgttgggcagaggctgttccattgagaggaatgtttacagcagtttcaaaaatgacaaagtcagtttggagacagaaaaagacaaaaggtccagtctcatccatctctatatggtacatttgcctcacttatggttgccttaaaggcaagagggaaggtcaccatcagtgaacgcaatgcaatctcaacagtgtattgattcatattctcctagggctcaaactactctctattggttccaggataatgacaaattgaaccatatgtaagtaatcttttattttttattttttttttgagacagagtctcactctgtcacccaggctggagtgcagtggcgcgatcttagctctctgcaacctctgcctcccaggttcaagcctcctgagtaactgggactacaggcgcccgccaccacgcccagctaattttttgtatttttagtagagacggggtttcactgtgttagccaggacggcctcgatctcctgacctcgtgatccaccctcctccacctcccaaagtactgggattacaggcatgagccactgcacccagccaagtgatcatttttataggttaaaatgataggtgaaatgaatatagacactttcatatggttcaacctaatgacttggtaaattattgccttggtgtattaataatatgttgcattctgaacaaataaccatggcttccaaagggccctaacctaaaatcggagagtaatttatgctttggagaatttgactcaaatatatacttgaccaagcaccatgatccctaggggcatgagaaaagcacataatggatgtggatgtgataggtggtcttttcctgttaacaagctggcagcaaagcttcagaaaatatatatgcaagcacaacttgaagctgaattcatttctgtattatattctcaactcgttatctaaagcatcagaacatgtgttttcagagatgagtcctttactataaggttaatatttattttcattttctgtattatatatgaaaagtaaattaatgtgaaacctggcccagcttgctggaaagcaggttttaaattgtaaatattccttagaggagcaaatggattgtttaataccatagtctcagtaatctagcttatataaggtcattacattttttaactgaaaaacctagttacctgattattgcacattataaaattgtttttctaatactttatagggcccaacttcagaaaatacttcgcttttttctttttatgctttcgtttgtttaccagcaagcaacttccctggggaagccaaacacatattcataaaaaaaatcaagtagctgatgtgcagttgagaaaactagaggactgaaaaaacaaattttaactagcaaatgctgtgaattactcttcctccccttctctgaaatgggtaaaggacaaattgtgtaaaaaaacctatgcactatagaagggaatagtaaccatttcttttgtctctctgtttctgttctgactgagaacctgcagccatttcttgttacatgaaaacaaaatgctacttgttacctctattttttgttactatacaattatgaaatgtaatgtaagacaccaacagaaatgatatacctgtaactgtacctatcaggactatacctcatttacagtcagaaagcttactgggatgtcaggaaatgatacagggttggttctcatttcgtgccgaaatgagacagaaattcagtgacgaaggtgcgttgtaggggtattgatgtgccccaggtagtgccagcagagtagggaaaactgcatttgcataaaaactactcttgacatgattgttcattttacaaaaaaattccattaattaccaagccctcacccagcccatgtgtgataggatttatgtaggaagaaacttgattttcaaataattttttaaatgtatctcttgcctaaaggactatatacatctaataaagtaacactgtgtcatcttctggagttatcaaaaattgtatacaatcaagacaacacaagaattattttatttttgagtgcaaatacaggtactgttggagttgatgggcaccatgctttctcatgaagtagcatttccctaccatcaagccattgttttgtgccattcaggagaggaaaaaaaggaatttatgctgtacatttcagttcagtgtatgaccaaaagcaatatgtttataagaagatgtttgacatactaattattttatatcatttaaaccatactgtagcaacataatatatggagctaatttgtagaattatttttacgatttccaaacaaatgtactgtactgttatataatttattgtgaggaccttctcatggaagccattaggaaaacaaactagaggtaaatatcacattaatctgtattatcaatttctcatagacactgtgctaatgtgaattttaaatgacctgcatcaagtcttctgatctcagataactcagtacagatagcaattagtcagctgatttgattacaatggagtaaccgacaatatatttatttataaagcacatattcataataacgagaagaattcagaaaaccacttaagcaagacccttctgaaataaaaaatgttgctttttaaatagtttgtcctaaggtgtttaaaacatgtcaaccttatgtaaggaaaaatttcctggtccaaataaagttgaagtttaagaaaaattg

SEQ ID NO: 14453 - DNA, 1242 bp, Homo sapiens
cccaaatctttcactatgtgcaccccagcccctcaaaaatggggaagggctgaaagaatttccttaggaaataatttttaaaacataaccacagataaatgagaatcatgataagcagtagacaaggcttttttctttttcttttttccttctttttttttttttttttttttttttgagacagagtcttgctcttttgcccaggcaggaatgcagtggcgccatctcggctcactgcaacctctgcctcccgggtttgagtgattctcctgcgtcagcctcccgagtagctgggattacaggcacctgccactgcgcctggctaatttttctatttttagtagagacagggttttgccatgttggtcaggctgctctcaaactcctgatctcaagtgatctgcccacctcaccatcccaaagtgctgggattacaggcgtgagccattgtgcccggctgacaaggcttttttcttcacatgagtaatttttttggcttcttctcctccactctagtatttccaccctcagtaaggaatggaaacctgtcccgtctggggtgtgaagtgccctctgctttttcccccacattgtttggggttcccagcacctcagccacattgcatgctgggttttcattgtcattgttgcaaatgaaatggagtagacatgtgaaatgctaacctatctaggacctgatctatgccttcttgggaactgagaatgaagaaacagaaatagatggtggaagaactgcctaaggtgtgaaaagctgaagattctaccactgaagtactgaatatgttgtctagttgtgagactagtgtgtaaaatatatgttttctagatgatttctgagacttgtgatgacaaggaacctgacctaaccccatttttcataaagacaaagaacagcaatgttaaattgccatatgaagagaaacactagtgatgtgcgtggtctccttgcctcttgtttccttccctcttcctcactgacttccccttgcacaggggcttctgttttatcccatttattatttgtggcacctatatcaatgtggggtttgtaataggtgagaaatatttgcttggagaagctcttgtgcaattagcctggcaatgattggccggccatgtttgaatgccagtttctcttctttgctgaagtactttatgataaaagtaagcctagacataaaatctggagagaaccatgcaataaacaagtatttttgaaat

SEQ ID NO: 14454 - DNA, 1729 bp, Homo sapiens
agtcaaagaattgaaaccctccaaaccacgtcatctgattgtaagcacaatatgagttgtgccccaatgctcgttaacagctgctgtaactagtctggcctacaatagtgtgattcatgtaggacttctttcatcaattcaaaacccctagaaaacgtatacagattatataagtagggataagatttctaacatttctgggctctctgacccctgcgctagactgtggaaagggagtattattatagtatacaacactgctgttgccttattagttataacatgataggtgctgaattgtgattcacaatttaaaaacactgtaatccaaacttttttttttaactgtagatcatgcatgtgattgtaaatgtaaatttgtacaatgttgttatggtagagaaacacacatgccttaaaatttaaaaagcagggcccaaagcttattagtttaaattagggtatgtttcaagtttgtattaatttgtaatagctctgtttagaaaaaatcaaagaccatgatttatgaaactaatgtgacataatttccagtgacttgttgatgtgaaatcagacacggcaccttcagttttgtactattggctttgaatcaagcaggctcaaatctagtggaacagtcagtttaactttttaacagatcttatttttttattttgagtgccactattaatgtaaaaaggggggggctctacagcagtcgtgatgaaacttaaatatatattctttgtcctcgagattttaggaagggtgtagggtgagtaggccatttttaatttctgaagtgctaagtgtttttatacagcaaacaaaaagtcaattttgctttccaccagtgcgagagaggatgtatacttttcaagagagatgattgcctatttaccgtttgacagagtcccgtagatgagcaatggggaactggttgccagggtctaaatttggattgatttatgcactgttatctgttttgacacagatttccttgtaaaatgtgcctagtttaccaaaattaacaaagggggggaaaggaccttagaactttttaaggtaaaatcaaatatagctacagcataagagaatcgagaaatttgatagaggtaacttgtttaatgtaaatctaatagtacttgtaatttctttctgcttagaatctaaagatgtgtttagaacctcttgtttaaaaataatagactgcttatcataaaatcacatctcacacatttgaggcagtggtcaaacaggtaaagcctatgatgtgtgtcattttaaagtgtcggaatttagcctctgaataccttctccattgggggaaagatattcttggaaccactcatgacatatcttagaaggtcattgacaatgtataaactaattgttggtttgatatttatgtaaatatcagtttaccatgctttaattttgcacattcgtactatagggagcctattggttctctattagtcttgtgggttttctgtttgaaaaggagtcatggcatctgtttacatttaccttatcaaacctagaatgtgtatatttataaatgtatgtcttcattgctaggtactaatttgcagatgtctttacatatttcaatacagaaactataacattcaatagtgtgctgtcaaagtgtgcttagctcacctggatatacctacattgttaaatgtctaaacagtaatcattaaaacatttttgattacctgtg

SEQ ID NO: 14455 - DNA, 1412 bp, Homo sapiens
acattctacagaaagaaaaatgcattattgacgaactggctacagtaccatgcctctcagccagcccgtgtgtataatatgaagaccaaatgatagaactgtactgttttctgggccagtgagccagaaattgattaaggctttctttggtaggtaaatctagagtttatacagtgtacatgtacatagtaaagtatttttgattaacaatgtattttaataacatatctaaagtcatcatgaactggcttgtacatttttaaattcttactctggagcaacctactgtctaagcagttttgtaaatgtactggtaattgtacaatacttgcattccagagttaaaatgtttactgtaaatttttgttcttttaaagactacctgggacctgatttattgaaatttttctctttaaaaacattttctctcgttaattttcctttgtcatttcctttgttgtctacattaaatcacttgaatccattgaaagtgcttcaagggtaatcttgggtttctagcaccttatctatgatgtttcttttgcaattggaataatcacttggtcaccttgccccaagctttcccctctgaataaatacccattgaactctgatggctgttatcaaaggaacttttctttgtttaaatttgctgatgcaggaattaagtttaaacacaactctatagaaagaaaggagattattacccagaattcacatgtagtgattattaaggacaatttttttttttaactaaaaaagttggcggcaggggtggggggtggcaatcatttttcttcctatacatacaaaggatattgtcaaaaatggcgttcttctcttgtggcctgttattctgattgctgctgtatacagttttgtcactctttagtttttagttaagcatactgatagactttcctctaaaagccattcactccagattttacctggggaatattctacatactgcttactttctctataaaactcatcaataaatcatgaaaggcactgagttttgtaaatcaggaccctaaatgtttaattgtaaataagtttcagataattattatagctttgcgttgaagtttgttgttttttttctcaactagttaagtcaactgcttctgaaataactctgtattgtagattatgcagatctttacaggcataaatatttaaactgtaatatgctaacttgaagagattgcaataaagctgcttcagctaaccctgtttatgtttaaatactagggtttgttctatattttatacatgcattttggatgattaaagaatgcctggttttcgtttgcaatttgcttgtgtaaatcaggttgtaaaaaggcagataaattgaaatgtttgtggtatgaggaaataaaagaatggaattagctttcattcag

SEQ ID NO: 14456 - DNA, 3697 bp, Homo sapiens
gcccaggtagatgcagggacgcaggaagaacacgttatttattcgtagagccacgtggttaacctctgagttcgcgaaaaggaaaatatttaacatttactacactgattgtattgtaaaatatgtcgaggcacatgtcctgatggctttaaattcctggtatggcataatctacctcttttttttttttttttttttagcaaaatacagggcaatggccaacaaaagaaacaatttatttcagcggccactgggtggcagacggaattcgttataggcactctcccaaggcggcatgtttcctaaatgtatagcggttacacccacatttgagattttttcctctacacgttagtacacttgaggtttatgtaagtgatttcatgttcaaaagtttattttcctctctctcttttttctttaggaagttgaagatattcatatagattttatttatttaaaaatggaaattgtcgatctccataaagacttaagatttaattctgtatttcaacgcaattttccccccatatgtgattgagtaaaggattttgaaagatatcccatgacaacgtaataaagcttaaaacaagatctgaccgaaaaggaatagggattccacccagggaccctaaatttgataacctttgtgttagcggacattcctcttcctccatgcctcaggccccagtttattttctaccataaaatcatgctctcaatgaagtaattgatatgaatcatttaatttatagcataaatttaagtcatttggttgtttcaactagaaggatttgcattttatcccttgtcctctattaaagaagaatttcacataccctgggagccttaccctcaccctaaaaactacaccaacctggttaaaggcaaccttggccctaatgtacaccccgcgaagatcaccaaataaaactatgtccctaaggaccattagccttaagcttagagagcttgaagtttacacaaccaataacaataattttatttgccccaatcttttatatgataagaatgatagaaacatttggaatttgtagatttggtagtaactggatgaatgggttctcctgttgataaatgccattgtttcccatttaatatggatcctcctgatttcttaagtaaaaatcaagcactcatctcacgtatataaaaatatatactcattctgtcctatttttattaatctcatctgctccaaatgagctttggatttataatcaaagtgtacccacttgatagcacttttcctatatgtttgccaagttttggggaaagggaatgactgtagtaaatgatacatattttccttttttataatttatcactttattctttgacagtttatttgttttggagaggaagtggcctatcaattatgggttatgtgcaattggattttgaaaaataaaacaagctatttaggaattgaacatgagatatatggaaatataatttggtttttgttaatctcatcctctccaccttgtgtagataggttattgctagttatgatatttatttctaaaatatgttatttgaactgtgaaaagtggttcatatagtacactttgtggaacaattttatatcattaccccgatgaaaagttcaatctctggatatttaatgataacactcaggtaagggctacaaacgctgtaaattaagaacaagatattattaatgtaaaagcgctgggctgtttccttatcccacacaaagaatcttttaccttggtatatgtggatatggtatattaccttggtgtatgtatatgtgtgtatacgcacacactcatacaactgagaagcctatagtatatggttaatttttggagaaaagggtgttttattgtgggttacagatcataagtgagtgaatagatgtaattccttgatgcacaccaatagatgtgttcccattgacatcttagaagtattgtatgaagaggaggacctagggcttgaaatgaaatgagaatcaatcaattgcaacattacatgatggaataatgagaagagatactgaaactagaggatttttcatctatcaaagcttgataaattaggttgtgcaaaaacttggcagtggctttctagagatgaaactggagacatgttagtgctggataaatcatttaaaattaccatttaatttattttctacattgtttatctgaagactcagaaaatccacatatttgagcttaccagactcttgggtgcattgctgttctatcttctgcttcaacagttaggaaaataaagaccaatatgaatttggaatgtcagaatttctgacataacacattggcgaggagtatggaatgtaagggtcggtgaaagtttcatatcctggaacatcttgcattgccaattgaaagacataaaagtatgcagaatcaaaataatatgtgtccactttcatgtgtaagtgaaacatattctttacaccaactattgaagcagttgctcctagaaacctagtttctccagatttcccaagtggaaaatatttagtatgttttaagcttacattcaattactccagagtcttaggacccaaccatatacttccttttattttttattaaagaaaatgacttgttatttttgtaacggctgagtcctgtgatcaaataaaagcatcagttcaatatatcagggaaattgcatgttacccagcaactgaaataataaaattcaagctctctttttctaaatgggccagagacctgatgagaaagtctccaggaagccaaactttaacatactttgtccatttttagttaggttcttggtgccaagttgtcatccctgatgcattagttgctttcagtgcattgaatgaattttatttttacttcctatgttgtaagaatggttttgaatagaaggtcagtgatggtacagattcgtataattttaaaacatgattagatggtagtgaagtgttatgagtgaggaggtataattgatgtcatgaggaagtgagtactgaatggttctatgatttaaggtaaagcagcagttgtagtaagtgtattttacaaatacacatgtaaatagaggtttacctggaaatatgtacgttctaaaaggtcaattttttaattttatttttttgctggttatcctggccaagtgtcttcagaactcatccaagttacgagacgaaataaactaaaatcacctcattaatttttttcccttagttacaaccaaatgaatttatgtaatctctgaatgaactacatccctattccagccgctgatgaatatgttctccagcacaaggcagcattaaaaggaaatacttttcagtatttcttttcatgccaaaaaacctacagaataattttccaaacagtcctttattcgtaattataagaattaaacaatctaaaatattaaagatttaccctccagcacattcactgggtaaagaccatttaatttgccctctcagggaatttgaaataaattatttgtcctggatattctttaaaaactttttatttattcagcaaattttggcaaaaaaatttctttctttgcttaaaacattctggtactatataaggaacaacaaactaaaatgtatgtagtgttattttgtaatctcatcactatcaataaagctgcattcaataagaccttagtcaatgactaaata

SEQ ID NO: 14457 - DNA, 1287 bp, Homo sapiens
cttgaatggatttatgacgtaccgttgagaagatcaatttcagctacaatactcatctgaaaatcattaatgccaacttgctctgatatgtgaagtaatggacaagagtgggaaaaaagagatccttttcaaaaagattataactggatagattaagtcaacaaaatgcaatatcagtcatcaggtaaattgcaagctgaggataaataataaaacttgtcataattttgaacttggaaaaaagtttcttttgctctcatagaaataactttttaatttagtagatgggaaaattgacttcgtatttccccaagtatcaaatactgtgttaatacttaatcaagcaggcttaacactgtgtacatattgtcagtagtttatgagctcctgcatagtatgcagagtgtgtggcctcaatattatacattatgcctctggatctcaactactcatttgccaagtcagttatgttatggaccaaaagccaaatctccatctgaccctacataattttagcaatagaacttttatatttcaagtatggctaacatctgttaactatttcagtgactttatctggttccaagaggctgtggccaatggcaagatgccatatcctggaaacatattacgacctcccatgtttgttacatgcatccagtttaccacactttacctgtcatcagttatagtaaaaaccagcatggtgttactcaactattgagaaattgtaagctatttttttttgtcctgatgtctaaattgcagtgataagaataggttgatacatgtatcataatctacctttataattttcagatcactttcaaattgcccaaggaaatattgtgatcctaagaatattaagataattttaggttaatgaaatacccattttccttttattcatggtgctttgcttacccacattattttttggtgtattttttagtggttattttagaagttgaagtggctgaaattttgtctattgtcttagaattgattgccagaaattgcaagatgtaatatatcaaagtcagggatgaggagcaggaggactattcaagataaacttctgtaacctatgcatattttatgggggcagtattattacaaatggatctgaaatgtcagttctagtatttagagagacttctctaataataccgggtgatattatctttgagtaaatttgaatataaattgaaacataaaaatgagtattgtgaactttctaggaaatattcattaaaaccattgaaataaaaataaattcaagaaagt

SEQ ID NO: 14458 - DNA, 94 bp, Homo sapiens
tattaaataatattgataataacaaaaagatctgtattaaggtttatggctgcaataaaaagcatactttcagacaaacggggaatttcctaaa

SEQ ID NO: 14459 - DNA, 1066 bp, Homo sapiens
tgtctgatgcctcattcagcagcctaggcatggtgctttttctgtggtcttttgcatctcaggaagataaccaacagtaatcccttgaaaagaaacttaagtacctcggtgtttttattttttttttcttatggaaaaaaatataaaagatcacatatactgattttaaaggctcctcagtcatttggagcccttggattagcagcattaattaaatctcaagggtttcttgtaaagtccatttatgttaatcaaagttgaatataaaaatccaccattgcctgttagccagtcagttttagtcactgtgaaatatttcacattcagcctccatgcagtagagatttgagtttaatttcatgtccatgtgactttcatgtttcctatctcatagctcatgctactacataagccaaaacatgtatctcatcattggaagtaagatcagggctgatattcacctgggatagacagtattggtgaactactcatttactacagtgtctcagccttgataaggggcagtggattgcctgttgttcggtgttgtgaatagcacctctgaataagattagagtgtttcttaattcatttcaaactctaaaattagattaatggtggtgctaagaaagagtattaattactttgggaatggtcaaaattaacattaaaaacattttagacaaaaagtttcattgtacattcaaagaaaatgtaagtttggaagtactaaaagactattttatacttgttgattaatcggaatgtttgttgtatgccttcattttccatttcacttatatgtgtatgtccatatatgttaattttcattgtagcaaagctaatggaaataaagctaatgctctagttgaaagaaaaggaaaactcctgaaatcctagaatgtcttgttatttttagctgactgtaaaatattatgaacagtctttgtgtattgtgcttaatgcttttgtaagaaacagaatttgaaatatttcatccttgtcatgctcaaaattttgttacatgcttgttattcagagtataataaagttttgtacaggcctg

SEQ ID NO: 14460 - DNA, 1018 bp, Homo sapiens
tgcaattggttctaccaaggcccttccttgagcatttattatttaagtttgaacgatgtaaaatatggtgtagaaattcttgtgaaatattgcaagaggcgagtttaaaattctgcagatggccttatttgtgtatttgtctttttattttatctgtataattttttttgtcagatattctggggttaaagtcacatcatatgtgaggaggaaaagtttaacatgaactaacatttctgcactgtaacgtgccgggcacacactaaactcagttactgtacctacaggtaagtctacatcctctctgacagccacagcactacatcaatccctgacgttagggatacctcatgacattttcctgtttttatggaaactctgagaagctgaatgatacatgcaggggatattttttgagatgatttaaatgtaaaccaaaagatggaagacaaaaagacaaacacacccacacgcagtctttgcagtatctgacagagaactcacaggaagttacttcaagcacttgccagtactatgatattcaagtaccttgcagcatttctctgccattgctttcaatgaggccagaggcatcctggatattagacctattatactgtaagaatataagtataaagtgcgttcatatacatgtgaggttttcttttgcttgagtggacagtagcacctgtatcattgaactcattttgtatcagagcaattttgcttgcagaaagctatgaaataaaacacgtcccttaactgcattgctatggaattaattttttttccccagggaaaactagtgtatttttttatgagcaatatcaatttggagtgaccaaaagatacttaaaaatgggtttattttgatttctcatctgaaataatcatgttctggtattatatctatctatatttaataaatatatacattttaatttattatgtgtactcacatactatagaaagatattagtatgcatttaataaaacatattcacttgaatatatggaa

SEQ ID NO: 14461 - DNA, 935 bp, Homo sapiens
tgggacatgtttaaataactgtgcaaggggtgatgcaggctggttcatgccactttttcagagtatgatgatatcggctacatatgcagtctgtgaattatgtaacatactctatttcttgagggctgcaaattgctaagtgctcaaaatagagtaagttttaaattgaaaattacataagatttaatgcccttcaaatggtttcatttagccttgagaatggttttttgaaacttggccacactaaaatgtttttttttttacgtagaatgtgggataaacttgatgaactccaagttcacagtgtcatttcttcagaactccccttcattgaatagtgatcatttattaaatgataaattgcactcgctgaaagagcacgtcatgaagcaccatggaatcaaagagaaagatataaattcgttcccacagccttcaagctgcagtgttttagattgcttcaaaaaatgaaaaagttttgcctttttctgtatatagtgaccttctttgcatattaaaatgtttaccacaatgtcccatttctagttaagtcttcgcacttgaaagctaacattatgaatattatgtgttggaggaggggaaggattttcttcattctgtgtattttccttacatgtacagtagacgttctctattctatcagccttctatggtacctttttgtcaggacaattaggattgtaatgctaatgcaaaggcagcaattcaaagatcttctagtgcctcatgaataaagttgagatttaaaatttgtaacattgatggaacagctgggaggttagaccaatcattaaggaatgtatgccatagctttctttgctaccataaacattttggaggtgcatctgctatgtgacatggtaaatatggttaagtgaatgaataaaatgttttagtaacctgtgtgtgatgaa

SEQ ID NO: 14462 - DNA, 57 bp, Homo sapiens
cctatacattttatacagaaaaagctgcatgaaccatgtgagaataatcccatacat

SEQ ID NO: 14463 - DNA, 1668 bp, Homo sapiens
gatgttttgggaggaaaacaattgaattacattgtgcaatgcattaagaaacccatccagctgtcatggtatgttacaaggttttcagcagactttgctcctaatggctctctgaaagtgacagacttaaatattgctctgcagtgcttttcagaatgtagagtgagacctctggtggaaaaattattgccctgtggactcctttaattttttttacattagacgaagcttctcctgtttgtaaaggaatgctataagaaatttcaaacacaggttttgcggaattttaaatgctggaaaacataaatgaaatgcctaaatatattgttacagattttaatactgtggatcaaggaaagatagcaagcattcttttcctgaaattggtcatgtagcttttctgcgaaatagtattgaatctgaatactttcacaaaataatactgaaaggtaaaccctaaatcttgccagactgcattagtattttggcattgaaacttgtgcaatatctgtgtaatgtagaatgtggggtgtgcatgcagatgtctggtactggagtaagctgaaggtatgtgcagtatttaagaaaatgtacattctaattaattcacttataaaaccatttacatattgtgtatatgtttttattttcaaatgataaactctagacatatattttgcaaaatgagcttgggtttaaaaagtgctttgtgccaaaaatatcatacctaatttttatagtgctttactatcagaatttatattgtttattatatcttttaaaagcagtaagcagttttcatctgacagcgtagataaaagaggagtataggaatttgaatgctagagcatctcccaggtgagccttattgcagatctttttgatatagtcacccataagcatggtgagctcctgctctcataaggtcagccaaagccccttaagaaggtacacagcacatctgcagtcattcaggaggtcctgtgaagtgtggtgatgcatctaacaccttttgctgctcactgagaacccagctttgaacttacaagattacactaaccatttttaaagtgcacaaaaatattattattagtcttaactaaaattacatattttataatgccctgcaactctaaaccatccttttgtttacacatttttgtatggtattttaagattatcaatcacttcaacatttctataaccttgtttgtatagcactttctcaagagctgtcagtcccacatacagaatcatttcttttacaaaatgatttaatatgtaatcatgtgtcaggacataaattttgtcacttgggacagtagctttccagctaagataattgcgtgaactctgttaaaactgattatcactcatcaatggctttatttttaacctataaataacccctttcaatatacctggtttttacagcattgcaaaatctgtaaaaataacttttattggaaaatgtcatgaagtcatttttcattatttgtactaaacaatgttttatgtactccttttgtgttttatcttttgtttttccatctgtactcccctcatcctcctaatgttgagaaaatcaaatttcctgggtgtgtccttgttaagtgatcaaaagtaaatgttctctttgccattttagatggaaaaataaaaaaaatt

SEQ ID NO: 14464 - DNA, 1003 bp, Homo sapiens
aggtccttcccacctgtgacctcacctcaaagacaattcatagcctgtggtctccacataaacagcaacaagacaagtaatagtcctttttttgtttgtttgtttctattctagggataactgctcatgattactcccatatatttctagtatttccctctgtactgttggcgtgacattgacactagtattattttacaaaacagactgaaaaagacattagcaagcatagtctataaacctttcagtaggatgatattctcttggttgtttttcattgttgtgtgtaatcttttttttttctttttcttttttttttttttgaggaaaagcatgaatttgttaacagattttgagtctcaaccaactagcagaaactttgtttagggttgctaaaagactgtaatatgatttttgaactagctgataataaagttgtagataagatgttttaacctgtcttttaatatctgttagttagacaaagatgtttgatattaagtttgtaaatttaattttaatgctgttttaatggggttgaaaacaagcagctactgtatgtatgtagctaactgaatttgttcagtgttttaacctgtatttgttaaaaaagaaaaaaaaacacacataaagttccatgtgtaagcttctctaaataggaaaccacaatttgtcaaatatgtttgccataatttgtcaataaagctgaaaacttttgtaaaaattaaatttggaattacttgttttctagctttaaatgcctgctttatttcttcttcaagagatgcctaaaatgttttctatttaaaaattacaaaaatgaacccaagtctgttttaagatatttgtgtaatacttaaaaatgtattaataacttatggttgttaaataatttaaaagttaacaaactaaactgttacatgaatcatggttagtaaacactaatgtataacatgttaatggaaaaaaatggatttagaataataaatggattttaaactat

SEQ ID NO: 14465 - DNA, 366 bp, Homo sapiens
aatagagctcacaactactcctttagacatgtaattgttacttaaagctaatctaccaaaacaaaaagactgaacttttgtaattaacaacagcaacaataacaagattacgaatgcttttgacttttttttttgtccatggaatatttgacagatgaagtaggactgctgagaagattctgataacagaaacaaacaacaaagttgtggtgaagctataatatgcaaacttaccagatcttgtcagtcatttcctatgtgtatgttgacctggataagaatatccaattttgggtggcaataaatatattcgcacattaagaaaaaaaagacttaagcattagaaagcaaaatttaaatgactaa

SEQ ID NO: 14466 - DNA, 48 bp, Homo sapiens
gcagataatatcacatatcaaaaagttataattaaattgatagtcatc

SEQ ID NO: 14467 - DNA, 299 bp, Homo sapiens
cagccttctgtcttaaaggttttataatgctgactgaatatctgttatgcatttttaaagtattaaactaacattaggatttgctaactagctttcatcaaaaatgggagcatggctataagacaactatattttattatatgttttctgaagtaacattgtatcatagattaacattttaaattaccataatcatgctatgtaaatataagactactggctttgtgagggaatgtttgtgcaaaattttttcctctaatgtataatagtgttaaattgattaaaaatcttccagaatt

SEQ ID NO: 14468 - DNA, 791 bp, Homo sapiens
aaggcttactgctgcatggctgtctgcatgaaccacgcctggtgaaggagcctgggtgagaaacaccatccaaagctggggcaaagatgattaccttcagcatgattacaatgtattaccttcagtatgattacagaagtcctacttgacaatcacatatagaagaacggtgctattcagtaagttctctttcctttcccttggagggaagacagcagagtcatcagttaaaaaaaaaaaaagaaaaccaaacacctcccttgaataaatttatactcctgttcccaggatcttgagctttagtgtgctatacctatgtgtcttatcgtgggccactgtgccaataaacaaaaacaactgtttggtttacctcagttgcagtagttattttcatttagaagttgttctcagattattgtttcagttatatagaggattactagactagttatgaagaaaccccactacattcaatggaattggtgcttaaaatctcatcgatgtgctgtctctggagtgataagaaagggctacatctcccgaaatgatttctttacgtcatgtattggtttccttcttcaccttgaacttttgttgaactgtatgtactttaccccaaacctgttaatattttgagcgcttctatgtgaaagcaaagaaataattttaatactctggcattcataaattttattgatgagattatttattttaaaggtttgaggtaacatctctggttgtaccaaagaagaaataaatatggtttcttaatctcttgcatgttttcttat

SEQ ID NO: 14469 - DNA, 296 bp, Homo sapiens
attgaagcagcaactggtgcagtttgtccagccagtggatccatatggaagaggatgtttggagtttaggctacagagcattcaggtattgtttgttttacttcagtacagcagcctttcttgtcatctgatggacatctgtttaaatggagcttgtcagttaacataagctaattggatggttggtacaaaatgtatgttttgtcttcatttgttctgcatgttttctctacaacaactaaattggaagatttttttgtacagtgccgatactgcaagataccactcttgagtat

SEQ ID NO: 14470 - DNA, 212 bp, Homo sapiens
ttaaggactgatctcccctgggaagtggggatgagaggagaaatcttggcttcacttttggtgagaaagacatgatagacactgaggaaagtttgaacttgtggccgggacctgtccctctcaggtcttctagacatgtctgagggaagtctcttgaatgtaagaaagtgttattggcaaagcaatccaataaaataagctacctatgatgc

SEQ ID NO: 14471 - DNA, 94 bp, Homo sapiens
gattgtatttttagaaagatctaagaactagagtcaccctaaatcctggagaatacaagaaaaatttgaaaaggggccagacgctgtggctcac

SEQ ID NO: 14472 - DNA, 2060 bp, Homo sapiens
atattatccctaatacctgccaccccactcttaatcagtggtggaagaacggtctcagaactgtttgtttcaattggccatttaagtttagtagtaaaagactggttaatgataacaatgcatcgtaaaaccttcagaaggaaaggagaatgttttgtggaccactttggttttcttttttgcgtgtggcagttttaagttattagtttttaaaatcagtactttttaatggaaacaacttgaccaaaaatttgtcacagaattttgagacccattaaaaaagttaaatgagaaacctgtgtgttcctttggtcaacaccgagacatttaggtgaaagacatctaattctggttttacgaatctggaaacttcttgaaaatgtaattcttgagttaacacttctgggtggagaatagggttgttttccccccacataattggaaggggaaggaatatcatttaaagctatgggagggttgctttgattacaacactggagagaaatgcagcatgttgctgattgcctgtcactaaaacaggccaaaaactgagtccttgtgttgcatagaaagcttcatgttgctaaaccaatgttaagtgaatctttggaaacaaaatgtttccaaattactgggatgtgcatgttgaaacgtgggttaaaatgactgggcagtgaaagttgactatttgccatgacataagaaataagtgtagtggctagtgtacaccctatgagtggaagggtccattttgaagtcagtggagtaagctttatgccagtttgatggtttcacaagttctattgagtgctattcagaataggaacaaggttctaatagaaaaagatggcaatttgaagtagctataaaattagactaatctacattgcttttctcctgcagagtctaataccttttatgctttgataattagcagtttgtctacttggtcactaggaatgaaactacatggtaataggcttaacaggtgtaatagcccacttactcctgaatctttaagcatttgtgcatttgaaaaatgcttttcgcgatcttcctgctgggattacaggcatgagccactgtgcctgacctcccatatgtaaaagtgtctaaaggtttttttttggttataaaaggaaaatttttgcttaagtttgaaggataggtaaaattaaaggacatgctttctgtttgtgtgatggtttttaaaaattttttttaagatggagttcttgttgcccaggctagaatgcaatggcaaaatctcactgcaatctcctcctcctgggttcaagcaattctcctacttcagcctcccaagtagctgggattacaggcatgtgctaatttggtgtttttaatagagatgaggtttttccatgttggtcaggctggtctcaaactcctgaccttaggtgatcgcctcggcctcctaaagtgctggaattacaggcatgagccaccatgcctggccaggacatgtgttcttaaggacatgctaagcaggagttaaagcagcccaagagataaggcctcttaaagtgactggcaatgtgtattgctcaagattcaaaggtacttgaattggccatagacaagtctgtaatgaagtgttatcgttttccctcatctgagtctgaattagataaaatgccttcccatcagccagtgctctgaggtatcaagtctaaattgaactagagatttttgtccttagtttctttgctatctaatgtttacacaagtaaatagtctaagatttgctggatgacagaaaaaacaggtaaggcctttaatagatggccaatagatgccctgataatgaaagttgacacctgtaagatttaccagtagagaattcttgacatgcaaggaagcaagatttaactgaaaaattgttcccactggaagcaggaatgagtcagtttacttgcatatactgagattgagattaacttcctgtgaaacccagtgtcttagacaactgtggcttgagcaccacctgctggtattcattacaaacttgctcactacaataaatgaattttaagctttaa

SEQ ID NO: 14473 - DNA, 256 bp, Homo sapiens
accagtttccagccaatgcaatgaagccgggttgcagagattaggttgtggccagagctagagtgattccttaagcttgttttaaaatctgctccagcctaaagagttaagggaaaaccatttgttcccttaaagagttaagggaaaacccttggctctgagtcttgttgtgaatatttctttgatgattgttaataaaaagtgttttttcttttttcccatttttaaaaataacaataaagttttaaataagttg

SEQ ID NO: 14474 - DNA, 1697 bp, Homo sapiens
aggaaccaataaataatcctgcctctattaatgtatttttatttatcatgtaacctcaaagtgccttctgtattgtgtaagcattctatgtctttttttaattgtacttgtattagatttttaaggcctataatcatgaaatatcactagttgccagaataataaaatgaactgtgtttaattatgaataatatgtaagctaggacttctactttaggttcacatacctgcctgctagtcgggcaacatgaagtaggacagttctgttgattttttagggccatactaaagggaatgagctgaaacagacctcctgatacctttgcttaattaaactagatgataattctcaggtactgataaacacctgttgttgttcactttcctcataaaaattgtcagctctctctgacacttagacctcaaactttagcatctctgtggagctgccatccactgtataatttcgcctggcaactggactgaggggagtgtgcccaggcagctgccaagcactccctccctggcttcagggtcagagtgcccagcgtttatcagaggcagcatccaagcccagagccagtgtcgactcttcggctggtgcctttcctctgaggggctatcaatgtgtagataaagccctgagtaggcaagagcagtgagatccactgctatggtcttgatacatcctcaaactttcccttcccagcacagaggaatattggctggcatgcaacctgcaaaagaaaaatgcgaagcggccgggcacggtggctcatgcctgtaatcccagcactttggggggctgaggtgggcgaatcatgagatcaggagttcgagaccagcctggccagcatggtgaaaccccatctctactaaaaatacaaaaaattagctgggcgtggtgacgggcgcctgtaatcccagatactcaggaggctgaggtaggagaatcacttgaacctgggaggtggaagttgcagtgaaccaagatcacgccactgcactccagcctgggcgatggagcgagactccaactcaaaaaaaaaaaaagaataaagaaagaaaagtgcgatgcccagtcaatcacaaataagatcatcctggtttaaatctactctcacatggatcacagtataaatttctatgtgctgtgttttgttcgtttgtattttgtagagatggggtctcgttttgtcgcccaggctggttttgaactcctggcttcaagcgatcctcctgtctcggcctcacaaagtgttgagactacaggcatgagccactgtgcccagcctgttctatgtttttaagctacacgagaattttttttttaattaattctcactgtttgttcagtctgtcttcatctaagtttgtgttgcagtttaaagttaaagtgacttttaaaggccacatcacctgagactagggtaatcatctttacttctggttcctgaaatcatatttttccagtggaccatcctccagtggctgtggttgttgagcatgctttcagaacacctatgtggcttaaaacttagtttatgttttgtgttcaacactacgtgtaatattttaaaactgtttaatgtgatgtgaatacatttatgtacatttatttttaaatttgtaaatagctttaaattgctatggcaatgtttcttttataaatcatcaaaataaacctttgtgaattg

SEQ ID NO: 14475 - DNA, 2220 bp, Homo sapiens
cacattttctaagtcgccagtgctgcttacagtttgaatacatgaaaatcctgtttctgagatgtttgcgcacgtgcttattaggaaatgagtctgtatggaaatctcaccacagataatggttaacgaaccgggtcgacatcacaaaggagggtggagactctttttactaacttgaatgagacaaaagcagtggtgtcagtttataatcctgatgcatttcagtaataatgtagaaaaacattattttaaaaaagttccaacacacagccatgaggagcctcagttttgaaagaggtgcataataaaactactaaccagaggagtctatgccattttaagaaaaacaattaacctggttaaagagaaatgtcttatgtaaataataaactaattgtggcttgtaaatgatttgtatgtgatcctgtcgactaaaatcacttaacaattctacaataagcttctgcatcaaagcctgccgcttgctctatgccggaataacaccaaatggaatctcctcatctcttgcttgttagcgatgtgtctgattcagggcatctgtctttttgttacttttttgtccgtgtcctctcatttgggttttgtaactgcaattttcaaaccaaagtttaaaatcaccttttcttcctgttttgctgtagtcactggtgttcctcacccaccagctgtaactcagtttgtgtgaggtacagccacagaagatgtcatgtactgtatattacctggtgatagttgcttttcaccccccgagttcagtttctaggagccaatgaaacttcccctcacctcctcatctttccaagttgttctttgaattgaggagtttgaaggcataaacagttacttggggatttgcgaaaatcctacttagttactgcgtttacagttctttggcccagtctctgacccttcccaagtatttgtgcaatgattgtgtttactgctggatttttgaaggtttttttttttaagaaagtgccatttcattatttgattatcaccaaattatctggaaataattgggacattgtaacttatctatttatagttatgagattaagactggagtgccatcaccgcgggtgatgatttagcttttgctgtgtgtgtgtgtgtgtgccttccaaatcatgccataattgtaatgttgaatcggacagagccttacgtgcccgagggcggggcctacctgcctgagcgcgagcccttcatcgtgccggtggagcccgagcggacagcggaatacgaggactacggcgcagacgagcctgcagaggagcctcctgagccccaccggcgctggcggcgcgccctgccccacggacccgggcagtgaaccagagatcacgcgccgcgccgcgaggcttgggggaggtgttgaaattctcatttacaggtcagatagagcagtgtacgtcttttctgaggtgtttcttccagcgttgctcatccaggagtaccctttctgattgtagagaaccttgtttctgcaggaagcctagctccaagcacgcagtctgtagacatttttgcctttgcccttgaaatgcttgcaaaatactttgttaacaaaagctgcaaagagagaacatgccgtgtgcctttagttagcacagcgggcagcctcagtgaaactcttaggttaagcagttaagtcctggaacccagagctgctgtgtatttcgagcgggcagtttatcttttgctatacttattttcaattcaattacaccacgattcaaataattcccctcctaaaaccaaaaaggagggaaacgtcaactccattgcaattacttatcttcctcttctatctctgttatacgccggggcatagaatgctcgtatacatctctttaacaaccacaaaccttaagccatgtagatgaagttagtgcatcaacgggatacagttccatattgccttaaacctccttgttttagacacactaacatttataccaaattgcagattattctgcagagagggaattgcatgtttgtgttgtatatttagtatgaacttttttcagaatataatatttcttagttatcaaaagtagttggaaaacatttgcaagactatgaacatagaattgctgcttttatattttaactgcagattgtgaatttcactgccttatattatttatttctgaaacaaaagaggcatttttcaataaaactactgaaaatttg

SEQ ID NO: 14476 - DNA, 143 bp, Homo sapiens
cttcagtcatcccagcaatcgcttggttcagtttcattcagctctctatggaccagtaatctgataaataaccgagctcttctttggggatcaatatttattgacttgtagtaactgccaccaataaagcagtctttaccatg

SEQ ID NO: 14477 - DNA, 3169 bp, Homo sapiens
ttttatattatgaaagcaaatcatctgcatgtgcatcaaggccagtcctattcaacctagctttcgaatgctgatatctggttagtatgtcattttgaagttggcacataacttttctaaaaaaaagcagtctttgttgtttgcttcttccctacggatgacttctaaaaatatatgacgggtataaaaaaattagctatattgatcatatcaacactgtaactgctgaaatggcattctaatgtttgctttttattcggacaggccacatgatgcatagagcctctttcatgtgacttgtgtctactgcttaaatctttatgctgtgttgatgatattatattgacatatgaagctgtatatgtgtatgtattttgtggagaaagggattacaagatgtatgagtataatgacttgctaacctttcaggattcagagaaagatgaagaaagaccatatctaaataatacacttcatcattttcatgtgtataaatgcttaaagtaccatctttgttgaggtggttcatgtatccagtttatccagtacagttatttgtcaagcttagctttgatttcaaaggacacgcttaccttgtctggcataagaattaatgctcatgtctgcagtggttgggtaggtcctgcttaggagaattaaaaaattcctctttccgtttggttgaatgttgcagtcaggaaccccaactcacttggaatgtttttatatgtaatcatttcccttgaagcttatactttataagggaagaaagaattcaggtgatatgggaaaactgcttggcagaccttcatcttctgcctcaactgtaaaccacatgtaagtgcttaatggagactgttttcattcttgtgatatttaacattcagaaaattacttcagctttggaaatactcaggctgtttttattctgcaggtaagtgttttgacttaagtactaatattccagaaatttttgaaagcagtaaccttaatttcctatgtatttcattccacttttgcatataggtcaaatagcaatgtgtatgcacattctctttagttaaggcaccaattgttttggttggttttcctaagacatactttaaaaagatgttctataaatttcctaattaaattatggggattttggagtatgtacatgataaattataatatgtatatggttgaagttattttattttttactaatgaattattttaatattccttattgaataaatgctgtaacttgtttgctatggaacttattcttaaagttctagttaaaaataatttttccacatgcatgaaaatatgtattaatcagaggtggcttaattacattgaaattgcttttttgttgttgtttttttactgaaataactcatgtttgtgtagaagaatgcctgtttactcagagtttatattttccttcagttatattttaaatcaaaaggtctgggtaatgtatacttttgattaatatatactttttttaaaaaacaaaaaacaatgtaatggttaatagtagaaatgtgccacacttttcaagttttatataacatatgaaattcagttaaaagaatgtgtgtttcataatgacttttaactggtaaaaatattacttgcacgaagtacttgatgtatggttatcctgaaatttcggagtatttggtgtgttctttgtctaaaaatagtctgttttgtcagtccttcagaatattatttattctgaagattgtccctcttgcacttggcagtttattttcggggatacattgttgggggagaggggtttctgccactctttccagattgagtctgtgctgtttaaggaggactaccatcctgcaactctttttctaactggggcacagaggatgtcgctaaagaaaagttgaagagccctttcagcactttctcatctgtggagaagatggaatcttaaaatacatttggagttttatctgttttacaagtccattgatggcctaagttcctcctgttttctgctgtttgatctctaaggaactcctgttgctaaatatgaagagtatggaacattcgtatagtctctgtgaagcatggggggagggaagacatttctttttcttataggctttatgctcaaatgtcatagtctcctttcaaagaattgtgttgcattttaaatgcacccagcttaagtagaagacattgaaggatgcattaattttcaggaactattttgaattatgaaaagattcccaattgaaaaaattattcaacaagtaaaagctaagaaatttcattgaaatcataaggcagtttaagcataaattgataaaaatagctgtgtactactaattaatagaaaatcattcaaccaagagaagagtcaagtgaatatcgtttgtttatttgctagtgagtttctttgtaacgttgattttattaaatgataatatttggttagtatgtcctatgttaataaaaatgaacaaaattaattttgctatgttcaggtgtcttgataaaataacaatgctccagtgttgttgcttacatttagcactaaattttaacacagcgtcagtgagtccaggttttaacttcttcatgcctggatgggataaaatgtaattcattgttaaattaattcatatttgtatttattaatcactgtgacaacattaaccatttgttcttaccaggaagtggtcagattatcatctgagttacagttagactggctaagtttggtattagatcaaggggaatgtccagtaaacagagaggtaagcatgatggaaataatgaagtggggtacacaggaaaaacctgactagtgaggaggagcagctgagagatagggtcagtgaatgcggttcagcctgctacctctcctgtcttcatagaaccattgccttagaattattgtatgacacattttttgttggttaagctgtaaggttttgttctttgtgaacatgggtattttgaggggagggtggagggagtagggaagtggtccttttacaagaattttgatgcataagtgtctattgtagggtttggatgatctagtaaagtgttttagaacccctttttatcccatgcaccattcagtaaacataaaaatcacaattctgctaatgtcatttggaacttcaaaataaatatcttgtct

SEQ ID NO: 14478 - DNA, 605 bp, Homo sapiens
gggcagtggctaagggggtatgttgtgcagatgctactgctgccgtgaaagtgaaccttcatctgtttgtgccagttctttacatgtactaatttaagttttaaatattgtgtttataaaataaccaactaataaccatttgtctttcccattttgtgcatttgttttgatgctggggaacaaaattagcaaaactattgcttgctgcctagaagccagggcgtggtttctagttccagttttgcttctagcaagtggacccatcaatagacccatctgagcctgtttcctcatcagttagatgtggggactcaatcacacgctcttcaagtccggctcccatatttcctaattgcaagccaaatttaatgtaccttgttccacaataattttttattaaaaaaatcctattacaaaataagacatactttaactattgtcatttgcctctttcacatcatgaatttgctttatgtgctggaaaaaacatcacatagctatcacagggcctggacctctaaaattttgcaaaaacaaaaggttctaagatgatttcaggaaataatgtgaacatgtaataaaatggaaatgaaatatggaatcct

SEQ ID NO: 14479 - DNA, 744 bp, Homo sapiens
aaactgaaaatgtacaattatcatttaggctatctcaagagagatgatttgccttctcaaggaaaatggagacaggcatattcatgggtcatcaaaatccagacatacagtcaacactgagaatcagcacacaccatatttcaaatatagaagagtcatgtacttggcaaccagtaaattctgaagaaaaagacacttacttattattaaaaccccaaatgcaatcagcgaaacatatttttactattcttggatgatagtcaaaatgatcataagccaggtttgcttccaccttccctgaaaattttactcacagatcatttgcaacaagcatagcttacttattgtttagggactgaacaatttattgggaagcaaactctttatatgctagaaagtacatttaaaagatgactacttacgcagggagatgcaggtctctctaaacgcatgaatgtatgtagtgtgtaggcactgtagtgagtgtatatatgctccacactacgtctgataaacacaaacctcagtattcagttattaggcacactagttttatacgcaactactgcttacatagtagactgttttgttgccaataatctttgaattgttctttaaaagaaactgaggttcagatacacataccatggaaaaatcttacttttcttgttactacacaaagctattttaaagaagatgctatgttgggagaagggcgaagttgtactatatgacataatcaat

SEQ ID NO: 14480 - DNA, 121 bp, Homo sapiens
cttgtaccaaaatattttacttcaaaatctataaagcaggtacagttaaggaataagtagaactaaggcttctgcttccttgctgctgtggtggagtagggaatgttatgatttgatttgc

SEQ ID NO: 14481 - DNA, 466 bp, Homo sapiens
atctgtagataacgagggagaatgaattgtcatgaaaaattggggttgattttatgtatctcttgggacaacttttaaaagctatttttaccaagtattttgtaaatgctaattttttaggactctactagttggcatacgaaaatatataaggatggacattttatcgtctcatagtcatgctttttggaaatttacatcatcctcaagtaaaataaatatcagttaaatattggaagctgtgtgtaagattgattcagcattccatgcacttgctttaaaatttagtcctgtgcatactgtggtgtttttactgtgcatatttgaatttttcatgcagtttttctagagcaataatcagtggtgcttttgtacctaggttttatgtgattttaatgaaacatggatagttgtggccacctgctgactatttgtggtttaaaataaaaggtttacttgtctgcag

SEQ ID NO: 14482 - DNA, 2012 bp, Homo sapiens
ctgactagagtatacattttttctaattgtaaatattgaaatattttaatacagtatttattataaacatttagactttttaatgctaaaatgtccttattaaggaatgatttttaatagctaaatacaatgcagttaaaaagaagtagatcatacatacaccacatagatagtttgccaagaatgaaggaggcttttttgaatgaaaccaaaaataaaaatatgtcttgaaaaatgaaatagattttaactcttcatccagtgctatggcaagtttaactgcactggaggtggtattccttttctacttttattcctatttatgtatttatttttaatcatattctcactgtgctaaatacagtcttcccactaattgttgaatgaaaattaagggtgaaagtctgtgttgggaagtgtagctccggatggtggagaaccagtgcttcttaggagcccttccctttatggatagggccaggggtccctatcttacgtggcagtcctaagctactcttgagtgatagcagtcacaacattgggatttcccattcctctgaaagtacccacagctaaacactactcatttcccaatttcagtatttactgaaatcacttacctacaattctgttagaatattatgttgagttcggaagacatttctctgtttgcaaggacagttagttgctctctgtcatagcccgcagaagcttggctacagtgtaattcctctccttgttctcctacactctttgtatctcagtgactgggtgtaagatttcatgccaaatgcaaggaatagtggaaatacataccaactgcaaagaatagaaaaactttatcccaatatattatagaaagatcttcagttcaattatgtccagagtaatataatttggcaatgttaatgcttttaagatttgaacttgtcctcaaaccaaggagacaacaatagtgtaatactattggacttacaggattagttttaaagcaactttgaatagaagtgtttcagacataggacttctgccttgttgactagagtggatagttttctgtttaaatgcattggtcttttggctgtttgtaattcacttcagcttatagagaagttgatgaccttggatcatgctgggtatgattggtctttaaaaagcagtaatataccaccagcccaaggagaaaacattgttaaaatgaagagtggtggaaatagtgtgttgggaagaataaaaaatttagattggcacttattctaaagtgagctgtttttttcaagaatttactagcatttgctcgtagtatgatttctgacgccagtcatatatactgatgaggggaaggagttactgtgttattctgagttcttataaatgcatattattgaatttcattgcatgactatttgtcaagacttacctggttaggtctccaattaaaagatgtaccacctgtcatcttctaaattgtgttcctttcatttattgggaacagaatctctcaaaagtgctaaactatattaaaaagttttcttaatagatttgtatgtctgatatgtataaccatttactataatatgttgcaaatcattctaatatatgtaaaacaatattatttgtaatgcagttattggtaaaatattatgtaatgttaattttgttcctagctgctaatttttctgccaaaagtattctaattttcaggttgttttaaaggcttttaaaactttttagttaagttttttattcacgtcatttaaattagttttttgctttttttctacctgataatctctttaacaagatgcaacaagacagaattattaaaattaaacctaaagttaagttacagatttaaaggcattatgatattaagcattaaaattggagattaaaatgtacaaaacagggttttccttatgaacaaaccttacagggtaaattgtttttttttctaaatgtcattaaatttatttgtactcagaactgttactaataaaaattaaaaatgc

SEQ ID NO: 14483 - DNA, 1789 bp, Homo sapiens
attgaactgggccttaactgttgttgacagtgaggaaaaactcccatatcatataaaatttcagggaaaacagaagcaaaggagagcttgggggtggggagaaaagacaaatgtgctctatgtcctagtaactcttagactgagtaaagtgttaataccatacccagatgttttatttatgaagtttttattttaaacattttttttaaaaattagccttgatattctccagaccaaagcaatcattaagtgactttggggattctccccctgttcacatccagttgtctaaaggatgagatttttcatgtatcttatagtcactcattcttcggtctgaattttagacgatcacagaaacggtctttatgaattattttgataaattactaattatcttatctactgactgaaatcagtggtgttacattttcttgtccaaagctgaaaatgtgtatacacttaaacttgcacatttgaattcatttgctgaccggaatggtcaaatctctccacctctagtcagagtataattttggttgtaattaaatttttaaaatctgctgatctctgtagaatcttagaggcttgatgatgatggtgttggtgaaaataagaaagaattgcagtaaagtcttgtctggtgacccagagatcaccatgacttgaggcacaaatcactgtggggaaacaattttttgtgatgaaaaggcagcatttgaatactcctgttagtagcagaaatatattatgaaaattaagattattgtctgattgaaacatgaaacaactcatgtctttattagtaacatcataagatagttacatttatgtgctgttagaatatgttgatttttatcaggctttccttgttttgatttatggctgttcctgatttttcatatgtggaaatatacctacctcttccgttggaaagaacatttaaaattaaataaattttaattaaaaaatcaaggagtcttctaatgtaaattttaatgttaactttcaaatccactagtattttttttgcttttatgacaaatagcatacaccaaacatttctgtgaaactatccttctctttcaatgtgtttaattttggagtaacgttttccttgtgactaagttgcaagatcttatttattaactaggtatgaagtataaacccattttggtgcaatattcttgactccttggtgctaaagattgttaaattcaatgcttgatgttacaaggtgttgttaaaacacaaaatgaataaaagtgagagtagtcagaactataacattcaatttgctatttacaaatgaagtatttcatgtaatataagtgaacaactggaaataaagtaggaaagaatttgtatcatgttttactacataggttaattttttaagggatgttgcaaagggattactagagaaagacaaaatgtgaccaaaaaaaagcatgaatatttcttaagtatctcaacaacatgtcaaagctgcatgtgtaggatgtatgctgtttgtacaaactatttcagaatattttgtaagctataacatatttattgtgcattaaaattaaatactttttccccaaaggcatgcagtcatgagaattacagaaaatttgcaacatataaagtagtttgatctaagaggattcaacacctttgttttgttgctcagtgtgtaatgactgagatttgtaaatctttgtgaacattctgtactggttcccaagagctattcattccctgctacctgatttcagcacaataaatatacttctgctgtggg

SEQ ID NO: 14484 - DNA, 3964 bp, Homo sapiens
gaatcatttaaaaatgtcctgtggggaagccatttcagacaagacaggagagaaaaaaaaaaaaaagaaaaaaaaaagagtgatccagcccttattagggatgtgttttgtgcaatgatgatatgctcctggttttaagtttggcaaagcttatgtatcttttaatagatgtgggagcatgatctcgaaaggatccttttcccttctcttattctcctacccaattggattctatcctgcaaaaaaagagagacctgtcattagaagcaaccaggttctcctgatacaagagaagaaatgtgtgatgacaatatgggtttgctgtatctgctcccatagctttgccataggaaaaaaaaaagtggaaagtttcttttaagatggaattcataaaagggaaaatacggaggaaaaaaggtctcactccaacttgtgaatcagtttaggagttcagatattaatagtaacaatacaggaaaaaggggaactccaacgttgggattactgtctgaggcttgtagcaagtgctttctgtggaatgatcttgttttgctaacaaacggcttgctccaaatgaacagtagtaggttggtgcagttctcgtaacaatcagcagaacttatgatgacacaatccattaattccagctgcgtgcatagatcacatttttaaaatgtaaaaatgcaagcaaaaacagctgtaacaaagaaagtgtgctcaaggaccaaagatttaacagataaaaatacccaattagaagagatatagtagactatatgaagagagattatatttgttacacaccaatatacatcaaagtgcctgttgccttctgaaaatttgaagtggcaaaattattttatggtttaatgattattttattttatcagggactgcctcaagaagaaaataacataagcttgtgaatggtggagaaaatgccctattttttcttgcaaatacttgtataaagttaacatttgttgatctgatattatcataggtacatgtgtatgtgtgtataaattatatgtgtgtgtgtatatatacattttatatatacattttatatgtatatatacacagtagattgactatgatctagaataatgtctcaaataggaaatgtttaaatactgtgtgtttttatgttttcaacaggataacatgagacgtgggcatattgcaatgatgaattaaatccacatctaaaaaaattaaatgaaggagggaaccaagtaatatatttcataggaagagcagaaattatactgttttagtgggatttttttttctttttttttttttctttggtgagccataaaattccacaaatgggagaatatttgtttggcagagcactcttttttatattgaactgccattttgacagttggaacccatttattaaaaaaaaaattgcattcctctatgatgtttaatctagtggatcatggatcagtaataggctacttaaatccctgactgctaaaaaggatttccggtgatctaaacactacttgctaatgtttaaatgaattttaatgaatgcattctgcatttctggaccactagaatttagtaatgtgaaatgaccctttttacagaatatttgcacaattgcttaaaatttatatatgagatatatattatatataacattttataaatcatgtcaatatgaaacatctttgatctggttgtcacactgcatttaaatatttagtactgtactttaaatcgctttccattaaatcaaatccaactttattttctttcttacaaaaataccagttatacctttgtgaaatgaactggcattactatttcagttcaataacagctaatcctaaaaccaccctttctcctagccagtagttcctctagatactggtctctgaaaatgcatttgttaaaaacaaaacaaaactaacacataagaaccttccctttgtgttgtgaaacaaccacataatctccacaaccttagtggatgactgcttgctatgataattcctcgaagacccaattagaagattttcatcatcagttaaagagagaccacgggagaaaaaaatatcctcctgttggcagtataatttgtttgtttgtttatctagggatcctcagatgcttagtgctaggttaatccaggttaatccgtctggactaccttttgtgcatctttctttgaagccttaatgggaacctgatgggtttgctgtagcagcttccttgtgaattctgtcagagctgcaacagccgctgcactgccactcagttttctaaggaactcctcctactaccatcttggctcagtctccctcacttaagccctgggtttgaaaaattaattgcaacttcccaggaaacattgttcagtttgcagattaagcctggcactcacctatcagaaaccagagctccgcctgcttagttgtttcaaagttttctgaaagaaaactaggggagcacttgtgaacacaggagcagctggtgatctgctttcttaccctaactcttgacaaatgagtcgtctactattttaaagagtctggaggtctctgactctgccataacaataacctgctgttaatttataacacagatttttgtttggaagagccttatttgaaatacactttgatttattttcttaaatatttatattcttttcttgcttacttcagggttggtagcttagttggaagtgccagcacctggcacctattcatatagaacaggctgtactcaagacaacttctagcatttactttaagacttatataatttatttctattttgtgtgtactatagtcttgtgcatatgtagttgaacacacagtgaaatatatgtctctctttgtggatgtgcggcctaaaaatttgaatgtctggtgagagagagccatgtgtataggtcagagaaaagaacagctcccgactccctattagcgcctgtgatttgtttccttttgtgtttatctggcctagtgtgctgtttctttaaaccaggaagaagttttgtcttttggaggctcttctcacctgtccagcctggcatgtcagagaacacatagcctgtgacaatgccgtttttaaaggtttacttaatttgcagtaaatccagctgcctcaagaactcctacaccaagatggacatttcctttccagaaatgggatcaagtatctgctcactttggtattggatggactaataatgtagctccaaaaatgcaaggatggaagaatatgtgtaatccaaaccaaggaaggaaatgaaaagtgaacgtactgtttttaccacccctttctgtttgcttattgttggttgcttcactgtgcataaagttgttttcaatgcaacgcttgttaaataaatattgtgaactattttgtaaatgaaatgtattatgttgaaagctgtcagttcaaaaataagcttttttgttgttgttgaagatgaagtgtgttaggtgaaaccaaaaagccaaaaaaagtaatttcatatatagcatctatttgaatataatctttctttaaaatttcttttagcatagcattttcagtgctaagaaagaatctctatgttatattttgttaaaataatggctttctaacaaagcaaatggtaaagtacaaagttggaagatgtcaagttaacgagacttgctgcaaagccttgcagaacggaggaggctctgcctgctggctgtctctccctccaacctctctacaatcatgcctgctttgaggtgttctgttgcagcaagctgcaccttgggtcactcttttggaatattttgactataggctgcgtcacaggcagaaaaggagttgatggaaaatggactaaaaaactgacatgtttgaatcagtgctagagggaacagattgtgaattttgtttacagcatccaatatttggatttttttgtaaataaaaaagttatttttttctattg

SEQ ID NO: 14485 - DNA, 1186 bp, Homo sapiens
ttcactgtggagttgagatgcattttacataattatgagtttgttcatataaagaaaagctgtggaaaagagtcttagagattttgtaatatcattctaaatagattaagaaaagatataatttctttactgcagttaaatcatataatgtttgtatgattaaaaataaatttctcagaattgtgattttagtaactttatataaaatgtgtgagacaaaaacttattaaggttaaatagaattgtttcttctgaataatctaacaaaggaaaatataagtgattgaatcataagatataaggggggtaaagtattaaaaataacttttttgtttgataacttgagaatttagaagattttgccaagtatgtgttgttgcttgacttcttaaatatggcattgatgaatttaaagtaggagcatcagttattacttctgattcattaatggccagaattttgtgtttggtgtaatagttgtgtcaccattcttgttgctttttaaaaatcaggctaatcatgtggtccatgtctcttcaaagcttgacctgcacaaatgccatatttctatttggaccacatattctccattttgcattgagcagtagagtacagtggaaagggaataagaatactgattattctgaacagtttagtcccaagagaatagcgttttaaaaaagaaaaacaagatttggagtcattgtgggttatttttggtgggatggaggatcttaaaaatgcctaattgtgagagaatcaattgctgaaagtgttaaaatttctgaaaataaatgcttaattacatatacaggaattaaatagtttggaagagggttggattatcattacctttacaatactgtataatcagaagttctctgaacctcaattgtatatctagacataaaaattgttttctgtataggatgttgtttggtttgtttctgagtgtttaaattttgcaaaaacaaatgttaaatttgtgcttcagtacctagataaattggaaaggttaatgttctagtttctggaaggtaagcctgggagacacataagcaattcactgctataatttagttgatgtaaaatgacggaaactgactcaatatgtcaggtttaactctgcccaaaagcagcagacatgtaagcagatgtgcaataaaaaatgatcttgatccatttc

SEQ ID NO: 14486 - DNA, 552 bp, Homo sapiens
ctattagagctgggcattctcctcccccggcagacagctctcaagcaggagcacaccgaggccagcagtcagctcaggaggcatcaattacaaagacaagaaccagagctatgggataagagcattgcattgaagttttaagtttacttgtttgcatgtattctctaagagaagagttaactttagatctttgaaaacccaggactgtgaagaaagtcatagtagcaggttgaggcaagtgtagaagttacatctctatttcccacagagaggaatattcacatatgtgcagtgtcagcaccacctggaaggttattacctaatggagatccatctgtcctgtgtggaatccagtgaggaattttattggtggaactgaatgttaactgctgtaaatcctaggaaataaacttttaaagagtttctcaggatgatttaaaacaaattttaaaaaagaaaagtagaaaacattttatactttattcagaggagatgctcaatagatgtttgttgaatgaatgattatcaaattaaaggatttcctatttatgc

SEQ ID NO: 14487 - DNA, 323 bp, Homo sapiens
agataattttcatattcctgagaaactggactttttacaagtctttacaaaactgtcaataataatggcagtactaagagatttataatcataatgtttacaatgcagcctactggattgtctctagatctgtttttcttaaacactaacagaataattctttataaataggtaagccttacacttgttaaagaaatttacctctaatttcagtctcactaatgtaaaatactgggacttaagtatacaattcagtcactaactgtacagttttatgtggggaacaattcatgcaggctactggaaaattaaatcttattacc

SEQ ID NO: 14488 - DNA, 1531 bp, Homo sapiens
gataatagcaaacatttctaactctattaatgaggtctttaaacctttcataatttttaaaggttggaatcttttataatgattcataagacacttagattaagattttactttaacagtctaaaaattgatagaagaatatcgatataaattgggataaacatcacatgagacaattttgcttcactttgccttctggttatttatggtttctgtctgaattattctgcctacgttctctttaaaagctgttgtacgtactacggagaaactcatcatttttatacaggacactaatgggaagaccaaaattactaataaattgacataaccaacattaaaactcataattattttgttgaccattttgttaaaatctacttttcaaaaaaaaaaagctagaaatgaatctaggcgtaggtgaacttttgctaagcagaaataacactactttgttgcctagagaaagataacttctcaagtatttttattccagtcctagatcatatatgttcttttgtgcaacggaattctaacagttctaagagaaagatcactgctgtttacagcgccttgtgcagccttagattttaatattcttttgtcattgttacatctcatagagtaaagctcttattaccttgatcctgagtcagaaatcccacctgaaatcaccttttttcccccttgatcaaacatcccatccttcagctaccatactgttgctacagggattttgtggactgtggcccctgtcctgaggttggcaccttcagttcagcacagcctgagcagtgagaaggtctgaaaggagagtatatagttaagatccttgagaaagggctgcctgaggaactgacctcttaaagatctcaggatctttaagacaacaagttaggttcctactggagttacctgccagaatggcctcttaattaactcaggtaatgaagagctaactgtgttataatcatcttgcttttgcctgaatttggagaaagtattataattaagttcccagtatcagaaatgtccttacataagattaaaatatcttgatgactaataccattctatgagaaagagtagttatatgcccagactgtattaatttactttagaaactaatgtttgaagtaatggaaaaaattttaaattataaagctaaggtgcaataacatttgctacttatttatagaattatttgaagaattttgtttttgaagtaatgctttaaggagtataagatattcaagataaattatactataaaatgattttattgaaagttgaaggttacacaaattgttttaggtatgagcagaagaggttaaggtatttctaaaggtaacatatagtcaagagtttcctcaaaatagttatttggagaagaatcagaatgtctgtgtatttcttgtctgtttctatgttgtcttatagctctgactaaatgtgtttacctatgcaaaagatttattaaagcatagaaaaggtgaatgaataaaaatataaaataattgtcctttttctt

SEQ ID NO: 14489 - DNA, 1392 bp, Homo sapiens
ctgcaatatttgtgactgaataggaaaataaatgagtttggagacttcaaataagattgatgctgagtttcaaagggagccaccagtaccaaacccaatacttactcataacttctcttccaaaatgtgtaacacagccgtgaaagtgaacattaggaatatgtactaccttagctgttatccctactcttgaaattgtagtgtatttggattatttgtgtattgtacgatgtaaacaatgaatggatgttactgatgccgttagtgcttttttggacttcacctgaggacagatgatgcagctgttgtgtggcgagctatttggaaagacgtctgtgtttttgaaggtttcaatgtacatataacttttgaacaaaccccaaactcttcccataaattatcttttcttctgtatctctgttacaagcgtagtgtgataataccagataataaggaaaacactcataaatatacaaaactttttcagtgtggagtacatttttccaatcacaggaacttcaactgttgtgagaaatgtttatttttgtggcactgtatatgttaagaaattttattttaaaaaatataaaggttaacgtccataataaatacttctctttgaagctaccttatcaagaacgaaaaatcgtatgggaagaatcccctatttatcactgctatattaaaatatatatattttaattatatttgacaggttttgcatctaaattgacctatttattcattcttgattaaatgcactgaaaagtaaagggtctgtttgtgtcatgttcatgaaaatgcggttagagaggtgctattcaagtgattctgaaggcaccccaaggtatatctgtaatttaaagattactgcaaatatctttactttactgtgggtttttagtacatctgttaatttagtgtttctttgtgtgttttgtagactagtgttcttccatccttcaactgagctcaaagtaggttttgttgtaacattgtgattaggatttaaactaattcagagaattgtatcttttactgtacatactgtattctttaagttttaatttgttgtcatactgtctgtgctgatggcttggcttaagattttgatgcataaatgaggtcactgttgatcagtgttgctagtagcttggcagctcttcataaaagcatattgggttggaaaggtgtttgcctatttttcaaattatttaatagatgtatggtaccatttaaaagtggttgtatctgaatttactgtggggataacatacactgtaatggggaaaaattacctaaaaccaatttcaaaatggctttctttgtatttcagtttaaaaacccagtgcatgtacgccctctgagatgcaataaacaccttgaacaaag

SEQ ID NO: 14490 - DNA, 829 bp, Homo sapiens
tagaaattcagatttcataatgaccttattaaaaggcctgaagatggatgggattgtgccactgtcaggacagcttatgaaaaacaagtgttccaatatgtttccagaaagcaaacaaccaaagcaacatttcaaaataaattgcctttaaccaataagaaaaaaaacatataatggtgtattttactaaaaatcattaaccagtctcattttaagtgatttatggacagtttcctttatagcagagaagggctcacttgtatgctagaaatagaaagaaaagaaaattgaacatactccgccacatttttattgataatgtgaggtttttaaaatttttattttagatccagggggtacatgtgcttgttgtaacatgggtgtattgaataatggtgggaattgggcttctagtgtacccatcatccaaatattaaacactgtacccaacaggtaatttttcaacgcttactgccgctcacactctttcccctattggagtccccagtgtctgttatctccatctttatgtctctgtgtacccattgtttagctcctacttttaagtgagaatatatgcaatattttattttttatgtctgatttagttcacataggataatggcctccagctctatccatgttgctgcaaatgacatgatttcattcttttttatagttgcataatactccatttatatatctctctctatatatatctcacgttttctttatccagtcaattgttggtagatacttaggttggttccatgaatttgctattgtaaatattgctgcaataaacatacatgtacagatatctttttta

SEQ ID NO: 14491 - DNA, 470 bp, Homo sapiens
acacttggatttggtatagaataacccattgaaatttctgctgtgcgagggtggtagaaatttacttttttgggtatattcttatatatattatgtacatcgctgtctgaaattttagttattttttgtttttaataaagactaacacaaacttaatgattaaaagtgattgagtctcatagtctttcatttgctagctgtgatccaaattttattagaacataagtcacttgttattgccatttttaaaagagaaaattcataatgatgttatggcaaacagataagactgataaacttcgtattgtatagctttgaaaataattatgcctagtatggagaaacaggaataagatctgattttcttagagttaatatattttagtagattggttttccttttttttattttgtacatagttaactgtgtatctataaataaagcatcctatatgagtttttaataataa

SEQ ID NO: 14492 - DNA, 535 bp, Homo sapiens
aaacagtagggcctctgtaaaattggagactgataggttgatcagaaactcaccctaaatctgaacgggtgccgctataatttgtgacatctggcaagatttccctttatgtatatattttaacaatccgcttggacacgaacaaagccacacttctaactgcttctggcgaactgattttatttttaatttttttcaataaagatattcttagatactgaaagaaatagttaatgagtttgcatttgtgcttgagaaaatttggctcaagtccatttggctgtagtgtcaacgatgtttccagtagtgtttagatttggtgtcttcaaaggtagttgattaaaaccaagtgtgtctttaatatcttgtatcagaataactttgtatgttaccaacttaaattgctagaataaggtaaattgatacacaactgctatttttaatttagaactttgacctaatttgggttttcaaaaccattttggctacttgtattctttatgctgttgtttatttcaataaaaaattcacacct

SEQ ID NO: 14493 - DNA, 252 bp, Homo sapiens
atgttttaccaagtgctgtcttgatgactgctgattttctggaatggaaaattaagttgtttagtgtttatggctttgtgagataaaactctccttttccttaccataccactttgacacgcttcaaggatatactgcagctttactgccttcctccttatcctacagtacaatcagcagtctagttcttttcatttggaatgaatacagcatttagcttgttccactgcaaataaagccttttaaatcatc

SEQ ID NO: 14494 - DNA, 1259 bp, Homo sapiens
gtgccacagcctcagatatgttgaatgtggtaggagagggacccctcccctactccagaatcttcacacttggccataaacacactccctctacctgaagcaaagctactctgtgacacacaagagggttaaacaaagaaaacctgcatccctcctcagcaaggcctaagctgagttggaagacaaagcacatcagccttagtatcatttgggaggaatttttttacattgtcaatatgctttcagttatgagctctagacagaggtctcattgttttgttgtagggttctccagtatgtggataacattagttgttttagaataggtaattgcaaattagtctgaagaaatctaacaggattcttttaagagcttagatttttcagggaaaaaaaaaaaaaaagaaaccctgtgtcagttttctgttttttctaactatctcattacaattggtgcacaatgaactggaaaatataaaaagtgacactttaggcaaatgtgatggcctccgagctgaaatgaaggaactggcaatctttccaaagtggcagccaaggccccactccctgtcctactcaatctctgcagggaaaaactgtgggataggatagcagccagctggggacacacagaggaacattcaacaggaaggtcccgcctagggaaaaggccacagagcccaggcctcttgccgattcagggatccttggatataagtggattagaggagagggaggaaagctatcatttcagtggtctccaaatcaagtagaaatattactgggaggtatcccacttaagcctgaaccagcagacatccgaaagggtcactctagagtcagaaaggaaagcaggtcccccagaaggcaacacattgataggaagtggaggccacagaaaaagaatgtgcccacttgataattacttaagacttctatttaaccaaaagaacattgaaatactttgtaaatattcatattgttgaacctttcataatcaggaattcactatgtactatactgtaagtcatagttcgcctataatttactagtatatctccctctaggacagatagtaaaatgtgtactatgttgttacagtggtgcaaaaatgttttaaaagtttatcacttgttttgaagactagaactttctttacttttctatattttcttagcaattcacagatatgttctctttggatttagtactttaacatatgtacatttcttcagaataaaaataagggtatttcacaa

SEQ ID NO: 14495 - DNA, 28 bp, Homo sapiens
tttccattaaaatggcttttaaaatgtc

SEQ ID NO: 14496 - DNA, 340 bp, Homo sapiens
atcacgtatcctgcatttgtgggctgccttgttccttgttgagttgttgcaagaggtcccaattatgacatgcagcaatgccaataccccttctgtgaatacaggttatttcaagctttcgtcagtggcaaccactcttaggcagcagcaactggttttggaaatttccctgatgtcagtaccacctggatgtggacctttgctacctgtattaataccagtggcctcattttgctgtatcattacaatttggcttcttatattaatgtttgaaaaggattaaagctggtattctagaacatgcccttcactggttgtgtaaataaaactgtagaatgac

SEQ ID NO: 14497 - DNA, 3988 bp, Homo sapiens
gcctgatgcctccctggcagcacaggaaaagaatttttttttttaagctcaaaatctagaagagtctattgtctccttggttatatttttttaactttaccatgctcaatgaaaaggtgattgtcaccatgatcacttatcagtttgctaatgtttccatagtttaggtactcaaactccattctccaggggtttacagtgaagaaagcctgttgtttaagtgactgaacgatccttcaaagtctcaatgaaataggagggaaacctttggctacacaattggaagtctaagaacccatggaaaaatgccatcaaatgaataatgcctttgtaaccacaactttcactataatgtgaaatgtaactgtccgtagtatcagagatgtccatttttacaagttatagtactagagatattttgtaaaatgtattatgtcctgtgagatgtgtatcagtgtttatgtgctattaatatttgtttagttcagcaaaactgaaaggtagacttttatgagaacaatggacaagcagtggatacgtgtcaatgtgtgcactttttttctatattattgcccatgatataactttagaaataaaccttaatatttcttcaaatatctctatttaattttgacactgaaataaccgtaaaggtttatttttctgttacctcaacaagaagaatttgaagacttcaaaatattgagcagaattcattcatacttaaaaatttattagccctgcattttcataggaagacacattatcttctggactatagctgttctaatggattataatcagaatggaagagagaaagcatattgactttttttgagcgacatctctgactttctttagtctttagctattactggatctcttaagacagcatgtgttaatcttaatgtatatcgttatcactgtgcagttgctgtttacttgaatagtattgtgttcctatattccaggtttaagtagatttcatgcctgggtggccaaacaacagtcttcattttttttaattgaaaagaagtagtgtctggatcagtaaaattatactgtgtgtgagtgtgaatataaatgtgtgtatgtgtgtttctgtcctgtaactgttacagtaatgtcataaagtgagaaaactgtgaccaagtataaacttttaccacttgctgcactcttgcacatggattcagtttctaaaattgagttcttcctgtaatcttgttgataaaaatactgactccaaccattcaaaaatttcaccccatccctccttaagagattggatcaagtattactaaattgacctttaggtattacacaagaccagtgcttagcaaaaaataatgacaggcatccaaggaagggatgtatttgtagtgttattgccaggaaaggagagtactttggtttctgagcaccgaatattgagcaatatgtcagtcactaaaaggaagacagttctacagaaaaacaatggtaacatttttcaatagcgtgtgtagatagtatgcactatatacatcacgttaaagtaggactatcacacccagcccatgtggctaaaaaagctgaatcagacagtggatgagacacacaacggcagtgaagaaccgatacacttggcattgacgtctagctatgctgtatctgtgctttgcccacatgcccttggtgacagctgagcacccagctctgtcttggtaggtttgggctaaggaacaaatctctcctttgctcgtggttagcaagatacactcaagcatgaagataaacacagctgctttcttcttacaccccggtctcatgctccttaatggcgccatgggtgcttgttgggcctttttccagtaaggaatgatattgctgaagaatctacttaaccctgacaaattttaattataatctcttcttatacagataaaacatgactcctacaaggccccaaggtttacatagtctgaagtgaagtacagagctggcatctatctggtgatttctagctctcgagatacccaagcagcctgatggggcagttccccttcttacggttcacgctctaaggcaggatgtggcttatgagatactttgcattgtctgtctgcacaccttgaatctgcctgctggctcccttactttacctctctgtcatgtgcagatgaaggctcagggtgctagaggattagtaagatctctttctaaagacaggagagattatttacaagaagaactcaccagggtttagtttgcatttaagaattgccagtcttttgtcctgcatcatcttgaacattaatccacatgtttcagagctcaccaggcagtaccaatgctcttttcacagctatgaagagctagagaaattcttgttatggtagaaaaatttcacgattcatttttgaaactgcatttgtgcgtatgcagtgtagattttatagtgtgttgtgctttcaagatctaaatcatatataataaattaagggacaatggggctgacagcactaaacttggtgcttattgatattctaagaaatatctgtgaaatatcatcacgtatgttatacaaccttcatttaaaaaggtttaaaactagttagattcactttgacacttttcatatcatttcttaacccaagtgacgaaaacattgtccccaatgaatatactcattagaattaccatttgttaatatcactcattaattaaccccataattagatccattaatttaaatgatttaaatttaagtaagttttataaggtctgacatcagaggtatcttactttcctctgaggatgatgtacttgccctgaccatgcattttaccatcacacatgttcagaaagggccaaattcccaacctgctcattttttttttatcagagtcatgatgaatcagtcctagaatgtttcatttgcacaagtagggctgcctccaagaggaacctctgatttattttgtatgaaatatatgtgaaaggatatgaatctgagagatgctgtagacatctgtcctacacttgagatgatttccaagcctctctggcactttgagttaagtctatctggtattaaatgccaaggaccttttgctgcctaaatccactctgcaggaaataggcccaaccaccagatgagaattaggccctggatgagtagcgctatagttactgtcctgttgattaatttctgccatttcatgtccataaaagagaccacccatatcatgcacacaattagatttctcacactctaactgtatatttgtatgatattttaaaatctcctaaatgctgggcaatggctattaacaattaattgtcttgcactggccttctgatgaaatgttaacaatgcctattgtaatatagaaaaaaacattctatctactgatttgggctgaatgtatgtaaataggtttctaaaaagtcagatgtttgagcagtggcctacaaatcagtaattttcggatgggagagtttctttacattgccgtggcatcttaaaagctatcttcatgtaaattgactgtactaggcctactggggatcagagttcccaagaaaggaaaccttttcttgtatctggattcaaatttatttccaatgtttcaagcgggaaacatgactctttattgtctgtaaatctaacattattacttttcctcttagaagaatattgtattgttagatgtttgttgagctggtaacatcgttgcaaccactgcaatatcttcgttagtaatctgtataatactttgtatacaagtactggtaagattgttattaaatgtagcttcagtcattaaattactatagcaaagtagtacttcttctgtaatatttacaatgtattaagcccacagtatattttatttcaatgtaattaaactgttaacttattcaaagagaaaacatctcatcatgtctattgtccaaagttacctggaatcaaataaaaattctagattaccatgaagaacat

SEQ ID NO: 14498 - DNA, 2449 bp, Homo sapiens
gacctgcctgtgacttgagggttaagaagaaagaggaatgaggaaaaaacgctgttgcccatttttgtagccagagaaattgaaaaacgactgtggcttgatgttgatacacatttgaattttttttaaaaaaagaaagttatcgtagccagcctgtaaatacttgatgcattcgtttcctcagtgctgcaatacatcgtggacttaaacatcttatttatctgataaactcagccttaccttgtggaatctgaagattgaaatatccaaaggtttaaacaagatggaaatcaatgaaaaagaggccttgtttatatatgggtagcttcacatttaatttataaagttaacaatctggaaactgtgagcccataaaacagtattttttagaagttgtgttacaactgtagcaaattttccttttaaaaaatccaggcaatggcattaaacattcttgctatcatttaccatggatttcctacatttctgagatccctgtattcaaaaacaaatgacagggttgttaagttgtactatattaaacaacttggtctggtttatatcattttaacaagttttttggaaatgtaaaagaaaaaagtaaagctccatttttgtgaattgcattgtttctaaaggaagtattttgagtattttcatctgtttgtattgtttcgactatgatatcagatatccagtgtgtccattctggcagtggttttgagttacttcatggaacttggacatacaccaccaggtcctttatgtgttgttctcctgggagacttctttttttaaatgccagggctacttctgctttacctcagtggtatcagcacattgtaaattacgttaaaacacacaactcactgtgatctatgggagtgatatcaaatacaaacgatgttgtgttccttctctcgaacaaaacagcaaagggaatgccagctaacttctttgattagaaggtaatgtcatggaatagaatgctgtcaccagaaaatgctctcccactgctagataaatgcagaggcaaagtgtagacatctgtaggaactaaatatcaaggaaatcaagacatttattttcaaagcgagaattctatctacattctattctgcggatgttatttctgttatacatctgaattttaaaatgtttactgatagataatggatttaaagggcggctaattgattgtctgccattgttgataaactgttctaattggtttgtgaaagaactctgagaattagctaaatggaggctagtgtatttatttttagaggtacatgttttaagtaaatgtatttaaaacaaattttcatggtctgaattgtatatgtaaatgcatatctgtgtaagtatatgcaagtgtatattcttctactgattcagtcagacacgaaatccaactgaattacccggtagactgaatatctgacgggatttctatatggacatagcacagatgaaccaaaaatgtatttatattcacctgagttttaatgtttttaaacaaagttttctcctgcagtgcttttctatatgaaatagttgagtcaagcttgggcttttttcttcgttgttcccaagtcatgtaatgtatagtgaatttatccaaaacgccattgtaacgttttttactagagtgtttttgcacatttgggcgctaaagggattaaaacaactgatgccacaatgactattgaaggagggaaaattctcaaggttccatagtatcttttacaaaatggattaaaaaaaaaatgcctatgcaacttcaaatagtctgatgcctgcttccccaggacgagtgactcttccacggtgtgctgctttccctccgagcctgtggaaaggcagagcccttttgcagatacgaaagcaagcttttgccaatgatctttaatggagttaaaatgtttatggtaattgtaacctttcaaatgagttacgtgaaaagagcatctcacttttaatacacccagatattttcttcaagtctttgtgcattttagcaggacttaattttcttaatttattctttcctttcaattatagtgacatagagtagttggccttataagtagatcccatttagcccctgaacataataccatctgcagtattataaaagtcatttagaaggtcagggggataatctagaggcaggattttggacattgtgaaggaaatgtgctccttctcagctcacttcaataactattttctgagactgaagttttttagacaagaataagaaaactttgctttcttcagttatcacatgtgaaagcttttgctttttgttaggaaaaggtgtggatgactctactgcgtggatggttacatttgctttccgtgaaatgctcagaaaatgtcaggacattccttttccaattgtgtgtcagtgcgtattgtaataaaactactgatttaaattagc

SEQ ID NO: 14499 - DNA, 2619 bp, Homo sapiens
acagcaacagaaagagcaccacgccgtctttaatataagttattaaactctcattatgttaaataaaaattctttaaggcatacagaaaatgcgagttgatattagttactttgggcatatggaagaaataaaatctctagctttggattaataaaaatttggtctccatttaaagggcccacactacaaattatgatttgtctaatgtcaccattttatggaccattttttatttacattgtggcagaagggtacttttcaagggaaatgagtaaactggaactaatttttaaaattctacttgcatagtattagtactattaataataccttttacacaaatatttttgactttaaagcactttcatgtaaaaagtaactatgactgtataattgcatagagcagacttaagctgtttgacacctatgtctcttttgtgtcttctgtttaaacttgggccaattcctggtggatattagttcatattacaaaattctgatgttccaaaaagtagaatatatatagagatcaaacattcaaaagatacattctctcctaagctcaaaggttatatttttattgggtagaacagtataggtaagttgacatgaaattgcatcctgcaccatgaccacattagtaatatcagaacttttgagaaatactggattttgaatggtttgagactaattctttaaaaattaggctgagcaacactcacaatccaaaaatattcatattaagacttacacatttgaagaatggtacattttgtataaaatcatatttgataccattatttccacatacctacttttcatctgttgcttaattttttctttttagagttcttgctcaactttatatggaacaagtcttattatttttgaaagagtgtttagtaccttgtattaagaaacttggccaagcgtggtggttcactcctgtaatcccagcactttgggaggtcgaggcgggcagattgcttgaggccaggagattgagaccagcctgggcaacatggtgaaatcctgtctctaaaatttaaaaaaaagaagaagaagaaactcgagactacatcttcaaaaaacaactttgcagtatttgaattttacattatactgcccttcatttctgacagccaaataactttattgatatttattgcttttgtagttgttataactaataatttctttgaaaatgtgttgtagtttatgtttttcaaagggttttggtagtgtttgtgatagaatggttttgcatatgattattataggggatatatttatagagctctacttgtatactttgtgacttacattatgaaaacttcaaagttctcaatccatacagttagtatttgtatccagagtgtttaagaaaaaaatctgtcttatatttttagtatataggagccagtgttgcttctatttgttttgaatacaaattccagttttctttgcatattagatcccatatgtaagaaacaaccttaaacaataatttgtatgctggtaatatttggacaagtgccataaattaatgtatattgtactttctgaatagattttctctaatcatagcaaaatttatttcaaaactacaactctttgaattattccgctataataaaatttagttataaaattatgtggcactactgaaaatctaaaggataatctgaagaatgagtaagacagatattgatagaaatttttagtattttcagaatgtttgggttcatacacataagtgaaatcattttaaaaactaggggctgggcacagtggctcacaccagtaatcctagcactttgggaggccaaggcaggaggattgcttgagcccaggagtttgagaccagcctgggcaacatagcaagacccctttatctataaaaataataataactaggtaccattgtgaaaaataataactagggattgattatagtatctttactctgtattcacaaatctctgtattcctgaacatatttaatcctttgatttacctctgactaggtttgtcattgtaatccctgggctgcttaggaggataccatttggtttgatgaaaaagctggaatgataatagctcaaactcttttgagcatttagtacatgcttggcactgttctatatgtcttaagttattcactcttgtatttaaccatcaacactcttatgaggtaaatatcccgcaattacttttgcgccaacctagtaccactacagacaaggaaacagatgcagagaggctaagttacaagggcacacagccataaactttggatctgtggagtgactgggcttcagagtcctcttcctgactgctgttcctatgtcttttgcaaagagaagtctttgacaggtatatgctttattaaaatcatgtttagaaagaaatgagagaatagaattagaaaaaggaatgactgtaggcttcgatgaaaatgacttttgtgactaggtgaaaattgtttggctgggtatcctggaaaattgtcttctgggaatatctatattccagggttcacttttgtcatagaattgtttcttggcccatttaagagagatactttgtttattaataaatcaaacgttttaatttta

SEQ ID NO: 14500 - DNA, 517 bp, Homo sapiens
atgcttgtaattctacaaatttcacatttccatggcatgcactacagaaataactgtataatgaaaaagtatttaaggatatggttaaaaaaaaatcccaggacccacccatgttttcactatcccttctgcagctttccaaagctacattgacgagacacttactggtttaatttgcacttattaaccatctattgaatacacagcattatattaggtgctgcaggaaatacgacactgtagcgactgatgttagttgttacccagatcccctggaaaagcacactaccagtgttgtgggcacatttagttccacccgttagacccttgatgctattcacatgaataatttattttcctcaagtgtcattacattgttcaggctacgtgaacttggaagcacctacaggccatttgcatgaaattcacatgcacctaaatcctcactttgacagaaactcatgcttcagtttataacctattacctattttgtatgcgactccacctccgcatgtt

SEQ ID NO: 14501 - DNA, 150 bp, Homo sapiens
gggctccaaggctgttcctagaagagggcatagacatcgagggggcctggccagtcattgacagacggacttgttgaccacacgcccctcaccaaacaatgcagcagctactggaccaccctgagcagcactcatctctcagagaagccc

SEQ ID NO: 14502 - DNA, 3053 bp, Homo sapiens
tatggttttgtgacttatgagctgtgactcaactgcttcattaaacattctgcattgggtataatctaagaattgtttacaaaaagattattttgtatttacccttcattcctttttttgatccttgtaagtttagtataaatatatctagacattcagactgtgtctagcagttacgtcctgcttaaagggactagaagtcaaagttccttgtctcactatttgatctgctttgcagggaaataacttgttttttctcatgtttcatcttctttttatgtaaatttgtaatactttcctatattgccctttgaaatttttggataaaagatgatgttttaagttccaatgagtattactagttactcaataccacttattgagtactctgtttctacgtatgtagaatgtatagggatagaagagttgaaaagggaaagcaaaactcctcaagtagcttccttaaaatgtcattcataggagatgtactggaattgctcattctgtgactttatttgtgtcctaaacattcttcagtgaaaataattttatttcagtcaaacatttatgaggaaatgagatcacatctttgtcactggatgctacttgaagagggagtactttgtaaccactttgatatgctgttatcaccaccccctgccctctgctgccataatcacacaaatttaaaaagaaagaaaacagtcttccatagatttttaaggaagaaagggcccaagccaggagatcgcttggttttcttccagaagttaaatggggggatctgaagatttgaatgtttggtctgctttgaaatgtatgtcttttgggatgtattatatgcctagctttataatcagtataaattttaattattccaggaatatgcataatattgaaatatttcatgtcctattttaatagaaaacctcagggcccaagtaacagtgatagaagttagaaaaacctttacttagaattgtccacctagtcagagcccaagaaagaattttcagtggaaaaatcaatatataacttagtgctagctagcgccacagactctagtagataatattatcatcataatggctggtgaaaccatataatcacagaaaaacattgccttcagcatgttcagttcgcagcactgagggcactcttgagggtgttgttaatgaagatttaatttttaaatacaggtggttccaagctttcaaataggttatgctccaaaagtgttatttgtaagttaatttttttacaagtcaaacaatgttggaagtggtatttaggttctagatcggtccacgaaagttagcccatatgtatatcttgaatagtataggggagggtattcataaagtccttatgtggttttaactaagtgaaattatggacaagagaaataattgtaaaatcgtcttaaaggaaaatttaatttttactcctgtttatgggacattcgttctattaactgtcagacacaatttctgttttcatctgagagccagttttcctttatttctacatctaaaataagaacatattgtacactattatataatacagaattgtcttaaactttaataaattcgcattttaaaggtgtttacagattattttttatatctgtagctgaatttgttaaagtctaaaaagctcaaggactttatgaagatctcattatatgaggaaaatcataggttaccattttataactctattgccataagaaaatacactctaaaatcttgatttgaaacatattagaaaccttgattcagtgctcagtggtctcctagtaagaagtcaccgacggtagcgtcatatgagaagaaagaaatccccaccacctcaacctctgctgagattgtgtgctaggaacagccttccctccgtttcccctcagtcaaacttgagccagcctctggatcgatgtgatcttattgcatgtttccatggggtgtacctatactttaagccaatcctgctgcattcactgctaagttaaataaaaagccaagaagattttgcactgtgcagatcctttgctatctgacttgcatctcttcccccacctgtcagctagccacctgcttgtttgtgttgggatattttttagcacctgaagcaccatctgaaaggggcaccattttcttcttccctttgatctcacatatgctccctaaaaatccttaagttgtcaatctgatccccagtgtgaggttaatgagcaaaattggtctttggggccctttttgtccaagccccactgaaaggcctcttcagaaaactattatctttaaagccctactttaactccttaattccagcatacagctaaaactggatgtatattctggcaagtaaaggctgaggactcctctttaatcctcagatctagataactcatgacattttatttgaccaacatagcacatgatgagatatcaaggtaattaaaatagcatgcttgaaaaaaaaatacgtaatctgtttcacctgtaactgtttaagccaataaacttttcaaaatttatgtaatgtggggcttttatgtagcactttacgttttcatgctgcttattgttttattctactgaaaaaaatgaatttcaagattctcaacttttttaatttcaaaaattgtttattgttttgactataggaatacaaaatttcctattttgggagaataagaactctttttgtcatttttggctatgaataaactttctggtcttttgagaccacccatttttatagatcagaatcagaaaacaggtaaacctcactcacacatttggactcatttgaacaaaaatctaggccaaaatactgaaaagcctatgtgtttttttaattggaagtatatgtaaggttaatgcatttagtgaacgtgactaacaaagactaatgtgcacattaacagatgtactttttaaggttttatgggaggctgtgcattgctcaaaagctgttgggaacgccttctgaacagttgccttcagaactagtttgagctgctcaataaaaccagtgactttactcat

SEQ ID NO: 14503 - DNA, 181 bp, Homo sapiens
gtgaggtttcaggaatgtcttttgaaatcagaccttatccatgaggctgctgcgccatgttgcactaaaggaagaggaagaaggagattgggacacataccattgatttgttgttaaaaaaaaaaaattcctgcaaccctcttgatcttctcttttataaataaagtaagcactttgaagc

SEQ ID NO: 14504 - DNA, 5047 bp, Homo sapiens
ctatagcattattctgaaggattttcaaagtctccatgtgttttgttgcatttaggattaacaatggacaacacaaagcccagtcttactatttatatgtacagtatttggtgatagagagcaaaggaaaaacacatcagaacagttgccttaacactgaaaaacataccctgcattttgaaaatgtttatggatgtctcagcagttcttaaaagaagaaaaaaaccactaacaaatggccagtagatgctggacacaatcattagggaagtgtaaatcaaaactactatgaggtcgggtgtagtggctcatgcttgtaatcccagtactttaggaggctgtggtaggtggatcacttgaggtcaggagttcaagaccagcctggccagcatggtgaaacctcatctctactaaaaatacaaaaattagcttggtgtggtggtgcattgcctgtagtcccagctacttgggaggctgaggcaggagaatcacttgaacccaggaagtggaggttgcagtgagctgaggtcgtgccactgcacttcagcctgggtgacagagtgagacagtctctaaaaaaaaaaaaaaaaaacaaccctgagattcacattcactagaatggctgtaattaaaaagagaaataataataagtcttggtgaagatgtacagaaattacagaaccctcatacattgctggtgggaatgtaaaatggtgtagccacttcagaaaacagacggtcagttcctcaaaagatgaaacagctgctgtatgagttagcacttctaccccatgcccatagccattatttggcactaaaaagaaacgaaggacttatatatactaaacatggataaaccttgaaaacgttaagtgaaagaagccggtcacaaaagatcacatgatgattccattcatacgaaatgtccagaataggcagaaagattagtggttgcctaggctggctgtagatggaatggagtaactgctaatgggtgtagggttccttttcagggtgatgaaaatatcctacagttagcttgtggtgtaggctgcacaactcttgaatatattcaaatccactgaactgtacattttaaatgtaaggtatgaattgtatctcaataaagctgttattaaaaaactcttgaggtgtaggactgaaagtatactgacaccaggagataccctggaactttctcgaaaaatcctgcattatccctgagggttgttcaggtacgttcttcagatgtgtcatagtttgatagagaactcatcaaaaagatcaccactgggaatctagatctttgttgaaaagggaagagaaagagaagcttaatgagcacattgaagcacttaccagaaagaagagggaagacttctggatgaaacctctgtgagtaccttaacattcacatggaagtagtaaaaataagattctgggtgcagttctccaatgacaggaaaaaaaacaaagagaatttgaagaatacgtcagagacaaatacattacaaccaaaattgacttcaaggcacttttgaaggagatcaaatttataacaaaataatttagtgaaagtgaaagcttgtggaagatgttggaatcatccatcctgaaaattgaagtcttctgtttatcaacagaacagctaagaagctaatctaagaatgaccagcacctgaaagatgtagacaacattttgcagaatgataaatggtatccagtactggactgtgtctgagaggcatcaactgaatgtggatgttaatgacctggactgtcagggtccacctctacctcccagagcctcagagcccacaagacaaaataattctgaatactgttccatgggggtaatctactaattcaaaatgcctgcctgtgccaattttcaggtttttatgtagataagtattagttaacctgttgcaaaatgatctgacaaacagaagcatttgtgacgtttctgaacagagaacactttggaaatattttttgtgtgacatgattgatagatacatgctatctctagtaaatctaaaatcttgaaactcaaaatcatccttttatgggtgtagaagtcagtgatttaatgatgctcttcctaacagtggtgtgcatggaaaggttttcattaaagagcgtatgtggtttgcatttgcaagattcaactagcacagactccaagaaaacctaagtttttttgttttttaaagcaggtaaggccgggcactgtggcttacacaagtaatccacacactttgggaggctgaggtgggtggatcactttaggtcaggatttcgagactagctaggccactagctagcctaacctggtggcacgtgcctgtaattccagctactcaggagggctgcctcatattgaacccgggaggcagaggctgcagtgagccgagaacacactactgcactacagcctgggcgaaagagtgagactcttgtctcaaaaaaaataaaaaagtgccatcaagttagaagttttaaattcatggtacaagcattgccatagatgtgcctgcaagaaacacacagatgacttttttttgagacagggtctctgttgcacaagctggagtgtggtggcgcgaacatggctcactgcaaccttgagctcctgggctcaagagatccacctgcttcagattttcatttagctgggaccacaggcatgtgccaccatgaccggctaattttttttacttttcagagagaggagggggaatctcactttgttgccaggctagtctcaaactcctgggctcaagcaatccacctgcctcggtggccagagtgctaggattacaggtgtgagttgtttttttttttaaagagacagtcttacctcattctgtcacccagaatggaatgactttctaaaattgcagaaagcagaacatattccttgctgtttataatattatagtcgtatcaaagggaaagagtatttctccttaaataaaattacaaataagaaatgtatgttttactcttactcataaaaggtattgtagaatacaaaaggtttttcaaactggttttgtctttgattggcttttataatccacacttcaaagaagaaatgcatttaacttttaataacttagtcaaaaagtataatgttgccttgccttgcataacctttaactattgcaaatgatgttttgtccttcccctttgtccagtattttccaaatggtcaacagtttaaacatttaagcttgcactgagaaaccttgccacatttcagcagttttgttttgcttttggtggagagcacctgatcgcgactttacagccaatgtatttactctaaattacacttttatagatacaaggtaaagtgtagctgggtgaaggcactcaggagccataaaatgtggtcaaccacaataaattaaaatgtaagctaaacaaagtattcacacttgcatttttttaataaggaatttaagatccatagtatctttaatgcttggaagagacacaaattcaaggtgataaaaatattaattagaagacacataacatgcctcaagtatatcaacacttgactccacaaacaaggcataaccatgaaaacaacactccctttattttgggctcccaaaatcaaaagttagaactaatttatttaatcacagatatttagtatactcaataatgcactaacaatttctttaaaaaaacactaatactgtacagtatttctgtgttttagtttttcccacagctgttgaaaatttcagccttgatttgaaacatgacctgcatgacaggctataagttgtcaatagttctttttctttggaaaagtacagttgtggcatttactcactttagcagatagctaaaagggaaaaataaggaaaaatatacactggacctgcagttaagtttttgacaatgccaaggatcaaaaacagatgaaacaacatttgctgaagatgaaaaggtattgcattggtcttaatagatgttgccatctctgggtgaggatgctgactgagcctgttctgtgtcttcatcacctctatttgtttcttcttctacgacagacctccaagagacaagatccatgtagtaagccacactaggtccttttgacccttctcattcttctgtagtctcttccctgtgacttttgacaaaaatactcagttcacaatattagctgcctgcttctgatgggtaggaggtaatcaaaatactcccaccaaagcactctatggtctagacttgatacttaaaatttagttttcagcattcctcaacaaggataccttgaggtaataggagatattttggtaagtgaaaataattcctgcttggaacacagcctactgaactcaggatttaatttcttgagtattaggcagttctcaataaattgatgtatactgaggaatgattctaaagaggttagtgatatcctgtttgagaatagatttagaaaactgaaggtactctccagctctacaattctgtattaggaacaatagggaaatgagaaagtgcctctatattgcaatctaatgagtctctgggggaagactgtctacctgcgtagtagttgagaacaagacaagctcccaaacacatgaaaatcaacttgaaataacatcaaattcagcctgggcaatatcatgagaccttatatctacaaaaaattagccaggactggtggcacacgcctgtagtcccaagctacttgcgaggttgaggcaggaggatcacgagcctgagaggccaaggctgcagtgaggtgtgatcatgccactgcactccagtctgggtgacagagcaagaccctgtctcaacaaaataaaaaacatcaaattcattccatattcaggtaacagtgacatatatctactgaattatttttcttttaggaatgtctatatctatggattgtcactataaaaaaaagaaaaaaccctaaaactgagcttgacaaagggaataaaagcatactttgtttttcttggtgtccccatgttaataaatcatttcttctctttggctc

SEQ ID NO: 14505 - DNA, 493 bp, Homo sapiens
aacagaaagaagagtccaaagtgagacttaactgtggtcagaaggtcacattgcttacccaggtgctcccttttggacaactacaaaaaattttattgtaatatttttattttacaacgtgatcttacagcctacagaatgctctctggctcccggctttgcctgggctgaggtttttataccaaacctggaagcagcagcaggtgcctgaactcgtaactagagaagagttatccttcttccctgccttggaagccctggcctgggaggaggtcataccccaccgttggagcccagctgcctgttttcttttgcaggggatctgggcacctgtgccttgaggagatgctgccaggagcatgggactctgacagtcctttgtataaaggactaaagggagctgcccttttgaccctgttctaagctctgccttgccaagcccatagtgtgtgcccaaaagctgtcaagtggccaagacagctcgtttctggag

SEQ ID NO: 14506 - DNA, 5879 bp, Homo sapiens
tgactcggctctgcctcccagtccgcacacctctcccatccaggcgttcttcagtcagcctgtggcactgttcatctgctgtcccgaagaaaccgagaacacatttggtgcacactacagcggtcttagcagcaatactgttccgaagtatcctctcctcttctcgagcaggagtgatagttaccttcacaatggtgctaccccttgcccaggcaaggaaagacagcagtgatgacactgtctgtctgtggctcaatttcagtcttcacagggatagactacaacacctctaggccccaaccacggattttttttctcagtggcccatgtcacaaaccctatctcaggaatttcttctgaatgttcaatttttttcattgaagacagcttctatacacatcaaagttttatagctagactgtacatattatatataatatatatataaaatatatatatatatatatatatatccatatgcaaaagtcctgcatgcctcaactttctcatcctaaaactggaaacttatttctcatttagaaacaggttccaacattcctcttcttttgtctctgatgctagaactagtttggtaactgttaacatggtcatttttcttgcttcacagttcaattttcaattcgtacttatttatggacaaaattcagtgttggaagctttttcccaaggttttatttcagatttctttttcgtttggtttggttttggcacctccaagtggtgtcatttgagcattgtaggtttgttttttgtttgtttggggggttttgtttgtttttgtttttgtttttgttttccttgcagatactgtacagtaatggtcaactttgccacttgcactgagttttgggtcaaacctattttcttaaatgaagttgtaacttcggtataactcaagtatactgtatattctttgcttttagttaaaaaagtaaaacattttagctaattaaaaagcactcaggtgataattatgtaggaaaaacaatcttgccaaataatgaattcatcctaggatgtgtagacaataatctgcttgaatatttttatatttcacctcctccccacctttccctaagcaaagtttaaacgcagatagagagttcagagttgatgctggatgttcagattcctaagtggggagagagtttggacatctcactcaaaagtacatcagaaaaacaggaatccgtgattttataccagaactcagcaggcattggctcctagaaatcaagttagaaagttttcacccagggagtaagtcccattcatttcaacacgtcctgaggcctcggcttgctcttggaagtgttgtgcagtaggacctgctcccctgaaggacggggccaaccagccactggctttcctgcccaggcttggcctcccaggacatctggcctgaggggatttgaatcacagccccgaaggtcctgccttcaccccattgggagagagcagggcatcctggcatctgcgatccatccctgacacaggctgacacattctttctcctttccttctccaaaggcttggagttttcttctgaggtttttctgccagtgtcttgtctgaaggcagacttcattctgaggctttggacaagctatcaccgggaaccctccctgtccccttcccgaatcacacacataccctaccctcacctgatgataattttctcttcttgctgcaaaactggttggcttgcaacccagagagagcagcttcccttggctctggggccgtgttggccccagccacgtttacaggaaggtgtgccccagaggaggaggaatcagctccctcgctccagtggccttgggtccgggtctcactgagcagcccgagggccactccagcccggctggggaagagagtcctgaacggtttgatgtggggatggggtggtgggcagtggggaatagatggttgactttgtttctttatttgtgccattgtttggacaatattaaagctgcatgtaaaaggggaaattagtatatgatgtaggctaaaagtgaaatcatagtaacatatgttttagtattattaacttttttctgtacaaatattagcactaaatgtttaaatatgtatgaatgccagaaatttgtcagttcatgcagtaggataaaaaaaaaaaaaaaaaaaaaaaaaaggcttttctttttaaacagttccacttttaaaacctgcctctgggtttttgttttttcttgtttgtgtgtgtgtgtgtgtgtgtgtgtgtgtgtgtgtgtgtgtgtgtgtgtgtctgaaacagatcttgataaagctctgtgttggagctgctggtttttgttatggttgttggaatttcttggcctactaggacagttctgtgcttcaccatgaggtttgcctttgtggaaaactggtgacagtgagaatataaactcaatgtgaatcacgtgatacttcgcaggcgtgtgttacagtggagtcagctgacagtattttgctttttaactctattgttgcctttccaagtgacctctcctcttcttttaaaaaaagaacactttctgctcatatcataaccaggtccaacccagcttcttggcatgaggtttaccctggtaacaactcatgtgcaactggtagtcttgaccacattccatccatttcctcaggtttctgtggttcagtagcccagacctgtttggcagccatttctagcaggggcggggcctctttatttctctccaccctaactcagacctcaccttcctcccacccacccctgccttgcttttcttcctcttcccccaacctaacttctgccatgggaactggttaaaaacactgctctaaaaaccatcttccaatttcatagagatttctcacaagttatttcattcataatccaccatgaacagtgactagcttcgtgcagttgttcatgtgatgtgtgtgtgtcttttcctattcagaactatgtgcttgtcaaaattatttctgggttgattcaaagggaggacttgctggggaccagaatccaaacggcctcaagtggaattttaaaacctagcctgtctcttttccctgggatccctctgtcaaccccacgccttttaggaaaaagaaaagtgagtgaacagcaaggaagagtgtttgcacagtacagtaacatttggttgttcttaaggctcttttcttacaaaaataagagaccctccaaccacgggctgtttaggaggatgcctgcttgggtctccaaatggctggggtaggaatggttgttggggcagagccagtggaggtgagtgaccctgagactaatgaacatcccacctaaatccagtcctccccttggatctgcctttgtcctgcttgtgtatccaggcaacctcttttcaagttggtcaggctttggacaggtgagtgatttgctgtatgtgtttgtttctctgcgttacctgggggtgccttgattaaaatcgaactttattacatactgattctggaacaaaacagttagaaaaactttaaaaaaaaaaaaaccgacaaagttacgaggccatcctgctatttatcttctgagttcccagcaatgactcaggcatcagagatgatgctgcagtggaaaacctgactctgtgtgtctgcaactgaatgttgtgcgagtaatttattaactgtctttctaaaggtttgctgcttttaagatgcactataattcgggatgtaatccttacattgcttttccaaggaagggaacaaaagtctagtgattagtatgccaactgccactactccttcaaaaggagccaggaccagcgacaagactcatgagaggactggctaaagtgaagtgtgcacagtgtgaagtttaatgctgttgtcaagaggcctaaacccacattttctcttttaatattttatgattgccatcaaagaagaagaaaaagaaggaacagacaaaggtttgaaaatgataagcctgttaagacaccaaaaactcctgtcccgtgaagctgcttgacatcctgtggagtagcataatcctctcaaaatgaggaagagctgcctgcaaagctttctcaagtccctatttggctacctacttctctacattatgccccatttaaactaggagctgtcttagaaatgacttcaaactgcttcactattgcttacagtttaggaggagtctcagatccagaaggagcaagaatcaagtttggtcctcaaatgactgtaaatagactaaagaacaaggtgttttttgtttttgtttttgttttctaagaataaagctgttcgttgtatcatgagttagtgtttcttccccaaactgaagactgtgttggaagtgcaatttctggtgagtcagtccacaatacaatgccctgtgtggagttggtattcatacaggaaatctgtgtgcacgaggcattgtgtgttgaaagtgtatgtttatagtactgcctgagccatctcatgaccccagcgtccaaaaccgatgctgtagaacagaacatatctgtacacaaatagtgtgtgcaaatagcatttgtacatagaaaagtctcattgtggcagattgagcataaattattcaactgacggtgcaaaaacattacttgcaaagaaaagtttatagtattttcctacactccaccctgggagatgatatttctatcaaatgaatatcagtgcattttaaatgtaatatgaaaacgatgctgccattttgtgaagaatacccacttggttgcagaggccaactttcatagctttgatttaatgttgtgacacggtgtatgcattttgctgtcaagcaatggataaacagctctgactttcattctcattccagtttattgacctcagataaaacactggcccttcttagaagcagaagtgtgcaccaagaccattcatttcaggtagactcacattcagtgccaagtgctcccatgggaataatcagacgcatatgttgcgaaagagtgaagggacttggacaaagaggggttttcctacagatggatgctcagtcttctaccaaaacatgtttggaggcagaactatgacctccccttaagtcctaacaatgtattttgtgtgtgcaaatcctgggatgcccgtttcacgctctgacataaagacatggcacctctagtgagtgatcaggaagattccatatgcatttgggagcttcaggtgcttgttagacacagtgagccattcaaggcaagcaccacctttgctagtgaggccaagagagcctgtgacaatttgacaatttgttccagaaccagtctgatgcaagtgcacctctaatatatgccttacaaactccagaggccatattcaaaacagggtcttctcagtgtatgcaaggggctgcagcccctcttctcttcctccccaggttgaacaatacggacagttttcacacatatctacctgtataaccctctgtacctctcataactggtcaacgactgtaacaggttacatcaggtgtttttctacatactttttacacagattctatgcgattaatgtaatttaattcaatgcatcattttattgtactagttcttaggcttgtccttatttttttctaagtgattgtggtttttctcgtggtttttattgtaaaaaatgaaaggctgttgatgcttattctctgtaactaagaatttttaccttttgggggaaaaaagcattgctatgaactaatgaattgaaacttcatttactcattgtaaatacactattgtgcaaaaaaagttttcactcaattgaattgctagtgttaactgaattttgtctagacaccatttctgttgatgaaataaagacatatcattatgcattgtaaactg

SEQ ID NO: 14507 - DNA, 1015 bp, Homo sapiens
aaaggaccagcaaaatacatctcgcctggtacaggaacataaaaagcttttagatgaaaacaaaagcctttctacttactaccagcaatgcaaaaaacaactagaggtcatcagaagtcagcagcagaaacgacaaggcacttcatgattctctgggaccgttacattttgaaatatgcaaagaaagactttttttttaaggaaaggaaaaccttataatgacgattcatgagtgttagctttttggcgtgttctgaatgccaactgcctatatttgctgcatttttttcattgtttattttccttttctcatggtggacatacaattttactgtttcattgcataacatggtagcatctgtgacttgaatgagcagcactttgcaacttcaaaacagatgcagtgaactgtggctgtatatgcatgctcattgtgtgaaggctagcctaacagaacaggaggtatcaaactagctgctatgtgcaaacagcgtccattttttcatattagaggtggaacctcaagaatgactttattcttgtatctcatctcaaaatattaataatttttttcccaaaagatggtatataccaagttaaagacagggtattataaatttagagtgattggtggtatattacggaaatacggaacctttagggatagttccgtgtaagggctttgatgccagcatccttggatcagtactgaactcagttccatccgtaaaatatgtaaaggtaagtggcagctgctctatttaatgaaagcagttttaccggattttgttagactaaaatttgattgtgatacattgaacaaaatggaactcatttttttttaaggagtaaagatttttaattctgtgattgtgtgtatgtgtgttgaaactgtaaagcttttatgactctaatattaatctcttaaatgaaattaaaaggcaaaagaacatgattgagcttaaatgatcatttcttcctgcagtgattcttggattgttttctcatgtatttg

SEQ ID NO: 14508 - DNA, 2003 bp, Homo sapiens
tatgcatttctcccttttaagggagattacagactgcaagagaacagtactggccttcagtatatgcatagaatgctgctagaagacaagtgatgtcctgggtccttccaacagtgaagagaagatttaagaagcacctatagacttgaactcctaagtgccaccagaatatataaaaagggaatttaggatccaccatcggtggccaggaaaatagcagtgacaataaacaaagtactacctgaaaaacatccaaacaccttgagctctctaacctcctttttgtcttatagactttttaaaatgtacataaagaatttaagaaagaatatatttgtcaaataaaatcatgatcttattgttaaaattaatgaaatattttccttaaatatgtgatttcagactattcctttttaaaatcatttgtgtttattcttcataaggactttgttttagaaagctgtttatagctttggacctttttagtgttaaatctgtaacattactacactgggtacctttgaaagaatctcaaatttcaaaagaaatagcatgattgaagatacatctctgttagaacattggtatcctttttgtgccattttattctgtttaatcagtgctgttttgatattgtttgctaattggcaggtagtcaagaaaatgcaagttgccaagagctctgatattttttaaaaagaatttttttgtaaagatcagacaacacactatcttttcaatgaaaaaagcaataatgatccatacatactataaggcacttttaacagattgtttatagagtgattttactagaaagaatttaataaactcgaagtttaggtttatgagtatataaacaaatgaggcacttcatctgaagaatgttggtgaaggcaagtctctgaaagcagaactatccagtgttatctaaaaattaatctgagcacatcaagattttttcattctcgtgacattaggaaatttaggataaatagttgacatatattttatatcctcttctgttgaatgcagtccaaacatgaaaggaaataattgttttatattataactctgaagcatgataaaggggcagttcacaattttcaccatttaaacacaaatttgctgcacagaatatcaccattgcagttcaaaacaaaacaaaacaaaaagtcttttgtttgtgaacactgatgcaagaaacttgttaaatgaaaggactctttaccctagaaggaagaggtgaaggatctggcttgtttttaaagctttatttattaaaccatattatttgattactgtgttagaatttcataagcaataattaaatgtgtctttatagatattgcaggaatgtatacatattgtgattaatgctttcaaaacttatgaaaatcatgaactaccccagaattgaactgttgtacttccaaagagaattgggctgtttataatgattttaatagagaaagatcccagggatcggtcataattggtcttgtttgataatgtgggcatccacaaacaaacaaacaaataacagaaacaaaatctgtaaatgttcctttgtaaaacttgtaaattttatttatactgtcttgttttgtacacacatttctctgtagtgggctctgaatacattgaaaatgcactatatttttctattttacttgcagagcatcacaaaagaacaggtattttcagtgctacataatgtgttttcccacatttaggaccaaagacggctatagaaaaactcaaatggattgcttcccaaacccctccccaccctttttttttggttttaaatcactgtacagtgttatttgatattttaatttattttttgattgactagaaaaatcattttaatttcactaaaatgttttttgtccctaaggaaaagtaatctgtaaaaataattttaattagcataatacagtcacctagacacttccatttgtaatctttgtaatagactgtaaatatatttttggaactat

SEQ ID NO: 14509 - DNA, 424 bp, Homo sapiens
atattggaactggctgacattttgggtgatgcttgttctttattgacattgaattctctttctcatagcctctccactttatttttttttatagggtttgtgtatgtatgtgtgtgagcagtgtaaagaaagaatggtaattatagttctgttaccaagaataaataataggaaagtgattacaaatattacctccagggttcaatagaaatcctcaatttagggtgaggagacttttttttggttttggggtttttccttgattgattttgttttcatagtgggaatcaggattgtgctttattgagcctgcagttacattgaattgtaggtgtttcgtgtgctgctaaggtatgcttatttgagtttatcaagactttttttttctggaagacactgctgcttttaccatcacattggagcc

SEQ ID NO: 14510 - DNA, 92 bp, Homo sapiens
agaaaatcacagaaatttcctatgtgtactcctcatccctcctgctgtatattttctcattttttgcgtaataaattatgttaattaccaaa

SEQ ID NO: 14511 - DNA, 4644 bp, Homo sapiens
tatattttgtgattcatcctgtctattaattatcagtatctaaagccacattgttccactctaattcctacttttaattaattgtataatgttctgtttaaaataatttctaggattttttttccttttatatctgtaagtaaaaaatgtataaataaggaactgaaggttaattagcaactgtgtaataggatccttggaactttttacaaaactgcattctaccttgatgaaattttagttaaactaaattaaagaaacattttctgagagtgttttctgtgtgtgagtattaagcagatacttcatccatagactttttgttgtagtatgacttcctgcctccctgccttgtgactgatttgtcatgtttattttttatttttacaataatagttatgttttaaaatgatactttttcaaagtacctggctaccctatactgtgtttttggtgggggaaaggtgttgggaaatgtgactgtgtatttgtttttcttttttatatgtgtgaggcaagttaacaaagaaaacccttacaaagcacacttaactgtgttaggaatgagactgaatctggctaaaggattatacagctgatatccaaaaagaagtgtaaacatgccaacagggtttatatttaggttccaagagttgccaaattttttttttattcatcctttcttttggagttgtcattaaaaaaaaaatcatatcaggaggaggaaataaaggagactttaagaggagagtaaataaaaatattctagaaaagtaacaatagtagtggtctgagaagtcagctgatccatcttcttgctctttagccagagcttcttataacttagcattttatccaagaaacctgtttagtttcctttaacaacattgtttctcaacttttgaactcttaactcatccagattgttttaccagttggagcttgtccttgactccttttcctattgagcattatttggttgaaagagctccagtcctagttttgggaacccacctgggtctcaaactcagctttgctttatgatcttgagctagttacgtaacctttctcagtctagtttcttcatggagaagaaaagaagaatccctttactatttgacagtgttgttgtgagaatcaatgggataatgtacgtgaaaatatttggtggcccaaattctgttgggaaatgtacagacacgattagtttattactcgtgcacaattaaggcaaagaacacctctcaattttatctttctctaatgatatgtcccagatgaatgatcccactttccaatgttttcttacatcatgttttctaactttgaagtactttgtttccttcttgggattatagtctttatcatggttctactcttccttcaagaaaacatttcaacccttctctggctcaaggagtatctttaaaaatgaaatactttgcaatcagtattctgtagttaatagcgttctcttaattataatctgtgaaatccaaaggagtgtctgttattttcataacatataaatggtccttctctcaaatcagcttcatcaaagggaataaatgaaagcttaaggctgtttaatagacttcataacactgaatttcttttcatcatgatagtgacttactaaacaaataatgtatggcttggaaagttccagcagtcactaaggagttttatctatttaaggtgatgcctttaaagaggttatttatgtgtatatgtgtttttgtgtgtgtgtgtgtgtgtgtgtgtgtgtgtgtgtgtgtgtgggttttttttttccaaaggagattgataaagatacctttgagaatcttgctccttagagtatgaaaacgtttaaaggataggaaaagctgctactgaatcatgctttaggacatatatctatagatactaagaataactaaaatttgtacttaagaatggtaacaacaaagtgtgtaacaatatgtgtgtgtattatatgttttgtatttatgtataagtaactttttttaaagcttttttttaaattgaaaaaagaagaaaatttatggctcagttccttttttttaaaatcttcactgatccttcacttattactacaatcttgccctctttcattcccagacttggagtcccttatacctgcttctttaatagccactttccctaaataccctgtaatttctgaggctgctgcttctaccagtgtaatacaagccattgtcttttggtcaaatctgagtttgttctcctttctcatgttctttgtcctctctgtgacaattgtattttcttttatcttcccatcatttccacaatggtactgctccttcctacatatacagttgacccttgagcaacacaagtttgaactgtgcaggtccacttatatgtggatctaaaatacagtatttgtgggatgcaaaatctgagtatatggaggaccaactttttgtagaggcaggttcctcagggttaactgcaggacttgagtaagtgcagattatggtatgcacaggggatcctggaaccagtccccagaccaaaaatgaccactgtatcttgagagcaccttcatggtcttctttcctgtccccagtcgtaagatacgacccttcatctgctttgtctcaacattctgttagtggtgaactgataactccagcttttctctctctttttttttttttttttttttttgttgttgttgttgttgttgttttgaggcagagtcttgctctgtcgcccaggctggagtgcagtggcacgatctcggctcactgcaagctctgcctcccgggttcacgccattctcctgcctcagcctcccaagtagctgggactacaggtgcccgccaccacgcccggctaattttttttgtatttttagtagagacggggtttcaccatgttgggctcgatctcctgacctcatgatccgcccgcctcggcctcccaaagtgctgggattacaggcgtgatgagccacctagtgctaattcatctctaaacctctgtagttggagtctcctgaaatctcagactacctcctgctttcattttctacccagggaatacactattgtcctaagttatttagccttgaaatgtcagaggcattttaggttcttcatgtttctcccactttcagttgattaccattacaggatcttaggcttctttttatctttttgcagtgccttgcatccactggttgtttgttttttctgttgggcactacttatttccttacctctggtttcttctcctacagcttatgttctgaaatgtgtattcctaaaatactgttttcctcttgttacttttctgctcgaggacttccagtaacttaccattgtttataaggtgatgttcaaacccttcagtctggagactttctgccacctatctgactgtacctttatcttcaagcttatctctttccaaacaagaggctcatttagcagctttctctgattgccatgttcatcctacactcagcctcattcagtttacagcatggaaactgtataggacctctttcctatagaaattgaagacacttaaataggaagaaaattaaaatatacatttggatacatgagtattccagtcaaataatatctataaaataccagatagagtataaaagacaactgaaggacaacagagtgatgaaaggactttattaggcatttggatttggttatgatttaaatttcaatttaattagaacgtttccatggcaaggaaggaagcatggaggactgtggaaaagtcattcagtattgagttcatttgcattagaggaatttcatagtttaaaacttgtatatctttacctatccttcgtatgttttcttcttaagcatatttgactttttctacctcagcatctgtataagaaaatatttgtgagtcagatgtttgtgggttttccttacctattattattttcttccatgctttacaacacattttttaaactaccttgttcttaaataattacacggacctgcttctgtgtactttcacagaatctttgacagttaaaaattgtatgttatataaaaatttgacaagcttctacagttaggaaaagcctttagaaatctgccttccccaaaccgtatgttatcatagcactcatgtctccccatgtctaaaaggtaaatagatacagaaacctcaccaaaagttgaatcatctgtactaaaccactgcttttttatccagactttttatataaatcttttattttccaaaaaactgatcttttacctacccctcttagagttaaaaatattgcctgtcaggcaagagtatagtatgccaatataaataatatgctttatttggttagaaacagttggtttgggaagctagcaacatagcatattctttacaaatttaataaggtgtattttgatactgtgataacctgcattgtaaattaccaaatggttggaattgaccagtttatacttattaaaatttttgatgtgccaatggctatccaattcattgcatttgtgaattgtgcttttagaaaaattgtggacattttagttttatatacatatttatgagttatttgtgcatatgataaaattatatataataataaaagtatatatgtaactt

SEQ ID NO: 14512 - DNA, 553 bp, Homo sapiens
cttaatatatgttctgtattaaaattaatgtgctttgttggggtttaattttgggattggttttgggttttgtttttagttgttttaatggtaagaattaagacatttgtagattttaaagaaaaatatgaaattgtccattaaatcaagtaaaaatgtgcacaaatgttttcataaaatactgcaagcacttctcttcaagaatatgagtggatattatttttaccttatgttaatcagtgatatgctttagtcaataatatgattgataaaagaataacatggaatcatgctaacttattttcaaaggaacactgagcaataaagtatcgtggcatttatgcaaaaaaaaaagttaattttttacaccttcatgtaaggatgtcttattaagcctgtgacctggcaagtgttttgtttggtatgtacaaaatggtcagagctagttggagaatgagacatgcttttccagctgtttggttatttctctggattaactgttcaactggaaaatttttagtttttctagccaggtgtggtggcacacacttgt

SEQ ID NO: 14513 - DNA, 502 bp, Homo sapiens
cgtccagcctcactgaccctcttccttgggacctgccactccctgggtcggtccattttcccaggtagcaatccatccgagctgggaggagatcttcgtgcttggcagagttttcacatgctaactggactatagcagccttatttcttttttgtacaaacaaaacacagaaccattcagatgactccattgaaaacaaacaggcaaaaaataatgtcagcatggttcctgaaatccatttttgttttcattagaaaactattaataatattgtgtggtagagcaggtgtaagagctggttgtcagctgatagtttttatgatgatcctcttcaaccctgaggtcttaattgtgagatggattcttgaacctccttcctccaccaggatttgaagtaatgagagatatcatcagaaaaatgttttacggtggctgcttgtactttatgtgtgtatattgtatgttgagacataagtcaaataaaatccacagatattaaacg

SEQ ID NO: 14514 - DNA, 1167 bp, Homo sapiens
aacattccgaagaattccatagtggaccacttggaaataaaccattggacagatttcagtaatgtcttcagtggaacacaaatgaaaatgaatagcttgtttctgtcaagcatattggaaagtgattttatttttgcaaaataagtttttctttaatatgattctagtacataattgattaaaatctcttgattataaatgtttggaaaggttctaaggggacctacagacagacatacatagacatttcaaaattaatagcttttgattagtataatatttcttaatttggataataaaaattgtagctttttattaagccaggaaacatgaagcataatttgtttaaaattctctttggtcattgagggaccaaaaaaggacgtaaaatttacagtcaatctatgagggtttttttccctccataagtttaactttaaaactgtatttaaggaatcaaatcttacaaaatcctggaagattttggtaatgatgttgataatttcagggaaattaatcaagtacctatattgatttaaaagtgtattttattcagtagtttgaggatcttgccatggaagatactagcccagcctagcagaaaagtgcaatatgtatagcatactttgacattttaaacatgatagtccataaccattttgaaatgctgggcaaactacatgaagttatttataattaattcacagctaatcaggcattttgaaagcttaattggattcaaaaaccataatgttggaatttggtaaaattttaatgttgatttttactgtgaaaaggtttttataagatatacacaccctagtttaatgttgtgtcttggtgtggatttacagatttactacaggtattctgaaccaggaacacaatcaggtttcaggccagtttgatactggctgtccttaattctaatatgagagtaggacatcatactaaatgttatgtcagtgggactgtactgtctgtggaacttagcaaattaatcattttcttcagacttgaaggagagtgataaataaaatttggagtcataggatattgatgcacaatttaaggattaaacatttttaatcaattgtggatgatggcttattaaatgttgacttcctagtataaaactgcaagaataaaagtaacttctccagctgt

SEQ ID NO: 14515 - DNA, 127 bp, Homo sapiens
attgtttctgagaactatagtaatatggcttggatatctgatgttttcaaatacaaaaatgtacaatttatcctttgagagagaatcatgaagaaaagaaggtcaataaaaagggctaaaaccttgg

SEQ ID NO: 14516 - DNA, 575 bp, Homo sapiens
tatactttttaaagtattttgtctgatttttaaaaaaaattgactgaatttattcaaagttgaaagtgtcctttctctctctctttaataaactcagtttggtacttgataaataatcatagtcttaaatgttagaaatcctatataatattatttatttaaaattgcagatttttaatttaaaatacatttttatttttaaattttgtcttttcccttttttttcagatcaacaacccctccccgtcgtaaacgctgaggaatgatgtggcaagaatgccatgatgttctttaaaaaaattccatgagttttaagggcttgtctcattatagaggcacattgtggctgtgtaggtgaaaccagaatcttttttttttttaatctgtaaataggtgtactttttccaatgctgctccaagttacttaataggatttctttgtattacgtttttttcaaaaaatatagtgcataataagactataaacatgccattctctttcagctgtaatgttcttaaaattattcttgaatgtactgtgatgtcaataaagctctttagttcatttttgttaa

SEQ ID NO: 14517 - DNA, 1030 bp, Homo sapiens
gaaagtacatggatcaccatgagtctagacatgattgtctatcttactggtattatcagaaagggcaggtgtaccgatatgtttatgcccattcttcttgtgtacttgtgactcttagcagcatggaagagaagtgtaaccatgcaaatacaatgagcttaatatgctaactttagcaagatgtaaaatgttgatctatattgtgggtagggaatgggatagtctgagatacccaggcttcatgatggtgtatattatttcagcatattataaactagtcactaatgaaaatggccatccatgaccattgactcaaaactcaccaaggaacctgaccttgccctccacactgtggcctcactgtaacagtttcctcaaggttcctaggagggtatcaccttagagtgaagtctaaaatttggctattttttatctataaaaaatgtcagttttatatggtccaatactaataccctcaacaactaagccccaccttttagaataagttaccatttattgcacacatgcaatgtgtaagattacatgtaacaaacctgtgaaataagtattattacctttgtttgctaaggctcagaaaggagaaatgataggcctaatgctgcaacagctatctaagagctgagctaacattcagctctgcctgtttcttttctactgcacgaccttgacaacctttacttatcatactggagaacccagtaacttggagtttcttttgctttctcctgtagccctacaagaggagaactaaagtctgatagaaatgagttgatgttttaagcatcattttggattatctttgttctcacacctgctaactgtagaaactggcatctgcactttaataataatactttacttctggactttaagcataattaggaaacattcctggccgggtgcagtggctcatgcctgtaatcccagcactttgggaggtggaggcaggtggatcacaaagtcagaagttcaagaccagtctggccaacatagtgagaccctgtctact

SEQ ID NO: 14518 - DNA, 1486 bp, Homo sapiens
tgttttgctgaaatattttgttctttaaggatctctgaaacatatttatagtttaataccccattaccagcatttactatgccacagattgttagagagtataacttaagttactgggtatttgatacgtgttcctataaaatcaaagaaaacatagcactagcattcagggttatacacagaaaagggagctaaattgaatacacaaatttcccctctaattatatgggaaccagaatagataaattttgacttgaaaaatattcatgtagatcaagtgtgcatatatactacatgagaggactgatgaatgacaacattgcattgtgactatccagtgatcctcaaacacacaaactattacttacaaactgcggtatacattttacatatggaaatataggctatgtaatgtaaatacatcaaaaatgggtaattttctttgactctgtcacactaaacttcttaacgaaatttccattcccaaaataactgagaaagagagagatacatcttataaactgacttctttgtggtttcaaatcagccagctcatttggttcaggcataaattagagaaatggttctggatatggtgcaaaaatgagttttcacctggtatccattataaacaatcaggaagaggtaatttttcaccttgcttttcagttagacaaggaccaggattgcactgacatggcgctgagggtttttctaagtaagaacactgagatattgggacacacatcaaaaacctggagtgctcaattggaagtagttctatgaatatggaaaggccagaggcagagtgaaataaaatgctatctcaaagtttaacacaatttaagggctcagcataagtaaacaacatatttggggtttgcttgtaaaaccaactaaataaaaaattcaaaccaattcacccagaaaaaagaccaataggtgcaaaaataaaaggaaaaccagtgaagtgccacatgacagcagtgttaagtgtttgaaaacgtttcaaagcacatatgtgccaatgtgacaacatgtggaaagcctcaggagagagtctaagataaaagcttaggctgatagacaagtagttaagagctaagagcagtactctgaaggaataggcaaaatgtttattttccttattgtttgtaaacaacaaacttggtcttacatctgtgtggtatagtagaaaggccagctgactagatctctggattctaattttggccctacctgtaacttaattttgtgaccacagttgtaccattcaccgtgcctgggctctagtttcctggtttgtaaggcagccccagcgttcatgttctgtgatagagcagaactgaacttattacctaattaactctctgctatgagttgtcaagactgatcattctgttttttctgtacacagaagtttagatgctttgtgacttaagcaggtgtgtgggctcctttaggcaggttacagttaactttctag

SEQ ID NO: 14519 - DNA, 2805 bp, Homo sapiens
caaaaatgactaaaatggacaaaagaagaaatagaaaatctgaatatttgactattaaaggaatttaatctgtaattaaaaaccttaagtacaaagaaatctatatgctatgatggctttaatggagaatgtcataatgtcatttaaaaaggtatgagagtactattgtagattaaaagaggttaaaggcatataataatcaaaatgtaatgtatgatccttgattgactcttgaatcagaaaaaaattacgtatttttggggccgttggagaaatctgaatatgggctggacatcattaggtaatattagatctcaggtgtgataatgttgtggctatgtaagaggatatcctaaatctcaggagaagcatactgcagtatatatagtggtatctcatgaagattaaaatgtactgtcaaatgtgtcagcaaaagaaatacacatgatgtgtgtgtgtgatcaagtgtttataatgagtggattaataaatatgagaagatagggtgatttgttgtaaagtaataaaggtttaaaaattacatgattcagtagagaaaaagcattttatgaatatctaacattacttatgataaaaaatctcagcaaactaggaatagaaggggattttgttaatctgataagctgtagctataaaaaacttggagaaaacatacttaatgctacaaagttagaagcttccctgaggtacggaattagacacaaatgcctgttaccacttctgtttctcactgtattaaaaatccttgctaacataatatggcaagaaaaagtaagggcataaagactggaaaaaaaaacttttccatttttcacatgactgtacctgtagaaaatgaatttaacaaggttaatataaaaatcaattttatttctacttactagaagcacattaaaaattacacttatctttatgtaacgtaatacattttaccttaaattttaaaattttaatttattttacgtttacaaaagcatcataaacatcaaatacgtaggagtaaatttaacaaaaaataagcaagacttcatggaaaactaaaatattgagagaatttaaagaagatctaaataaacagagggatataccaagaattggaagactcactattataatgatatattttttacccaaattgatctgtagattcagtgctatcccaggcacagtcttatgtttgagggtgtgtgtgtgtgtgtgtgtgtatgtgtgcatgtgtgtgtgtggaaattgacaagggtaatatgaaagttatatggaaattcaaaggcaaagagcagcctggttaactttgaaaaataaaaagggagaacttactctagtagatcttaaaacttattataaagataagtatacagtgtggtgttggtccaagaataggcaaatggactagtatgacagaatatagcccagaaacaaacctacggatagaaatatacttgatttataatgaaggccaaacaatagtgagacaaggctattttttcagtatatggtgctgggtcaactgcatatacagatgaaaaaaagtacctattttacaaataattttaaacagcctacagaattaagcatgatacacaaaacaatacatcttctaaaagatgtaaaagagtgtcttcaggatctttgtatgtgcgaaaatttatcaaacagagaacaaaaagtacaaagggaatgattaagttggactgtagtaaaattaataccttctatttattaagagtaaaaaggcaaaacatggagtgggagaatatagcttcaagatatataaccaaaaagagagcttttatccaggttaaatacgagctcctacaaatcaataaggaaaggacagataatcctatatgaacatgagtaagagctttgaacaaggacttcacaagagatagttgaccagtaaacatgaaaagggcttcagcttcattggtagtcaaggatatgccactgcatgcccattagaatggttaaaatgtaaaagactgacatacctattgttaggatcaagaatgtgaactagaatttttgtctactgctgctagagtttacaattggtacaaccactttgagtaactgtttgacagtgtctactattacctactgtggttggacaagtgaaattttaaatcttaggacataaatatccaataaaaatgcttgtacatacatgtatatcaaaaataggtgcattcattgcaacattatttgtgatagccttaatgtagaaacaacccagttcattgttaaaaagcttaagttgtagtatgtagactgccttatagcagtaacggattacagctatgtataacattgtaagtgaatcttataatgttgacaaaagaagccatacaacacatattatgattccattaatatgaaactgaaaactaggcatgaccagtctctggttttagaagtcaggatagtggctgcttttgaggaaggaggtagtgactaggagtgaatatgagggaggtttctggggagctgataatgttctgattcttgaagtagttaaccagattacacaggtgtgttcgttttttgataattctttgaactgtatgtgtactgtatattttcttgttatattcaataaaaagaattactatgatttttatattacatagattaaataagaagtatttcagattgataagtaacacatgcttgtgtatttatttagcttaaggtttggctatcatggtgagaactcctatgtaccctgctcaggtcctggtaaacagtatcataagtataataaattggtgtttttcattctca

SEQ ID NO: 14520 - DNA, 653 bp, Homo sapiens
cttgacctgaacaatccatttgaaaggagtggctaagaattctctctgttcagtcatctagacaaatcgaattacttgatgtttgccttgaaagaatcaacttctaacctcaaccatccaggaaattgacagtggctgcagtattgactccagtgacataaagttaaccacagtggccttttaacaaatgttgccttttataatgttatctttatgagtttcttgatatgtaagatgaaaaagcatttagaataatcttttaatttgtgtatatttgggatgatatttaggagctatcaatcaaattttacatctcacaatgtactgtttacatggatattggctgctttttttaaggaaaaccacattgagatgtgacaagtgttaggacttgtcacagatttctaactctgccgcataaactataaatctgtaaggtggtacacagcgtgtcttgttagcaaaatttatactttgatatgatcacatgtagaagtagcttcaagaatttcttgtagtcataaatgtttaataatatatgatgtaaaattatattatggagcctaatgatgataacaaagaaaacaatatactgatcttagaaaatgtagacatggttaactgggaaataaaatatagagtggcacttcaag

SEQ ID NO: 14521 - DNA, 1569 bp, Homo sapiens
tgaagtctggaaaactcctctgactactgatgcacaattcagaatggcagaagtaatttgggaaaatgtcaacaaaaaagcagcctaaatgcaacccataggcagggctgatgcttccaatttataaaggatcatcaggttttctgtttctctcttttcccttttatgttttctctgtttgtgatacaattagaaaatataaaatcacagtagattttattttttaaaatgctaactgaaagtaatagagactgtcctttttcataattaattttatccaagattgtattaaggcaaaatctgattctacattccacctctgctatgtaactgtcttgttaaaagggtgttttctcctaatttctgatatattatatgaggtcatccagctggtgtgttcttttgcatgtaaactgccatttatattttagaaaactattgtatagaatggatttagattgtctataaagccacaaatacgtattttgccacagtgtattctatattgcaatgatttttttagcattttaatattttaatatatattgtaaaatttagactgatgatactaacagttgatgaaatgacatataatttatatatgaaagcttacgctatattgtatgaattatttgcatctttcagtggccagttttccatatgtatatattatggtctcaatgtttttcttacgcctcattttaatttataatgaaggtaaaattaaaatgtattttaccacgtttcttttcattacttttatctgtgagctctgacacatctgaaaaagtaatctgatgtgcaaattataatttaaatatgttaatttttttgcttcttaaatttgcttttcatcattaaaatgtcaagttcaagtgatatgtgcctaatatcacttggatgttggtgggtttttgaatttttgggtggttaatcagttttattttgaaaagacgtacttgaatagttacagcatatgtttgaacaggaagtaggaacatgcatacacgaagaaatgctaacggaaggatttgttatgtttaggatcttcccttggaaactaaaaatagaatattaatgacattactgtttgtagaatgacatatgcagattttctcataagcagtcattgtgtttgccagtaatgtttgagagacatgtaagttgaaagttttgctaaattataaagctcctttaattcgttggttttgattctcttattctcttgtcttttctaaatgttaacaaaatatatcttaacagattacatgaaatttaggaattatttaaaagttaccattagctctaaaattaagattcggatgctttatttatagtaactgaagctaataatgttttatgttttgattttttgaaatttaattgtagaagtcactgccttctgagttttcaaatagataaccacctttaatattacactgcttataatactaatgtttacagatatgtttctgtttataaccatataatacattggctttgtcatattagttttttttgcaagtagttatgtaaaagagatagataataaaatattaaataactgag

SEQ ID NO: 14522 - DNA, 4263 bp, Homo sapiens
tcagagagagaattcaggttaccaagacggaaggtgtcttgaagagatcctgaaaaataccagcactttttcatggcttttaggttattctgctttagtgcatccagactggtggagtcggagggaggaagtgaggaagggtcaaggatggaagagttctttcacttaccctttttattagtcagcttttaaagtaattgttttactgagccttctgactatgccttgttctcttttgagatatatattttcacagtcttttctagatatattattgttttaacttaacaaatcttagcaatctctcaatgccttttcacttatttttttccaagttatgattctttttcctcacagtcttttttgttccatagcaatgaggttgtccatttgataattttaacaaacaatgtaagtttaaaattgaggctaaggtaacatgaaaaagcagggaatctcaaactttattccatatatacacacacacacacacacacacacacacacatacatacatacatatatatatatatatacatatatatacatacacacatacatataattttttttttttttgagatggagtttcactctgtcgcccaggctggagtgtagtggcacattctcagctcactgcaaactccacctcctggattcacgccactctcctgcctcagcctcccgagtagctgggactacaggcacctgccaccgcgcccagctaatttttttgtatttttagtagagatggggtttcactgtgttagccaggatggtctcgatctcctgacctcgtgatccgcccaccttggcctcccagagtgctgggattacaggcgtgagccaccgcgcccggcctattccatatttttttaatgggacattttagagaaaggtgtgatttgactggttttatttttctcccaggccagaagtattactccactagatcaccttacttaattgggcactgtgtggataacttgataatgaacaaaactctcagattttactcacattacccttgtattatgccatttataaactgctctgaaacctgaagctggaaagataacagatgggtttctgagcacggggttaacctccagctaaactcaacttccttgggatttggagtcaccatgttgtgcacactctggtgtgggaaacactttatgtagggtgggaggacaggggagttaaatggctgggcaggtgccacaggatgaggccactgaaagatctgcttcattctttgatctgtattctgaagttccagattgttcatctagaggcagagacatctcttttaaaaaagtgccagatgccccagtgccagagctgcgaacgtgaacacagtggaaggcagagggtttactacaggccaggccatggacaccccacccaggtactgcagtgagggccttgattccagagctctttttcctactgaaatcatggtttagtaaacagtggcatttggctggtgggaaatgcgtaactggtcagtgtgtctggccagcgtggctgtggcacttggccaggacgctccgttgaatgaagctcattgattggccatgctggtcatgtctattttgcttcatccactagaaccaactttgagtcagtctcctgttacgttaaatggctaagaaaagttccaaatgaagttgttctcaggtgaactgagccaaaagaagcaactcttaccatgaggtgatttctgttagaggagacatataaataagctcatctagggtcacctcattttcctaaatatgtttttaaagcaattattgtagtaatttcatttgagttaaatttacatgctcggtcactcattgagaaaatttacacagactctgaatccagttcctgtcatcttcagatgttggtttattgacatcacagtaaaaaggctactgtcgactggacacagtggctcacacatgtaatcacagcactttggggggccaaggtgggtggattgcttaagcccaggagttcaagaccagcctgggcaacatggctaaaccccatctctacaaaaaaaattagctgggtgtggtggtacatacctgtagtcccagctactcagaaggctgaggtgggaggttcacttgaacctgggaggttgaggttgcagtgagcacagatcacaccactgcactccagcctgggcaacagagtgagaccctatttcaaaaaaaggctgctttcactgtactgctgcagcagtctcttcaggtagctaaattaggagcttgttttggagaaatgaagcaaaggtgaatgacagcctaggcttgaaattataaagctctctcaggttgaactctctcgtgcgctctcgctctcactttcgccctgtacctgagagcacaggtgtaactgtgatgtcatagtgccgagactactttcctttaaccattggggttaagttgggcagcccatttagtttacacgcgcataagactaatttacaaaatcactctatacagtcattagatgtaacatccttccctgagtagaaagtaatgcatgtgtttggagattattttctgtaatgctgggaacaaacctgttttaaaagcacactgctaaaagtaggtgatataagaccatttgctgtttttattaaagtatgtgtgtgtatcagtgtctcaatgtgaagattgtaacctcaagattaggaatcttaaaagagccacttagcctgaatgggaaacgtgagactatttttaaacacacacctctaaggaagaagcctcccatatagacttgatctcaaagaagcagataagaagacagaaaagtgttttaagtgtaagatctcctatggagtactttaaattcatttatacaaatgaataagtgtatctttgtataatgcataaatacatagataaaaacatgtttgctgccaaagttcccaataagatgcttcctgtgttttttggcctttacttagctgaatgatcaaagttcagaaaatggtctgcaaaagttactccatatacaaccccaaatctactactttaaatgtaacatcaactcagttgtatgaatctggagtgtaatatttatattagaatgtatatgtcatttaaaatattttgaaagccctcataaatatttatatttactaaactaatagcatagacactatataaatccgcagtgatgcttatatatcttaaattagtaataatgggtgctatataattattttcagttactatccctgacactctggaatcttctccatttctccctatcactcaatttcattttaatcattggacacctttgcgttttgctgctaacagtgtgtgtatgtcaccctctttatatctggttttcccacttgtctgaagctctcctgatcttagaacctggagctgcagattcctccatgtcagctcccatcacggccccaaagacagagtcacttggttgctgagtcacttggttgctggaaaaatctttggggaaagctggtataagctacacactgacctgtccccagtgtttccaggtaatgacttggcactccagagaaagtttcatgctgttgcgtgtggtggctccaagccaagcacctggcatgcaggtcagcccttcccagcgggcgtggcgtcgtcctcttcacagatgccacgttgcagccccaaggcctcaccattttgcgttttttagaaacccattttcttggtcatttataaagctgctttatagatatctttgatcctggcatgccttggtttcctctcccttccctctttccaatcctggtttcctaacctcctcttgtagtaattctcaactcaactcaaagtcccaagaatttggaatggtaggatgctgtgcggggagctcgaggctgaggcataatcactgcttcggttctgctcatcaggggacacgctcccttactcatggcagccatgtttgattgtcacagagccccccgaatactctgtctatagtgacacactgtaggtgtcataaattttaagaaacctgcttttaagtactatttataggtttttctgttatacttgcaacctagttttaaaatacatgaggattttatgaaagctttatacagacatttataggaaactcattctttgattttaggtgccatttaaattgataacacttactttataaaaagatgctttttgtctggatagagccttatagtttaaaatatcttcatatattgccatttgatcaaataaatttcttacttag

SEQ ID NO: 14523 - DNA, 568 bp, Homo sapiens
catcaaagtctgaaatttataagtataaaaaaagactctctcttcatcattccccagtgaaatagcaaaatacaaaaaaagagctccctaatgtttttataaatcaaattcagaagcgagatgccattgccaactgttttattcctttcaacaactgcattgtgaataaactttacaaatttttcttgtatttctcattgttataattggggagggggtggataactatgggcagtttgcccttttctgcatcaaaactgggagaatgaaattccactttctcaattcttttctcacatttactcaaatgcattgtcttgccctatagactcaggagttgcttctcaagaaagagccagcaagtattctcagcctgagggtgggttgctactgtccacataggcatttccggaattcacttttttgctacaacctccagtgaaagcaattatttattttaaatgtgcagttacttgatgcgactaaaaagtagaataaatgcaagagataataatatgtgaatcttgaagcctattttattgctacaaataaaataacatttaaaaag

SEQ ID NO: 14524 - DNA, 511 bp, Homo sapiens
acagttttcgtgcttcctcctgacagcgacagaaaacctcaagggctttcccacgttgacaccaagaaaccactgggcataatgcttccccacgggaacattattcctgcactcacaggctacagttgaacagaactgccgtgggaattttatcttttttaggcttctcctttttagcaaggccttggtgtttctttttccaccctgtctaggcacatgtggttttttggtgttttttttaagggcatgttgggataaatagctaaatggcaacaaacacattgtgaatattagattgctgaattaaggatcatagtcgggcatacttatctatatccataacctctatatctttaaataaatgtgagaactgttctcatggagaagacttctttgcaacaataataaatgttatttaagaatgacaggcttttacttccggtttcttcatattgaggggcaactccagaagtggagttttctgtgagaataaagcatttcacctttctgc

SEQ ID NO: 14525 - DNA, 2061 bp, Homo sapiens
aggatcaactatttgcctgaacagaatcatccttaaatgggatttatcagagcatgtcacccttttgcttcaatcaggtttggtggaggcaacctgaccagaaacacttcgctgctgcaagccagacaggaaaaagattccatgtcagataaggcaactgggctggtcttactttgcatcacctctgctttcctccactgccatcattaaacctcagctgtgacatgaaagacttaccggaccactgaaggtcttctgtaaaatataatgaagctgaaacctttggcctaagaagaaaatggaagtatgtgccactcgatttgtatttctgattaacaaataaacaggggtatttcctaaggtgaccatggttgaactttagctcatgaaagtggaaacattggtttaattttcaagagaattaagaaagtaaaagagaaattctgttatcaataacttgcaagtaattttttgtaaaagattgaattacagtaaacccatctttccttaacgaaaatttcctatgtttacagtctgtctattggtatgcaatcttgtaactttgataatgaacagtgagagatttttaaataaagcctctaaatatgttttgtcatttaataacatacagttttgtcacttttcaagtactttctgactcacatacagtagatcactttttactctgtgttaccattttgactggtcgtcattggcatggggtggatatagggcataggattacttgtctcagaagctgtcatagaatttcttgctgccaattaaaaaacctgtgttctttacacactacacgtataaatattgtaactgttcatctttgttgttttatcactgtaagcctgtcaaatcatagtatcctaagcatctgtaaatgctaattttgcatttttggaaaaacccattccttccaagctagtgtttttcattggctccaggtctaatttttcactgtggtccctggcagccagtcttttgaagtttaaagattacctgtctcttgactgcagtaccttttctttaatttttaccaaaaatatccagaggttactggagttcttattcaatataaggaaagtttgctgcactttattaccaagcctctgggattttaccagtcaaacatatttgtgcattacatttcatttcttgtgagctagctggctgtccatattgaatgttgacccatttgagtacgctaaaaggcttacagtatcagacacgatcatggttttagatcccataataaaaatgaatgtttttcttataaaaaattatacaaatgctgaagtgagattctactattgttcattgcttccttttctttttccttttgcgattttcactgattaatagcacatttcttcacaaaattagataaagttggtcaaagaccagatattctggaatggaaattgtaaagcttaatcaaaaagaatagccagtacagcatacaatctcagaaacttagaagcaagtagaaaataattggttgatgtaaacgaaagtgccattttagtaaaggcaggaaaaaaatagcaatatttgagttatgtaaggataaaaaatccactgacttgtatttttgcacaagaggctggtctgaatatgattgttcacattaagagtgtttattcgtcggttcattttggggattttcccccttgatgttttgacagattgaagtgagctttagtgagcaaaaggatcagaatgcagggaacactaagctgtgatgaagaaagtgtggtaaaaagccagagtagttttatacagacaaaaccagtgtcaggcctttgcagtaggcttgagtgaacttctgatctagatttgaaagtaaattttatgaagacattgcccatttttacttcctcattcattattgtaccagcatcatagctttattactctaatcccaggtaagtcaagcctacaatgccctagaggaagagtaaaaccagaaattcatgctggcttaaataatctatttttgtttcttttcatttgaatatttaaattttatggtttattaaaaaattaaat

SEQ ID NO: 14526 - DNA, 966 bp, Homo sapiens
ataaaaatgcagtttagtgattgttgacgttcttatttggtgagtgcctgtgagcccaaatttttttctagccatccctttcaaacatttttccagattagattatacattccatgatacaagctttaaaaaataaacacaccattttggccagtaattgatataaaaatatcagcacttggatttgtctgtagtcagtagaaattcgaagttttttcaagctgttccttcacactggctttgcaggttgttgtggcaccttctgttttactagcttaaactactttattgtcttttttgttttagagacagggtctcgctgtgtcacccaggctggagtgcagtggcacaatcacagctcactgcagccttgaccttaagcgattctcctgcttcagcctctcaagtaggtaggactacaggtatgcatcaccacacccagctagtttttttgtatttttagtagagacagttttgccatgttgcccaggctggtctcaaactcctgggcttaagtgatccaccatgtcagtctcccaaagttctgggattacaggcgtgaaccaccctgctgggcctgatcgtcttaatgtacaatactaaaactttcagtgtatagatggatgttggcatgaagagataatttaaagctggttccttcttgaattcatcactgagcagctttctaactgccaaggtttccttttttgttcctccaccataatgtggtcaccacagctcttaaagttctaaatctcttagtgtcatatataaaaatctgcctggtgattcatttgtttatgctcttaatattgaaaggtgagagcagagtttctaactttttaaaacccttacatcttgcataaggattaggcctgtttcggcaattgaaacatgcttctctgagggcttttccatggaaattgcagccttccaatggagcccaaagcttgccactttgatgtc

SEQ ID NO: 14527 - DNA, 2060 bp, Homo sapiens
catcaaattaaaaagacactattgttagttagctgaaaatcctagggaatgaggttgattgggagcgctttcacgatgcgttaatgacttttaaaacatatgcatttttccttccttttatcacattgctaaatgagttctgctttctttttggaactgctacaaacaaaattagaagaaaaaaaggtcaagcagttttcacttgtcacgccagaagcacacttgaggctgcagtcgcagaaataattaatgagattcgctcctgtgacctcagcaaatggacaggaaataagtccttattgattggaccgagccagggatggcgccagggcggtggcctgtggtttttcctgctagagaggacaaagcaagttggaagctgcaggtgtcaagagaaatgctctcaataccaaccagggaggattgtctaatcaaaaactagtgaccaatttgtcataatggagagtagttcaatggattgagaaaaatatgttttatttgttggcttgtaattatgtctctggattattattattttttttttagatgtagttttgctcttgttgcccaggctggagtgcaatggtgcagttttgactcactgcaacctccgcctcctgggttcaagtgattctcctgcctcagcctcccgagtagctggaattacaggcacctgccaccacgcctggctaattttgtatttttagtagagatggggtttcactatgttggtcaggctagtctcgaactcctgacctcaggtgatccgcctgcctcggcctcccaaagtgctgggattagaggcttgagccactgcacctggcctcatgtctctggatttataatgcagtatgaatatactttgtgctttatggtttttataatgtctttttggagaaattgccgaaaagttgccaaatacttgaagtaggagattaaaatgttatcaaatgttaaattggttatattaggaatagtctgtttttctttcctgaagatcagtttttttattcaaacacatttcaaagaaccaaattttttttttctttaaggaaaaaggagctttttttcaagtgaaatgtattcatttgtaatactttggtttaaggcatactttaatttttacgagtttcagaaacagaatttttgtactagggaattcattggtgagagtgttcttttaacctcagaatgtcaaattttggtcttgaaccacagacatccaattacagaaagaatataagcaatctcacaggcctgcaatcggacactgtctctgtgtggttcataggagatgatttttgaggtttgcactcatgcaatttgagaacaccgttgacaagaaggctgagtttacataaatgatctagattgaaactcagctacctttcttcctcatgtggtgtaattacagccctatctggagacagcgaatacagcaaacagattttattacctagttcgctcaaacactacatgaagttattttagttaaagccctcccccaaaagttataaaaccattttatcagggcccaacatgtggcatgcaatgaagagaaaatgtaaagctacagaggttaatgtattgtattataaaatattttaagtgtactcaaaatatcataattgtacagtttatgccaccataatttgaggcctatagatttagcttaagagaacactgttctgtttgaaatgctttctgtcactgaaattggcttaattagtaaccatggataagatgctttagatcagactaggttttaatcattaacttccacaaagaagtcatactttgcgttaggtgtgctggttggatgtgcaggaacttcagcaagcagtaggttttactaagcagatggtcgggcactgcagggcaccaggcaggatcctagggcgcctcttattctgcgttagcatctggtttgctgtatgaccttgcacaagtcacttccttctgagcctcaattttctcatctgtacaatgagattcaaaagttgacctgaaagtcaagtgtgaaaaaaaaaaagagattaaacaagataattatgaaattc

SEQ ID NO: 14528 - DNA, 2226 bp, Homo sapiens
cttaacatcccttgcccttgcgcggggagcacagcatctggggaagggggagtgtggctgtttaaacgtgggactgctgggagatcagaaatttccacaagtcctttcatggatcttgaggttctcaaaaacagccaaactcaacctttgataagcaaagaaaatcgtgtattagggcaggctaggccacaggatacgtagactccaaaatgtacacaggctcaaataccatagaaatttttgttcgagagccaaaggtgaatgttcctgattcatggatgcatctcaatatagggacataggctccatctattttgtggctctgccaccctctacagccttcatgccccatgcattagggaatagaaagggaaagaaggtgtggagaagacacaggtgcttccctgcaatctgaaagtgatgctcatcacttccactcacatctcattggcaaaagctggtcattttgccacacttaaccataagggactctggaagctgtaggttagctctgcccaggagaaaggagaaccagaccttggtaaagaattgtctcttgcataggaagtgtcaccttcaggatacaaatacatgagcagaggcagagttaggcaaaattcccccaatgctggttgtaatgccacttctgtctcatccactaaagaaagcttgttggaatgcagtctacaaaagcgctataagggctaaaggattatagtaatagcttgaaggcccttctgattgatgttttaaaaaatcattttcaagcttcagtattttgatagtgcctaaaggccatagagtatagtggataatcactgggactagagccagacagcctgggctgagatgctggatctgctgcttcctgcctaccttttgcaagtcttaacttacctgtgcttcagtttcctcacctataaaattgtgataataataatggcagcacctgcctcataggattgttgggaggattaaatgagttcatacatgcatttagtacaagacctaggaggtaacaagagctcaataaatgttagtagttacagcatagatctttttaacacatcccttaacagatcacagcccatcagctccacagctgagaactgctgaagaaagaaggccccaggccaaggagtctgggagtcttcatcttgccaccctgtagcccctcagtgggcaggctctgtcttctgtggcaagtcacatttctcccctgagcctaggatccttccaccagtgaccccagcaagccgcacacgtgagctattttgtatgattcaagaccctccacacattctcttccaagagcctcatccaacccagatgagcgtggccctgaccagcttcccctggccaaggatggagaggtgagaaggggccccttgccggagaggcgttctgaggggtagagcgcagattctccctccacagcagctcttaccaaatgtagagatgccctgcaggccactttccaacactgtcacacagggccatgagccaggcagattaagtgagcagagccctattttccaaaggagagcaacattgttccatttgattcctaagaacaagagaaagggacaagatctttcacgaaccaacactgtaaagtaaaccaggggcagccttgatttcataggtttgtccccagtgttagcttaatatctggcatgtggtaggtgttcaataaacatgcatcatgtctgtgccctcacggtgtccctttgtcttcttgtcaaaacactcatccttatgtccctcttgagtttaaatgtctttctctcatcctcttctcctcagccccattccccttttctcagggtggtgatcacaggacaccatgctgattgaattgactcataatcccagagtcccactttttaaaaaggagatatttactctctctcccactcacgttggtgcaatctcagccctatgtcttaaatgcaggatttccagcagtaagagggaggcatgatttggttggagagaacttctatcactcactcaacaacagtctgccctgttcagtccaactggtgacccagggccagggaatccagggctcttcagagggcttcagcatagctcctgtcccccagcccctcacacctccttccagttgagccctaggatgtcctcctgtccttcactttcatccccataccggccctttgttctcctgtgtatgagtctgttctgctaataaagacatacccg

SEQ ID NO: 14529 - DNA, 1385 bp, Homo sapiens
gcagtactctgaatggaccacagtgtttgcacatatttgcaattttttgctgttttggaagtgtatcataaaccagaaacagtacagaactgatgttgagggaggtgtagtttttttactcttgaaatgggtgcataatataactaggcagtggcggtgccttggtacaacctgaaaaatgttaaggcttattgaaacctttcaagtaggggatggtacatttatttcatctgcaaatgataataaatcctttgttattataactgtccagaagtgtgggctatgtattatctgatcagtctatggtcccagtaaaagtaaagatgcaggaaacacagtctgtaaatgagcgacttttctttgttcagctttagttttagcaaacaccacaaatatgttttaagtaacatcgctcaagtttaagtaacatcgctcaagttgataatctcttgataagctctgttgttgacattttgcagtgatacaacagctccactcatagatttaaacttttatttttacttatcttggtcataagttggcattctctcacattccacatgatatagagggctacgttttggaattttccttttcttaattgcccagagttatcagacagattataaaaatggcttttaatggcttaaaccatttctaaacctctatcttagcagatcaatgcaggatctaattcttttgataagttctagctctaaaagtgatagtgggactgtatgttttctgatactggtggcttatgttattaaaccttttttaaaaaaggttcactctaaaagctgaactacatccttagttttcagtctacttgactctatcaggagctttttaaggaaagtaagtataacatgcaaaggaagctttttttgtattcattttggactcctgtcaataaaaatagaagtttgttgactcgttttatgtttcaatggtgtgtgtctttttactatcaggacataaatagggcaatccacttctttatttttcaactaaagattgaatagtattgtacattactgctaaagtgactgctatttctgtatactgtagaaaaacccaggagtgagagggatttcccctcatagtacaactggaaggatagtgcttgtaaagagtagagatgtgtacatgatgaatcattgagggagggtggatatttttattcctagatatggaggaaacataagtctgtagtattataaaactgattgtaataattctttcctatcaaaatctccataggtcaaaatattgttggaatactaaaatttgcaaccttgtttactttaaaaggttgccactttcagtgcagaatactaccggcatcttgttactgcaatagttggaaataaaatgtgaaaatt

SEQ ID NO: 14530 - DNA, 3374 bp, Homo sapiens
gacctacaaaatggagaattgacatatcacgtgaatgaatggtggaagacacaacttggtttcagaaagaagataaactgtgatttgacaagtcaagctcttaagaaatacaaggacttcagatccatttttaaataagaattttcgatttttctttccttttccacttctttctaacagatttggatatttttaatttccaggcatagcaatgttatctattttaatgtgtatttgtcacaataacagaacatgcaagaacaatcattattttattttataggcatttgattactattctagacttctggtatcttcttactaacataaatatctcaagtagaaaagtttttgaaaactaacatttaaaaattaatcagttacagtaaagactttgaaaaagaaatgtacttgttaggaagtagcttaattaccccccattgcagtattattgttatatatatagttaatatgttgtacatcacaataatatataattcagtctctagtttccctagagtcatttttgaaaccactgattgcaaacctccctgacaatttttaaaagtagtaagccacattacatttatctttgtaaaaagatttatggtaactggtttcttacttgacttttataaatagtattttacatcttatttttgcctttatttcataagtaatttaaaaatcactggattgctttattatattcagggcaatatggattatttttataccaaggatttgcatcgtgaattacattaagttatttggcaatttataatttattactactttaaatcaaatgtagcattatcacactgtatttaaattgtcattttttaaaggaatattttcttcttaagatatatagaggattttggagaagagagacaggaggggtaaaaccagcttaaggttcagcgagcagaaagggacctgagaggatgctcactgtaagactgttggacagtggtgtgtattgaggggatgaatcggaacgatagtctcatgcagaaaatagtgagattaagatcatccttattgtttctaaattatttcaatcagatgaaagtgatacgattgaaatgaaatcacatagttcgtgctcagaaattctattttggtatgtttgtattagcctttagaaaaaacactccgtttcagaattgttcacagttttatttcttaggtttttagagttcaggatttcatttattaatttcttcttgcttttttggtggaaataggctttgttgtaaacattaagaatataaaatctcctctatatagaaacaagaattttgttaaaaagagaatttgaatcccttcctatactataaaatgctctatagggagacaaagtgtttcttttttcttttatgtttactgtttatgtggagtgaaatataaggctcttggatgtataacatactcaaaagctgttacactttctctgatctgctgtgatccactgaaaatgtgctggggtttgttctgctgtcactgtttatgctgctggaacttagcactgtcttgatttgaagcatatgattgagagccatttgaagcaatcttcattaatgcagataaaacaagtttacatgtgcagagttagaaaatgacatgttcaattctgtaagtggtgactttttgagcacctttcagtattatgtatttgtaaaaaccattgtttttggatataaagctaataagcactttaaaaaggaaaaggcagcctttactattttttctggttgagtcattgctctttagacctagcatcagcaatagatttcaaagataagtattaagcgctaccctaaagtgtgtaagtttttcattttgtcatattgaaaaatgatttgcatagtactgaatgttgacacacagcttatatgtatttacaagaatatctttaagtgtttttttgacacattaaaataaaggaaataaggaaattgtaagctttatttggatttttaaatacatttttaaaatttcagatgtaatttaacatcacatttgtttttcaggtattgagtttagatgcctacttttatgagtaccatcagctggacacagtgtctcatacctgtatttgcagcactttgggaggctgaagcagatcgctggagcttatgagttcgagaccagcctggacaacatagtgaaacactgtctctgcaaaaaatacaaaaattagctgggtatggtggtaagtgcctgtagtcctagctacttgggaggctgagatgggaggatgtcttgagcccgggaggtggaggttgcaatgagccaagattgtaccactgcattccaacctgggcgacagagccagaccttgtctcaaaaaaaaaaaaaaaaaaagaaaaaagaaagtactgtctgtcttaaattttgctgcaaataaaaatgtactttggattatttattgttgaacttgagagatagaaataacatcagatatattttttcttttttttttataattaattttttttttttttttttttgtagagacagtgtctcactatgttgcccaagctggtcttgaactcctgagttcaagagatcctcctgccttagcctcccaaagtgctgggattacaagcataagcaccacacctggctgaacatcagatattttaaagtgtagcccagagtctagttggtaaatgttacttatattgggactagtattttctaatgtttctgggatatgctccctataaaatgaaatgttttcctggaacaatgctaattaggattgcattcctggccaaagacatgacatcaaataagtaatagacatcaccagcaatgaattttgaaaagcaaaaaatactattaacctatataaccatttaaaatttaaaaaattatgttccaagtacctctattttctgagctagaagaaaccttagaggccatctgatgatagattcccagagctggatggatccctagggactacctaatctgactttctgtccactgcatggattcttctaaaaagtatgtcacttatttccctaccttattaagactaaataagtggaacatcatagagctctttatttataacagtcattctttgatagtcaactcttaaatggagacttgagatgcttaaatattgtactactgtgcttatcttgtaaagatttcataaaatgatagtattggttattttaaaaaggctttggcttatgctgaattatacatgtagcaccaaaatgttacaactctactaaatttccttgttctaaactattatattagctataataaatattagtcatacatgtaacatgtttaatgacaaataactttctttatctccttggaattaaagagggcttttaaaagat

SEQ ID NO: 14531 - DNA, 635 bp, Homo sapiens
aatttggcaagaaggggcaaaaacgtgactattaatgattgataagcaccagtgaagaagttctaacttttagcatgctgcacagaaactggtataacatgccttcagtatactaacactcatatgctcagttttgttttgttttggcagttgacaagaagttaatttgctttagtaaaaatccctcattccagcctttctatataaatagctctttcttgctgttttaatgtggtgcacactatagcctcacaaacctgttattccagtgtaatctgcagtgtcgtaactaaagttactggcttggtcttatttgcacagtttttgcgtcttgtttgcttcttgcatctgattaactagaatatttctctttcccccttttaatttgtgatgtcacttgaccccatttatgtgtaggagcactacaccattggtttccaatactgcacacataagatacatacttgtgtgcagaaagtatcttcctccaggcttgtaatacccttcacatggaagattaatgagggaaatctttatattctgtataaaaacaaaagcaaatttatatactaaaatcatttgtctaaaaatttaagttgttttcaaataaaaattaaaatgcatttctgatatgc

SEQ ID NO: 14532 - DNA, 1100 bp, Homo sapiens
tgcctttccttcattaaagatgattctggaatgatcagcagatatagtctacaagggggaaggtactaagccccaggaccaatggtagacaaaataattcagaaatccattgtgccatgattcctttagtttctgctatttttctgtggaaaaccactgctggcacaagcagtgactgtttggcagcttcaagtttagagctgtgaagacaggctgccattcacagtattttgctttttgacagtacaagatgctgtgtaactgttttaatacagcaaatagtaactctccaaatcctgttgcttttatgttaaataagataacaagaattggagcatgcaaagaatgggacttggataatgacttaagctttatatgtaaagaattttagaagatcttggtgctgctattcctgctggaggaatgaatagatggctgtttcagttaagctattagtaataaaagtgaacattgctactatctgagcctacatacataacttgtgtgatttcaaattaaacttgcattatgtgttaattttcttgcatctaaaaaagcatagaattcctactcacacagctcagcaacaaccattttgatggtaacagttaatttctttcattagttttttaaattcagggttctggatattaaattaaaatggcattcttaaagattttcttcaaaaagcaatcctaaatgaaagtgtgtaaattataagaagctggcgatcttttgatatgctgtttcacaggatcctgacactggagggcagctgtcttgtgcattacttgtgtttccagcaccaaagttgtgggacatgttgctgtagactgctgcgcagtcctgggtgcattcagtctctctgcctctgcctgcctcctggtccccactttaaaggctgtgcagctccttaaataataaagctggaaaatatttttagtcgggttatcaaatttgatttacaaaaacgctaactttgtttgaaatgcaaacaggtttgaaaatatgtattaagtactttgtattctggaagcgtgaattgcttttgaagtctgtcagtattactggtatttttaaataaagaagaatttttctcc

SEQ ID NO: 14533 - DNA, 2331 bp, Homo sapiens
acagacccattgaattaataaggactggtgattcatttgtgtaactcactgaagccaaaatactatcttttaagatgtcccacatggaagacgctattccaggatctttaaatttccatggatgcatataggatgtttgggagcatcatccgtgaagaaaaaatcaattaaatcattgtgttcaacaggaatatttaaaatattctgcatgaatcctgtggctgtcttattttaaatagctgctgctgtgggattatattttttttccttaacatgccaaatataactttctgaaagtgatggaaaatgttgtcttgtgcagacaacatcatggctcttggcagtttaaatttagtaattttaatttagtgaacagaattgagaagaacgtgccaaatgagaatcaattaggtggatttttggctgtcatttcaaaagtggaataaatttattaatttagtagtactaaatggtatccttagattaaaattttgtgcttgataacagctgttttttctacattagaaataagatgccacacaaggaactacattccagatttaaagaaatgaaaggataccattagtgtgtataacagattattgttcatacttgtaaagcatcttatgtcattgagaatataaagaacagtgccttagaagacagtgaaaggtaagctctagcttaatgtctatgatttgttctttgacattaaggaaggtaaggattggtcagaggatgtaacttgatgtgagcagtagtaaacctgttttagatatcatactgttaatattttattgaaaatttatttcagagcggagaaacttaagctaaagtctgttatacagaattgaaagccttcgtatcttgaacctcccaacatttttcttatggctgttgaaaagtatagagctaaattgatttaattacactttcctttgtactttaaaaaaaagtatgctagcactattgtaccttgaaaggatttccaccagactgtcttgagtagtgacttctttggtgaggcaagaaggatatacattattttagaatcatttactatttaaatgagacaatcatattattttagaatcatttattttaaatgagacaatcattttaagttttaagataacagaagtgaccaatgtaatttcacaacacctaaggattttttggttgatcaggttactgtagatttttactgattgtcctggatgaatagactgtgctttttctttttctctcccttccttcttggtttcccatagtataataagcatgcatactttaacttctatagttttctcctttagagggtcgtcttcagttttagaggtttacttctcccttgcctttgactcattggactagtgcagaggctttaagtagtttaaaatgggcttttgcttttctaggtcattaacgttttttatttagtttctttagccaatagtggctgagtttcgcacttgattttcaatattttatagtaagaaatgacaaactgctttgtttcatttcataaacaaactctgcatttagataactattaaaggttgttaagatgaagatttactgtttctttgttactcgttggtacagctgtttgttttacttgcacatttgtacatatacttaatgttttcaagtgccttaattgtttaaaatctctggcttcaaagtttcttggggaaaggtcggtttacctcacattttttgtttccattagtaatattctaggtacctcacaaaatgtattatggtgccatggctgttagtttttagtgagtgctgtaggattaattcgaaaataggcagaattccattcctcccaaggtggcaaaaattagctatactgatgtaattgtcatttacctgggtatgaattccctgacacacattcatgtcaacatatgtagcaaattttgtgaaaacataacaatttgaagcttctgtaattttgagcactgctctaacaacaagcataatataaaattagttagattttgcaagtctacaaatgagctcttgcaacagaactcacagcctttttacttttttcccctaactttagcaatgtagtatcttgagccattaatttttgggtttttttaaaatccagaaggtatatagaaaccttttcagatttttcatctgatttgttcttgcagatgttcttctatcaaataccttattttaccttacagatatttgttgcacaggcagatactgctgtatttagacatttctatttcagttcattaaaaactgcaaaaccaatctgtatcatgtaccaaactgacttaaaataaatctacatgtttattg

SEQ ID NO: 14534 - DNA, 97 bp, Homo sapiens
ttttcatatcaatattttctgtgataatttattactttgtatctgatcagctgtttgtggatttaattaaaaagtacttgataaattgtaatttgaa

SEQ ID NO: 14535 - DNA, 124 bp, Homo sapiens
acgagggtgggccgtctgctttcgttcccacaaagaaagcacctcaccccagcacagtgccacccctgttcatctgggctgcctggcagagagccttgctgtttacaattaaaatgtttctgcc

SEQ ID NO: 14536 - DNA, 3335 bp, Homo sapiens
cctgtaaacacgtttgactgcttgattgggctcttcttataagccagctctgactggattttgaacgcttgaaatcaggctctccacaccattgacttgcagatgcttctgtgagagctgtgatggctaactgatgtttataatgccctccatccaggtagcaagatgtgtgtatgtcttgtctaaggtactgatttgtattgagcatttcaatattattgaatggttttcattttaatctgcaatgtctcataaagactcgggtagtttttctttgggggcattgatctcagtttttctgtaaggtttaaatgttcacagccataggttatggtcttgccaacctccccagttatgtttttttgttttctaggacaaagggagtcattttggttgaactgggcagaatggtttgttctattttcttatttttcttaggcaacacagttgttaccacaagacaagtcagggctaaatatgacagatcacaatgtatggggaatttgcccttttaataatttccagtcccctaagacaaagtaaccctcaacgttttatctttatgcagtacagtgggcttattgtgttaacacttcagaaagattcaaactcataaactcagtattttaactcaaaattcatgtaacaagatagccaaaagcataggatttcttaaaattctgaattcgtcttttctgagaaacataaatttacatatttttcaacagaaggctatcaaaattttaattaagtttaaaatacaaaattggatcaagacattcaccctaaattctgaatttttgtcagaaaagagatttgattttcatgaaggtaaagctttcttcactattctggaacataaaactttattcagtgtaatttaagtcttatatatactctactgaattctaactgatctcctgaaaatgttgatctacgtgttgtgtctgataactttctggagatggaagcttataattcatttttattgcagactagttaaatcccacaaagtgaatatcttctcctaatctttccttttttagagacagggtctcactgtatcacccaggccagagtgtagtggcacaatcattgctcactgtaacctcgaattcctgggctcaagcaaccctcccaccttagcctccctagtagctgggactacagggatgtaccaccacacccagctaatcttcatctaatcttaaaactttgagcctcagagactttgtagccagcatgtgtctgtaattgtatgatttttaaatcatcatcaaaagattaaattatgtttgggttaggttttcaagctaagcttattgaattcttttaccactttcatgtaagctggtaggggatttttgagaaaagaaggtgggcactagtatatctaaattaacaatgctgatggggagtagggggtaatctactctaaaattaatagagcctttccatcaattgttttgttttagacatccttgatttctccctaaatcaaataagttatttggaggttagagtaatagagaattcttcaggtttgagagaagataaaaacattttggttgcatatttgctaagctatattttattatatgtaattcacaaaacttccaaaatgatatatatcttatatgtatcaaccaaactaatgttaaatcaggcctgactagagcaaagataacaattttttacaaacactgttaagccctaagtattatttcaggttctcgtttaaactgtttaattttattcttaaaacacaaagtttttaccaacttttcaaagcccaccaatccacattttctccaggaaattaaatatttaagtaagtgagtgtttactcactctggatagctaggtgattattcagaaaatacggttacatagctatttataagtcaagtttcactggctctataacagtctacctctacactaagagaactataacatgaacaacataggtcactttaaatgttctagtagcaacttttaaaaacataaaaagaagcaggtgaaaatgttaataaaagtttatttaatccaacatttgccaaatatttcaacatataaaaatatattagtgagacattttacattctctttttcatactaagctttcgaaatctggtgtgtattttacactttctgcacatctccatttggatgctaatgttcattggacatacttgatctgtatttagatttcatacaacttacagttgaaaacagattctcatatcaagtagctaagacaaaagtttttttcaagaattgaaataagtatcagtttaaaaatttatattaaatttattaaaattaaaatccagttccttgttgcatgggacacagtgcaaatgcttgataagcacatgtggctagtggctgctatattggacagcatgggccacctgtttctaacttgagcatcagtcctagctatgcctgaattatttgaccagctgtcaaagagaaacaaggaaatgatagctttgttaatctagcctctttctttgtcccacatatacattctacccctttgaataaaaaagttcaatgacgccgggcgtggaggctcatgcctgtaatcccagcactttgggaggccaaggtgggcggatcacgaggtcaggagttcgagggcagcctgaccaacatagtgaaaccccatctctactaaaaatacaaaaattagctgggcgtggtggtgtacccctgtaatcccagctactcgggaggctgagacaggagaatcacttgaacccaggaggcggaggctgcagtgagctgagatcacgccattgcactcaagcctggcgacagagcgagactccgtctcaaaaaaaaaagttaaatgacttgagtacccaaaagaaatgtcgtgaacatgaaagtacttctcatgtgtccttgagaaatgatgttgctagtgcagtgtttcacaattcattttctactaaatgtgtaccattttttaaattgttttaacagaaatatagagtgtgtttcttaggaaatagaatgttatgctttggggctcctgaaacacctcgttttgaaggtgaatctttggttttctcccagaagagggtctgccttgggatgattggagctcttaccatcaaaatcagttattcaagtgcttgcccagtgcttcttgaaactcacctctactctgtattttctacagttggttcttgtgttataaatgttgtgagcaacagattaaatgatgctgaggaatgaaaaaagattctcattataaatgcttacctaggattctcattatagatgcttatctaggttttcataaatgggaatgtaacaat

SEQ ID NO: 14537 - DNA, 508 bp, Homo sapiens
tttacttaggtgatagcagcctgaatctcaagagttatctgaaagtgatagagggaaactgagagaagtagattgaaaatctgggcctcttggaagtacttttgcctcctgagcaaggtaccatggctgccagacttcaggtgaactcaaaggtctgccagccaggaaggagcactcttatggaaacaagttttaatacaattttaaaatgtattgctctttgcctgaactttgatgctttaacaaaataaacattctatttataattccatatagaaaagttaagtgacttatttaataaatgtattattttcctttttaacattttcagtagaaaagtcagtctctgttaaaattactcattaaatgttagaaagctttaagacatttaacattgttataaatgaaaccaaaatatgggttatacattttacatacaaaactgtttgtgaactttgtgaacataagatactatcattttcccaataaaataaatggattttgcaac

SEQ ID NO: 14538 - DNA, 1241 bp, Homo sapiens
gattacaggcatgagccatcacacccagcctttgccttctggcttaagacactcttgtaacagcttttcaaggctgaccctcttgtaacctgatttccatctgtataaaaatgtccagccaaacaaggagaagagaaaaagaggaatatcagaaaatacaacttgctacaagtgcaaccacatgtcaccctggtgtgaatatgctggacttccgtacagaggactgctgatattgtacagtgcaactgcaactgcaactgcaggcacaaagcattgcagaagcggggccaaagtaattgttgctttgtcaaaacaaaatattcacaaccaaaagtagataagaaaaaaccattggactgagaaaattatggcaccatgtaagaataagaaccctcctcttaattatttgcctcgattttcattcatttattcattcagtccatcagcaaacattaattgagctttgtgtctgacactgtttcaaatactggcaaatcagccatgagcaaaacttacagaaatcgtagcctcattataatgctcatttctctcatcaaacatgttctgaaagtttgctctgtttaaggtgtcatgctaatgtttaggatcaaaaagatgtcctaacctggaattaagtacagttaactactttaagcccttgggagtccctagtggtccccttctgaatcacttcaaatgtttcagcagtgaaggagtccaggctttgcagttaaacacacctacgcagtatcccttctccagttctcactgactttgttcactgctctccagtgcctggtggagtgctgacacatgtgacattcaacttcagttgtttcgctgaggttgtataacattgagtaagtcacttagcctctgtaaacctagggctttttattgtaaaatgggaaaaattaatacatttagtttccctaattaataataatttaatttccctttgctactcttcagttaaatcttcttttcttaagaattaattttcaggataaactttaaatgttctttataattttttcatttgttaacattagaatggtgtgatttcttctgatttttcattcggaaattcaatattctatgtagaggttaaataggattttgtaagtcagctctcctgagacttcatgtttgtaaaactgtctgtgtatcccacaaaactgatacaaacaaactcgcagcacaactcctgagatgtttgatgaataaaaaattaaaactgt

SEQ ID NO: 14539 - DNA, 1215 bp, Homo sapiens
ctatctgtctatctatctatctatctatctatctatctatctatctatgtctatctgtcatgtatctatactcgattataatttgtaggattttatttgtactcagtttttaaaatttcatgttttaattgaataattgttccactgggcttggggtagggtaggcattctttttgttgtttattgctgcttccagaccagagtccctccctgcttcccaaaagctcccacatgtgaatatcgtgtcattcagactctgccacctattagctttcttggttctactcatcttctgtcccctgggtttcacttctcctggctcactctcactctccccatataatcactcctgtcctaattcttggtgatttcagtattacaaagatgatcctcccaacaccttgacacctccctcagtaatcttgttctccactctcagtaaatgaaattatttttagcttagacaagagtgatagcagtaaaagtggtatgaaacaagcatatttgggatataatttgaagacaaagctgaaagatttgatgagggattggaatgtggaggaattctagaaggggcaatgtggcttgaggattgcctatgcaagaaggaatggcacaagatcatggctaaagacagagcaattcaggccacagaaaggtgttagaagttgttcaaagtgctgttgcattcttttaagcgccggagtatcattttctatttgcttttaactttttcattgtgaaacatgacaaacatacagaaaagtgaagcccactgagttaccgcaaaatgaacccccatgtaaccaccaaccaggtcaaatctggaatgttgccagcacccagacgccctctcatgtttcttctcaataccagtctcctcactctccacacaaaggtaaccactgcccagaattttatggcattcacttccatacttctcctatggttttgccgtggaagcatacatccaaataccataggctagttttgcatggtttttttgaattttatagacctaaacaatttatcttctttgtgcctggcttctttcacttaacattataattatgatatttgtccagactattgaatgtagctgtagtttattcatttttattgttttattgtattctgttgattgacttataccataatgtatttatccacatttgagcactaataaaacttggattgattccagattggagtaaa

SEQ ID NO: 14540 - DNA, 703 bp, Homo sapiens
gaaaaatgcattgataaatattacaaaactgaatgcaaatgtcctttgtggtgcttgttccttgaaaatgtttggtcattctagtgttttgctttcttttccttataataaatgacccttttcctccataacttttgatttctaaggaaaatattagcatacatttcaaactaaatgttttacagtggcttatcttttttttccccctgaaaagactaatttggtcaaataaaccactaagtattaagcatggacagctgttgttagagtagcagattcagttttttgatatatcttaattgtgtactttgtgaattttaatttaaagaaagcaactgaaattgaaatcttgagggcagctgtgtctactaatgagccttattccatttcctgatgttttaaaagaagaaacactgccttgattatacgaatacactcagaaagtacatttagcttgtagtgttgaattctcttaaaggaatgcttgaattttttcattattgttttattgtttttatatacttgccttatttgaatgtttagcagtatccccttcccacttatatattgtgtgatatgattttgcttgcctataggagttaaaaacttttccatgtgaaatactctgacttaaacatacatgtaacttacataactgttaagaataacagtctgatttaataaatggttcattttaaaagtt

SEQ ID NO: 14541 - DNA, 594 bp, Homo sapiens
atgacataaaatgacagcaaagagactgagagactgttgatcaaagcacagaacaggttcaaataacttttccactgcatgaaagtttaattagacatttctttgttttcaacattagaagtggtgtaacatgtaagctgagcacggtggcatgcctatagtcccagctacttgagaggctgaggcaggaggattgttgagcccaggagtttgagtgcaatctgggtaacattttttagaggtgccagttcccacctctaaaaaaaacaccaacaacaaaagaaatgatgcaacatgtaggcttacttaggaagtccagcattaatggcatagggcataaagctctattttttgttaaaaatacttcttatagagtaaaatttatttagaactgatgtccaaggacctatgcagatttatatgaatgttggaagctatagagattttgatatcatttggcttataaatccacaggaggagataatgtatggaaaacatttaaatcactgtcaattgcagagctgcctgtgatcttcttaggttatagccaagtcagcaacataattcctctaaataaaattacattgtgctcac

SEQ ID NO: 14542 - DNA, 166 bp, Homo sapiens
atgtgccatgcctgctgtctagcacctgaaatattatttaccctaatgcctttgtattagaggaatcttattctcatctcccatatgttgtttgtatgtctttttaataaattttgtaagaaaattttaaagcaaatatgttataaaagaaataaaaactaagatg

SEQ ID NO: 14543 - DNA, 4557 bp, Homo sapiens
ccagctcccgttgggccaggccagcccagcccagagcacaggctccagcaatatgtctgcattgaaaagaaccaaaaaaatgcaaactatgatgccatttaaaactcatacacatgggaggaaaaccttatatactgagcattgtgcaggactgatagctcttctttattgacttaaagaagattcttgtgaagtttccccagcaccccttccctgcatgtgttccattgtgacttctctgataaagcgtctgatctaatcccagcacttctgtaaccttcagcatttctttgaaggatttcctggtgcacctttctcatgctgtagcaatcactatggtttatcttttcaaagctcttttaataggattttaatgttttagaaacaggattccagtggtgtatagttttatacttcatgaactgatttagcaacacaggtaaaaatgcaccttttaaagcactacgttttcacagacaataactgttctgctcatggaagtcttaaacagaaactgttactgtcccaaagtactttactattacgttcgtatttatctagtttcagggaaggtctaataaaaagacaagcggtgggacagagggaacctacaaccaaaaactgcctagatctttgcagttatgtgctttatgccacgaagaactgaagtatgtggtaatttttatagaatcattcatatggaactgagttcccagcatcatcttattctgaatagcattcagtaattaagaattacaattttaaccttcatgtagctaagtctaccttaaaaagggtttcaagagctttgtacagtctcgatggcccacaccaaaacgctgaagagagtaacaactgcactaggatttctgtaaggagtaattttgatcaaaagacgtgttacttccctttgaaggaaaagtttttagtgtgtattgtacataaagtcggcttctctaaagaaccattggtttcttcacatctgggtctgcgtgagtaactttcttgcataatcaaggttactcaagtagaagcctgaaaattaatctgcttttaaaataaagagcagtgttctccattcgtatttgtattagatatagagtgactatttttaaagcatgttaaaaatttaggttttattcatgtttaaagtatgtattatgtatgcataattttgctgttgttactgaaacttaattctatcaagaatctttttcattgcactgaatgatttcttttgcccctaggagaaaacttaataattgtgcctaaaaactatgggcggatagtataagactatactagacaaagtgaatatttgcatttccattatctatgaattagtggctgagttctttcttagctgctttaaggagcccctcactccccagagtcaaaaggaaatgtaaaaacttagagctcccattgtaatgtaaggggcaagaaatttgtgttcttctgaatgctactagcagcaccagccttgttttaaatgttttcttgagctagaagaaatagctgattattgtatatgcaaattacatgcatttttaaaaactattctttctgaacttatctacctggttatgatactgtgggtccatacacaagtaaaataagattagacagaagccagtatacattttgcactattgatgtgatactgtagccagccaggaccttactgatctcagcataataatgctcactaataatgaagtctgcatagtgacactcatcaagactgaagatgaagcaggttacgtgctccattggaaggagtttctgatagtctcctgctgttttaccccttccattttttaaaataagaaattagcagccctctgcataatgtagctgcctatatgcagttttatcctgtgccctaaagcctcactgtccagagctgttggtcatcagatgcttattgcaccctcaccatgtgcctggtgccctgctgggtagagaacacagaggacagggcatacttcttgtccttaaggagcttgtgatctgtgacagtaagccctcctgggatgtctgtgccatgtgattgacttacaagtgaaactgtcttataatatgaaggtctttttgtttacttctaaacccacttgggtagttactatccccaaatctgttctgtaaataatattatggaagggtttctatgtcagtctaccttagagaaagccagtgattcaatatcacaaaaggcattgacgtatctttgaaatgttcacagcagccttttaacaacaactgggtggtccttgtaggcagaacatactctcctaagtggttgtaggaaattgcaaggaaaatagaaggtctgttcttgctctcaaggaggttacctttaataaaagaagacaaacccagatagatatgtaaaccaaaatactatgccccttaatactttataagcagcattgttaaatagttcttacgcttatacattcacagaactaccctgttttccttgtatataatgacttttgctggcagaactgaaatataaactgtaaggggatttcgtcagttgctcccagtatacaatatcctccaggacatagccagaaatctccattccacacatgactgagttcctatccctgcactggtactggctcttttctcctctttccttgcctcagggttcgtgctacccactgattccctttacccttagtaataattttggatcattttctttcctttaaaggggaacaaagccttttttttttttgagacggagtgttgctctgtcacccaagctggagtgcagtggcacgatcttggctcactccaacctccaccttccaggttcaagtgattctcctgcctcagcctcccgagtagctgggactacgggcacgcaccaccacgtctggctaatttttgtatttttagtagagatggggtttcaccctattggtcaggctggtcttgaattcctcacctcaggtcatccgcctgtctcggcctcccgaagtgctgggattataggtgtgagccaccgcacccagttgggaacaaagcctttttaacacacgtaagggccctcaaaccgtgggacctctaaggagacctttgaagctttttgagggcaaactttacctttgtggtccccaaatgatggcatttctctttgaaatttattagatactgttatgtcccccaagggtacaggaggggcatccctcagcctatgggaacacccaaactaggaggggttattgacaggaaggaatgaatccaagtgaaggctttctgctcttcgtgttacaaaccagtttcagagttagctttctggggaggtgtgtgtttgtgaaaggaattcaagtgttgcaggacagatgagctcaaggtaaggtagctttggcagcagggctgatactatgaggctgaaacaatccttgtgatgaagtagatcatgcagtgacatacaaagaccaaggattatgtatatttttatatctctgtggttttgaaactttagtacttagaattttggccttctgcactactcttttgctcttacgaacataatggactcttaagaatggaaagggatgacatttacctatgtgtgctgcctcattcctggtgaagcaactgctacttgttctctatgcctctaaaatgatgctgttttctctgctaaaggtaaaagaaaagaaaaaaatagttggaaaataagacatgcaacttgatgtgcttttgagtaaatttatgcagcagaaactatacaatgaaggaagaattctatggaaattacaaatccaaaactctatgatgatgtcttcctagggagtagagaaaggcagtgaaatggcagttagaccaacagaggcttgaaggattcaagtacaagtaatattttgtataaaacatagcagtttaggtccccataatcctcaaaaatagtcacaaatataacaaagttcattgttttagggtttttaaaaaacgtgttgtacctaaggccatacttactcttctatgctatcactgcaaaggggtgatatgtatgtattatataaaaaaaaaaacccttaatgcactgttatctcctaaatatttagtaaattaatactatttaatttttttaaagatttgtctgtgtagacactaaaagtattacacaaaatctggactgaaggtgtcctttttaacaacaatttaaagtactttttatatatgttatgtagtatatcctttctaaactgcctagtttgtatattcctataattcctatttgtgaagtgtacctgttcttgtctcttttttcagtcattttctgcacgcatccccctttatatggttatagagatgactgtagcttttcgtgctccactgcgaggtttgtgctcagagccgctgcaccccagcgaggcctgctccatggagtgcaggacgagctactgctttggagcgagggtttcctgcttttgagttgacctgacttccttcttgaaatgactgttaaaactaaaataaattacattgcatttattttatattcttggttgaaataaaatttaattgactttg

SEQ ID NO: 14544 - DNA, 985 bp, Homo sapiens
attgtcaatatcacagtattacaggtgctatttttttcagtgcttaccactaaactgttgtgcatggtgctttttaactttcatcgagtcaaggatgttcactgtctgttatctgaagactatgaagacttctatgctaaccgaattaaaatgtacttgttgatctctgaatagctcacttcttacaatgtacaaattcctcattctgtcaccttttaaacattgttttataatgcaggtgttggatttgctccagtatgtgtaccatcttgtaaattcatttgagtagatcatgtttacttcccagtggaaggagcactgaaaacctcttaaagaaaaagcatttgtgtgttttccttgaactgtctgtatcaagacgtgttacttcgagatatccattcactttataattttgactgcaaaatattttgtaaatacacttttttacttttcaaacgagcaaaataatgtgcaatgatttttatacaaatgattttcaagttgtttggtatatttcctctaggttttgcttgactcaaagtagatcgttattttgatcaaactgtgcaaacagtagtaccacgtgtagcattttgaaacattatttttttttaaaaaatgctgtcttgctttagctattaatggggcattgtgaggaactgtgcaaagacatttttgttacaaacctgtgggcctgttgcaatactttaaaaataaaaaattttattccatttgcttgttttgtatagacatttctattgcttctaaatatacttaaaatattttctttccttatgtactgtacagttaatcttatttgccatcatcttgaacacaaaatgtgtatttagaatatttgtataactgtgtaaaataaaaaaggaattatgtggtcagtgcattgttttttaaactggaaatcattttgttttaaaagttaataatggaaaccatattaaaattgaataaaatataaaataatata

SEQ ID NO: 14545 - DNA, 463 bp, Homo sapiens
caccgttcatccccagatcactgaggccaggccatgtttggggccttgttctgacagcattctggctgaggctggtcggtagcactcctggctggtttttttctgttcctccccgagaggccctctggcccccaggaaacctgttgtgcagagctcttccccggagacctccacacaccctggctttgaagtggagtctgtgactgctctgcattctctgcttttaaaaaaaccattgcaggtgccagtgtcccatatgttcctcctgacagtttgatgtgtccattctgggcctctcagtgcttagcaagtagataatgtaagggatgtggcagcaaatggaaatgactacaaacactctcctatcaatcacttcaggctacttttatgagttagccagatgcttgtgtatcctcagaccaaactgattcatgtacaaataataaaatgtttactcttttgt

SEQ ID NO: 14546 - DNA, 455 bp, Homo sapiens
ggcccgggtctgcggagagaggccttgtcccagaggctgccccacccctccccattagctttcaattccgtagccagctgctccccagcagcggaaccgcccaggatcagattgcatgtgactctgaagctgacgaacttccatggccctcattaatgacacttgtccccaaatccgaacctcctctgtgaagcattcgagacagaaccttgttatttctcagactttggaaaatgcattgtatcgatgttatgtaaaaggccaaacctctgttcagtgtaaatagttactccagtgccaacaatcctagtgctttccttttttaaaaatgcaaatcctatgtgattttaactctgtcttcacctgattcaactaaaaaaaaaaaagtattattttccaaaagtggcctctttgtctaaaacaataaaattttttttcatgttttaacaaaaacc

SEQ ID NO: 14547 - DNA, 633 bp, Homo sapiens
aaaagaaaccctcaaaaatactttcttaatttcacattgttttttctgacctttctgtttcaacatttttgtaatttggaaactccagttttttcatattatcgggaaatatttttgtctaaaagagtgatttctgtttaatcgcaatttgttggtaataccaatgtgtgaaattagtgaaatcttagtaccttaacttcaaacatttctcttcagaaaagttcccttttctaaaattgagataacatagttcttgaatattttgctgtatttatagcctcatatttaggcatttatgcactgatgtgtcttcaataaaaatcttgtacagatatatttttataattatttataatttatattttgatattctatttaagttatcctgattctttaaaagtagttattgggagtagaagaacacaatataaatatttccgtgtaatagccaccaacttttcaggcataggttttattacaactgttaaggaggttttgcttcttctttagataacaacttgtttgcccaaaagaatcctaatttgtacacttaacatgtatttgtattaaactttttaaataattgctttcttatcaaaccaattgattttataataaatgtctatatttttc

SEQ ID NO: 14548 - DNA, 562 bp, Homo sapiens
catgacagagcacagctgcccaaatacaaagttctttagagcactgaaagaaacacaaagccagccaggaggaacagtaactcttccttcgggtggaagctttcatcgagttgaacaggacttaaacgaatcatcagggaccggatatttcttatttctcatttggattcttaaccttgaatccaaagtgtctgcaatggacaacaattgaaggagtggcaaacttacttgtattgagagcacacgcaattcctactggtgaaattactgtttctgtttctaataaaatagaagggattccaaataaacacttgcacacatttttgaagtgcggctagattctcagattcacctttcttccagggaagataactttcaatctatataaaaatctctgtcctaaaactacctttctttattttgaagagacttactaacttacatataatctaaattagatgatagatttgtttttagcccttttgtttggtctatcagtataagaagaatattttaggtttatagctgaagttatcaaggtttaataaagtaaatttctaac

SEQ ID NO: 14549 - DNA, 4893 bp, Homo sapiens
atttgacagtctcaccaatttcagaaaatcattaaaaagaaaatattgaaaggaaaatgttttctttttgaagacttctggcttcattttatactactttggcatggactgtatttattttcaaatggctttttcgtttttgtttttcttggcaagttttattgtgagtttttctaattatgaagcaaaatttcttttctccaccatgctttatgtgatagtatttaaaattgatgtgagttattatgtcaaaaaaactgatctattaaagaagtaattggcctttctgagctgatttttccatcttttgtaattatctttattaaaaaattgtacttggattatcttttgtctgtttattactacaatatgaagtcttgtttcagtggctaatgacatcatttctgtagacttacaatacactctaggtgaaagataatgattacagcttgaaagataactatttgctgtttctttgggaagagtatttatagtaattattacttatctttgcaatagaaattctaccaccttgccctctatagcttagccagttagtatcagtgaagattaacatcccattacaatttatgaaataatacagactctgcaattgagatgtaggagttctttgagttgacccaaagattctcaaaattgaaatggaaattctgaattgaaagaagaaactgaccagaacttgtattgaccagacttgcctatagtatattgctggtttaaaatggaacctgcagacaaaacctgtttcttttactgcatttacatggcatccaggttccattattatttacgtgacatccaggtttctaactcaaggaaataaacacaactgatttatcattcagcaactacttattgtgtgtctgcccattttaagactgtaggagtgtaactgaatataatggaaaaatgctttcactcagagcttacactcagagcttacattctagtagcaggaagcagacaaatgggggtaactcctgctactaagatgtgcaaagaagacaaaacattttaggaacttgccaaaatcagtgaaatctccctttttgtcaggcccacattgattcttttgagattaaaaattacagaatgccagaagataattcagtcaaaagtatttctcttcagtgcagtaaaatattaaaagaaaaaatatttctctacaagcctcttaaatgtttcagacattcacaatagcacctagacttttgtaatgaacagctgtgcacccaccccgacttaacaaatattttacttttgctatatttgcttcggtgtttttttcttaaaatacaccgaaattgaagctctctttgtgtactttgtcgtttgtaatcctccctccctcccagccttaagaagtaatcaccattgtgattattttatccatgtttttgtgaatattttacccatgtttttgtacttttgctacatatttgttatcaatctgtaaacctttatgacattaggaactaagaaacttagtcccttcgttagggggataatgaaatgtatttagtgtttgtgaaacatagatggtatgtatttggacaattctgtaactttgctttttttatttttatttttccatagcttattggggaacaggtggtgtttggttacatgattaagttctttagtggtgatttgtgggattttggtggacccatcacccaagcagtgtacactgcaccctatttgtaatcttttatccctcgcccccctcccaccatgcctcccgtctaccatgatgatcctgttttaaataagaaaataccatttcgcaggctccagatgttctggcatcctccctgtggatttcccagtgcctgcagctcacaggacaacaggggctgtggtagagtcacctatgagatcctggagtagtggatggaggagatggaacagtgaagacggaaactgagctcagtatccgggtgccaggagacaaaggccctttgctttttttcatttaatattctgatctacccctgttgacacatgttaagtatagttcattttgactgctatgtattatgttccattgtgtgaacatactgaaattgtacacttcaatactatactggatctccttgggtgtatttaagaggttttgtttttctaagtagttggttatatacaactaaaacctcaagagaactatctaaagcaatttcagcaaggtgatttggtacagcattaataaacagaaatcagtaacacttagtgaccaagtctgttggaagaacaaagacccccatttgtaataacaaaatttttagaaataatatgtaaagaagctatggttcttgtgtctagtaaggtcaatgtaacatagtaagatgtcagaataccctaatactttaaaaaattcatataggataaaaatgatatttgaaattggcaaggaaagacattattttgtaagtggaattgggacaacaactggtaaccaaatggaaaacccagttttctgccctccactagaagatttaaataggaaaagataaaactaccaaaaacctaaactcttaaagcaaatggattgaagaaggcctaagtgtgacaccaaactcaactataaaagatatatttgataacaaaaaaaaaattagttcagtggaccaacaaaaacttagaagacaagtcaagaaaaatgacaaaagacagagtgggaggcagatttgtaactcatccaggtcaaaaggctcatatctaaagatagtagaggaacaaaatgtataaggatgtgaactgggaaacaaatacatataaatagtttgtaaatatgaaaagatctttaacctcagtaaataaaaagctatagagagacttattttttaacttagttttttaaacctattatgtttatttattttttctttttttgagacggagtctcgctgttgcccaggctggtgtgcaatggcgcaatctcggctcactgcaacctccgcctcccaggttgaagccattctcctgcctcagcctcctgagtagctgggattacaggcgcctgtcaccacgcccagctaattgttcgcatttttagtagagacggggtttcactatgttggccaggctggcctcgaactcctgacctcatgatccacccaccttggccttccaaagtgctgggattacaggtgtgagctgccgcacctggctgtttatctcttttttttagagaaaggatctcggtcacccaggatggagtgtggtagcctgatcatatctcactacatcttagaacttctaggcttagggtattctcccacctcagcctcccaagtagctgggactacaagtgtgcaccatcacacctagctgatttttacatttttattttggagagatggtgtctccctgtgttgcccaggctggtcacaaactcctaggctcaagcgattctcctgactcaggcatgagccaccgtacccggcctaaacctatcatgttacagacttagaaagcaactattgtcaagtgtttgaggaaactcaggtcaggtttggtaaactaagatattaactcaagtaaagctctttaattcatttaatgaaggtgccacattgtctcagttctctatggcatgggtgaatgctgttctaagtcagcattggtactctaagctagttacatcatatctaagctttgcccttctaccagagctgctagcattctgtcaatgggcaattatttgaagttcttacattgaagttagtcacctacatcttctgttttttatggttttgatgtagtaatactgctgaagtttttttgataactgcgattcataatatttgttattcatattgtgatataaatgataagggcttttgaaaacaagtagtaatcatttcaatagcttaggatctccaccataatcttaggaaaattactaacctctgtgcctcagttgcttcatcatttaaaatgaggaaaataatagtccctacttaataggtttgttgtgaggattgagttaataacatagttaatgctcagtaagggttagctgctatttttttttcttttttttttgaaagagtctcactctgttgcccaggttggagtgcagtggcatgatcttggctcactgcatcctctgcttcctaggttcaggtgattctcatgcttcagcctcccaagcagctgggagtacaggtgtgcaccaccacacctggctaatttttgtatatttagtagagacgggttctcaccatattgtccaggctggtcttgaactccttacctcaaatgatccacccgcctgggcctcccaaagtgctgggattacaagcatgagccaccgcgcctggcttgctattgttatgaggtaaaggtagatagatgggtgagagtggtgccaggggaagtgttaaatttttgagtgttcctttagatgccagatgggttgtatctgagccttttattgcagtttgatgcctactagtgtgaagactactaggtcatagtggatagagaagcaatcttttggagacctgattttagcaaggatacgaataatatttgacaactttggggggatcttgatgcctctgtaatttactcaaggataatctcaagaaaaatggcattaagtagattacagaaaaaatagaactatcatattgttattattggctatttacatgagcaatgcggagaaatgtttaggattacagcatttagaagcttctcaattgctgcatttcctcactgtaccacaagatggcagatactgcatttaaaatttttttttctgtgtgttttctcttatagtcacttggtggccatgtaacaagcagagcaacatgtattaacagattctttttgaatgcaatattggattaaaaactttgaatt

SEQ ID NO: 14550 - DNA, 883 bp, Homo sapiens
acactggagaagaatatcaaataataaagtagcaaaacaaattcaaataatccattccaaaatacaatgttatcaaccaactgcacaatcagtttatcctgacatattcaagtgataggataaagttggccatgtattatgaaaaagattatttgtgcattttattgactgggcaacactgcaggacagtcaaggtgatatataatttcctcactgcctggtaaaattaagcacactaaaccaagttatttttctttttaagagatacttacatttccatttattgtttgaaatgtcgatcaagagaatcaacagatgatagtccaatttttactcagtgactgttgtagcattttcctgtttactgattagagtggttattcattattcctcagattgctgaatcccatcaggctgttattatgaaggaatttgattgctttgctgcacagcaggacctgtgctttgagatttttttttctcttttaaaatatcctgtaactacaatgatggtaaagccatgttaaatgacttgattgtacttggagtaattgcacatttttttctatgcataaaaaaatgatgcagctgttgagaaaacgaagtctttttcattttgcagaaggaaatgatggaatttttctgtacttcagtatgtgtcaactgagagtcatatacattagttttaatctcttaatattgagaatcaggttgcaaaacggatgagttattatctatggaaatgtgagaaatgtctaatagcccataaagtctgagaaataggtatcaaaatagtttaggaaaatgagaggagaacagtaggattgctgtggcctagacttctgagtaattaataaagaaaaagaagtaccctttggcctac

SEQ ID NO: 14551 - DNA, 1150 bp, Homo sapiens
gtacacacagagctaatctaaatcttgtgctagaaaaagcattctctaactctaccccaccctacaaaatgcatatggaggtaggctgaaaagaatgtaatttttattttctgaaatacagatttgagctatcagaccaacaaaccttccccctgaaaagtgagcagcaacgtaaaaacgtatgtgaagcctctcttgaatttctagttagcaatcttaaggctctttaaggttttctccaatattaaaaaatatcaccaaagaagtcctgctatgttaaaaacaaacaacaaaaaacaaacaacaaaaaaaaaattaaaaaaaaaaacagaaatagagctctaagttatgtgaaatttgatttgagaaactcggcatttcctttttaaaaaagcctgtttctaactatgaatatgagaacttctaggaaacatccaggaggtatcatataactttgtagaacttaaatacttgaatattcaaatttaaaagacactgtatcccctaaaatatttctgatggtgcactactctgaggcctgtatggcccctttcatcaatatctattcaaatatacaggtgcatatatacttgttaaagctcttatataaaaaagccccaaaatattgaagttcatctgaaatgcaaggtgctttcatcaatgaaccttttcaaacttttctatgattgcagagaagctttttatatacccagcataacttggaaacaggtatctgacctattcttatttagttaacacaagtgtgattaatttgatttctttaattccttattgaatcttatgtgatatgattttctggatttacagaacattagcacatgtaccttgtgcctcccattcaagtgaagttataatttacactgagggtttcaaaattcgactagaagtggagatatattatttatttatgcactgtactgtatttttatattgctgtttaaaacttttaagctgtgcctcacttattaaagcacaaaatgttttacctactccttatttacgacgcaataaaataacatcaatagatttttaggctgaattaatttgaaagcagcaatttgctgttctcaaccattctttcaaggcttttcattgttcaaagttaataaaaaagtaggacaataaagtg

SEQ ID NO: 14552 - DNA, 2794 bp, Homo sapiens
tctctgtcctgtgagaagcttctgcacaagtttccttaccacctcctcttggacctatgcttggccaacagcatgcagtcttccatctgctttctcttcatactgtggattatcttttcctttggttctaaatcttcagtaatcggttgcaagattgttggcttacctgcctgtgccattcttcctctgggccttcatgcttttctgcattgtgttaacatgtttcaagtgcatggccttctacggcttctatgccaagcgtatgatactatagatatagtgtaccatactgcctttctttgcatggcttggaccctatctgtgaccatgctcttctcccaatttaagtggttctgtaccacaaagaatcttgatacattttcacaaataactgattgggcttcatactttatgctggctgtgtcctgatacccatgtacttatggtaagctatttgggtattaccactgcaagacaaaactgatatcttaacccggccatcaacccaaattggacattccagactaccaccaactggatcccagctgccttcctgggcttgtgccatccaccctactggttatctgatagaacaagctggtggctgatgggtgactgctaggcgtgactgaggtaatagatgaaaagtgttctatgttatcacattggttttcctgtacctttggttactctacgtcatgaccagctgctggtgagtatgaagcctgtgctatagcccacccctactcactctcaccttctggttgaactttgcttaggccaccattgtctgcctcatcaggaactatctgtagacgtagctcccagggagctcacagcaacaccccctaccaccaggatgggcagtaatatgtgacagagcccaaagcaaggctggaacgcagtcccttccagcttagtctttctgactcctagccaacaaaccatccttaatgtgagcaacttctttaggcatttcctcttttccccgcctgcacccactctgaacatgacaaaagttgccagagttggggcattgaggaagagatatttctggaatgtgagacttgttatgcctctgtctctttctctccctcctcctcccctctccctccccctctccctcccatcccttttcttccctttcactctgaagcagttttagcttattaacagaaaacaaaactggcaaagcaggctttttgtttaatttgctctttccctgattgtgttcagagagaaaggttatgattaaatgggctccagatctcttattgcccttattcctccaccccacttcttttagcaaggtctgaaagtttcaaagggagacctataggttaattgtttagttataggcagtgttaaattaggcagattttgacatatttatctttttaccccatccattctaccaaaacctgtgtatttcttgagtttttagtttgagaagctggaaagagagagaagggcctcacagtgatgggttcaggacgggtcaaaggcaaaggcctttgtgatgtgagcaaaggcaaccaaaacttagcctcactccacttttctaaagatggaaattcttttttgggccttggactgcttctagggtagcattttgtaggtcactcttctcctttgtactattttgtttctgccctgatgtcccttgggtctccatcctactgcctggctttcttggccctcatttctcagcttctgcatttccttccctgctcctaacaaatgaagaagcaggctgcagcctgcattgtggaagatctccagcctccttgtaggggataaggggatgtgcagcatctgtgtggattttcacggacaagttccagtaggtgggacagtgatgccgtcaaggcttagttatgatcatgtgtggtgataaagaccatccaccatcacccttttcccctttggttttgaaggccttgccctaagctacctgagggtttaggaggtctgaacacacacagtggagaggttaatctaggttgggaaactgagtaaaagtccagagcaggaatgagcctgctgtggcgtgggtttggaaaggctcacaggaaagaacctgcaggatcaggggtgggaggggaggcccctgaggtgctctccagggaagaggggctggggtttaaatagcatgcttggaggaagattttccttcaatttttcctaagtccttgaattcaccagtagatttttgtaaacaaaatgtaagtcgatgttttctctcaattatcctaggagtgacctttatatgtgtggaagattaatggtatatgctccttatgtcactgtttttgagtaaaatccatttcctttctctgtttcagcctatgacaaaattgatgtttacaggcctgctttttgcttataattgacaacatgtgcaaaaataccaaatttgtgtcctgtgcagtatgaagaattcagtgaatattcattaatgtattagcttgttttgctctctgttcatatatggctctattcttagaaatataatttgaatgtgatctttcaatagtctgaatattttacaaattatagctatgtcttgtgaaaataacctcaaaaagaaaaatacgactctgttgtcttacttgatatttcttgccctagtaatgtacttgacatttatgttcctaagcagtgtaagtaccagtagaatttctctgtcaaactcaatgatcatttagtacttttgtcttctcccatgtgcttgaaggaaaaataaagtgtcactaccgtatttcttgttttcatcaaaaaataaaaataattt

SEQ ID NO: 14553 - DNA, 1934 bp, Homo sapiens
catttgcccttgggaatactcctgcacaaggtctcctaccaccttctgctggacctgtgcttgggcatcagcaatgagtatgccttctattgtgctttgtttttgctgacttttctgcaccctgtttcctttggatattcagttctctcaacctcaagattgagacggtggtgggtatgcttctccacttccatatgaccttcatgctgttctggaatatcacatgctacgaggtcatccttcacactacttgtaagccaagcaaatgatactgtagattgtactgcctttatctgcactgcttggaccctgtttattcccagggcctctgaactggttgctgtcacttggatttctagctttgggagcctgttccacctactcagctctgcattgagcagtatgggcacatgccctgtggacagttactggacgttaatgaactcagaggagaaaagcagtgagccacttgttctgtgtgatttatggtacttcattgctcttccttcacctctagtcactttctattgctacctgccctacattggctcctgccaaggtccctctctctccctgttttccttttttttttttttttttttttttttgagacggaggacggagtcttgctctgtcgcccaggttggagtgcagtggcgcgatctcggctcactgcaacctccacctcccgggttcaagcgattctcctgcctcagcctcccgagtagctgggactacaggcgcgcgccgccacgcccggctaatttttatatttttagtagagacggggtttcaccatgctggccaggctggtctcgaaccccgatctcgtgatccgccctccttagcctcccaatcctctcttaaaaaagtgatagctcagaaacatttgtaaaagcaaggtttttatttcattttggctctgtcattttcagaggcaaagaagttggcctgtaaaatagagtgctagagctcttacgcccctccccttcttcccaacttcctacttcctagcccttttatcaactcctagaatagttaaagagagacacatctagatgggatgaaaggtgccctaagcaggagaaactgaacaaaaggctagaggcatgggccaggtaaaaattgggcctagagtgaagactgtgctgtcgttaagagctttcgaggaaggagtacttactccccaatgatgatgaatggaaaaatacttttcagggagaattgaaggggttaaagtgttaaatatgttgcctagacaagggttctttaaagaaagacagcgcaactttgaatgctttcttacttgttttgtgacctaatttatgtggaagattgttatttcattaggatttagtaaaatttttttttctgattctaaacttattgtgaaaattgagctgtacagatattcttttgatttcaattgggaacatttggaagaacaacagtcttacttgcctgtacaatatagagacatatgaatagtcataacagttttcaacttgttcttgtttctgttaaactatattcctagaaacatagtttgaacaacttggtctttgttaggcttgtcaaattgccttcatggaaaaataatctacaaaagtatggtttaattgattgtcttacatgataattttccctggtaacaacttagtaagtgatatatcttttttcctaaattgcttaaatactgtgaaattgctctgacaaattggaagtgtaccattggcatatttgtcttcctttttatgcatgatggtaaaataaaagcatgttgttctgctagatttcttatttttcaccttacccataaatgtaatgcttgaatgaagttgttcatattaattaaaaattatggaatcattaaagtcctttaatccattaaagttcttaatggattaaaatcattaaagttcttaatggattaa

SEQ ID NO: 14554 - DNA, 214 bp, Homo sapiens
agaatcaagcatttaagcatttcagtgattgagaacaatactttgttttctaaatgtagatattgaactccttaatacaattatgaatctgtgaattctcttaagtcttaacatataatttaatttctaaaatgcctgtgttaattgaattatacctatcatacttcattgtttggtaaattatttcaataaaatgtcttgtttttgcattgtg

SEQ ID NO: 14555 - DNA, 57 bp, Homo sapiens
ataagccttaggagatgccacattccagaataaaatgtttccagggtctttgcatct

SEQ ID NO: 14556 - DNA, 125 bp, Homo sapiens
tagcgttgtttgggaaatagagagttgagataaacactctcattcagtagttactgaaagaaaactctgctagaatgataaatgtcatggtggtctataactccaaataaacaatgcaacgttcc

SEQ ID NO: 14557 - DNA, 2982 bp, Homo sapiens
attgaccatatctccagacaagattgttaatcagactattctgaatttggggcactggggaagatggtgacaaagactacaaaatcaggggaggctgtttgttgcctaaatgaaaggcgggtacctcagggcttcatgtgaacaattctcaatgcataaaacaccctgttttctgtggtagaccataattagctattgcatgtaaagcaattttgattttcttgaacttgtaagcaccaaagcatgtgtttcccaaaggggtattactgggctcttaagtaccaaatgaaaccctactgttttacttggttccttttccctttagtaggaggacagtgctaactggaattttataaggagtaccctttaaaatacagagagtaagtgaattcatattttatattctagaatgttaactgtggtatttcagaagacagagcttgactcaatgaattgtagaaatataggcttgacttaatttttgtaactgaaaggctttagacttaaaaaaatttattgtgcatcctaaaatctaaaccaattattaatgatcatttattgtaatgagtttgcatttcagctttattcaatgcagtacaaaatagttttctttaagcagtcttttatcaatcaatgctgcactagaaatagattctcaaaagttactaaacattttactttttttgttttttaaaagaaatgcagatgagtgtaaaacatctgttctcaattatgttgatctgtgtgcgcagtactggagcatttacccattcatgttgagcctcaaatgcttgttttctggggtccacaaaagacagttttatacattttgagttgttcataaagtttgtcttgtgatagtcctggcacttaaagacaaatttttctggtagtaaaagttcagatttattactatgtcatgaaacacagtacattcaaatcaaacggcagttttctttctaagtaaatgatttccagtcatctaaaaggtgggcaagatgagataaagacattttgatacagtaattgttttggttgggttttcatgtcagtttatgtttgactaaagctctcttcatatgcaggtttataaatttgttaggtctgttgtcccatgattaaacatggagtgcctcctctctgatttaatattctgcaggtcattgtaacctgctaggcaaagtcacaacattgcattaaagaggtgatagctttgctaatatcactgttttaaaggacgtacagttaaaggaatattaagtgggagaaagcctacaaggcttttagaatattatcagtatcttcatttctggtattcagatgttatgtgataaaacacattttttttggctttcccagatacactatatatttgttcaagggtaaatctataaaatgtatatactttattttgtggttttgctatttataaatttaatgttttaactgttgctcatttatggtttgttttgggtggtggtgttcatctgtatatcaccatgttaatttgtaatggaagtgcacttcgtagtgtatattgttactgacattaaaatactttatagcattgtctctgagcaaaagctagtatttaattgtacaaatgaataagcaagttacatgttattgtttgctcttgacagggtaggcctcttaaaagaaaaaaaacaacttgttttttctttatgaatcccctatgccaaacacataccttccatgcatgacatgagatctgcaaactggattttagccaccgtatttatttagtcaaaaaaattgtccattgtagcagacccgaaaacctttttgctgtgacatgaaaccatgttattcttatcttcttaaaacacagcctgggatggaatggccatggcatttttttcagagaacatcctttatctgctatgactgaatccttaggaaatgtaagctataaccctttgattttcaagaactaccgaataagtgtatgaagaggtggttttttaaaacttcaagttggaatttttatgaggtcactgtgtaatttgaagaattgtgtgagattgtcatgatataaattccttttaaggactgataaatagaatgaaaagtttccaggtagtttaaaactccacaggtcagtttccttttcattcctgcttcactgtggtttataagcctacgggagagcaccgttgctcagatgctactgtgagcttcctgtccggtgttagaaagtaactagttaaaagttcattttagaatgtatggtttttggggatgaactaagaattagttattagttccaaaggactgagaaccaattttaatattttcacatttataggaaagaaattcatatgtccctgaaacttctaggacaaaaccaaacaagtaaggagggaactgttgcaaagccatttcatcgagaaggggacagaaggagaaatacacacatgtatacacaaacagaatggttgagaaaacgttttaataaaatgtgagggttgtatgtgtgcgtgtatatatttacacttaacctctaaaattctcttctacagtatctctgttatgaatatgatggaaaagcaacattttggtggtgagactattgttaaaataaatttgagaaagacgaaaattttgtgagtcttgataattacaagtcaacagctatcgaaagttagcacagcttgtctgtggtgctgtttttttccccactgcagtggacttatgctgttttcatgtttagaaacaaaaaggtttcatgtgattcatgtgtaagatgcacagtatttgacatcctgattatgtaatccctattccatctatccagtcttacacttatggttggcctcaaatctattgcatttatgataatgtattatatctagttgagtttaatatttttttattagcctgtaaataaagatggcatcttctacattaaaatgatattgatctcatttttttaaataaacattttgtttccttgacgtt

SEQ ID NO: 14558 - DNA, 198 bp, Homo sapiens
ttatttgtctgtcatttaccctgtcaggtgtcatgccaggttatgtatacatttatgtggaggtgattaattttgtagtaacttttgagaagccctctgctgtctgcagaaatccaaggattttctttgaggatagaaatgctcttgtatatctttctaacaaatagtaaaatctttaaaaaattaattgcctacacc

SEQ ID NO: 14559 - DNA, 1025 bp, Homo sapiens
tttaacattacttcagaagttaacacaatggttttttctaatgaaaaactacctataataggataaatttcaagctaatttttgagttaccactaaaaatggaaggaaatatgcaatgttattttggtagctctaagaaaatatcttgcaagctccaccttcactttgcatcttagttttgaacaatcctattcaattttctcattctctagtgattaccttcatacttttatgcaggaaaaagtccgtatcatctggcattttatcaagactcagcaactggaatgttaaactaaagagggggatatttcactttaccaagtagatagatggtatagagcttaaggcattttcatgctcataaatctgataggcaacagtagctcctactgaaatttcttaggtagggaatgtttattaatatttggaaaatatacttccatcattgcaatgtggagcttcattcataagttgtaatgattctttagcaagtacacttaaaagcctttgcaggtagaatgtcaagatttgattataaataaagtgacccagggaatttagaaaaaaattattttaaaaaatatgtttgatgctattttgtatttttacagttttgattgggtaatgtttctgttcttctgaaaacagacccttggcttcacacattttaaaaatgtttgctacttgttaagggagtcagattaacttccattgggctaatgaatgctcaaatttctaatgagaaactaacactttaaaatttatcatacaacagaaaatggccaattaatggtcctgtataagtggaaaactgttaaggaggtctcaggttttgaaatataactcaacagtatattaaccattgacaagaatggatttttggaattgagaagggtagacaaacttcaggatactaggcaagaatatataaagaatatttcccatgcgttttaaatccgtatgacccagtgttctagagttctgtataaaatgataccaacaacaaataaagatgcttcccaagt

SEQ ID NO: 14560 - DNA, 272 bp, Homo sapiens
aagaattgtgttggcacagctctgtatagactgttactaagagcatgactttatacagattgttatgtaaataggctttcctatgtcaaacactgtgaatgagaaagtatttgtctctccaacttgaaaatgcactgtatttcctgtgatatttattggaatcattctataaggtactatattatgtgtgtaattataactgttatttttatttgagatggaagagtctttaacctttgtaattactgcataataaattttgttagaatcaa

SEQ ID NO: 14561 - DNA, 1715 bp, Homo sapiens
aaagacattttatattttattctgctccattcccttcactgtataccttaataattccttttctggtaatcaggcacatgatgaactttgattagtaggtctgtgattaagttcttaaattgttttgcagtcttttatgtttattatcataggtataggtggacctaaattccttatcatatcctttattaattcagccagtgtatccaccagttttttgtttatgtttttaagtaacctattatctctggatttcatgaaggtgtaatatcgtttttgttaaactgaatagaattgtatagcgatgacctcttaattataatttgatttgactgcaaaactttttcctcctctaagaggagatgatgtctgctttaagctgtaatgttttgccatgttgcaaaaagccataataataagtataaaaaagctttttcctttacaatttcatgttaatctggtttgtctgtccaccagagacagatcttctgtgacagcctccttatgcaggtctatcattatttgatagaatgtcttctaaaatacttcactcacattgtaattcaaattagaaagtcattccaaaaggatcatgtcatgttgacctcatttcatcggaactgcagtatatttttgttggttaattatattagtgttttctattttgtaaatgtgtcctttaattttactttaaatgccctgtgtcatttctggattatatactagttaatttcttccattccccactacacagagaggtgagctttcaaattttgcagagctctgctatcactgaattacatttatctgaagaaaatagtacaacttaatggattagcttttgggtttaactgaatatatgaagaaattgggtctgtctaaagagagggtatttcatatggcttttagttcacttgtttgtatttcatcttgatttttttctttggaaaataaagcattctatttggttcagatttctcagatttgaaaaaggctctatctcagatgtagtaaattatttcctttcagtttgtgaaagcaggatttgactctgaaagaagctttgccaattttacttattcgtgatcaatcaaggaaaatctaataaattttaggccaaataagaatatagcatatttagtatggttatagtcaacacagagatcacaacttagaagaaatataaagaaatggccactccccatcccccacagtcctggagtaaatcaaaatcaatatatgattcttttaaacattaagtttgaaataggaatggttttctcaagaatagatttggtgtgataccttgtgtttgcttacattggcccactatatatacatatatatttatgtagatatacttccatgaaagggctaatacgatgcatatactgaagggcaaggactttgaccatgtcaattttcagccgagaatggtcagaaagatcagtacaaccccatggattaggctgaaacatatgaaattgctgcatttgtagtttaaaaactgtcagcagtttcatatggttccacctaatattattgaagacaattattttcttagctatcaataggcttaatagttttagttattttagcttttgaaagtgttttaaaagatttcctttatcggacaggaccatctttatgacctgctttctgtttttcaatatcatacattggtgtatgtcaaagaataaattagtaaaattagt

SEQ ID NO: 14562 - DNA, 1290 bp, Homo sapiens
atcatgagacacacggtttaaatttaggttttatttatttttaaacacagcaggggggcttgatgtttttctgtgtctgtaacaacatttactttgtgaatatacatattgtaaatactgagaagtataacgatatatttaagtaggtatgagctcaatttgtgaattcatttttgtaaatttgttgttttgtaaggttattatagaatcagatctagcttacttttagttcttattcatgtttaagagttagtcctggccaggcgcggtggctcatgcctgtaatcccagcactttgggagtctgaggtgggcggatcacgaggtcaagagatcgagaccatcctggccaaaatggtgaaacctcgtctctgctaacaatactgaaattagctgggtgcagtgatgcgcctgtagtccctgctacttgggaggctgaggcaggagaatcgcttgaacccgggaggcggaggttgcagtgagccaagattgtgccactgtactccagccaggccacagagtgagactctgtctcaaaaaaaaaaaaaaaaaaaaagtcccaacttacatctcctttattcagatgatttaaatattgtttccagtgaatttggaaaggagaagtaatagtgtaaataatattttgactagctgcagaaagcccataagacaaggaaaagacagtatttcttccattctttatgtctgtacatgtaaaggaaaatggataaaactacagctgcttcttttacatgtggaagaacaatgatactatttaccatggcaagtggtaggaaaactgttgtccttggacataattgttttttaggagttgcttttgatacccatatcaatttataattctttgtttgaaatgaagtctttacatggttcattgaagagatagattggttatttcatactgataagcattctactcttatttgttatgcattttccttagtgatatattttacttgtactgaacttgaaaatataaaggagaatacatttctaaattattttaaatggctaacactatgatttgtcttatttaaatagatgtctctgcaccggtaagattaatacaatatgtgaatgtctattttttatatcttaactcacaatgagtatatgaaagataatacacgaatatattacattattcatttttagtcatgagtttatttcaataagtttttctaattgtagatactgttttttattctttccttgtatctaaatataaatcaaccattaaaatcattctaactctaaccctgcttttttt

SEQ ID NO: 14563 - DNA, 1696 bp, Homo sapiens
gtgagacttctagcatgaaagtcccactttgattattgcttatttgaaaacagtattcccaacttttgtaaagttgtgtatgtttttgcttcccatgtaacttctccagtgttctggcatgaattagattttactgcttgtcattttgttattttcttaccaagtgcattgatatgtgaagtagaatgaattgcagaggaaagttttatgaatatggtgatgagttagtaaaagtggccattattgggcttattctctgctctatagttgtgaaatgaagagtaaaaacaaatttgtttgactattttaaaattatattagaccttaagctgttttagcaagcattaaagcaaatgtatggctgccttttgaaatatttgatgtgttgcctggcaggatactgcaaagaacatggtttattttaaaatttataaacaagtcacttaaatgccagttgtctgaaaaatcttataaggttttacccttgatacggaatttacacaggtagggagtgtttagtggacaatagtgtaggttatggatggaggtgtcggtactaaattgaataacgagtaaataatcttacttgggtagagatggcctttgccaacaaagtgaactgttttggttgttttaaactcatgaagtatgggttcagtggaaatgtttggaactctgaaggatttagacaaggttttgaaaaggataatcatgggttagaaggaagtgtttgaaagtcactttgaaagttagttttgggccagcacggtagctcacccttgtaatcccagcactttgggaggctgaggtgggtagattacttgagcccaggaattcaagaccagcctgggcaacatggtgaaaccctgtttctataaaaaataatctgggctttgtagcatatgcctgtggtcccagctactgaggaggctgaggtgggaggattgcttgagcccaggaggcagaggttgcagtgagccaaggtcacgtcactgcactctagcctgggcaacagagtaagacaaaaaaatatatatatattgaaaatcaaaggaggcaaaattttgacagggaaggaagtaactgcaaaacactaggctttagtaggtacttatataaaatctagtccagttctctcatttaaaaaaatgaagacactgaaatacagacttaaatagctcagatagctaattaggaaatttcaagttggccaataatagcattctctctgacatttaaaaataatttctattcaaaatacatgcataattgattttacacctcattactggtggataatttatgtgatgtggattgctggtgtccagcatgacccataaacaggtcagaagaatgatggaatgttttagaataaactcctgcttatagtatactacacagttcaaaagatgtttaaaatgcttttgtatttactgccatgtaattgaaatatatagattattgtaacctttcaacctgaaaatcaagcagtatgagagtttagttatttgtatgtgtcactagtgtctaatgaagcttttaaaatctacaatttcttctttaaaaatatttattaatgtgaatggaatataacaattcagcttaattccccaaccttattctgtgtgtagacattgtattccacaattttgaatggctgtgttttacctctaaataaatgaattcagagaaagtg

SEQ ID NO: 14564 - DNA, 2263 bp, Homo sapiens
acacacatgtatgacccttacaagtgctttaagattttaaaaatgtgatgttttgtccacagtagttcaggcaattaagaatatgcaacccagagaatttctgtgaaaacattttgctctttggcctggtgtggacggaaagggtggccaaatggattgagtgatgagcagacatgtttaagggtctaagtctcaagaatctgttatgtgtgtttgctgcggtgggagggggtgcttgtatttatcttatttccagtcactataaggttgtacacaaactaatttaaagtttacttaataatggtatctttaaaataattgacacaattgcaaaatgaattcctggcttcagttagctattatttttttaatgacaacatagactgtgctctaagtttaaaagatggggaagcttatataaaagtgacccttttgcatcatatgggtatctaaacttaatttacccaataagttgatgcttaatgattttattttatttttgtctatttctattttagttgtggctttgctctaagaatgggtaatagttgtactacagactgctataaatttcttgtgatactcttttagagctcaaaatatctctgagctttagacatggtaaggtggagagtaaatgcttgataaatctttaagatatgtcttgaatgataattaggacattcagtccagtggaaatacaccattcaattagtcaggtctggtgaatcgtttgtttaaaatattagcaaatgagatgtggaattctgaaatttctccagactgtgtcttaataaaaatgtcacctgggtgaaattttagatcaatcactaaatttgggtgacaaatataaaaatattttcatttcactttaatacattctttctgtgaagtaaaatgtttttctttctcataatggcaaaatatgaatgccatcaaagtttaaggaattcattttagccttaaatgccttcgtgagatgtcttacttgtattttaggtaactggtcatcagtgccaatgacatggataacaatttttaatctactcgacagtgcatccctgggaatgactgttatgtttttgtcatattcctggtaatataaatactcgtgttctttactacattgtttttatcaactctaaaagtcatgcctctgtgacctttatcatgtttacaattgcaactgaacttatgacaaattaactcaggaaataaattgagttatcctttctagcattgtaattaccatcagcaaggcctgagatagccagagccaatactagccaagtgatttattttcaaggattgccactaactacggttctttaggaccaagatataaaacagtcactaaaaatcattaggctaggtatcagtaatacattcattactaataatgcatttttggagacttttgtgaaagaagttggtctctgccaaaagctggtggaccacattcacaccacgaaagccagtgtcacatgaaccagattaatgactctctttatggggtatgtgggacatcctggaagtgtataatttcaggaatgaccagacaataccatcttgcaaagccccttcaggtgacaatctaaacttgtgggtaggagagtgcataaagtttattgctcaactgctcctccagcctgctgaatttactgagtaaagaaatagcaaatatgatagatgttttagatttcatagaacagaatggtttgtccattaattctttcattcaatgactgtttattgaatacctactcttttagggcgctgtgttaggtgctgtattgtacaagaaaaatataataaattagattcccagcgctattctgacatagtgaatgaccttgaaaaatttactaaacatactatgtttgtttctccatgagtaaaatagggatatagggacaaacagtctaatatctcatagaaataccatggagacaaataaaatattttaatataaatatgatattaaagtaaatttctgaagtaatacttttgggtatggcactagtttttcctctgactattttactgtttctttcactctcaatataaaaactatttgataagataaaacgatatattttattgtaattagaatttagacaaatcagctataatgtaaaaatgttaataataattacgttttatctgattaaagttacaatgatcatagcactttaaaaatattatctgaactgtcatttgtttatatattaccgtctaataaaatagttatagatcttccaag

SEQ ID NO: 14565 - DNA, 796 bp, Homo sapiens
gacactctctaaattgctgcactcctgtaacaaacattatttttccatttcattgtattgtgttttgccattgttggtctgttgatttccctagatgtgagtctgtttgttttcaattgtctgaacttcagcaagaaatgtgatacaacttgggcactaaaagaagccacagaacaggaagcggtcatgaaagtgccatggatgaacactggaggtggcagtgcctgtttatgaactaaataaataaatattaaacacctaaaatattagaatatttattggagatttaaaatcatcttattctgacttaattaccgatatccccgaaggctaggttcattgaataatagaaaatttcattatgattgcttttaagaacagattcttcagctgatttagtgataagaatccagaaaagaaaatgtactagtgatgtattctctccccagatgaaattgctgccttattcagatttactctcttgagccagattttgaatttcactgcagactgcttcagacttctaatcataggcttgtaaacctactaataggctctgcccctcttcccaatactttttgtcatttagagatataaaccggggcatataaaaatgcaacttgtattcctttgtatatttttccctgtctgacttataaatcttgagacctttattgtaaaagcatgtatcatcaggtgagaaatataaataggaactggggtcattgagcctcaggtagggaatatatcaacccgatttcttcctctcttttcccttttataggataaataatcc

SEQ ID NO: 14566 - DNA, 1564 bp, Homo sapiens
gttaatgactccagagagtaagatcagattcgtccacaaagagatgggcataataccaagctggggtggcaccacccggctagttgaaataatcggaagtagacaagctctcaaagtgttgagtggggcccttaaactggattcaaaaaatgctctaaacataggaatggttgaagaggtcttgcagtcttcagatgaaactaaatctctagaagaggcacaagaatggctaaagcaattcatccaagggccaccggaagtaattagagctttgaaaaaatctgtttgttcaggcagagagctatatttggaggaagcattacagaacgaaagagatcttttaggaacagtttggggtgggcctgcaaatttagaggctattgctaagaaaggaaaatttaataaataattggtttttcgtgtggatgtactccaagtaaagctccagtgactaatatgtataaatgttaaatgatattaaatatgaacatcagaattactttgaaggctactattaatatgcagacttacttttaatcatttgaatatctgaactcatttacctcatttcttgccaattactcacttgggtatttactgcgtaatctggaacatttagctaaaatatacacttttggcttaaaaattattgctgtcaattccaataataattcttagcttataaccaaagagcagtgtttaaaaggagagcttctatacaaaacctattcctggcgttacttttcatacaatttttgttctgttttacctggaaataatttaccaaaataactgagtgttgctgctaaagaacaaaagtggggaggtatcagggaacaagaaaacaagaaagggtatgatcaatcattttcttctgctccaaacagctggagtaaaattcatgggaaatggcccttcatttaaaaaaagatgtacctcactacccactacaaatttggaactttgttcttttcaataattagttttctattgtaaattacctactaaacagtggtagccatgacatggaaagtcaactgattctacaattggacattcatttgtgtgccctggaatttccaactagtaataaacaactactgttgatgtagttttaaaccacttgaagggactcatgaagcatcctgcaacataaatttgcatttttacatcagatttcttttttttcctgaaaaacaactaaccttctaacaactatctttcaaaagtaaatgtaataaaaatgcacaacataaaatgtttatgatcccagcaatacactttttaaaaaatgtgaaagtcaaagaattaagttctagttctgactcatcacaagaggtcaaaagtatttgctactgtaacattcaattcacatttgagaatcatggtaaaaataacttgcatttgccttaccatcatgatcctactgttgagttaggaaaatatggttagacagactcacattactttttttcagaggtaaactctagattactgtgtcaacccaatactatttggccatagatgtaaaaactaccaaataaaagtggattttgtggtctac

SEQ ID NO: 14567 - DNA, 3518 bp, Homo sapiens
gtctttggcctggattgctatattacagaagttctagtcccacttgtcaaacagagcattctgagtgtttacaggcggacctgttctcttccgacaagcaatttgaatcttaactttccatcagtcttcagtgtttttaatctaaggaataattatcttcctgcattttgatttcttagatcagaattttttaatgccatcctcattagttttccaatacaatataagttgaaacaatgtacaatattgtatattctttgttgcaagtggcagaaagtaaggttatgtgcatggccatgtgtttgtaggtgcatgtgttgaaataggaagtatcctagtatgtatttagatatgaaaaacttatgtgctagtgttgactttgaaattataacatgtatacctatatattctttgtgtttatttaaaagttttgaaaatatgcagtactgtttatattttgtataccttttaataggtatccacttaaggcatttgcagtacaaatattaattgaccacttccttggcccccagctacaatgaaaaagaagaattatgcacacatctaacattggtagatttctaaagacaactcataaataatttcttaacccatataaggataaaataataccattgatattcttgtttattctttttaaataaaaatgtcacaagtttaatagatcagccttgtaaagcaagcataaaatgttcataaatgttttatatattatttggtagtctagtatggctttaactgaatatttgatcctcagagacagtatcatgagactgcattataaatgacatgattaaatgatgaatttattttgtcagcctcagcaacaaacatttcctaaatgggatgcaaaaagaaactgaatgatgttgaattttagtttttctttaagttgtggtaagcttttagtttagctgctttaacatggagtcatacatacttagaggtaagtcatttattatttttttcctttttctaatcttttccttaaaattaatagataacaaactaagttacttttttactaacaaggaagatcaggaataatatttctttgaaagctgaaattatacttctcacagtttgctaccgaaaaaaggcttaaactaaaccttgacatccacagtagcatcaggaatagaaatgtgtattttggctacagtttgcatacagtgaacacataaaatctatattgaaaactgacagaaatatgaatgtcgaggggcttggaattctaaatggaagattttagaaggaactttgctctctactgtcactatataaaaccaattatgttatgttattagatattaactctatttaagcttttcttttactaagaaattcttatgccaaatgtattccaagagccatctccttatgatgtatttgaaccatttagagaaattcacttcattgtaccccatgacctgaggtaaagaaaataattttcaaattgcagacttccttgaaaggctcaagactgtagcatggtgatgtctagattcatactttactgtaaggacagtttcggtagttaagtggaattaaaggtctagagtgatttgtattggatggtaactaaggtctatacatctactcttttaattcttatttccttcaggaagatccttttccacaggaagctatcaaagaaaagtaaactagacaccaagtaatatcactctcataatatgctttccagctagaggggagaaaacaccaggaaagaggaaccctgggtcataaaatgacggacctgttaggaaaatgctgttgtgtgacaatggagagcctgcccaaggactgtgcaacctatctgttcctctccaccagtgtatcccaagtagtctggtatgatctgtggttccttagaatattgaggatctctttaaaaaatgaaatttctgatctcaccccatattactaaagcaaaatttccaggggtagggactgggactccagaaccattaataaaacaaaacaaaacaaagcaaaatattgatgatcaggcagatttgaaaacagtgacattgcttgatctctgaatggatggatgcccttgggtggtcacttttcttcctaggacttgcctttgttatctgtaaattagaatggctatactttcagacttcacaattttaagccacttttttctattaacagttgaatgaaccagtgggacacattttaacgtcttcttatgttgactaaaattatagttagagctgagaaaaaaaaaatagcatctagtccaactccttgattgtaaaactgaaaaactaaggttatttgaatgttctgttttctctttttaaatattttataacttttaaatggaaaaacctattaggtaaatggaaataatccttgaaaatagtttttgatgttttgtgatttttaactggtaaatttctactttaggtgggcattttcttccctagaatatgccctttattatgctatcattgctagatttaaagggacttgtaagcatttctggaaatatttgatttaaaaacatatattaatagatgttttccctagcagacttttggagcaaaaatattattttagttcagcagaggattactgatattatgggctgatctcagaaaggaataaggatgaggcagagaggagtacttgagtttgtgtgtgtgtgtgtgtgtgtgtgtttgtgtcagtgtcacataagttctccatattgccttatgtcccaaagccaaatataaaaatataaatgatgctttgtataattcattttatcaaaaattacccataactttcatttgtttttatatcgacaatgaagatgatcatatttcattttgcagatgtggccataaaatattatttacttctatataggtgattttaccaggtttagttatcctgagaaaacatctggacttaagagtttctgcttccctacaaagatctttaaagttatttttaggcacatttgtgacaaacaactacttgatattgaaatctccttcagccattagaagctatcaaataaagtaggtgtaaaaacaactgtctgtggcatttgtatacatcgagaacatttttctttccctcattttctgcagtgaactccagtaaagctaagtgtcttatgaaatctaaactcatatatgtacacagttcactctagcttcttccaaaatatctctaggtagtacaactgaagccaaacctgcctgacttcctgctcctggccacccaaaactccatatggcttctcgtacactgacatcctctctctacccatttaactgctaattgagtctgataaaagtcttctttgaaaaaagtttttacttctaagatttgcatttacatcataaaattaaaccattttcaggaaaatcagatttttttattacagtactatttgctttaaattcggcatgtttttcttaagtagcaagtacatgtatcggaacttagaactggtgggcgcggtggctcttgcctgtaatcccagc

SEQ ID NO: 14568 - DNA, 168 bp, Homo sapiens
ctttgccgggaagtaaagctttggaggaaaatcaatatcaatgaaagtgctaagatcattgatctttaccatgagaagaccattccagagaaagtgatagaatcttccccaaattaccccgatttaggacaaagtgaatttataaggacgaatcacaaagatggtctg

SEQ ID NO: 14569 - DNA, 1784 bp, Homo sapiens
caagatgtgacagaagccacttaggcagcaaacataaatgttgcagtgaaaaaagaagctagccttctagctgaaaaacgagtattccccaatggactccagaagaaacttgattcatcgctgcaaaggaaagaacaaccttaaaacttttaacagataaaacttacagaaacctatgatatagaattcatatagtctattctgttgtgtctaaatctgtaggcattgtgttgttgttctttaggacgtatttatttaacttgcacattttttcagattcttatttctactaccaacaactaagtaattgggaaataattctgtatttcagtttctgagtaaaaccagtctgaaataggataaaagccaccaaatattttcttttttttccagaatttgttttgccattttttagtgctatcatcattcctaacaagactaacttacagaaaaataattatatctgactgatttaaaatgttcaggtttcttatccaaatcccttggaactatggaaaggagtttgatttcacattcacagtgtatttacaaaatacgctgtgtcataaatatgtttgaattccaacagccaaagccattgagagtcataggagttttccataaccttctcttctatgacccaacaacaagctcatgactgaaatttcaccagatttctgagacgatgtcttaatattctatgtgctatgtaccagataattctttagatgaatgtttcttaggattgtaggaaaattatctagttaatcataatatttgatggaaagaaaaagacaataaaattgtaatataataaatttggctgacaagaaaccaaagtgattcttaattagtatacatcagaatgatgctcttatagttgtaccatctataaaaattactttaagggctctcacattttaataatttatcttattatgtattaagtatacaggaacaatattatttttcctttaacaaaatgaagagacaggctatctggttaatgttacataggaatttaatagtaatgcttgaacttcatccatagatcatactctgtacaaaatttgttagctaacatcctatctcataattattttatgttttgtggagaaatttgttgattttgtaccaaagtgtttctgaagacaataaattgtgagtcaactttagaacaaaaaaaattagagttttttcaatgtttatattctgattaagcttactttaccttacattttttctaagtaacaatgaatcctgatttctagtgtcctaaaaattgcttagtgatttgattgtggtaatatcatttcttatctacaatgtctaaagttttatgggacagtttttcttttatttattttgcctgtttgtgcagataagaacagaaacttttctaagacccacatttggttattgaaggccacagcgaatcttaacctaacagccttgacaaactgcaccataggtgtttttagactcatataatttgttatttttcaaacaatagtgaataattaatatttttgtttggaatttgagaacaattaaatttgtacttttagtaactaccattctttgattagaaaattaagagaatgcatatcttactttggttgtaaattatcaagggctttctaatagaaatcatatataacatttctaaatataagtcctttcacatactgtgtttccagttgtcttgatattgaaaagtgtaataaacttcatgctcacctattggagatttgggaaggttgaaaataaacttcctaattttt

SEQ ID NO: 14570 - DNA, 1440 bp, Homo sapiens
ttgggtgagactctttaaagtgcatccatgaagaaacctgtccatctattgagccagcagctgttgtacctgttacacttgtgcagaaagattttaatgtggggggtgggagacttttacatttgagaggtaaaagtattttttttatgaagttgtgtatcttaataaaaaggactgaattagtttttattactatattaaagcatcaacatttcatgccacataaattatatttaataagaaccagattgaaatgagaacgtattggtgtttgtacagtgaacatgccaccttttttctcatggtttcagtagagcagctaccacatgttgcatgagttcatactttctacgtggcatttttctccctttctaaaatgaaagctgatgaatcttaaaaggaagaagaaaagaaaagctgtgcaaattcatagtaaagttcgttttttatatgtttccagtgtagcagatctctatataaatatataaatatatataactggcttattttcttttaatgtgcaatgatggctggatcatttaaagttctttttagaaaataacataagccaaagactcaagtgtaaatatgtctatatggagaaagcacattatatttattggttacttacattccttttttgatggctaaaatactaccaccacacaatcatcttttttttcctgaagaaagctttttctttagctaaaatcaattgtaaacgatttttgtagattattttttgtatgttttagtgtaagtagaagataaactttttattcataaaccaggaagcaatgttctttatagtgattctcttgtgtacatgcttgtgaattaaatttgtgtaaaatcccttggcaattgggtcttttaatataggaccaaattaaaacattttgctgaatatgtatagtttttcacaatttcattaggtaaataatggtttggtgatcatacatgagaaatgtacacattaaaaggccttgctgacaacttgcacaatgttgaacatagcctttaagcatcatttaaattttaaaggaatggagtttttcagcctgtggcccagcactggtcaagaaaacaagatggcaacatatatgctttcagggtcaaatttgagcaaactgtaaactgtcagggtgataaaatgtttctcttgatgtttacatgcacaagctttgcgttctgactataaaaagtgtgaacaaatcaatgccagattcctgttttgcgcattgtcatgggattcttaagtgaacctttctaaatgtggtcttgttcacatgctccacgtagctgtaacttcacatcatcagcttgcagtttgtaattgactaaagcattccagtgtcctctttctagattgccagctcatgacatggtgcttataaagatttaattaaagtaagaatgaaataaagtttttataattat

SEQ ID NO: 14571 - DNA, 1417 bp, Homo sapiens
aagacttaacaagctgcagataaccatgtggacttctgtcataattcttgctgagtcaagagtgtaaataaaagaaatggcaggactcatattattcagttgtacccaagtatttaaaaatgactctcttaagccttaaaaagtcatagatttgtgctgctgccagaattatattaattattattaatgttattattagaaaaaaaatttctggagtgagagtaaagaggcttaattagtttgtgggcagttttcatatgctctgtgaaatgtgtccagatgtgacatagtttttttttttaatatgtggaaatgtcttctcttcccattcttttctcctaaaatcatatatactgtaatatatgctctctcacctctattacctcctcacatctaccctttcccagttaggtttgctttttgaccaaaaagataacaaataccaggtatggcaagttgtgaagacagcacattaaaacatacctaatttcacagtattcctgtcacgacagaatgttagtattcatctctttgaatcatttgctcaaataataacattccaccttttcctgctgtatcacaggaagtgatttgcattttttttcagttcatctgacttatgttcacagaaccgtatcagcgaccaagaaaataggactgtcagaagctgccagttattactgaaccattaaatacttatatactaagaataaataaaatatacccatgtgaaataataattggattatggataacaagagagtgaaagccaaagcactttctgtctactgtactcttctaaatggaattttaaaagtcatagctggctttacgtgttgtcattattagcattataaatatgcatgatagtataatccagtaatggttgaagaatgtattttacttaaagagggatttttttttttaagtcctgaataagtctactggaagaattattcttctgggtgaaaaagcttttgtttgtgttcttattttaaataatcggagtcaatttattaaaatgttcttgaaagtactattcccagggattttaatgcacaaaccatattgtgacaagagatgagcctctgtactgtaaataagaaatgaagtagagaaatgttaaatattttatgagtttagaatatagtaaataaaaggtgatgtaaatgaatgctgcacaaacggtgttcatgatacttttagtagtactttaggaaaaactacacattctcagaagctcttgatgtctctaatgaagggggggaatgctgttaatgagaacagtcataaatttttagcatataattacaagaacagcctgtggatatgatcacttaaatgattttgtggtgattcgtgccattgcttttttatttaaaagaaaattttgtaattaaatgcctttttctaaatt

SEQ ID NO: 14572 - DNA, 74 bp, Homo sapiens
attctctaatgcacagaaataatgttaaatagaataactgtggaaatatattttattttctcatagattttaca

SEQ ID NO: 14573 - DNA, 204 bp, Homo sapiens
tagcatgccaaatattgtactggaatttacctctgggaaaactgaagcttcataagaaattgttttgatttagggttgtggtagaggtaggtatgagaaaatcatcttgtatttatagatgctaatgaatttcaatgctttctatctttacacttagatattaagttctttgtgaaattctgtaataaaattctacttcattaa

SEQ ID NO: 14574 - DNA, 310 bp, Homo sapiens
tggcgcgatctcagctcactgcaacctccgcctcctgggttcaagcaattctctggggcagcagttctaagctctggttgcacattaggattcctagagattcagattgaattaatttgaggatgggattattctaatgtacaaccacggctgagaaccactgccgctgacgtttcaacacaaagtttgctgtttgaacctgcctgtctcctggatttcaaagaccactgtcttcattgcacaacaatgtgaatataatcaacactattgaactgtacctaagaatagttaataaaaaactgagtgttta

SEQ ID NO: 14575 - DNA, 1249 bp, Homo sapiens
aaagtcattttttaaacaacactcaactttgtgaacccctgaagattttttgaccgttccaagtcttaatgccacaccactattccagcgaatttatgctacaactggtaacaatgaccagaagcctgaagaattaaaatgccaacaccaaacctttccttaccagctctggtctatattgctcccatgcatttaatatattattttgttttataaccacttctaaatattctcagttctttctttttgttgttgttaattaaggggttttggttttgttttctgtttactttgtgtgcaactacctgcttttaatgactcactttgatcaaatgacagtgaacaaagccagcccaagctggtaaggtgctgttcacttgaacaggtgctgttgcgcagaaaggaaactctgtgactaatttagatagtggctttccttcttctggattcttttcattgaattctcacagtaaatatttacggagttttcaaattgcagcaaatatactgtatgagaaaatattaatacagattaaaagcctttcttacatcttgaaaattttctaatatttgagaatttcacagggatgttttttatattggacccttttgactttccagtcctgtgactttctacttttagtagagagtcagaatctctggactggagaataatgaagaagttcactgactgtgcactgtgcttagagaccctgccgcaccacagtgccaatgcttgtcagacacatgcccttcggcagcattccagaacaggagggaagagaaagagaaaactttcttcccttctactaaaagattcaggcagcttaaaaccttagtgctttctttcttaacatacccacatttcaattctttccattatttgaacacttgggtagaactcttgctttgtattaaacctctttgtctacacatgtaaaacttaccttttgttattgagcaggcctatctctttcagatagttttatgattcacacaggtttgaggatgctggggagagggggagggggctgtggtggtgttctgttggttacaagaaagttataccatttaaagctggcaccagagacccgatagggacttattaactatattgaacattttttcctttgcctttgaccctatgtatagttacgatgccagattagatttatagcagcctcaagttgtattaaatgatattttgcttcctgtaatactattataaaataaagtttgtttattctct

SEQ ID NO: 14576 - DNA, 946 bp, Homo sapiens
agccagactgtactgtggagaaagtagaaatatatccgtctttgagagtggactcaaaccttttaaatctgaatgcgatcacactgtagtgatatagtagaagcagtgatgatattcagattgttttattttgattcaaatgatgaatctgttgacaccttataactcccatctccctatctatatttttgtctctaagagatcaagtaagatacatgttgttcatattcataacaacttattagagctatgtaggaacatagaggtatctgtgatcaaatgacttgtcattggcactttcagtctttcctattctagccgttgtttttgtttgtattttttattattaatgacatatttagtcttcagatatattattttaaaggcaccacacatgtaaaacagttattacaaatattttatacataaatctcttggtagattttcagaataatagagatttatatcaagaaaaggaatctagattttgttgcattgtaggagcaaacaaggcttcatattctttttaaaatgacttgaaattttattataaatttccatagtttctatcaaggtcaactggcagttttattacctttgctatggacttgaacttactgtataaaattagttggaagccatgtaagaaaataacatctgaaaattcttgaacttaaaatcatgcttaaatggttgattctccaatttctttttttaaaaataagttaattgcttttgcaggttgacactctcacctgacagatgatgtaattcttcaatttttataatcttaaaatttttaaattttatatttgtaaatacagtacacattttatttcttggattttgagagacattgttaattttgggggaattggcattgcgaaagacttgaaaactaatgagtaaagtctgctgaatgaataaaccgtgtgattgtttcccg

SEQ ID NO: 14577 - DNA, 325 bp, Homo sapiens
aaagtcagagtacacagcaagggttccaaattaagaggaagcaaaacgctgcccagatcctgagaaacctggagaaaatcaaccttagtagtttcaactcatacattgtcttgtttgattttgttctttgttttttatcctctttaagcacagatgcgtgttgaagtctaaggtgttctgtcatcacactctctttactagaataagtgtgcccaggcagaaaaaaaagtgtattcaatgttgctggcatgtgtggattcacagctcgtggctgtaaggaaatctgggggtttcataaatccattaaaatccttttagagttgcc

SEQ ID NO: 14578 - DNA, 1085 bp, Homo sapiens
agccagagagtgagagacattaactcattagactggaacttgaactgattcacatctcatttttccgtaaaaatgatttcagtagcacaagttatttaaatctgtttttctaactgggggaaaagattcccacccaattcaaaacattgtgccatgtcaaacaaatagtctatcaaccccagacactggtttgaagaatgttaagacttgacagtggaactacattagtacacagcaccagaatgtatattaaggtgtggctttaggagcagtgggagggtaccagcagaaaggttagtatcatcagatagcatcttatacgagtaatatgcctgctatttgaagtgtaattgagaaggaaaattttagcgtgctcactgacctgcctgtagccccagtgacagctaggatgtgcattctccagccatcaagagactgagtcaagttgttccttaagtcagaacagcagactcagctctgacattctgattcgaatgacactgttcaggaatcggaatcctgtcgattagactggacagcttgtggcaagtgaatttgcctgtaacaagccagattttttaaaatttatattgtaaatattgtgtgtgtgtgtgtgtgtgtatatatatatatatgtacagttatctaagttaatttaaagttgtttgtgcctttttatttttgtttttaatgctttgatatttcaatgttagcctcaatttctgaacaccataggtagaatgtaaagcttgtctgatcgttcaaagcatgaaatggatacttatatggaaattctgctcagatagaatgacagtccgtcaaaacagattgtttgcaaaggggaggcatcagtgtccttggcaggctgatttctaggtaggaaatgtggtagcctcacttttaatgaacaaatggcctttattaaaaactgagtgactctatatagctgatcagttttttcacctggaagcatttgtttctactttgatatgactgtttttcggacagtttatttgttgagagtgtgaccaaaagttacatgtttgcacctttctagttgaaaataaagtgtatattttttctat

SEQ ID NO: 14579 - DNA, 1097 bp, Homo sapiens
tcaaaattctgttggacttgacaatgttttctatgatctgaacctgtcatttgaagtacaggttaaagactgtgtccactttgggcatgaagagtgtggagacttttcttccccattttccctccctcctttttcctttccatgttacatgagagacatcaatcaggttctcttctctttcttagaaatatctgatgttatatatacatggtcaataaaataaaactggcctgacttaagataaccattttaaaaaattgggctgtcatgtgggaataaaagaattctttctttcctactacattctgttttatttaaatactcattgttgctatttcactttttgacttgacttttatatttctttaaaaaattccttccttttaaaaaatataaaagggactactgttcattccagttttcttcttctttgttgttcttctagtgtgacttttcaagtgtaacagccattcttcctgactttaatattgtccagttctggtcttttctgtgaattaccactgggccccttacctcaatgctttttgttgatgcccactctggttcccttgtttatctgagtctgttggtaccccaaatgaccccacacccatcttaaagtactttttttcaccttccctgtttagtactggccagatgagttttttctagagctctgtcactatctgaaaagaaagaggctatgggaaacatagaaatggtatgtattaataactgatcataggctgaggagaaaaaatgtagctggctgcaaacccagtgctgtgaggtgacttatatgaggttccagatcaaagacaggccgtgtgagccagtccaggagggtgtaagttctgaatggttccttgctgactttgggtgacacatgtaccacatactggctcagtttaagtcatggttctattgtagatttatttttatattagttaataaatgactttaaattgtcaccaattgaaaatcttgtcactcttttggttttctttatatagctcagccaaatcttgttttatgtcctgtcctcatctcttaagctaaatctgtttggatcatattaataaactaaatgaaattac

SEQ ID NO: 14580 - DNA, 741 bp, Homo sapiens
agttataaaggagcacactgtcgcactacattgtctaaattatgtaggaagattcctgtaatcatgtttttttaattattattttaaagctattgtataaaggatggttcccatactttgttatttttattgggggggttggggtggttcctttggattaaatctgatattttctaatactgaaagattttctaaatgtcactgctgacataactcccttggtcttcaatttaatagttgttaagtttttgcccacattgcatatgcctttcatttataatttatttaccctgcttgacttagttttgggaattcgtaaatttaaaggtgtgtgtattctgtttgcatctccctgtcactgtgacacacctagatgtgtgttacttcaattaaaattctcaaatttaattttgatttgcttcagcagggaaaatattctcaataatgtaaaataattaaggtctatacatgggttgtatttttctggttcacaacagcacaaagtgtctttcatttttttgttggttttcttttaagatcttttttaccctgaagtcggtgaatacttttctagtttatttgatactctttctgtgtatatattaagcttttgctgtagattgcctagtaaaattactaaggataggttgtttttacatatggtctatttaagtctgatgtttacgggggaaagtgtagttactaaaaatgtttaacataatttggaagaagagtatgaac

SEQ ID NO: 14581 - DNA, 1547 bp, Homo sapiens
aatattgactttttctcttttttatttgggataatttaaaaaatgatggatgagaaaagaaagattggtccgggttaatattatcctctagtataagtgaattactagtttctctttatttagacaaacacacacacaccagataatataaacttaataaattatctgttaatgtagattttatttaaaaaactatatttgaacattggtctttcttggacgtgagctaattatatcaaataagtatcacaaatcttttacgcagaagaaataaaaactacgggtagaaaacataagaactatcataaaatttacttacaaggaggctgctcttgttaccacttttattatattacgtatcacttattcagctctgctgaaaatttccaatgactttgtttgtttgctctttttgttttttacctaaacaatacattttgattctcttgtgggttgataatgtctccccaaaatttacatgttgaagcacctcagaatgtgactgtatttggagacagggtctttaaagaggtaaaataaggtcattaggatagaccctaattcaatatgactgatgatcataaaagaagaggcgagtagggcacaacaggcacaaagggagaccataaggagacacagaggaaggacaactctttacaagctaagaagagagggcctcagaagaaaccaaccctgccaacaccttgatcttggacttccagcctccaaaactatgagaaataaatttctattgtttaagtcacccagtccatggtactttgttaggcagccctggcaaatgaatcaaagacccattcctgttcctctccccaccactactgttttctactgtaatctgaagcttcaacaaaaggcttacctggtaagaatattcagctggtctgggtcctcaagactccaatagacactcttagagaaggattgctgatggattgatagtgaaaccattagatcattgaattcctctggaattagaaaaccagagagtcccattttaagaaattagatatttaatatagcattgtgtgttctattttagtaacagcagaatctcttgacattacacaactcagtgaaacaacatcatttaagccaaaatatctcccaactgactgatagactctgagcactaatatcatagtgctgtgatgatggacaattacatagtaccgataacagccatgcactgtgcaaagcatgcccttctgcacaggagagcaaggcacttgcagtagtgatctatgccagcaaaacatcattttgagacaaacatttttgtggcagatgtttttcctaaaaagtactatatcatccaagaaatatttgagtaaaatcccttgttcttttgggtgacattaactgacatttgctttttttcaagacctaatagaaaataagaaagcccataatgtatttagaaacaggaatcctcagagcaattctctgtattctcatataatttcaatgtaaaacagaaaacatattgatgtgttggtgataggcttgaattattaaaaacttcaaaa

SEQ ID NO: 14582 - DNA, 265 bp, Homo sapiens
atttcaagagatggacgcttgaggagccgaagtggagcccctttgcctgtcttagttatggccctgtatggaagagtgtttgagaaggaccctccacgcttagggcagggatctgggaaattccagtgatctcctttagcagagcccttttaggattagcctggctaagaaaggaagaaaaaaaagagatccgttagtgtctgtttagaaaagatgttataaacttacagaaacaaatataataaactgaagcagatttgaaaag

SEQ ID NO: 14583 - DNA, 429 bp, Homo sapiens
ggcgtctctttatcactcagcttctgcatcatatgcttggctgaatgtgtttatcggcttcccaagtttactaagaaactttgaagggctatttcagtagtatagaccagtgagtcctaaatattttttctcatcaataattattttttaagtattatgataatgttgtccatttttttggctactctgaaatgttgcagtgtggaacaatggaaagagcctgggtgtttgggtcagataaatgaagatcaaactccagctccagcctcatttgcttgagactttgtgtgtatgggggacttgtatgtatgggagtgaggagtttcagggccattgcaaacatagctgtgcccttgaagagaatagtaatgatgggaatttagaggtttatgactgaattccctttgacattaaagactatttgaattc

SEQ ID NO: 14584 - DNA, 902 bp, Homo sapiens
tccgatggatcctggattgatacaaggttgagaaatgaatgctcctggccttaaacatcaccgtaggaagggtttttaaaattttacgcgcaaaactccgtggaccccgtgccagtgtcttggaagtgtcaacgtgtttttggatgatcctgtattgggctgtacttactgtgatactgaaaagctgtcctgctgaagcagctatatttgaaatattaagtatgaaaggagtaattaaaaacaagcaaaacaaaacaagacttagtttttaaatgaccaaacttgtccttaaagatgttgttattaactcgagttagttcttatttcctctgtttattttttattctaagtacactgattctgtgaatgtaccttttttattaacagggaaagaaatgaattaatttgatatgctctaaatacataaaggtgcttcaaaatatgtagaaacattactatgaaatcagtttttaaaagatatactttctctttgtcctgaggtttttcggtcttgttcaaaaggaagaattcttgcctgccatacagaaactctctagcactccctgaccttaagcttttctaaaaattctgtttgtgtgaaaagtacaagaataacaatacttacaacttccatttttgtaacctacgttcacttatgatctggatttataaacattacttggtataacgtttttcatttcctttaatgtctctgttttttggctctaccatctgttttgtttttgtttttatctatatcttggtagatgtatttcatccctagagcaggtcagcctccttcccctaatgcgaatgcttgttttgttagggaagggcttcctccaacttcgtgtgaaattgtgatgttgaagtgaataaatgtctattgtgtaactctcatg

SEQ ID NO: 14585 - DNA, 3574 bp, Homo sapiens
tggcctcaacaccttctgaacgtggatagtgccagaacacttaggagggtgtctttggaccaatgcatagttgcgactcctgtgctctcttttcagtgtcatggaactggttttgaagagacactctgaaatgataaagacagcctttaatccccctcctccccagaaggaacctcaaaaggtagatgaggtacaaggtcctaagtgatctctttttctgagcaggatatcaggttaaaaaaaaaaagttactggctggtttaatactttctaccttcttcacagagcagcctttgaatagactatgtcctagtgaagacatcaacctccgccttaagctatgtatgtatggaggccagtcgcagctttattatgcagacacacaagtggtctggacatgagggtacagtttctgcctaccaagacactacttgcactggatcttacgcaaaaaagaaccagaacacacagtgtggacaactgcccatatattctatctagattaggagagggtcctggctaggattttagtggtaattcctagttacattcaacaagtataaagattatagagcttattttatgaactataaactataatttaatgcaaaatatccttttatgaatttcatgttaatattgtgaaatattaaaataattccacaatagttgagaaaaatgagcatttttttccatttttaaaaaatgcatagaaaagacaattttaaaatcctgggaccatatttatttagaagtagctgttagtaaaacattagaaaaggagtcaggccattaggttatttatccaaatctctaagcaattaggttgaagttattaagtcaagcctagaaaagctgcctccttgtaaggctttcatgacaatgtatagtaatccacagtgtccaattcttcacactcctcaggaatatcactacctcaggttacggtacacaggctataattgatgatgatgttcagataactgaagacacaataaatgacattcagacatcaggacaattccctcatgttcttttctatgatggccacctgtaccagcaacgtgggtttcacccacacaacgatgaactgttctcttacttctccagttgattttaaagacttgttaagaggtcttactaataaaatttgggtatgatagaaaatccacaatcaaatcttgaaccaaataacatattaaattactaatatttaagtgatggaagacacacaaaaaacttaaaagcacgaacaacctaacttgaaaaagaattttaaaatatgattaacctgaagaaaagagaatcctaagagccaaagctcctttttatttagcttggaattttcctattggttcctaacaaactgtcccaatgtcatataaggaaacatgatctattacattcctttataacaatgtggagagactataaacctatgtaagtagtaaaactatatcagagactcaggagactgactaaaaggcctggatctgcagtgtattatctgtataaaaattggcagggggaagctaaaaggaaaggagattggagatctcaattctatcatggtgtatttcatacgcaaatcagagcatgcattgttttttgtttttggaaagagaagggaagtgtgttctgccccatgtttccttccgtgtttatagttcaaactctatatatacttcaggtattttttgtttagcccttcattataaatgggcaggaaattgtttatcaacctagccagtttattactagtgaccttgacttcagtatcttgagcattcttttatatttttcttttattatcctgagtctgtaactaaacaattttgtcttcaaatttttatccaatatccattgcaccacaccaaatcaagcttcttgattttcaaaaataaaaagggggaaatacttacaacttgtacatatatattcacagtttttatttataaaaaaaatttacagtacttatggagagccagcagaagacatcagagcactcacttcttcccatctttgttaaggttagcgaattacccatggacactgttaggtgaggctcattcggcagccctgaaaacaaacctggtcacactgtctttaccctctcccttcagataaagcacttcgattatctattgatctgcccagttttcaagtcatgcgaatactaaaaaggttacatcatctggatctgtaccttggctatataagcatgttttccccctattctatgtttctttttttggtgaacattgaaaaacaggaggtgacttattactgttaattaaaactaaatgaaaaatgtcaagtctttaaaacagtgagcttgtaactctttcatgtaattttattctctatgaatttggctatcctactgaatcttaaaataaaggaaataaacactttttttttaaaaaaaaggaaaaatacaagtctaaaaatctcaatgaaatatttcacaagaaggaaaaatgtaagttagcctttgctttccactttggaataagcaggaggttagggaaggcattgagaagaaaaaagataaaaataatatgtgttgttcagtgcagtgcctaagctaggttttcaagattttataatacagtaaggaaaatgtactatatatggagattaggatgttgcaatttttccacaaaggtttaaaaacattttggaaatacaagtttttgtggaacattgtgttggaatattgtccccattaagtttctcctgagaagctaattggactctccactcagctttatttctaggtataatcactgttggttacactaaactcctaaacctaaatgacagggcacaactacagcttgatcctgtattaccacatcagggctcctgggtgagccagagacactgtttcataaatgcatatttattataactttaagagtagcaatctcatatactgaatagtcactctttaactccattaaataagatacagcaaggggaaggacagtatcacacaaaatggctttcaaattcaagtggggctatttgataattacactgtggcacagaggcagcttatgggcacttcttgttaaaacatctccatgttaccaacttctgacaagactcttagtataggcttgggcatcaacccaagattaaagtcaagaacctcaatcacttctctacaactacaggtgttgagtctttccagaaaaacaaaggtccaaatgaggcaccattcatcacagcttctttctcatttccatctagtgggtaagaggtttctcttcttaaaactacaatttcttaacctttacaagttatttaacattttctatcatattaaattagcaacataaaacattatcctttatctataaacttctagtctggttccctagagtttatatacacgtttttatttctaatctgcaagaaaaaaaattcctatttgttatttggtaacagagcattaaaagatactatacacatgtggtgcatatatatatatatatatacacacacacacacacacacacacaaaatacacttcaaaaagaagccaacacactttagccaaagtctt

SEQ ID NO: 14586 - DNA, 1017 bp, Homo sapiens
accctgttagggcttggttttaaaggattttatgtgtgtttccgaatgttttagttagccttttggtggagccgccagctgacaggacatcttacaagagaatttgcacatctctggaagcttagcaatcttattgcacactgttcgctggaagctttttgaagagcacattctcctcagtgagctcatgaggttttcatttttattcttccttccaacgtggtgctatctctgaaacgagcgttagagtgccgccttagacggaggcaggagtttcgttagaaagcggacgctgttctaaaaaaggtctcctgcagatctgtctgggctgtgatgacgaatattatgaaatgtgccttttctgaagagattgtgttagctccaaagcttttcctatcgcagtgtttcagttctttattttcccttgtggatatgctgtgtgaaccgtcgtgtgagtgtggtatgcctgatcacagatggattttgttataagcatcaatgtgacacttgcaggacactacaacgtgggacattgtttgtttcttccatatttggaagataaatttatgtgtagacttttttgtaagatacggttaataactaaaatttattgaaatggtcttgcaatgactcgtattcagatgcttaaagaaagcattgctgctacaaatatttctatttttagaaagggtttttatggaccaatgccccagttgtcagtcagagccgttggtgtttttcattgtttaaaatgtcacctgtaaaatgggcattatttatgtttttttttttgcattcctgataattgtatgtattgtataaagaacgtctgtacattgggttataacactagtatatttaaacttacaggcttatttgtaatgtaaaccaccattttaatgtactgtaattaacatggttataatacgtacaatccttccctcatcccatcacacaactttttttgtgtgtgataaactgattttggtttgcaataaaaccttgaaaaatatttac

SEQ ID NO: 14587 - DNA, 1024 bp, Homo sapiens
tctttgctaatggtggagccactatggccaatgcctggctgcaggcatcagttgttcaatgtggtagatgaaaatcatggcatgaattccagctatgccttgacttggcagaaggttatctctagcttatcctcagttcttagtaactttacccactagtgaagagatactgtctattttcaatgtggactcggaaaaaaagacttataagtaggaagatagaacaatgatgccagttgtcaggctcctcccaggttatgttttcatagtgtttctttcatcatcttcattgaactcttgggaatctccagataatcagattatttcatttggtaaattttaaaaaatatgcaatcaggcacagtgcctcatgcctataatcccagcactttgggaggccaaggtgggtggatcacttgagttcaggagttcgagatcagcctaggcaacatggtgaaatcctgtctttaccaaaagtttaaaaattagcttggtgtggtgccctctgcctatagccccagctacttgggaggctgaggtgggaggatcgcttgagcccaggcggttgaggctgcagtgagccatgatcattccactgcatttcagcctgggggatacagtgagaccttgtctttaaaaaaaaaatgctgcaaaaccaaaaataaatagccataatttgccatctttggagagattatggagataatctccttgtctattagccactagcatggctaattgatcattgattggacctcattacataagggggctgtggacgtctttggaatttgttaggggaaggctatgtggtaagctctactaaatgtatctgtacaaggatgaagaaaaacaaaataactactacttttggaggaaacttggaacaagaagagtacatagtttgatccattcctacggtcgagtctaatcaattccatttcttagtgtatgcatctaatgaggcttacaacttgctaaccccaaaagaagcaataaatgttaagcaattttagtaaccagt

SEQ ID NO: 14588 - DNA, 4894 bp, Homo sapiens
tgggtcagaatttctaccacgtttctggatacagtgaaatagctaacctctgtttcaagaatgcagttattaagtcaaaggaacaatgtgcaattgatatgtttttagatgagagagaaaaattaaagctaaaattagctgcaaagaagtattaataatcacctctgcaaaaattctaagttgccaactggcaaagaaagtctaatgttaaaaacaactttgcctttgaaacgttaataaatggatttactttgctaagatttatggcaagtgtcaaaaatagtatctgaagatactgaatcatcatgaaatgaactctacttctggccaaagcacaatgtatttgcagttttctcttttgattcaattatactgcacatgttttaaggaaaagtaacttaattgggtttttcaggcagttgatatttgacctaagctttttttttttttttttttccagttaatgctaagaaaagatttggggaaggttataataaaagtattttgtggtgaccataagaatgtccctccccaaacaagtaaacttgtgaaagtttaatttggaattagtggaagctgttcctttgaaagccaagatattatttaagttgtaaagccagctaataaaatgccttagtttgagcataatacaaactgtgttttgttctttagacatttatgagattctctgccactaacagtaaatatgatttaggggttttgtgggatctttttcacctaagagtttcctagctctgtcacatgaattcttttttatcctaatggcagatccaatttcatctcattcatttttttaaccataacttgcttttcccattctcacttttagaattatacctatgatggccctttctttatcttgcttaccttatagattataagtcccctgtgagtaagtaagagtcatgtttttctttaaagtttcaacaacaaaccccaaggtttatttatttaacaacaggtattcgttgaggtgccttctgggtgcaaggagctttagagtagattttgacctcagctgaacctggaactctgatctgatagactgtttatgataagcttttttttttattagcagcgtgatttgtatatcgatggcttaacatatacaacagcatttcttctccctgcaccttttcgtgaacctgacattttgaacataagcaataacatctgtatggtaaagtaggcagattatacatgtgttgcttagtgaatgattaccaagtgaacacacttggtatattgctttaccaaaatacatgtgtagttgtcacttcagattcactgagttaagaaagttttatttaaatattaatattaatcaagaatttaacagatatatgtgacagaaatctaacttcaagtgactgaagcagaaagaaaaatttttgaatgacataactgagaaaattagaggtagctctagctttgattccatttagatcgagcagctcacacaatgttagcaaggactcatctccactctgccttccctggtgctggttttgctctcaaactctatatagaactctcggccgggcgcggtggctcacacctgtaatcaaaacactttgggaggctgagtcgggaggatagcgtgagcccaggagtttgagaccagctaaggcaatatagtgagaccatgtctctacagaaaaaatttaaaaacagatcagctgggtgtggtgccacatgcctgtagtcccagcttctcaggaggctggggtgggaagatcacttgagcccaggaggtcgaggctgcagtgagccatgatcacatcactgcagtccagcctgggtgacagagcaagacctgtcaccctgccacccataaaaaacctcttctgtaatgccaggttcttgacaagatgtgataattccacacttacatcctcagatctcccatccagggcaaggacagactaaaagagcatatcttctccagaagtcctagaaacatctcatcattgactatgattgaattttatttattaatacttccctaggatatcctgtgtttgagtgtgaagttaatatcacacaaagcatgtagctaacagttgtgtgagggttggaaattcagggtgctgttaggaaggggaaatggattggggtttaaggtagggggagtaaaaacaagaaaccatccactctgtatattatataagactgtgatcgaattaagaattttagtttacagtttagcataaacaaatagtagtagaaatgaatgcatttattcattccttccttctccaatagtgtttaagtacaatctttttatttgcattttattgatgattgattgtggttgaaaggagtggtgatattatttcgaggatccactgtgtaagaagactgttggcagtggaaggctcgagttgattaagtgacaaagaggtaaagcagacatgcccaagcttggttatgctctgatttcctaccctgttactttcatccataatttatagtacatccattttgtgtcattttgcttcaggtatttcttgtcctgactgtcttcttttttatgattttactgtttcttcacactaatggctttgtcctctgactttgactctttgtgagattcttctgagcagttaacctctaggataatgtggcttgaacacattacagaactatgttttgacttgttagtattattcacacattcatgacaattgagcctctctactgtgagaaatgttttagaggccagtttctaggcatagctgtttttctcccatgagtatgcaaatcaatagttttaaccattgttaaaatgcaatcatagtgacttcagaaaatttggaaaatacagaaaatatagggaagaataaaattaacccacagttctgtcacctaaaggtaactgctgccaatgttttcatgtatttcttttctgtctctccaatgcatttttttacatagttgtgagcgttagccaagttattttcatgttgttatgtaatcaatatttttcaatagaagtattagaggttttttttattgatataaaaataacaattacagatcctgatatatagaagttattcaaaattatacagttttcaaaaaatcaagacaagtaggcccaatacaaactactgaatcatcttctaatttccctctaaaatatttatagaaatatgtaagtagaaaaacattcatcctttcctcgtctaattatgatcctgccatattccaggcacaagagaaagctctggggcttgagtcttaatagggctgatagtccaaccaggggacagggtatcataaagagataattcaaaactttaagattggagggtaggtgatggtagaaaattctgcggcaaacatttgttgatgctcatcatttgttgatgtcatcaaagatcaccagggcataattataatcaaaattagttttattgatgcttgctgcagcaagagagactgcacaccactggggtctatgggtgcttctcagtgggaaggtgtaaggaggggcttgctaagaatttgagcacatgtagctaattttaaggagggctcaagtgagcaagggtttcttctggattgagtgctgtcagaaagtggattgagtgctgtcagaaagtgggagtgattttgcaactgggtatcttaatttttatgttgtgggtgggaggaaaggaaagaagcaacagtcacccatgttagccacaagaagaggttggctgtttatggtttgcacagtgactttgtttttatctgtgctcaggcatgattacagtatctcattttatccggattacagtgacctcatctgatgttagagatttgagaattgttaaatgttcagcaggagaacgccaccgcctagtgtgaatgctaggtcagaagctgctttttcacactgaaaccatttaagtatgtacaaataagttaatagtgtaaatgtaggtgtaaaatacaatgcaaaacaaaataatgaagtaagtgaattaaattattgcaccaaatatggggatatgaaatagggaaagaaaagcattaagttacttatagtccataaagggactacattattttgttactctgataatcccataaaacaaagttttaagaatgtttacagtaaccatgaatggaattagtgaaactattcatatcaatgcaaaaaaaaaaaaaaaaaaagcaaagaaactaagtctgtacagcaaaagatggaaaggaaacaagaaaattaaatgaagacaaaggttgtgattattacagtaaatgaaaataggtttttatctttaaaatgtagactcaaactgcaaagctaatgatatgctatctgcaaaatattcctattttgtaaataaataaaaccatagatttaaagaagaaagggcacagatgtactggggagacaaaaataactgatccgttgggtgtataccatgtgccaagcaattttcatatactcatttaacatgacatatctataattatatgaggcagatattattaacctcagtctatagatgagaagactaaagctcagagggattgctaaaaactagtaaataaattatggaaccatgatttgaatttagatttaagtctgactgaggcatgttcagagacactacactgcctctccagaaatcaggagtagcaatattaacactggacaaagaatttaaagcaagtaaaaaaaaattaagagaatttcatattaataacaagtataatgcacaataaaactgtaccaaatgacataaaaatgcataatgaaatttattagaaattaaaaattaaagggcatagttacaattattgaggaattctcatagctctgccttatagatcatgtaaacaaacaaggtcatagaggacttaaatagcaaagcag

SEQ ID NO: 14589 - DNA, 1658 bp, Homo sapiens
agaattgaagaaaagttaagagctgccgaaatgcacagaggtgaaaatgacaaaccaaatggaatttctcttcagagttcagaattttcagatactaaggaggaagaaaggatccactacttcttgttcttatgaatgactctagaaaaatcagaatcaagttgtgggtggaaaaatcaacgtggcctttgagttcagttgttataaaccattgtgactattgttggtcaaagtattggtacttatattgttagtaattgcatcataattacattaccagtgttggaaaactaatgaagaaaacactgtaattgctactcagcaaatgtgaataaaaggtgtttgcgttattaggatgtctgttaagtaatcatttaatattattatattggtaatggttgtatgtgtgatgctatgcccagaatatgaagtatctgtttttgaaattcactttatttaaaagataagcagctgactgggcacggtgcctcatgcctgtaatcctagcaccttgggaggctgaggcaggtggatcacctaaggtcaggagttcaacaacaccagcctgaccaacatggtgaaaccccatctctactaaaaatacaaaaatcagccgggtctcatggcaggcacctgtaatcccatctactgaggcaggagaattgcttgacccaggaggcagaggttgcagtgagccaagatcacgccattgcactccagcctgggggacagagcaagactctatctccaaaaaacaaaaaagataagcagctttagaatatggcgcattcaaaacagtctcagtaacaaagacattaaaagaaaacaatttactttctaattaaaattttgtgtttcttaagatcaaatcatataggtaacttcatagacctaaattaaaagtgatttttggctggactggcaacaatgttcccaatgtctttactttttaaaaaaggcttttcatatttaagcacatacctattttgtagacttacattgtttaatatttattttaatcttaatatttttacattattatattgcattatttattttttctaagttccagaataatagtgtcattattatagactatatgttttgaagtttgatattataatgggatattcattttttgttcttttcttgactcctttctcaagtgtgtgataaggtctgctgataaaatatttaaccccaagaaagtgaaaactaatataaaattagaaagacctatccaaattagacagtcaattccattaaaataagaagtgagaaaaacaatgttgggcattgaggtgtaaattttgcccagatgtatacccagtgtgaaatatcttctaataaaaatatatttggctcttatccctgcacatgtagaggcataaaaattggtaaacatgtcccgctgtgtagaactttaaaaaaaaggcatttttgaaagtgttgagtggcactgataactggtgaagcctacagccatccgcccaaaagtctgttctgatggcactgagttttcattgttctggatgtataagtctgtgtgtcaggtacagctgggcccagccagcttgagtcactcttgtacaagcttgtttttttctgtcttgtgaatgcacttgataatttaaaaataaaaatatctgtttctctgc

SEQ ID NO: 14590 - DNA, 245 bp, Homo sapiens
actcaacttaaggttgagctttaaacttccaaaacttcttcctggatgataaattattcttagaaactgatttggactgttaaaggctaaaagtagatgtatttaaagactcttcttgacacattttgcctacacttgctatgtaaatatgtatgcctgtcatttttgtttcctttgttcctttttacgtttatactctgttcttctgtacatagagcttaaaataaacattctttttgaacttg

SEQ ID NO: 14591 - DNA, 4247 bp, Homo sapiens
taaatatgaagtaagattacaacagagcagaacttgcacccaccattttttttacctgatttttgttttcaaataagaatgtaagcattttacttaaattttactgtttgcaagtagtctatagaaattttgttttaagtcttcaaatatcttgagaaatagtagactgtatgttgaaaattgtactgaaataaagtagaaaattgttacgtaccatatttgtaactatcaacttttaaaacttttaacgtttttgttacatgcattgtaattctgctttgtctataagatatggtcaagtacagctctgtgaaagttctgattctcttccttccctgtttgtcaatgttttattctgaagtaaacgttagctctacatataaatcctggaacagaaattgtttatagagactacactaattattttaactgtatacatctgtttaatttgaacacactacatcgtagggtgactgatttttgaagtataccacagacaaaaagttgttactatggtaaactaagctagtttaacacttgagcaaatgcttaagaaggaattaaaaaaaaaaagctttgccaatagctaaaaagtacaagctattaaaaatcagattgaaaagttttgagaaaatgttatttttactgaaagcaagcagtggcctataaagaacattcttaggagccttttctatttgcgttcaaaactgtgtgttctctttctattcctatttgatagtttgagtcatggtcttagatattagctatttgtgagaggaaactggtttgtaacaatactgcaaatagaaaccccatttctactgaacatcctagttttaaacagaagaaaaactgtaatcctggggttggtatgtaggaggtctatcctgcagaataagttgatacattagtacctgatttcatatcttacatatttatttgagctgaacattagtttgtagtgtaactattagtaaaaatagagaaacacagcatactgttcattaatagtattttaaaaaaattgtttttcaaatgtcaccaataaaagttttggcaggaagcttgttgcggcattgatctaacctttttcccccccatttcagttgcagtttttgtagaatggctttttctttttcctcttaagagttctattcttcaggtagataatttttcaaatgtgaattatcttttgtgtctatattgatagctcttaaaggagtgaaaatctaaaatagtaaatttcaatgttaagtgtctgctttatgggcatatataaaagtagacacatttcatttgttaatttagttgtgtgtgtgtgttaaaaggagctaatgcttattctgttaatgtaaacttttgaagatcttaagtgtattgctctttcatcttaaacactttcgaggatttgcagtgcgtctagcacctagattacagccaggaacattggttaagaactgttggaaacaaaactaaaagcaaactcaacatatgtgatgtttatggccctcagatccttagtattgtgtgattttcccccgttaacatgtctttctaaaattgtctattaaagcagaggaaatacctgccaaaggaagtatgtattgcattaatcagggcataactaatattctcctgttcagaataatacttatttacgtgtgaaagcaacatggatgtgattcccaacacagaattttcatgacccttttattgtatacaaataaataccataacagttacttggttagacatcaaatctgtgtgcatgactatgtgcttatccacttaagacaataggtaaaaggggatctgagaaattatgtaatagggagtgggaataaaactacttaattcctgtgggcaggttatattttaagttcaaatgcattgctttaacctttggttacttttattctgttaaacagaattgaagaaagagtattataccagagtgtagtaggctagggtgattgtaagaactctgtaatagaatgtcattgtggatgttacctttttcagatccaagcatataaaaagcctgtatattttttaaaaacacatcttaactccacgctttacgatattataaaagttgaatggttcctcttggtaaggatatttgcttacaagtgctaggaaataactcactgatacctgcgttaacatactttgttttgcctagagaggggcaataaaaatgaaccaaaggatatttccagaaaggattaagaaagctgtttaagaaggccatgactctttaggtgtgtatgtgtacctttcagcatcctaggaatttttatactaaaagcaaaatgttttttccagttagtcttcttcaaggaattactattgttccttttgtcacaggtaaaatcagtgttgggaattataatttgagaaaaatattacccagtaacattgaatgtagatggctaaacgattcttactcagtgtgatgtataatgatgcaacagggacccttgtaaattgtcatacgccaataaaatgtcacaagtaataactgctgttgtttgtttacctgtgtctatttcacacatcttatttctgtggcctattttagaatatcagcgcatctgttaggaagattactggtgtggtaaggcttgataaatgctttataaactccctcaaacctttctttactgtttttttgttttgtcttgtttttgtttttgtttttgtttttgtttttgtttttgtttttcccttgtctcccctgggaaaatgggaaattttacagttggtaaatctaagccaaaattattttgaaataaaggaattctggatgtccagtttagtcctcgttttcttacgttaatctgggaccttatcacccataatatggtgattacttctctttctaaaaacatagtagctagtaaataagtaaaaagaattgtcttttcattcactttaagtaagatgtggtataattcttaccatgtgccatcctgtcagttttaacaaagcattttcacagaaatttgtgtactaagacaaactgacacattttgactcatacaaatggcaaattagtccttaaaaattctgtgagagaaataactctgtgtgtacatacatatgcatgtaaagtgttgtgtaagatcattggtagcttaattatactggataattgtaatgttatatacaaatttcttatataaaagtatgctgcattattaacatttgtttaacttttcttatttttctttttctgggtttcaactggaatcccattggtggggatgtaccttaagtttccttgtggaataatagactttcacatccagaaagagaagttcagaggcctttctcaatttacagagttgaagaggaaaggcaaatggaggaataaacttcattgtcattgggattaatttggctagactcaatctcttgagccttaaaatgagaaagtaatatccattacatgtttagagttctcaaatagttgatactattattaaatgtttcaaattttattggggtagatactaaaaattagtacactgtcctaatgaagtttaaatgaacaagttttacatttcttaggattcaggaatatatggaatctagttgtatttaattgacttgagagccacagagattgtgttgatttatgagctggactcctattgttttagaaacatgcagtaatgattaacttgtgtcaatgatggtaatgagaccaaacttgtacatttaattaagggtaccagttctttttatgttactagactataccttggcctttaaaaatgaatctcactgattaaagagaacaggcattattaggatagcattccaccacaactagaaacattcaaataatgtgtcttaattgtaatctgtatataggaaaatttttcctatggatatttttggtgttttaccacagtgaactgatttgtagcacttatgaagtgcagaaggtaatattcttgaaaatagaaaaaggttgggtgagcaggctttaatgcctttcccccaagaatatacatcgaatttttcttaatcttttggggttggccagcttccagatttcattaataatgagctctgcctttaataaaagtacatgatcatagctacactgtatgtttaggtggtgtgaaatgatttataatcacagcttgaactgtgtttgcttggtactgtcatagtgattacaaatttcatggaatgcgaagagcaacaataaataaaaaataccactcaccctc

SEQ ID NO: 14592 - DNA, 1493 bp, Homo sapiens
gtgtttcttctgaagaaccaaagctgaaatttaatgagaatttctacaattaatggaattcctttcctgctataaaggagcatcccctccacccgttttctagagttcttgaccatcattttgaaaagatttattaaaactagctaaagacaacagactggatagcttttctaataattttcatcaataggaaaaaagaaatacgtctcattcttcaatactttaaaatggctttttccagtgtgctccttcttagcaatcaatatttttctgcattctttaaaagacaagagaatttggttataaaagaaatgggctgactaggcatgatttttttggtcttaaaagcttaacatgtaaaattggcaaaaaaaattttttaccttttataatacttgaaaaataagtacctctttgttctacaagtagaatgaataggagaagagtttaagcctgtttttttaaaatattattgcaaagagctctatttgtagaagcaaattataggcagattaccaggttcttataaatacagcttgtacatggacattctgcaaacccagctgtcacatttttcttgcaactccttttgcaaaagcagactaaaatgttttaaaatgtgaaaaaacattattttttcaaagcaagaaaataatttactgccctcttacataatgtatttataaagtttttccagataaactaatcaaataaattagaataatgtgacaacattacaaatttaatttgttagctgcattccttctgatgttaccacgatagaatgttactgatgattcagggctatttctgaagtctgtatgttgctgctgtccccagtgatggtggacttatctttgccttacctgatcacaaattatgttggggaaaataaagatttaatatttctttaaatagaaaaagaatttggttttgctcgtttaagagcaatgagaaaatgatggaatgttgactgtgtttggcacacaggacacggaccttcatggaagtccttgctctgcgtggcatctgtcagcttttcacctttcattcttattcttcacttttgctgctgagcctagctgtacaaacttgcactttcatttgctaatataaattcagttttattttaccattttagagactactaatgattaaatgtagaaggagagggtgcacatgtttttatgtggagtgtttaaaagataaatttataccactgtaatgtgcagcttttattaaaagagaaattggttgaactgctaggttgaatgagagacttcatctattggactattttttttaatccaggcatatggtctttagtaatggcttgtaatttgtgaaaacattaatttgggggttttccctgttttcagttgtccatgtacacatagtcattatattagaaaagaaatctgttcaacaaacttgtttaatttgtttaaatcaacatagcatgaaacaccaaataaaatgtttgacatagtttt

SEQ ID NO: 14593 - DNA, 708 bp, Homo sapiens
ctgttgctcaatctaatcttcgatggaaattctaaaaattaatacagagctgatcttcttgggggtgggaaaatcgaagggagaggagaaaggcgctgcactttaaatccagtatttgtttactcatgttaaaaaaaaaaaaaacagacaaaacacactgaaatttcctaactacatctatttctataatttttaaggactcttcataaggactcttaaaataatcctgaacattagaaccctaatgttcaggaagattttaatctaagcatttttatggaaatatttttaatgcagcagctattgcacttcagccaaatgtttatttcacacaaaacggatgtaacatttcatgtgatcgtgcaccactggaacaaaaccaaaatgtgaccataactgtttaggcttctgtgtgtttgtaatatgctctaataatctgagtagaaatgcgtaatttcaattactgtataaagtttatgtttttttaagtgtgcagaatctgagagcaatggtttttacttctctgtgttaattgtaatattgactctattttgtaacttaagtttctgacctgtcgtacatttgtttgagtcgtttatgtactactgaactgtaccagttgcacatgcttgaactgtagtaatgttagcttgttctaaagctatccattgtgtcatatttactctaaaaattaaagagactctcaac

SEQ ID NO: 14594 - DNA, 1586 bp, Homo sapiens
tgccaacacttccttttgccttttgtttcctgtgcaaacaagtgagtcacccctttgatcccagccataaagtacctgggatgaaagaagttttttccagtttgtcagtgtctgtgagaattacttatttcttttctctattctcatagcacgtgtgtgattggttcatgcatgtaggtctcttaacaatgatggtgggcctctggagtccaggggctggccggttgttctatgcagagaaagcagtcaataaatgtttgccagactgggtgcagaatttattcaggtgggtgtactctggcctcttggttcattattttcaaacaagcacacttgtacaattattttctgggtacttcccatatgcacatagcactgtaaaaaatatttcccaaagatcactcattttataaataccactttttcagaattgggtttattgcgagcaggaggagatacttaaaacatgcacatataccaggttggtggtaagttggtcgcatgtgaaaacctcaactatttaatcatcatgattcatattttgagtgaatacatcaggcacagaccttcatgatatcacacactcttggctactttaagaggccatctttaatactttatgagtagttctggagtgtaaacataaacgagtattcttttgtagtcagaaaagtgtcctctcaataatttagtaggggcttattgtctctcaaaactaacctaaaagaaaatgacacattttataatagaatattacatttatttctggaagtgtgttttcaaaaagatatttacatagtctgtaaactagaaagtgttaggtaaagctctaggttactgtgttactattataatattaaacattcgaataggcagtcgttcaaagactctttggaatatctatgaatgaatatcctctattcttataatattaaaacccataagtaaatataggacatacaagagaaatgagttaaatgactatgtaagggagagtttattaaaatttgatgaaatttactgtaggaactaaactatgccataaaacaatagctttctagttcatttccagtaactgttcccatctcctttaccacttgttaagaaaattaaattcttcagtcacgctgctttaaaatgggacaaaatctattaagttgaaccatatataattgtggatatttggctgtttttaatctgacaagcagtaacttcatatggtttgccttaatatatatttgttttagtcatgaactcataatccattgatgctctttcatgagaagagatatcacccatatttccttattgatattattggtacaggcagacaaccctggtaggagagatggattctggggtcatgacctttcgtgattatccgcaaatgcaaacagtttcagatctaatggtttaatttagggagtaattatattaatcagagtgttctgttattctcaatctttatagaaacgattctgctggttttgaagaacagatgtattacactaactgtaaaagtagttcaagagtgagaaagaataaattgttattaagagcaaaagaaaaataaagtgattgatgat

SEQ ID NO: 14595 - DNA, 1936 bp, Homo sapiens
aggggctcacagagcggttgaaattgaagctctaacaccacactccagctactgtgtagtggctgaaatatatcagcccatgttagacagaagaagtcagagaagtgaagagagatgtgtggaaattccatgacttgtggaatttggcattcagcaatgtggaaattctaaagctccctgagaacaggatgactcgtgtttgaaggatcttatttaaaattgtttttgtattttcttaaagcaatattcactgttacaccttggggacttctttgtttatccattcttttatcctttatatttcatttgtaaactatatttgaacgacattccccccgaaaaattgaaatgtaaagatgaggcagagaataaagtgttctatgaaattcagaactttatttctgaatgtaacatccctaataacaaccttcattcttctaatacagcaaaataaaaatttaacaaccaaggaatagtatttaagaaaatgttgaaataatttttttaaaatagcattacagactgaggcggtcctgaagcaatggtttttcactctcttattgagccaattaaattgacattgctttgacaatttaaaacttctataaaggtgaatatttttcatacatttctattttatatgaatatactttttatatatttattattattaaatatttctacttaatgaatcaaaattttgttttaaagtctactttatgtaaataagaacaggttttggggaaaaaaatcttatgatttctggattgatatctgaattaaaactatcaacaacaaggaagtctgctctgtacaattgtccctcatttaaaagatatattaagcttttcttttctgtttgtttttgttttgtttagtttttaatcctgtcttagaagaacttatctttattctcaaaattaaatgtaatttttttagtgacaaagaagaaaggaaacctcattactcaatccttctggccaagagtgtcttgcttgtggcgccttcctcatctctatataggaggatcccatgaatgatggtttattgggaactgctggggtcgaccccatacagagaactcagcttgaagctggaagcacacagtgggtagcaggagaaggaccggtgttggtaggtgcctacagagactatagagctagacaaagccctccaaactggcccctcctgctcactgcctctcctgagtagaaatctggtgacctaaggctcagtgtggtcaacagaaagctgccttcttcacttgaggctaagtcttcatatatgtttaaggttgtctttctagtgaggagatacatatcagagaacatttgtacaattccccatgaaaattgctccaaagttgataacaatatagtcggtgcttctagttatatgcaagtactcagtgataaatggattaaaaaatattcagaaatgtattggggggtggaggagaataagaggcagagcaagagctagagaattggtttccttgcttccctgtatgctcagaaaacattgatttgagcatagacgcagagactgaaaaaaaaatttactttgatctctgtttttgaattcttattatttatattttgcttactaccttttttgccttttgtccttttgtggagagggcgatgaattaagagtagtggggtgggtggcgagtaagtaaaatttcaaatagcattttagtgaatgcaattcagtagtcctgaagcctgacttaataaaacaaaattcatttatggttgtttcatgaaagttattagataggatcaagttttgtttgtatattgtttgccttgctctgtttttgcttttgtgcttaggcaagtgcaaaatactctatggaaatcataattgtcatcttcttcatggtgttagggatatattgtcacatgatttcaataaatcctttttttgcttt

SEQ ID NO: 14596 - DNA, 546 bp, Homo sapiens
gatcagctaagttgcaccaactttgaagtctgattttcctggacagttttctgctttaatttcatgaaaagattatgatctcagaaattgtatcttagttggtatcaaccaaatggagtgacttagtgtacatgaaagcgtaaagaggatgtgtggcattttcacttttggcttgtaaagtacagacttttttttttttttaaacaaaaaaagcattgtaacttatgaacctttacatccagataggttaccagtaacggaacagtatccagtactcctggttcctaggtgagcaggtgatgccccagggacctttgtagccacttcactttttttcttttctctgccttggtatagcatatgtttttgtaagtttatgcatacagtaattttaagtaatttcagaagaaattctgcaagcttttcaaaattggacttaaaatctaattcaaactaatagaattaatggaatatgtaaatagaaacgtgtatattttttatgaaacattacagttagagatttttaaataaagaattttaaaactc

SEQ ID NO: 14597 - DNA, 1153 bp, Homo sapiens
gcagcgggcgggcccggctgccaaggaggagggagagcggcgggaggggccgcggtgccgggccgggagggaagagggaggctgcacgctcggcccacgggagggcaggctccggggcccgcagcctcccacgctgtctgagagatctcagactccacttgacccccggagggaaaggaccaaaatcaaaccgcaatttctaggtggtagcaaagggggactcgaaccagatgtcgtgtgttttgcatgcatgcttcttttccccatgccgcgccagtatttttcactgccatatgctcttgtcaaaactgcatttgttgtataaagatgggatcggtgtagttaaaaacttgcgaagggacttttgagttggctttctctgactctgtgttctcgctttggaaaaagacggccatcccttttgtgcaaaacaaatgtaaatattttcttgagatggatgcgattatgattgtctctgtccttgccacagtttttctagagacaatggagagagaaagagagagagagcgcgagagagatcaagacccaagttttgaatctcaaccgaggtccagggcatgacacctcctatgtgggttttcctttcgacgcagtgtaggtcaaaagaatgcatgcacgcttctaaatgaatcttgtctgaatatgtcgtgcaggctgtggtgccgttttccttgtaacaaggatttattagtgaattatcccaagtactccatatatctgtctgtggttgtatgaaatgaaaaaaggggcagagtgcaaagacccacactcacgcacacgcgcttcttctcccacccccacccccttcaaactttattcggaaccttcctttgctgttctggggccgctattgtaaaagcctgggctccctctagtagcttgcgccaccccccctcgctcagttattctgcatgcggggttggctctctctattatcagctttgaaaacttatcctggttttgggaggggtgccgtttttattttcctgaacatttgcttgaaatattttgttagggcctcaaagacgatacctgtctttattttttatatattcttgataactatgatatatttattaataaccagtgtttctggatgagatttcaaataaaaaagaacctttaaatcgtg

SEQ ID NO: 14598 - DNA, 1996 bp, Homo sapiens
actctcagccctgctgcaaagcctttccagaaaaataaaaatggttgaaaaggcaattctgctaccaatgactgtttaagcccagccaagtaactgaaccattccaacttcaatttacttatgaaaagaatttgatgatgtaggaggttatttcaattctaaaatacaaacccatgttgatctttctcaatcttgaactcatagattattatctattatctcaatttagtttgttatttatcctagtgggccattaaaaactaccacatgtgtttctgtctctccattagtcaataactaaactaacgagcaattagtaagccatgtgccagatgctccgctaggcaccagagggataaaaacaatacttatagtataccactaattttcgcttagtaactagtgaaatgttcaagtcatgcctgagtcaagagttgaggagacattacaatgtgtaatggaaaccaaggaaagtgaaactttggataagtggggactagtgtatttatatatttaattgatttctgactctatcattggcctccaaacacagattgtgtttttctttggttttgttttcttcactatgggatcttctgtgcccagcacagtgcctgacacatagaaaacaatcaaatatttgctgaataaatgattaaaaaatcagagaactttcccattctgtttggatctatagaacatccagagtaagtgatgagggcctctgcatttatatgcgcttaaattaagattatgtgagaaaagtttaaagacacttagtagagtgattttgaaatatagtaaacacttggaaatggtggtgctttaaaaagatattaatagataatatgaaaatctccatctcaaaaataatgcataaactatttaaaggaaaatcacatctccaggctttcaatgtttgttcattactttttcatatatttttaccatctgctgaaggcagtcatatcaaagggtaaagaaagatgggaggaaaactcagtaagaattatattagtctgtttgcaaagtagaaaaagattctcatcactcaaccttatgagcaggaagagggaaggctgtttgagaaccatttacttagcagaaccacatattttagacacttccctgcattaactgcacaaacaatatgtttgcaaacttgttagatcaacctccaacaacgacacattcaggagttaaatatttttcatcaaacattggatttttccttaacgctagagattgctacaaatcttctgaagggtctcaatggcttcaggctaagaagagatttctccctgttataagcagcaagacaaattagccatttcactctcaaacttcactaatgatcacattctttccaaaaggaactctagaagaccaaatgccccgagttaagaacatcaaaactaaccatctgaagaaacttcccaagtgtaagactctgccattaaaacattaccgagaggggactcaaacagtctttcttcctttgtcgtgtttcttgctcccagaccaaggcactgacgacagtactgatacataatttaaaagcacactcccttccactttgtaataccagaactctaattggacaccctgaagcttaggactaccagccatacaaatagtaaactctgtccacgattcactcatctgtgtattttctatagatgtttactaggcgtttgttatataaaaataccccggccaggcacggtggctcacgcctgtaatcccagcactttgggaggtgggtggatcacctgaggtcgggagttcgagaccagcctgaccagcatggtggaacccccatctctactaaaaacacaaaaaattagccgggcgtggtggcacatgcctgtaatcccagctactcaggaggctgaggcggagaattgcttgaacccggaaggtggaggttgcggtgagctgagattgcactattgcactccagcctgggcaacaggagtaaaactcccccccaccc

SEQ ID NO: 14599 - DNA, 1253 bp, Homo sapiens
cttgggaatgaatgtgggagaaaatcgctgctgctgagatggactccagaagaagaaactgtttctccaggcgactttgaacccattttttggcagtgttcatattattaaactagtcaaaaatgctaaaataatttgggagaaaatattttttaagtagtgttatagtttcatgtttatcttttattatgttttgtgaagttgtgtcttttcactaattacctatactatgccaatatttccttatatctatccataacatttatactacatttgtaagagaatatgcacgtgaaacttaacactttataaggtaaaaatgaggtttccaagatttaataatctgatcaagttcttgttatttccaaatagaatggactcggtctgttaagggctaaggagaagaggaagataaggttaaaagttgttaatgaccaaacattctaaaagaaatgcaaaaaaaaagtttattttcaagccttcgaactatttaaggaaagcaaaatcatttcctaaatgcatatcatttgtgagaatttctcattaatatcctgaatcattcattttagctaaggcttcatgttgactcgatatgtcatctaggaaagtactatttcatggtccaaacctgttgccatagttggtaaggctttcctttaagtgtgaaatatttagatgaaattttctcttttaaagttctttatagggttagggtgtgggaaaatgctatattaataaatctgtagtgttttgtgtttatatgttcagaaccagagtagactggattgaaagatggactgggtctaatttatcatgactgatagatctggttaagttgtgtagtaaagcattaggagggtcattcttgtcacaaaagtgccactaaaacagcctcaggagaataaatgacttgcttttctaaatctcaggtttatctgggctctatcatatagacaggcttctgatagtttgcaactgtaagcagaaacctacatatagttaaaatcctggtctttcttggtaaacagattttaaatgtctgatataaaacatgccacaggagaattcggggatttgagtttctctgaatagcatatatatgatgcatcggataggtcattatgattttttaccatttcgacttacataatgaaaaccaattcattttaaatatcagattattattttgtaagttgtggaaaaagctaattgtagttttcattatgaagttttcccaataaaccaggtattct

SEQ ID NO: 14600 - DNA, 580 bp, Homo sapiens
gccaattgccgttaactgtgaacatacttgtttttaagtggttttgggttcaaagccaatttggagacctagacattcagctcactgcttaactcaacattaaattttatgattctgttttgccctatatgttcaccgttgtatttaagtatcttttattttttaatttcgacaataaaaaggtcaggatggcgttttctggagggtagattgtgtttgttggcacacccaccttttctgttccctagcatctgggatatgcaatgcttctatggctaataccacacaccaatttaatttatagaatgggctcctcatttacatctcagtcacagactcagaaataaattgtcagtttgtccttttatgtttaatattttacataaagcatctattctataaaaatctttagaaagagtttcccatttaattttgattttaaagaattatattggataaggtggttttcaccataagctaatttactctctgcagccgtctacattcttcacaaatcatgtggtacattgaagcctcttttacatgtcaacttgtgacaaatacaaacatgtgagatttt

SEQ ID NO: 14601 - DNA, 2462 bp, Homo sapiens
gcctcaccgtgccttcagaggcttcttcctgcctctttgcatattcagcataacagcttgtcttccgaaaaaggcattaagggctagagatgtcaaatggaagagacttaggatcaagacattttttaatgttaggcagaacacattcattcagactttgctatttgttgtcaatttatagctgatttgaaggttttctatttaacactggttgacagtataattttcccaaagggcaacaaaacatacagatagcaaatttatattccttttctgttaagataatacttaaatttgttaatcaccagtaagatttgatgtttaaagacttccactgcaatatataaatactgaaaatgtgatgttctgcttatttggatatatagtttaacaagttccatagtaatttatggatgcccaggttacatttaaactatacatatacataatatatacatacgtgtgtacttattatatgtatatatacacgtatgtatagatgtgtgaatatttgtttatatacatatatgcacgtatctatatgtatatataaatgcattattacacatacatttctctcaccccttaatgcatttttctcaatgcagaatatttagatgctaatcaaaaaaatgatctcttacttgcacttgagactatggttgactaatgctctataaatccgaagagagttcggactataagtatttaggctatcattatgttgggcaaaaataagtaacccaatggtagataaatgaattcaaccagttgatcaaatggcagaaaagcagttagactacaatctgtgcagacagcatggacacaaagatgaccacaaggggcccaaaacagaaaagagaaacacaagctcacctcttggagctgcttctcctacacttctcagcccattgctttgccaccccctcatgtgccagggcatcccattccaggcttcctgcaaggaaacggttggaagtgggaaaggggagctagggattgaggggttaagggacctcacactaagaaggggctgtgctttgatcccctgcctcttgcactaccaatgtctcaagacataatattcatctcttgctgtcagacccattctatattctaaaagcttctgctccttccttcccaatttctcctttgtagcaggaaattacacccagccctcatctcaattaatgctaaataaagctattgtttttccaaaacacaaatctacactgggtctcaatatcagtgatgaggcttacaaaccaacacgttttctgccatgaggatttctctttaggccagaagtacaaaacaaaaaaaccaatggattttaaccaaaatgatttgaaatataggtgaggattcaggagaaggcaaaagctagaaacacttggggttgtcaacatgagtattacattaacattgcttgatgagaacctctaatgatactgacaacataaattacctagggtaaaggatagctgcaacaatgaaacaggaaagaagagagggagagagaggaaagggaaggaagaaaggaaggagggagaagggaagaaagaaacaatgtctaacccaaccctatcttgaaagttgaactcaagtagaaaaatggatagaaacaaaattctctagtactcatccaggaaaccattcttcaatgttgcatgtggctgtttgccaaggcacacaaagtgcttgtaggcagcaaccatatgctacaagaattgtaaactgcatacagtttgtttgaagtagacagtgaggataataacaaagttgctaggcaggaaaaaaaatcaggaaaaaagcttgtcgctatttgagaatctgtatatttttaaaggcttaaaatattataaccacagggtatccagccaaattcaacattactgcaagtcttagagatttaaacattcatttgattcagagctaaatattcaccataatccaggagggtctccttccccactgcagaggcagaacgtccaagaatggagtaagattagtcatagtaaagtctcagtctgaatatttagcaagagaaacaggcagcagaggaacccaaaggcagtaaatcaaatattctaaaacccaaagttcattattttcatccaaaagactttcacagaaacacattactcacagccatgtatatcttggacagagtttcagatggaatgacttgtctgaaatttgtaaagcttaatataggttttgggggaattattttaatattcaaagaatgttttattatagtcctttgtgttaaaatttagccttactaattataacaataactcataaagttctaaattcagaaggaatgtctgttctttatcaagtgtatgtaactattttttagaaatgccatctactttctagaaacactaaagttattgttttctaagttaaataactataatttatatatctattaaaaaggtacttctcttccc

SEQ ID NO: 14602 - DNA, 870 bp, Homo sapiens
ctcgatcgaaaccccggcgaaagaaatcaaacccccaacttcttcggcgtgaattaaaagaaacattcccttagacacagtatctcacttttcagatcttgaaaggtttgagaacttggaaacaaagtaaactataaacttgtacaaattggttttaaaaaaaattgctgccacttttttttcctgtttttgtttcgtttttgtagccttgacattcacccacctcccttatgtagttgaaatatctagctaacttggtctttttcgttgtttgtttttactcctttccctcactttctccagtgctcaactgttagatattaatcttggcaaactgcttaatcttgtggattttgtagatggtttcaaatgactgaactgcattcagatttacgagtgaaaggaaaaattgcattagttggttgcatgaacttcgaagggcagatattactgcacaaactgccatctcgcttcatttttttaactatgcatttgagtacagactaatttttaaaatatgctaaactggaagattaaacagatgtgggccaaactgttctggatcaggaaagtcatactgttcactttcaagttggctgtcccccccgccgccccccccacccccatatgtacagatgataatagggtgtggaatgtcgtcagtggcaaacatttcacagatttttattttgtttctgtcttcaacatttttgacactgtgctaatagttatattcagtacatgaaaagatactactgtgttgaaagctttttaggaaattttgacagtatttttgtacaaaacatttttttgaaaaaatacttgttaatttattctattttaatttgccaatgtcaataaaaagttaag

SEQ ID NO: 14603 - DNA, 38 bp, Homo sapiens
ttttggccattcaactcactacctggagagaacttagt

SEQ ID NO: 14604 - DNA, 1639 bp, Homo sapiens
tctatgatgcatggagactttcatttccacattttcccatttttttgtttttgtttttctagaaatggaggtaatccagtttatagcatgcctgtcctaagttacagtagtttgctattatatatacttttgttatatcaaaagaattaggtaaattaacaagtcatcatgagcctgaccaaaacaaaatttgaaattaacctattgggtctggtacttttaaaattgtacagatgtttgtgccttttctttactttgcttatattcttataagcattttttagcagtaatttgtacatattttagaatttgtgtatctgctttgtaataaatgtaatttctttccttttttggacacttggatctaaatgatgtaaagcaaaacagcatcaatatatatgtgaggttgcactaaaacatatttttatatgattaaaactgaacagcttttatgtacagctctgattctgtaatactaatatttatttactttgtttcataaattgtacattttttcttaatgttgtggattgcttttctatgtgaagcatgggatttactgttgcgtaactagaacaaaaatgtacattgtaaacaagatatttaaactagagtatcttattctgcacttatgcattagttaaaaaaagataaaggatgtatcagtcagttcttaactcttgtatatttttttgtctcttgtttgctggattgactataacttaagtgctgattgtgattttaaaatgatagtaccgtaaagcattaaagtaaacaatgtgctattgtgagttttttcaaagctttataaatcagttataaataatattaaaagtatttggtcttatgtgaacatgttgatctatatactcatctaaaaatatgggaaaacattccaccccatgtaaatatgtacaagtgcatcactggtacaattttatgtaactcagttggacactaggttgccacagacctatgctaggtgtctttaaaaaattaaggtgacaaagcacatgggactgtgtagagcttggttatcggccggcccggtggcttggcaggcagtgctgtgcgctgctcatggagaagacctgggcttagcaatctccttagttcttgctacacaggatggtgactggaactaaggctacacagagggtcgcacttggactctgagggttgggtgtggaagggggaaaaggagatggagacctgctccccagctcttcctgtcagccggtttacatgggaacagggttaacatctgtgttaggggaggtcaccttaccctttttcataggggaagagtgtcacactcctggctatctcagggggaatggggaaaagaatctttcaagggcaaagaactcgtgggaggatgtctgttgtatgtaatactcacaatggcttttggttagtgttgaaggtgggaagagcatttgtaggtccagaagagtgaaagagagggaggggtgcagcaacatgtgcacaggcacgcacatgtgtgcacgcacacatacaatctgggttatctttgtgctatatagtggattataattctgtgaaaccaagtttgtatattgaattacattaaggagtgttctttaaaaagagaaataaatatacaattacatgcttg

SEQ ID NO: 14605 - DNA, 5631 bp, Homo sapiens
acatgttctgatgaaagaaccaagtgacccaaagtgacctggacaagattcatagactgaaagctgttgacatcgttgaatcatatgtttatatattgtttttaatctgcaggaaaatggtgtctctcatcatttgctctgttaagggaacaaattagcactttttagaagtctgacaattgtaaacagttattagcttttccagaagctgattcccattttaagatgggggaaaattaaggtttgaggttttagaaattagcaagtagtgcatacccttctagccacaagtgcccagtccaggcaagtgctgacttcttagagaatgtgtggccagacccagggacctggagtgtgtttggactgcagtttgccaccctgagaacaccttctccaggactggcatttcagaatcagattcttcattttttgcagctacgatgttcttccagggcactgggggctgtgacttctctctaaattgtatataagttgtgtatatagagaccataattatatggtccttagaaaagactttgcttttataaagcatttagaaaaaatgcatacttttaaaacaagtgcttgagttgtcacttaaaaattatagcatattgctataataaaaccttatttatgtcttatttgaagatgaatagtcttaaaagataaagacataaatgggacaattgttattgagcaaaaaaccaaattatcccaccctcatggagcttatattctagcaaggggagatggatatgatagattacacagtttattggaggacaataagagttatggcaaaaagcaaaaggaacacagggtaaaggggataggtgccatttggtggtgagaatgctgactgaaaaatagaatgatcaatttaatctgaaacaaatggttatttcttttataatccatataataaatttaaaatctaaaatgtaaaattttgaacacaacactggaaagggtatccacagcaggaagtccccagttcacctccatgactacagggcagctttgcacagccctctgggcgcactgtgtgcctctgcccagaagggggcctcgccgttccaccagaagctcagctccaggccctggaggggctgctgctcctcagttgcatttcttcagtagattcatttccttgatgcaaagcatctgtatttgttggttctgtcatttgagcgatgtctctgacttgtttgttttgaattacattacaggctggaatgtaattgtggtgaaagtatttttatattgctgagagtagcagctaatcacagttacatgcttcagaggacttataattgcttggttttgtgtgtgtgtgtgtgtgtgtgtgtgtgtgtgtgtgtgtttaactgcatttgaaaagttttatggagaatatgcatgattttaaatctgtgataatgttacatgcaccttcaatttcatccactttaaaaattatcttctcattgaattttagtgcttctactagtttgttcctttttgcagttggtcgtaattcatttctggcttcttatgctttcctgcaagcagatttcattgcatttattgtgttcatatcattttcttggggattatttgtaggacaaccaacctggagttttgcctctctagagtaccacccagtaagtctggctgagcatcttatgtccagtaggttcttggtaaacatttgctaaatgaaattactgattgaaatttggggaaaagtgaataagaagactatctaggacaaaaagccaaagccgaaaatagtatatgagcattctagcccagagactgtcgctactaaaagaatgaaggaaataataaagtgatagacagggaaggatagaaaagacttaacaatatacatatgttccgtctttgctgttttggagaatgatggataagtagtgtttcctgattctgaagcatagctgaacaatttaattgtggtttaccatctttttggttccctcttcagtaattaacctatcgaaaatctgtcctaaatgtttggactggggcacagttccctccatcgctttgggagaaaatcattaatatggcatactgcagattggagggcaggaccactgagggtgtcatagacattagctctatggaattctgctagcaatttccaagtgacagtgaggaattatggatatatgttgaggtcattcagcttcctgagtaccacattccccagctacttagacacgggttaaaatattaagatgtcctagttcaacagcttgaattccattgattgatactgatagtgcctgtccaagacaccagctgaaagacttgttttgtgtacaaaatagttctgaaagtggtgagatacaaaaaggttttagaatcactgccctgttgagagaaattagggggaaatgattacatttagaagctgctagagttatccagtgtttgctggtctttgcaacaaactgtggagaatgggtggtatgtaatgctttggtaggcttcaatcactgataaaagatcatgttaaaatatctttgtgctttcttgttacttggcacaaccatctcttcctgtgttgtatttggagtatcatggagagaaaatagatggccaagagcttcagtgtaggcaagaactcttaatttttctttaaactttttactgggaaaagtatatatatataaaatacacacacacacacacacacacacacacacacacacacacacacaaacacaacacaccatggccctttaccccgaaatgcttcagtatagttattgacttaagtaaatttaacattgatatacttgaatctatcatttgtattacagttttgtcagctgacccaataatgtcctgtaaagaagttctcccactaccctataatcccaggtccagtctagggtccagcattacatttacttgtcttgaatccagctttttcttttttttttttttttttgagataggtctcactctgtcgtccagtggcatgatcacagctcactgcagcctcaacctggctcaagcaatccttcctcctcagcctcctgagtagctgggaccacagactcatgtcaccacacctaatttttttttttttttttttttgtagagacaaggtctcactatgttgcccaggctggtcttgaactcctaggctgaagcaatcctccttccttggcctcccaaagcactgggattatagacgtgagccactgcaccggtctgcctttagcttcttttagtctagaacattttcactggctttctttgtcttttatgacattgacatttttaaataatacagtcattttgcctcctttctgttttcttcttctttttttaaataatagaatggtccttgttttaaatttatttgatattttcttgtgattagattcaggtgctggttgatgttaagttcctcacaggatatcacatctggaggcacacaaaggccgtcacaccaaggtgatgtcaattttggtcatctggtcaaggtgttgtcctattccttcactatatagttaccttttttctctgttgcaatgaataagcagtctgtgggaagaggagctgttacattttaaacagaaaatgtatttgacactgatggaaaggagaggaggaaaattaatgacataaatttcaaagcaactattaaattatttgattgcattcttcctcttttactgtctgccaaaattgataaaaaaaatttttctaataagaatgttttaaatagtgatatcttaataagcatcaaaattaagcctgagaaataaattctttccttcctaatttcctcctcagcaaaagtaataattatataaatttcattatgcctgataagatagggttttggaaaatagacctaagatgtttctgatactgcagatgacctatggtgatccaatgggataaacactctaggtaggttgtcatttggtcataaaatatgagttatcttgggtttccatagagacatctagacttaaaatgttgtaagcactgctactttcaaaatgtcagtaaaaatagcaaaagccaaagctcttgaaaaaattacttaaatcttttttaaaagtagtatagcgccttgttaaaaatctgtggtgatgccaaagcttgtctttcccagtggtcctacgtgaactggccttatagccccagggaaaccagacaccaggaattggtttctctgccttttggcaaaggaataagactacattgacttcatctatgaagacaactgccaactatttcctttgtaaattgctaattttgtgtagtgaggaaaggagcgatgggcgacgtgatttttatggattagactggtgagttctgctgaaagtttgacatctttaggatcttacattttcttcaagttgagctaatgaaaacaggctcgtgactatttatcacctgatttctaagtggatattgggttgaacaccacatatccatgactattaaggaggcttcatggtgtagtttgacaaaggctctctccttgaccaaacttcagtcaggccctaagtcctctttttaaccaggcctccaccttggcccccattcttgatgggcctatacagcccagctttagcaagaatcctgctaagctagtttagagagaatcccacatccccaatatctatgaaatttctcatcccctacttttgatgtgtaagtccttggcctcccttcaacgagaagcctgttaagttcattttgcaagaactctactcttgatatctcctcttagtaatttcctaatcactgaccccctcactctgcccattagttataaacccccacatgttctggttgtattcagagctgagcctgatctcttcctcttgttgggatagttttaaaacctgcgatagttttaaaacctatcactgtagtcctgaattaagtcttccttaccttaacaagtgtcaaaataaatttttctttaacatgttgaagcatgaacttgagaatctagagcaggagtccacaaagtatggcccatgggccatatccagcccgctgccggtttcggtaccactcatgacttaaaaatgggtcttacaattctgagtgattgaaaaaaaatcaaaagaaggataatatttagtgacccatgaaccttatatggcaatcaaatttcagtgtccataaataaagttacattggatgacagccatgcccatttgtttctgtgttgtctgtggctgctcgtgtgctacaatggcagagttgagcagtggtgacaaaccatgcgactcacaaaggcctaaaatatttagcgtctggcccttcgagaaaatgttagctgcccctggtctagagtaggtaaaaggctgagattggaagctgcttgttcaaattctgtgattggaaccgaatgatgtggctcattgtacagctcatggtgaattgcttcagtaccatggttttgttttttccttttgaaaagttggtctataaatgtaaaggaaaaatctaagataccaaaatatgttttctggcttagaatgttttatttccttgtatacattttaagagagtggcaaggagaaaagataatgtatcattttatttgggtttagaataaataatacattttatttatgatca

SEQ ID NO: 14606 - DNA, 598 bp, Homo sapiens
agtgcagcagagtggctgatgctgcaagttatgtctaaggctaggaactatcaggtgtctataattgtagcacatggagaaagcaaatgtaaaactggataagaaaattattttggcagttcagccctttccctttttcccactaaattttttcttaaattacccatgtaaccattttaactctccagtgcactttgccattaaagtctcttcacattgatttgtttccatgtgtgactcagaggtgagaattttttcacattatagtagcaaggaattggtggtattatggaccgaactgaaaattttatgttgaagccatatcccccatgattatatagttatgcatcacttaatatggggatattttctgggaaatgcattgctagtcaatttttttttgtgccaacatcatagagtgtatttacaaaatcctagatggcatagcctactacacacctaatgtgtatggtatagactgttgctcctaggctacagacatatacagcatgttactgaatactgtaggcaatagtaacagtggtatttgtatatcgaaacatatggaaacatagagaaggtacagtaaaaatactgt

SEQ ID NO: 14607 - DNA, 1124 bp, Homo sapiens
ttgatttttaaagtgtatttttcgtattctggaagatgttttaagaagcattttaaatgtcagttacaatatgagaaagatttggaaaacgagactgggactatggcttattcagtgatgactggcttgagatgataagagaattctcgaactgcatgtattgtgccaatctgtcctgagtgttcatgctttgtaccaaatttaatgaacgcgtgttctgtaatcaaactgcaaatattgtcataaccaacatccaaaatgacggctgctatatataagtgtttgtcatatggaatttaatcgtaagccatgatcataatgttaactaaataactttatgtggcactgcctagtaagggaactatggaaaggtttggatttctccaaatctgggagaattttcaaaataagaaaataacctttatatgatatactatgactaggctgtgtatttcttttcagggatttttctaccttcagggttggatgtagtttagttactattaccatagccaacctgtagttttacatatacattttcttgtggagcaatagagttctccattttacagaagcattttaaatgtagtttgaatattttccacaagatgctgcaatgtgagttatcacttcatttatcttaaagaaagactaaactggttgtcagttacatctgacagaaaaaaaaaaaaaatcactgtgtaaccaggttaagtggtaaaataatccaggcgtcagtcaaaggcattttgctgactttaatattgattatatttttaacaggaatttaagaaaatattactggaattaaaaatatatatatattaaacaagaattttctttgctctgtctagcttaaactactactcaagctgcttaagttcttaagtattgtttgtaatcaccaataaataagtgcatttgtaattcatcagtcattattagcttttattaaaagaagattacgttttacaatgtaactataatctcttgaatttggtatcttattaatgagttttaaagatgtaaaacctaaccttttttaaagctccattgtcttatgtttttagaggcttttccgtaaacatatatcttacatataataaacttttcaaatcttgcaa

SEQ ID NO: 14608 - DNA, 356 bp, Homo sapiens
gactctgccttaccaccgcagtgcggggcacctctcccagcgtttctccggtttgccaatcctcttaagtattcctgtctccaaaggaccggctctccatggctcctgcgcctcgtgctttccgcgtacagaagtgcttgcccggggagtcccgcctgacctgccttcatgtggacccttagaacagcactgggagaccagcaggactcctgagaactgtgctggtggagaggtcctagagccggcgagcgtttgagaagagggcatggcgctggagtgagatgggatttggcgtctcgtttttggctaattgattgtcattggctttttccataaagtttagaaatcgttcagtc

SEQ ID NO: 14609 - DNA, 2104 bp, Homo sapiens
ctggtcagcctgcttctgccccctcctgatttccctaaggagcctgggatgatgttggtcaaatgacctagaaacaaggattctacctgaactgaaaggactgtgtgacctcccccaagccaaccactttcacctgggatgactttcgattatgctttgttttggggctgtatttttgaaatactctacaagaaagctgtggctcaacacatgagaagaagcacgaagcagttaggctgtacatcagacagaagggtaatgcgtgcagttcctgctgcctgcaggcagacgaggcctttgctttacagcactgtatgtgttgcacgatggatccgtgacagcactttcctgttgcactgaaactcttggccatgtagaggaaaagatatggagttatgtggatttcatcactagtatgtgtgcgtgagctggtcagttgccaaaggaggaaataaggttagaagcctgaaccgttacaaaagaagagctcactatggtcaaaaagtgatggctttcaggacttgttttttatcctgcctcacagttgttaaagtctgttccaaggcatcaccttccttctctacccaacaaccctgtgtaacaactaaagtagaattatctctcatttgttgttgtttttcctcaaaattaccaaacaaagcaaaaaatacccttgttttttatagttgagatgtcaagaagttaaattgaggcttaatgagcataggtagcttgtccaaggtctcatgaccagtcaagggcaagctggagttaataatctatatttatttgactcagcactgttttcatcacaacttgttttcccagcatcatgtagtgcatttagttttgtctttctcagggtatagtcaatatgcctgcaggagtttctatagcgagacatagaatagtattctgatcagttgccaaagaatctaggaaattagttgtattttgtgcaagctaatttaaaaacatgatgggctgttttaagaccagagtggaaattcatgagaggaactatactaccaaaagagcccaaatgaccaaatccatggataattgcttcacagccttggccatcctggctcagctctcaatttagtataatatgcagttcctgtgcctccagactatgcagctcatcaccctaggttctacaggaaatacagagatgaacaactttgccttcaaaaatgtgctgcctagaaacagacctgcattcaaccaactgtaatgcaggattggaccatgaatgatatgctagaatagaagaaagagaagtgtttttttaattgagagcctctatgtgcaaggtgatatataatcatatccagtttaatcttcacaatatccaatgaagaaggtctcattatctccatgataaagatggggaaactaaggtcagaagggttaactcaactgtctattgtcacatgatgaataaatagatgaagtgagatacaaagctgggtttgattcaaagcccttactttcctaattaaactatgatgcgtatttatttttctgcaccttcctttcttccacaaacacatattgatagatgcaagagactcttatttagaaggcgtgggggacaagaaggatacaaggtaagtttcagtggagctcagaggacggggagatagaactgtggcacttaggggagatgacatttgctttgggcagaggcagctagccaggacacatttccactataattttacaaagttaaatttataagctagcattaagtaaagtgaagtccagctcccttgctaaaaataactagaggtaataattggtattcaggtaactcatttacagtcataatgtgttgtgaaaatttaatcttaaaaattaaatttttaaactatgtgggtctgtgaatttctttaatgtctaagaaatccagcttcataatttccatgatacaaagatcttttttcaggtggatttttacctttgttccttttgctctgatagacaaaatcagtttaggactattaaagaatgttttggaataaactgtctttttcctcaatgaatgggatgtctaatgtatttcaaaatcacccaaaacttttggcaaataaaagcattt

SEQ ID NO: 14610 - DNA, 1968 bp, Homo sapiens
aagttgtaatattactagcacatatatgcaagcacctagtataatttctttgtaatatgtgaaactttattaatgtattaaatattacaactagctaaatttattgtcactgtgtatataatgttttgaagtgacatctatttttataaagtactgtttagttggaaaaagttgccttaatgtttgaaatgtgtgaaatttttggaacttgctggacagggtgatttaatttttagctacataattttaagaattagtattttcagtggtgtgcatattttggttcttaaatttttgcttcttaaactaaaaaaatcctgaccaatttatttgttgttttctgtgggttgcgacccatgcaatcaaaaagcaaaattttgattgagattttttacagcataggtttttcatataaaaatattctgaatttgttaagcactgccataatatcattataatgtttttgtcttttagtgcttccctatacaattgttaatgcacaaatgatctctaatatatacttacatacgtaaaatcataaagtttggtaatgcagtttatcgttttaaaaataatccacaaagatgtttttatctcacatacttacaactcaacacacagagtgaccatgtgcagctttcttttttgttagatgccacatccgaagactcatcgcagtgtgttatatgacaggacaaagcaaaaacaaacaaaaagcaagcctgtgaatataatttaatttgaaactgctcctggtattatatatttgctagttatctaatgttttaaaagaaaatatacctcatttaggtttgaattgggcgtattgtgtaaatttcaaatattcagaatgcaaagggcttgactattaaatgtttgcctttgatgtttataaacattacaactatgttgttttaagacatttaaaaacgtgaaatttgttatctttgtaaaatgacaatcatgtagaaacctgtcttggttgacaatctctttgaaacatttccgagttaatttcccataggcttcaccaccaagaaagtaagaattgcatctttacataatgatcaaggtataatggaaaaatatacctattcttgaagtagtttattatagttttcaaattgatttataccattattaacctgatgtggtctgcttaaaaaatgaatatatcagtatttagaaataaattgcaaaggtgggaatatatacttaaataatttgtcttaagtaaattagcatttggtagtctgaaatggtgacagattacttgttaaaattgtgaaaactctgttgtgtcctctcttcctacatttgtccctgagagtactccacgattactaggttcttgattcccttatatggcaatcaggcagaggcgttccttaagcattagagagttctgaagcttaagatttgttttggttggatgaagtccttagtacagttgaaaaacagagcattaaagactaatcaattgttttgcctcaccagtcattttaaatagtagaatacttatttctcagtgcttaaaatttctttttcaactgtgagattgaataaacagtctctatttctgtggaaaaaacaacagaaaagagatattaaataccataaaatgtaactctgccttttaaagttttgctgaagaatgtgtctgtggttaggatagcacaagcattaacttttgttttatagttatgctttttaaaattcattgtttttaaatttagacttcttatttccacactggattatgagatacttaacaatttttccaccttatatttcttttacacattttgctgttctcttttttgttattgttatgccaccataccattttgttaaaatgttttctttgtgaaacatttgttcaagttctaataaaattaatgttttcccttaacatggctcaataacttaaaaacgttcatttaaataaaattttaatacttgtttgac

SEQ ID NO: 14611 - DNA, 1620 bp, Homo sapiens
tgatgcaagggaattaagagaggtaatgtgtacttttcttatgataagatcactcataaaacagttggaataagaaagtaaactagtctagttttatatgacctggtatattgaacaaacatagatctcagttttggaagggccttcagtatctttagcacatgattcaccaatatcttgttagtaatattttaagtagatggtgaattatattaacccattttttgagtaggcttataccataactttacacctagtaattttgcagtaatacaactccttacaataagttaatgttagacagttatttgtttcttctgcatcttgctactgaaaacaaaaacaatgaaaatattcatatttctattatgtgtaaagtggtgttagtgtaaacagttaactccaaatagattttttaatgtattaatgattaccttaaaattatctgctttccctactcttaatttttcttattgttaaagtttttatatgttgtaagattgatgtatctgtaaatattgcagtttttatgattttgttttattataacatggaaatatggcagggttttttttttaatcattattatactgatgtcttggattctttttctttcccatgttcttgtgtaactagactttttagccagtgatatctgaattcatggtagagttgttatttcactccagttgttcctcccttaagcacgagtctttgaccttttgaacaagagaatgccatgttcacataagcaaatcgttgcaagtgataataacgaagtgtttcttcttctgtgaggaattaatggactttgaaattgctgaataaggagtagcttgttacatcctagccatttgatgtaatacaaatgttcttatttggcttccttttctttgagccttcagagttttaaaggaccctctttgaccctcaggacttattagctcccagttagctgcctggaaaactcatagaaccattccctagatcccatttgtccgagaggctttggtgcttagttaaggtgcattttcttactctaggtttatagagtgatgtaattcaactgaagaaaacacacacatgcttttggtgcttattcttcagttaaaaggaggtatccattgattcttttatatgaaattaaatcaaactgttatttttatagctcttcacatattaaaaagagctttcatgtacatttacgtgtttaatttacccaacaatcttgtgaagttgatataattaatatctttactgttttaaaggtagagaactgaagttcagatatattgaaactttcttaggacatgtagcaagtaaacagtggagcccaggtcccctgactccatatcttacattcttttactaataacatgtcatgctgagattcagaaggcccatgcttataatttaaaaatgagactatttcagtatttctttgtgtttgttttctactattcctttctgagctatgttttagagaaaacaatttgatatgcttcaattttgtaaaatcaaattacatatatataaaaaaacctatctgtattagacaaaaactgtttttatttatttctgtaagatatccattaaataaatattttagtggaaatgaaa

SEQ ID NO: 14612 - DNA, 958 bp, Homo sapiens
aagatgaagaggcagaattgagaggctaacatatttactcttgtctaacttaagagtgccaggaaagcagatgcttagattttgtgtcaaagcttgttatttttttcatactaggattatggtctttagattaatactgattatatagagcacggaaagataaagaattgaacattttctttgtatacttttttacactaattttattgttatacataaatggtagtcttcatttttgaagtcttacattttcactctttttttaatgaagtatttcatactacaaaaatacataaacgtatatataaagggataataaatgtaaatatctgtgtactcatcagccagcttaagatacagatgttgtcgacattttagaagttccctaaggccctctccctctcaaataattatttggaattttgtgtttgtcatttgtctattatagttttacaacatacgtatgtatctgtaagtgaaatgttaattttgtatgtttctgaattttatataaatggcaaaatgtttacttctgtgactttctttcatttttattgctatatagtattatataaatatactacaacttattcattcttgatggacatttgagttttgtttatttgtttttgctgttgaaacaatgctgctgtgaacattgtatctagcagttatattgcttgatatattgataaaataatgccaaatttgtgttctgaagtgactgtactagtttatacctctcttggcactgtgagttacctttgtttcatagcatctccaacacttaagttcagacttaaaaatttgccaacctagtggatgttaagtggtatctacctgtgatttccagcaagattactgttatctctgctcttccatgtgtaagatgtcatttttttcctggctgcttttaaggttttctgtcactggttgtaagaagtttgattatgatgtg

SEQ ID NO: 14613 - DNA, 814 bp, Homo sapiens
cacactagtaaataaatgtaatgaggatttgtaaaagggcctgaaatgcgaggtgttttgaggttctgagagtaaaattatgcaaatatgacagagctatatatgtgtgctctgtgtacaatattttattttcctaaattatgggaaatccttttaaaatgttaatttattccagccgtttaaatcagtatttagaaaaaaattgttataaggaaagtaaattatgaactgaatattatagtcagttcttggtacttaaagtacttaaaataagtagtgctttgtttaaaaggagaaacctggtatctatttgtatatatgctaaataattttaaaatacaagagtttttgaaatttttttgaaagacagttttagttttatcttgctttaaccaaatatgaaacataccccctattttacagagctcttttttcccctcataaccttgtttttggtagaaaataagctagagaaattaagccatcgtgttggtgagtgttcctaggctaatgataatctgtataattcacatcctgaaactaaggaatacagggttgaaaaaatattaatatgtttgtcagaaggaaaaataatgcatttatcttcccccccaccccccgccccatggaatatttaatctatttaatcttcttgcatttatttctcaagaattactggctttaaaagaagccaaagcactactagctttttttccatattggtatttttgatgctgcttccaattttaaaagggaacaaagctgccataaatcgaaatgttcaatactaaaagctaaaatatttctcaccatc

SEQ ID NO: 14614 - DNA, 2646 bp, Homo sapiens
aagtactataattataagatttcagatagaacatgcaattagccttttgaaatccaacttctgtgcaaaattttagtatcagaaaatacgagatttgcaggggaaacatcagtaaactaccattaatgtcaatgcccagttttgacttttgttagcctgacactcccaaacagttgtagaatccgatagatgactgatggcaaaagattgtgaacatgtggaagaaaatcagtgggattctggtgctgatgaataggttgccttcagagtattattgacagacagcttgtggaactaattctttatttttgatgttgtgggaattaacacatcaatggtggttatgggaactaccaatgggttcctacaatttttatcagtagtatgtggcatatacaccttcctagtggcagttgccaatgttaatgattattctttttattgcaagtatttcctatgatccttccacactttatttccttaataataataaactttttcagaaagaattgagtagagcaaaaatgacaaagatgtgtagctgtgttcaatttttttttttttttttttttgaggcagagtcttgctctgctggagtgcggtggtgcaatctcggctcactgcaacctccacctcccaggttcaagcaattctcctgcctcagtctcctgagtagctggaactacaggtgtgcgccaccacgcccagctaatttttgtaattttagtagagacagagtttcaccatgttggccaggatggtctcgatctcttgacctcatgatccacccgcctcgacctcccaaagtgctgtgattacaggtgtgagccactgcacccggcctgaaatttttttaaggtgaaaatgttttgacaagttcctttttcagaataggtttttgagcagaactctttcagcttgttagacccaactttgcttttgtttagcttcacagcatagctgaaagttgccaaactggacattgtgcaataaagtagaattctatattgataagcaaactatttccaaactaaaaatgtgatagataaaagtgtgattaatcaaatgatatgatcagagtaaagaattttgccattttgatccttttactttgttttagccacctatagtgttaccaaccatctttatccttgtctgcagggataataatgaactaatgtagtgttttaagataatttaatgatactatctttccaaactttgttagattttaaatgtattattgacctgagaccttaatgacaaatcactgctattagacaattgaagtgttcatttactttgtaattccaataatcatagttatggaattatggtaaggttttgcttttctgtcctaataaatatatatattttttgagatggagttttgctcttgttgctgaggctggagtgaaatggcatgatctcagctcactgcaacctccgtctcttaggttcaagcaattctcctgcctcagcctcccgagtagctgggattacaggtgctcaccaccacacccagctaatttttgtatttttagtagagatggggtttcactgtgttggccaggctggtcttgaactgacctcatgatccacctgcctcagcctcccaaaatgctgggattacaggcttgagccactgctcccggctgatttttgtattagtagagacgacagggtttcaccatgttggccagggctggtctcgaactcctgaccacaggtaatcagcccgcctcggcctcccaaagtgctgggattacaggcgtgagccacttagtatttgtaaccataagagaaagtatattttaacagcattacatttcatgccaattgacaagttttgccaattttaataagaaactaagctttatgtaatgtaacaccgtaatttatgaatttgttcattgtcactgcctttattcatgaaactgtcaaatagagtgtctttcaagggttgcaggatcttagagatagaaagtaccttggtgatcatctccagcctaaatttcatcatcccttctatggtattcccaacaaattatcatccaacctatacttaaaaacatatggtggccaggcatggtggctcacgcctgtaatgctagcactttgggaggccgaggtgggtgaagcacctgaggtcaagagttcgagatcagcctggccaacatggcgaaaccccgtctccactaaaaatgcaaaaaaaaaattaaccgggcgtggtggcaggcatctataatcccagctacttgggaggctgaggcaggagaattgctcaaacccgggaggcagaggttgcagtgacccaagatcgtgccacttcactccagcctgggcaaaagagcaaaacgccatctcaaaaaatatacatatataaggagataaagtttcccattttccaatacagtttcacatttgaacagccctaattgatacaactttatggcagggttttagtgtgtgagtgggatccaaaacactcaatcctgtaaaagggtacagtcctattgtatgttaacacactgatgatgtgagcctgtgagatgagccaatcaccagttgttatgttcgaatctgctttgtgttgggacgctttaatgtcagggtttcactaaataaatgaattttcatatactg

SEQ ID NO: 14615 - DNA, 1753 bp, Homo sapiens
taatgtaatttcaataccttggggcagggacatgttttgtttataatttatacatctattaagttctggatatttacagcttcttttgtttttaattgggccagaagattctgcaaatcccaaatctttctttattatttattgtaaaaaaagtttccttagaagtcataaaatattttgaaatttagagaggaattcatgattaaagattcctaaaaatataattctgatttatgtaagctgtccctgaaaatagaaatgtgtacttagctgagagaaaattcagcatctcaggaggtggtattaggatgactgtgttaacccattaccttttagaagccaactgttggccccttaccatgctggactgctataggcccagcttccccttgttctgtggcccttttcttcctccttgaagctcccagtattctttttcttttcccctctaaacctgtttctgagagtggatctcaagcaagttcatgccttcaatcagatgttacttagggtgggtatacctaaattataaaccttatgtacaagtcagtaagccttagggaaggtgagtgtgggtccttcctaatccctctgacgtcatgtcatataggtggctgcctccttagactgacctttgggagaaaaaaaccccagactttgaattagtaacagctctaagatggtcatgcagtgagataggaaatcaagatggaagcagagaatctggcatgccaaaaactaacagaaacttagttgaaggcaaagagagcaaggagaacgtttaatacttcattacatcaaatcaacactgctccatggtgagagcacagcaactcatttatatatatatatataggctttgttgatgaaaaacgacaattgaagagaggacgttgagtggattcctgggtacagcttttgtaaaaatgtcaccatggctttcatccaatggaatgagtcgatgttttttaatgctataaaatgttagaatgtgccatcagctaatgccaggcttacgtatttctagaccataaagcagtttttcacaaattcatctttacagaaaaccagcatctagcttagcatctttccccttttaatttgtaggcttttaaaggcaaatcattcccaccatcacttaacgccgggattatacacattctagaaatgattctgagaggagtgtatagtatggtgcctatctacactcacatgatattcttattcacgttttttttaaccataagtggcaaatattttaaaatatttgaaaaacactccagaatctagtacgctttatttttagactgaacctaaagtaggttgttcttttaacaaagggtttaattcgggtggggaatataacatatcaaaatacatgaacaaatggaaagttacttctagaaaagcaaagaaattgggtatcatttttgtttcttgggaagctaattttgttgaatgtttagaattgagcaaagatgtaaatttttgaagggcagtttagaaaaattaactttgtgaatgaacttaagatgtctgtactctatatgtgatgctgtgcagtttgtttttatatggaaagatgtcaactatagccataaccaataaaataaaaactgatgaggcatgcagctttcagcacatcttttatacatgaagaaattaattttgtgttgctatggtgttgaaatatccaagatgttctgtatctatgtaaacatgattcctttaataaattgtattttattattaa

SEQ ID NO: 14616 - DNA, 33 bp, Homo sapiens
tctggtaaggactcaagagaggtgaatcatggg

SEQ ID NO: 14617 - DNA, 34 bp, Homo sapiens
tggttccctgggcccagctgtcttttcttccgtc

SEQ ID NO: 14618 - DNA, 1405 bp, Homo sapiens
atgtcacttatctttttaaaaaactctcatttttacaaagactatcttccctcccttccctgaattcagaactgtagttctccatggcatgatacaaacaggtccttgttctcttctcctcttccccttttccacatcccagccccacctctgtaaaggctttgtgcattataaacctggaatgtatcgactttctttcaggggatattggaaagataatggtcattatacttataaactcaaattttgagaggttttagattattcagaagcatacttggaactaatgaagggtatataataaaacaactggaatccaatttggtaagctaaaattatgactttccctgggtaaaaagtcttctcagaaaaacaatgtcagaaaataacagcgtgctgcttagaaatacggctgggctctgtactatgcaaaatctagaaagtgtggggaaactttaaacccaagaaaacgttcttagtattcatcctccaggtgtcttacttcagaatgcatcctttgagattatgtccacttaagagaaatcatcagttaagaaatctactttaacaaaacaaaaaggagaaaaagtaataatgtgatggcaatcttaatttttgggtacaacatgacaagctgtgagtttgtgtgtttgtaagagaaaaatgtgtgggtacttgctaataaacaggtgaattaatgcacatccttatctcattgctggcttctttccaagttgagcaacaacaaaatgctgtatttgagtttctgacaaatttgttttaaaaatcaaatttgaatgtactattctataaattgcctttctgaatagaacatgacatgccattttctagcagctgccagtgataatttgttttacactaacttttaaatcagtgtgtgtactgcagggaaaaggatataggaatactcatcttacaggggaatttgtgaccagaagatgtagtaacttcaatgactgaaagtcaatgctgatagtttactggcaacattaattgaagcatcaaaaataaatggcaaagagaaatcaggacaaaaaatctaattgctgtttgggaaaaaacttgattttgatgtttattctccaggtttttggttgtttttttttctttcttctttcttaatgcctgaaattttctccattggcccgaaagcagtaaaaattgttcattaatcttccgttaggccaataaaagaagggcctcacaagacaaaacaggagccagaagtaaggactgaaggagaaggggagaatagctaatagctatagtatatgtatatgttaaaaactgaatatcccatcatcctatttcatgtatagttgagttctcaaatttgtaagtttttatacatcctttcattgaataaacgtttaattaaatgagt

SEQ ID NO: 14619 - DNA, 381 bp, Homo sapiens
tcaagtgataaccaaagtgtcactgcaagagatattcaagttctacaatcaaaaattaaatgttcggcccggcgcggtgcctcatgcctgtaatcccagcactttcggaggccaagaagggtggcttgagatgagatcaggagctcaagacaagcctggccaacatggtgaaaccccatctctactaaaaataccaaaattagccaggtgtgttggcacacgcccgtcatctcagctactcaggaggctgaggcaggagaatctcttgaacttgggaggcggaggttgcagtgagctaagatcacaccactgcactccagccagggcaacagtgagactcagtctcaaaaataaacaataaaataaataaataaatgttca

SEQ ID NO: 14620 - DNA, 749 bp, Homo sapiens
actaagcagatgccatctgcagaagtgctggtagcataaggaggatcgggtcataagcaatcccaaactaccaacaagaggaccttgatcttggcgaaagccctcggtgtggcagctttagccctcctccagatcacatgtgtgcaaattatggcttcagaggtggaagataaacagtgacgggggaacaaacagacaacaagaaggtttggaagaaatctggtttgagactctgaaccttagcactaaggagattgagtaaggacctccaaagttccccggactcatgaattctgggcccttggcccattctgtgcacagccaaggacttcagtagaccatctgggcagctttcccatggtgctgctccaaccatcagataaatgaccctcccaagcaccatgtcagtgtcgtacaatctaccaaccaaccagtgctgaagagattttagaaccttgtaacatacaatttttaagagcttatatggcagcttcctttttaccttgttttcctttggggcatgatgttttaacctttgctttagaagcacaagctgtaaatctaaaaggcacttttttttagaggtataaagaaaaactagatgtaataaataagatcatggaaggctttatgtgaaaaaagttgaatgttatagtaaaaaaaaaaagatatttatgtatgtacagtttgctaaagccaagttttgtttgtattgatttctttgcatttattatagatattataaaata

SEQ ID NO: 14621 - DNA, 638 bp, Homo sapiens
tctcttattaaatcaattgttactgatcatgaatgttagttagaaaatgttaggttttaacttaaaaaaaattgtattgtgattttcaattttatgttgaaatcggtgtagtatcctgaggtttttttccccccagaagataaagaggatagacaacctcttaaaatatttttacaatttaatgagaaaaagtttaaaattctcaatacaaatcaaacaatttaaatattttaagaaaaaaggaaaagtagatagtgatactgagggtaaaaaaaaattgattcaattttatggtaaaggaaacccatgcaattttacctagacagtcttaaatatgtctggttttccatctgttagcatttcagacattttatgttcctcttactcaattgataccaacagaaatatcaacttctggagtctattaaatgtgttgtcacctttctaaagctttttttcattgtgtgtatttcccaagaaagtatcctttgtaaaaacttgcttgttttccttatttctgaaatctgttttaatatttttgtatacatgtaaatatttctgtattttttatatgtcaaagaatatgtctcttgtatgtacatataaaaataaattttgctcaataaaattgtaagctt

SEQ ID NO: 14622 - DNA, 1360 bp, Homo sapiens
gttgatttgttatttatagactttcgtatcttagaaaaattctacagtacatccacatagggtgaaagtacccttactctcttgaaaaacgttgagttaacacagttggaggtaatatgcatattctgaagtcatagataatttacacagatctctctcaatgcattagcaaaaatcatacaatatacagatggtcctcgatttacattgtggttaattcccaataaacccatcataagttaaaaatgcatataacgttagcaacacagcagtctcctaattaatgacagcttgacttaacaattttccaactttaccatggtgtgaaagaggtatgattcctaagccctaaggagctcctcagcttgaaatggggctgcatccctataaacccatcataaagtcaaaaaatcctaaaacataagttggtgaccatctgtaatcatgatgtggtggtaaatcttggacgctaccttacaataactagacaaaggaaaatcatcctttgtcctgttctgtgtaaatatttaatgaatgatcaaaacttcagtttaaatattatgaaaaactttaaacataaagtagtagaaataagacagtaaatactgtatcctaatatccagtcaggatacagaaaccataccattaacttgaacagggataattttaatataaaaactgttaactgataatggtattaacttttaagagggatgaaagagagctatgatgtcctaggactgagagtaccccaggaaagaatacccttgaaagggtctccccttccccatggtgaagtcaggcctaatggagagagtggctacagcctactcagtgattgggaaattccctgtcttgccctgggccagagctggtgtaccgctggtggatcaggtcttacaagcaaagaacctcacactcccaactggtaagccagaagcctcttgctagggtgtgagcaaaacttggacaggaactctcagtagatgtttgtgtttgtcaagattctccagacaaacttccttaaaaggattggcttgtgttgttattattaagtctaacaagtccaaaagctggagtgtgaggcaggaggctggaaacccaggaaagctgatggtgcaaggtccagtccaaaggtatctgttggaggattctcttgttctgggaagaggacggtctttttttctcttcagaccttcacctgactggatcaagcccactaacatcgaggaggacagtctgcattactcagagttcactgattgatttaaatgtcaatctcatataaaacaccctcacagaaacacctagaataatgtttgaccttataattggaaaatcagagcaaaagttaaatctc

SEQ ID NO: 14623 - DNA, 668 bp, Homo sapiens
tgttcatttaaaaacaatcattttggagggctgagatgggaaataaaagtagttaaataacatcagaaactgagttcctggagaactacagtttagcattcctcaggctactgtgaaaacacaaccgttatggtctttgtctccatttttatcaaggttttccatggttaagtttggagaaaataccacacaaaacaatgaattgccaaattgtttgttttattcaagactcattctacttgcaagcaaagtgtatttgtagtcctatgaacagtctcctcgtgtatctccagagactgcatgtgcaaagtaaaatgcttcatttgccacatagttgttgtaatatttaatccagtagcataacttatatctgtatttaaggacttttgtgcaatatggtcttaagaaataattgccaaaaaaatcggccatggtttgcattttttaacataatctaagacagaaaaaaagcaatttttactatgtaacaatggtattcaacattctatatactgtgtttagtacactaattttgaagccaatatttctgtacatgaaaaagagctatttatctctgtttgttggaaaatcctaatggggattcctctggttgttcactgccaaaactgtggcattttcattacaggagagtttactatgctaaaagc

SEQ ID NO: 14624 - DNA, 5217 bp, Homo sapiens
gacaaagtcagggttttctcctcttatattttatcacaagcaactcttcaagatgttgcaaaagcttacatttttccttaaaaggaaaactgaaacccagtccttcaagcatcagcttcccatctaaagatgcacgttagatgaagataatcaccgaatacaccagggctcctcatttcagtcgtaacgcatccattgagattggaatgattgagttcagttgaaaggcgttttttgtgttcctactgggagctcacggtgatgtggggctctaggggggatgtgagaaatgtctcttctgttcattgctctccagagaatgctatggacaagaatcaaattttaccaggagtaattgcccatggaaacattctgtttttcaaaagaagaatgtacatattccacttgactgggaagctgtgtggcccaaatcactgtttgagtggaggaatgttttctagagcagtgactggaaggacaaacgtggtgttgcagaacaaaaattccttgcctttggtatggaatggtggtgccttttccatgtgatgagaaatgcttcatagacagtggcatgtgggagagctgaaggaggaggcgtgttccatattccactcattcaaaggacagcttggtgttttcacactttatgcaggttaggggatctgattaatgtttcctttccttacaacagctagagaaaacatctcatcacaattggagacctctacttcctttgagctttcctactcaatggtaggagataggaatatgttccgcaaagaatgtctactgctcttgtccttggctgtgatccctatacatagtgtgaatttatatccaggtttcccaggatcaatattgacaagacgactttggcatctgaattgttttaatatctttactcaaaaaaacaaaaaaacaaaaacccatggaagcaacaaaagagttaaacatgagggatttatttttgtatgtttatatgtcacttgtgtgctatgtgaatagctatgtttgttatttaaatatatttatagaagttcaaattactagtgtttaaaagatgatatactattatatattgtgcttagtatatatttgatgagtctatactttttgcttgagaaaaatagaaatactattgattcactggtgttatgatgttgcactgtgtctgaggaatgctcaggaaatcttgtgggaaaaaaatggggcatgcattcataatttttcattttcttccccaccccaacccccatgagctcttaaatttagatttctatctcttgtaagtcactcttttaaccagcaaaggactttcatcttagattatcctttctattaaataaactttaagctttgtgccatttatgcctgcaaaccttagaccaaaggcaacacaactaatgtcatcttttcattaaagactaatagaaatttagaaatcattgtgttaaagagagctatagagaaacaatatgaaagtcttcccttactaatcaccatgaatatttctcaccataggaataaccacaacccaccaagtacccatgttggccctgcctacccgtaacaaattgttcacacaacctattttgttttatagcttcaaagtgtggcttgacattcaaatggaaggaaccacctgaattatatctgcaaacaaaatggaaatagttgttgaatagttccccaagctttactaagaagccttaatactctgtaaacaaacaaacaaacaaaaaacaaccttagcattaagaaataaaaacaaaaaacaagaagcaagttgtactgctagaaacttctctaagataagaggccaggccagtcagtttggcccagcaaacatgtgggtacttctccacctagggaagccactgaagatgagtttgacctgtggtgacctgacagagagaacattcagatcctcagattgcaccctgatgccctggtttaggaaagcagtgctttaaccttttgcccctggaaattactgattctttctgtgattagcagataccagaagggaaattatttaggattggcaatgtaaagagtattgaaggaacaacaaataacaatagcagaaataacagtgtgacataaagtgcccttccacctatttttctttggtttgcaacaccagcctgtagacttccagtttttcttaaattgaagagctccagacacttttgagcagggtttgtgaatagctttgaatgctttcctttggcttttcgtgaagacatatttccccagcctttcaactgtaaactcctttagtaccattgaaacttaaggcaaaaaagatccctgggattacttagccaaggcttaaatttatttttcaaagtcaagaacattagcctagaagtttttgctttgctagttaaagcttactttgcagagcttcccaaagtgaaagggaaactgaacttcacaattttgcacctggctttctggagccccattgcctgctcattcgtgtttttccccctgtaaattattttgcttttgaccaggttgtgctagaaagtagggctgcttctgtgagttctcagcctaggctgtggccactaagacgtgggtggggggatagacaggagtgagagggagagtgggtgacactttccgtgacacttaatgtaggaagacatgggcttctctctcttggcctcaagccacttttctggtccaaagaatattgggaaaactggattactttcagtatatttcttgagaccgggtcatctctgaaatgcatttggggtagtttcctggggtccaagggccaattcctatacccagtcctgcagtgtctgtgagctgtggaatgagagagaaaaccatggctgctcaggaaggaagtggagaatctctcagcacacgtagatccaaatctgtggcacctgctaaagattaggatttggagaggactcctctttggggttgtgaagaggaccttttccctctgttgttagcctgtagatccagaacggagcctgatgtgatgccttcactggttgatatattgcaaatagacactctgagccctgcattgcaagggcgtcttttgctttaaagaattcttagttttgccacaacagctcaaatctcagaataggatcaaaggcctagaaagactcctaaagtataggattacaaagactccaggaagcgtaagaaagagattgtgtttggagtcagatttcaatgtgaaacccatgccttacatttacacagcactttgtagtttgcaaattggtgtgttttcagccccctcccgctgccccatgctctgagatgattgtggattattacagtgaagtgcctggcccggagcccccagtgatgaagcaggaacttgagtctcaggactcccagcggctctctgcccatttcctcctctccgccccccacctcgcttcacctgttaccttgtgaagttgctgttggcacatagcccactaggaaaccaagaagtttgactgggagcgtgtgtttcattgcactgggcttagcatacggctggccctggtggctgtttggctaaattctccatttgaaacctaaagggccctctctgtgcttgagcacagtctcctcctagtggtcctgcctcaacctgctggcgggctgtctatggattggggtttcacctaatcatgctgtgtttcctttcttttctttctgtacattagactacttgggaggtgctgtgtgatccttggatgaaaaacatatatttaaagaaatggagagtgtttattttgtttgctttttgaggcatgtgctgtcaaatgttagagaccaaacttagtgattagaggttggtcctttgaccttcttctcttaattgcttttcatgtaatcatgataatttactcaggtagcactccagtcacaaacaatgtcacagagatgaaacagattcaaagaaaaaatatttttaagtcttttgaaaagaagtgctattcaaatttaagacatgtttaaattcataggtacattatctcttagtaagaaatacttttttttttctttttttagacagagtcttgctctgttgcccaggctggagtgcagtggcacgattttagctcactgcaacctctgcctccctggttgaagtgattctcctgcctcagcctcccgagtagctgggactacgcccggctaatttttatatttttagtagagaccggggtttaccatgttgcccaggctggtttcaaactcctgacctcaggtgatctgcctgcctctgcctcccagagtgctgggattacaggtgtgagccaccacacctggccgaaagacagtattttgatatagccacatacatgatttaatgagtaatgttaagtacagaaaagctgccatatccacatagttttagggggcatttcttcttcagtctaacaagaatatgatatccaattgtggttttccaatttatttctcttccaatttcttttgtatacctcacaggagaaattgaatcctagaactgggagatgactgccctgcccagggttttgtaatacataattgaaaataaaagtccctgaaactaaatgtttgcagcctgtatgaaatggactgtggaagggggataatttctctcctcacagaaagccactcgtctccttgaatgaggcattgagcagacacacgtttctctgtgtcgtggggcaggaagcaattcccttgcctcttcagcacatctcagttctttcccacatgaccccagaaccacatagaaaacattgaaaataatggattcttcattgtatttgaattttttttttttaacctttagcccaaaagggaagtgtgcctcgtggaaagagcaaatgccgtaaaatagaaaccaggagttttaatcgccatatattttaatgtgcttgcatgatgggaatgtgacttttagcactgcatggtgtttgggggcaagatattaatgtggaaatcttagcttaagttttactgtgctctcatcctgtgtcagctacccctctaaactgaaaaagaggcatggctcatttctctcctgctttatgtttttgaggttgacttgtaagataaaaataaaaataagaaaaaaatatatctaggcaaatgacatgaaaaaaaagttgaaatatactactggtgttcatttttgtcctgcagtgttgctttctcaaagaaataaacatgtggctggaagtgttt

SEQ ID NO: 14625 - DNA, 1054 bp, Homo sapiens
gagggaccctgctcaggccacctgcctggctcctgccccaagtgccttgcttttacagtggacagcctcttctcgtttcagcctcagtattatgtagggaccttatgcaatttctttttcttttgaaaagttatctactgcccttcttggaagtttgcaggattggatgggaacaaattcagaggatcttaggtgctggcttgtggagacaaaaggagggaaatgggtagagcctgtttgtcttgcttccccagagatagaatgtgaagacacgcgctagaaatcgcagtcctggccagagacgttatggtcattgtgagggactggtggcattgttcctttttgaggggctggggggactcaaattggtggctgttttcacacagatgtgttggtttgtggtccaacttctttatctgaaaaagccagtgagaaaacatttttgatttgatttttctaaactatctaccatattttaagtgtagcagctttgactttgcaataacgtggcaagtatctgatttctcctttgaggcagaggtttaagtgtaggcctgttacacttgtttgatacctttttcatgacagtctcagtatagatcagttggtacagaaatacatgaacacattttgatagggcttatttcacacaaagaagtttatggttatttgtgtggggtggtgttgttatatattattgtctttaagggaaaagaagctataagattcgctgacagccaaagtatcatttagaaaagtgaagcaacaagatttaggttgatgaaagatacatgagtttgcattttgacctgttcagtgtctgtcttccagcacggtgtgtacacttcttcaaaattgtacacagtttgctaattagaaatatcttggaaagcctcatggtcactaattttcaactagcatcaggtattttgaaaacgtgtgtctggatattaactcttgtttaaactgaatgtatgatattttgttagaatggaaaagtactatcttgttaatttaagtattttaaatatagttgtatatttttcttactctt

SEQ ID NO: 14626 - DNA, 172 bp, Homo sapiens
ctgctgcctgggggcgagcagcctaccagatgtcgatttgcactacgtggagcttcttatataggtactcttttgtctttacagaatgacgatacaaatgccaatgaccagatgtgacttattttccttttactatacagcttggcagagaaaataaatatcatcaaataag

SEQ ID NO: 14627 - DNA, 205 bp, Homo sapiens
gttttcaatcaagttattgattccaaagaactccaccaggaattcctgtgacggcctgttgatatgagctcccagttgggaactggtgaataataattaactattgtgaacagtacactataccatacttccttagcttataaataacatgtcatatacaacagaacaaaaacatttactgaaattaaaatatattatgtttctc

SEQ ID NO: 14628 - DNA, 1849 bp, Homo sapiens
cagttgtgctcttccagttttcatatgtgaattcagtgcaagaaacttggtgttctgtttcttcttttaagctctatgcaatcatgcaaacatagtgatcatagcgtcaacatggtctggagtgtgttgcagactacagaacattgttctcccttcaagcgctgtaaagcaccaacccggaagtggcaggcacagaaggaagggctggattgggcccctttggtgtaaagaagtccctgtgtgctgctttatggttcgcagtgttgggcttggtgactggagcaaagctgctgtgagagagtgtcctttcccatctgtgactttcctggtgcatccaggaggggcacggcaggttctgaggtaactcaacttaccataaaaatgccattaagagagtacctaaaatggagagaagaatgaactagaacattcaagactcttttacttctgggtattgatttgctgtacatttttaaagtttgagtttttagctcagttctaccttttatctgacacattattactagtgttaactttgttagacttattgtcatgtctgggtcagttccttgtatctattttcgtattcctgagaacaaatctttttcttagaaaaattctagcttataataattcttttcagactgtagctgcctatgcttggaatttgtcctagataaggataaagtagctaatccattattgatcacagtatgaagtaaaactattctaagccattatatgaattagcaattcttagtatcaagattctcagattctctttggctaaataaacctttcttcttccttgctcatttgcaagtggtattaattgacctctatagcatgtgagtagtagataatcatgtcgatgacctttttttctttagagtaacagcattattgagatataatttacataccataagattcacccttttaaattatacaattcatttttgttttgttttgtttgtttagagacagggtctgactctgttgcccaagctggagtgcagtggcatgatcatagctcattgtaacctcaaactcctgggctcaagagatccttttgcttcagcctcccaagcagctaggactacaggcacatgccaccacacttgggtaattaaaaaataaataaatacttttttgtagagacagggtctcactgtgttgcccaggtctcaaactcccgatctcaagccaccctcccaaaatgctgtgattataggccagagccattgttcccaggctcaattcattggtttttagtatagttcactgagttgtgcaacatcattgctatttaatttcaggctatttcatcatccccaaaagaaccccatacccatgagcagtcagttcccacctctgctttcccaagcctgcggtaaacactaatctgttttctgtctctatggatttgggaattttatgtaaatggaatcatacaatatgtggccctctctgccttcttccttctattagcatgttttcaaggttcattcatgatatagcatgtatcagtactacttcatttctttttatggccgaaattactccattgtatgatatgccatgtttctttatccattcatcagctgatggacatctaggttctgttcatttttgtctatgataaataatgctaccatgatcatttgtgtacaaatttatgtgtggatagatgtttttgattctcttgggtggaattgctggtcaaatggtaagtctatgtttaaattttgaagatggtgaacttttgtagaatgagatagtcgaagctaaaactggagtatggcatctgaaggtaaatggctcatcaataaactcgatatcaacaatt

SEQ ID NO: 14629 - DNA, 353 bp, Homo sapiens
cctgcagtccagcctatggcctttctccttttgtctctagttcatcctctaaccaccagccatgaattcagtgaactcttttctcattctctttgttttgtggcactttcacaatgtagaggaaaaaaccaaatgaccgcactgtgatgtgaatggcaccgaagtcagatgagtatccctgtaggtcacctgcagcctgcgttgccacttgtcttaactctgaatatttcatttcaaaggtgctaaaatctgaaatctgctagtgtgaaacttgctctactctctgaaatgattcaaatacactaattttccatactttatacttttgttagaataaattattcaaatctaaa

SEQ ID NO: 14630 - DNA, 1168 bp, Homo sapiens
cagccaggccaggaccaagggcagaggggtgctcatagcgggcgctgccagccccgccacgcttgtgtctttagtgctccaagtctaggaactccctcagatcccagttcctttagaaagcagttacccaacagaaacattctgggctgggaaccagggaggcgccctggtttgttttccccagttgtaatagtgccaagcaggcctgattctcgcgattattctcgaatcacctcctgtgttgtgctgggagcaggactgattgaattacggaaaatgcctgtaaagtctgagtaagaaacttcatgctggcctgtgtgatacaagagtcagcatcattaaaggaaacgtggcaggacttccatctgtgccatacttgttctgtattcgaaatgagctcaaattgattttttaatttctatgaaggatccatctttgtatatttacatgcttagaggggtgaaaattattttggaaattgagtctgaagcactctcgcacacacagtgattccctcctcccgtcactccacgcagctggcagagagcacagtgatcaccagcgtgagtggtggaggaggacacttggatttttttttttgttttttttttttttgcttaacagttttagaatacattgtacttatacaccttattaatgatcagctatatactatttatatacaagtgataatacagatttgtaacattagttttaaaaagggaaagttttgttctgtatattttgttaccttttacagaataaaagaattacatatgaaaaaccctctaaaccatggcacttgatgtgatgtggcaggagggcagtggtggagctggacctgcctgctgcagtcacgtgtaaacaggattattattagtgttttatgcatgtaatggactatgcacacttttaattttgtcagattcacacatgccactatgagctttcagactccagctgtgaagagactctgtttgcttgtgtttgtttgtttgcagtctctctctgccatggccttggcaggctgctggaaggcagcttgtggaggccgttggttccgcccactcattccttctcgtgcactgctttctccttcacagctaagatgccatgtgcaggtggattccatgccgcagacatgaaataaaagctttgcaaaggcacg

SEQ ID NO: 14631 - DNA, 597 bp, Homo sapiens
agtgcctttgagaagggctatctgatgggttagagtgcctttgagaagaactcaatggatactggatttgctcctgtcaatgaagtttaaaggctgtccaatcctctaatatgaaatgtggaaaagaatgaagagcagcagtaaaagaaataccgagtgaaaaaacaggaagtgtattgaagcttggactagaattccttcttggtattaaagagacaagtttatcacagtatttttttttcccctgctgacccattgctgtaccaacgatgttgagtggcattttcttcttagtttttcatttcttaaaaaaaaaagctccatatttacagctataatatcaaataaagtgattattttttacaacccccttaacaccttttggagatggcgtttctgttttcagaaattaacgtaaaatcaagaagcaagattccataagctgagaactctggacagctgatcaggtttacctatggtgctttgcctttaactagagtgtgtgacggtagattatttcagatatgtatgtaagactgtttcctgaacaataagatgtatgaaaggagcagaaataaataatttttctaattaaaa

SEQ ID NO: 14632 - DNA, 302 bp, Homo sapiens
gagggaagcttcaaagtcatgaaaccaatcaacagccaagtcagcaagcaatcaggtaatgatgtgcgagtcccctcaggttatagaaattatgttgtatttagtcagtatgtctttttgtgtaatggactgggccaatcaaatgtgataaaattaatttgagaatgaaacttaaattgaattcatttatttaatagaatattcaaaggctatattgtaattctaatgagaattatatttaattactagctttctattaccattatatgtaaccagcaaatatatttttccttagcccttct

SEQ ID NO: 14633 - DNA, 830 bp, Homo sapiens
gagggaggccatacgccatgccatagcttgtgctatctgtaaatatgagacttgtaaagaactgcctgtagattgtttttaaaaggtcttgaataagctccttgagaaagttgtggaaagccctcctcagtgaggatagctacaccatggccatggcgcatcagatagtctctgtgtacctggatttgtgcaatatgtaaaaatgtatcaaatgtattatagataaggtgttaggtgcaaaggatgtctaataatccctgcacacgttttgaacttgcagtgaagtacactgctgttccttgcttcctggggcacttttctcttggttagtgtttaaaaattatcttcgcttttttaatgtggcctcaaatgtcatgccaattttcacatcttccacaaactccatttagggagaaatgtttaaatctctggtataagtttactccataccagagtaaactatatattactctatataagcagtcttgcaataactaatcaccaccatagaagaaagaaacagactgcaaggaacagagttgagtgtctggagtcatcaaaggcattaaaaactccagtaaaagctggggccgtagcaaaaatcatgaaaaacacttcaacgtgtcctttcaatcatccaattaaatgtgggtagattaatgaaaatgtattacatcaatattaactcatctatagcactttgagtatctttgtagttcatgatatcctatcctataatgtggaggtaaatgattttatatgcattgggggtcatatataaaacttcaatgtaatttcactacaataaattgccttccttatttgaaagt

SEQ ID NO: 14634 - DNA, 183 bp, Homo sapiens
tgagaaatccccaacttatgatctcaccatctgtttgccaagtccaggcaataaaatgcttcagaatgtctccaactgactcagaatcacagtgaaaatataaaatgcaaaatgcttttgtcatagttccactctctcagatacatgtatctaatgaaactgaataaatccgtgtcttctgtc

SEQ ID NO: 14635 - DNA, 770 bp, Homo sapiens
accacgatcgttatgctgagtatgttaagctctttatgactgtttttgtagtggtatagagtactgcagaatacagtaagctgctctattgtagcatttcttgatgttgcttagtcacttatttcataaacaacttaatgttctgaataatttcttactaaacattttgttattgggcaagtgattgaaaatagtaaatgctttgtgtgattgaatctgattggacattttcttcagagagctaaattacaattgtcatttataaaaccatcaaaaatattccatccatatactttggggacttgtagggatgcctttctagtcctattctattgcagttatagaaaatctagtcttttgccccagttacttaaaaataaaatattaacactttcccaagggaaacactcggctttctatagaaaattgcactttttgtcgagtaatcctctgcagtgatacttctggtagatgtcacccagtggtttttgttaggtcaaatgttcctgtatagtttttgcaaatagagctgtatactgtttaaatgtagcaggtgaactgaactggggtttgctcacctgcacagtaaaggcaaacttcaacagcaaaactgcaaaaaggtggtttttgcagtaggagaaaggaggatgtttatttgcagggcgccaagcaaggagaattgggcagctcatgcttgagacccaatctccatgatgacctacaagctagagtatttaaaggcagtggtaaatttcaggaaagcagaagtt

SEQ ID NO: 14636 - DNA, 180 bp, Homo sapiens
tcataccctaatgatcccagcaagataatgtcctgtcttctaagatgtgcatcaagcctggtacatactgaaaaccctataaggtcctggataatttttgtttgattattcattgaagaaacatttattttccaattgtgtgaagtttttgactgttaataaaagaatctgtcaaccatc

SEQ ID NO: 14637 - DNA, 547 bp, Homo sapiens
tctgatgttccttttatttataacaatgttaaatgcaattgtcttgtaccttgagttgagtattacacattaaagtaaagtacaagctgtaaacttgggtttttgtgatgtaggaaatggtttccatctgtactttggtcctctgatttcacatattgcaacctagtactttattagtttaaaaagaaattgaggttgttcaaagtttaagcaattcattctctctgaacacacattgctattcccatcccacccccaatgcacagggctgcaacaccacgacttctgcccattctctccagtgtgtgtaacagggtcacaagaattcgacagccagatgctccaagagggtggcccaaggctatagcccctccttcaatattgacctaacgggggagaaaagatttagattgtttattcttctgtggacacagtttaaaatcttaaacttgtctttttcctcttaatgtatcagcatgctaccctttcaaactcaaattttcattttaactgcttaggaataaatttacacctttgtgaaaattca

SEQ ID NO: 14638 - DNA, 672 bp, Homo sapiens
gaagagagaccgttgctgctgtcatgacctagctttgatggcagcaagaccaaaagtagaaatccctgcactcatcacaaagcccatacaactcaaccaaacttacccctgagccctatcaacctaggtctacagccagtggagtctattgtacactgtggaaaaatacccatgggaccagatcctgccaaattcttccagctcactttattctcagcattcctaggacattggacattggttttctggagggttttttttccatctttgtatttttttaaatttgattcttttctttgcaatgctatctaaccagaatacataggggaactgtgggctaggcaaacaaaatagaaaaaagtgtgaaaaacagtaaagttgggagaggagcatctattttcttaaagaaataaaacacccaaaacaatataaagttgtccagaatgtatgtcaagaattttagataggcctttcagtaacacaggtgaagaaatttttaaaaatacattgattattatctaggttagacttaaagtgaatctcaaataaaagaatcaggaatacaacttaagtgatcatgaggtccttccatatttagattgggtaagcatgaatgtgtattttctacaaaagaccttgagaagagttcaataaaaaatgttagcattataa

SEQ ID NO: 14639 - DNA, 908 bp, Homo sapiens
tggcctgacaatgaactactgcaggaatccagatgccgatacaggcccttggtgttttaccacagaccccagcgtcaggtgggagtactgcaacctgacgcgatgctcagacagaagggactgtggtcgctcctccgactgttatccaggttccaagcctagaggctccttccgaacaagtaaaaagtctgtatccagacatctatgtgcttggacaacgggatgaaaagacatgaaaaaccacactgatgcagaagcctttagtgctgcacgggagctcgagtgttggttgagggtctgccatgaccaaggaagcctcaatgccgtccctgggaaagccagagctgtgatttttggcacaacttgcgagtgtagtgactttaggactggcgcaaaacctccagggtgctcaacttaaccactcaccttgttctaaaataggttatttcagtgtcccagtcaaattcctattctaacatgctgtcaactatgtgattctttccaagccaataaacatttccagtaatttcttaaaatagtgttcatggcagtcttcagcagtggcttctgactaatgtggcccctgattccgtcgtcctagagaaacctgacatgactgcattgattccatattgtcctgggtctatgtggctgtgcatatcatctgctttttgtttttgttttcgttttttttttctacagactctatgtttgggaatgggaaaggataccggggcaagaaggcaaccactgttactgggacgccacgccaagaatggactgcccaagagccccatagacacagcaggttcactccagggacaagtccacgggcaggtctggaaaaaaatgtagggacatggatgaagctggaaaccatcatcctcagcaaactatcgcaaggacaa

SEQ ID NO: 14640 - DNA, 245 bp, Homo sapiens
ttggacgggagacagagtgaagcatcaacctacttagaagctgaaacgtgggtaaggatttagcatgctggaaataatagacagcaatcaaacgaagacactgttcccagctaccagctatgccaaaccttggcatttttggtatttttgtgtataagcttttaaggtctgactgacaaattctgtattaaggtgtcatagctatgacatttgttaaaaataaactctgcacttattttgatttg

SEQ ID NO: 14641 - DNA, 6514 bp, Homo sapiens
ctcagggaggtgtcaccatccgaagggaaccttggggaactggtggcctctgcatatcctccttagtgggacacggtgacaaaggctgggtgagcccctgctgggcacggcggaagtcacgacctctccagccagggagtctggtctcaaggccggatggggaggaagatgttttgtaatctttttttccccatgtgctttagtgggctttggttttctttttgtgcgagtgtgtgtgagaatggctgtgtggtgagtgtgaactttgttctgtgatcatagaaagggtattttaggctgcaggggagggcagggctggggaccgaaggggacaagttcccctttcatcctttggtgctgagttttctgtaacccttggttgccagagataaagtgaaaagtgctttaggtgagatgactaaattatgcctccaagaaaaaaaaattaaagtgcttttctgggtcatctgtggtgtatgttgacatggaccgctgcccctccatcctgcccttgcccgtggctttggtgtttcagatcctactcacgggaggcagctgccgcggaggtgtgggcagctgagaggggtgggcaggccagcacagctcctggcaggagacacaggtccaggagcccgtgagcatttgtgagagcagagatggcaagcacgtgcgtggagaccaacgaagcgtgtccctggcacacagcaagggagagtttcgctcggtctctgcagtgcagtctcctggcgtaagtcttgaagatggacccaactccctgaagaaatggatcttgaaattgaacacaaacatcatgaacgtacagcctgggcattctgcagtgatttgtgagatgagcttgcatcgactgttcctctcagcagtgacagccaaagtcacccctgataaaatgcagtttcactttataaaatgcctcgccccttcccagcatgtagagcttgtctgcagccctaaaggagccaggtcctgctctgatgagggtcaaatcagagccgacatcccatgtacaaaaaacccccaggcttctgccttccttccgggctcctgtctgctcccattttactccacggaatagttctgccctgtagcatctccagcggcctttgcagactgctgtcagccaacaggtgccaaaaatgcaaaagaagaagaaactaaaagcagtgctatttttgcagaacaaatgctagctattaaatcatcttaggccaagacaccaatggcacttggaccgataggtatttggagcatgagttaggaaggatatgtctttctccaggtgcgcagctgaaagttgctgagaaaagctgcctgtgttgctgtggtaacatgagaaggaatgaacagctctatacaaaaactggccacacattataaggcctattctatgcagttatgtttttggctatttgctcatttagtcattgtttatcaaccaaactaggtaagccaaggagttacaagacagctctagagaagctccctctgcttacaggacaataatgcattgtttgtttgttgatacaaatgaattatttgaatccacagaagtgaaaaagggaaaaaatcctggctgacttgtgggaagagcgtactgcagagcctagggcctgagttaactcgctggcggccctgcaggcaggcttgatgggagcgcccagcacatctgcccaccctgcacagggcatgaagcaccgtgtgcagagatctgtgggcaaaagcccaggacgtgaccttaggcaagaggggtccttggagaagtggaggtgtgcatggtgtgtagccttgcgtgtctgtgagcacgccctagtggacctgcgcctggattatcgggccagtctctcggaggggtccgtgatgctgagttacgccattcacctgaactctgcagctcatcggctgtaggatttgggtgagacacttttccttgctgactcatttccccatctgcaaaatgggggtgacgatatctacctcttggggtgtgtcaagggtaaaagagcacactttaagaatcctaaagcactaagccaaggatgaaagactagaaagctgcctctatgttgctactctcaaaaatgctcagaaattttcttgtcgtactaaaaatgtgttatttttctcattttcattcttccattcaacacagaagtaatctaagtaagttctaaaaacatagatccgggggcccacagacattcaattttcttctgaattggctctggtatcacacaacacacaagcaagcaaacagcctgcctgctagggccttgggttccaggctggaggaatgcaggcagaaatctcttaggaaataactaagtgagcgccaagttttgaattgccttagagccgaaagagaatgtggcgtgctggggagagatctggacctctttctcatcagtcatttgacctgtccacgaagaacaattttgttatgcagcctgggaacctggtttccttacaccctgcgcccttaatgacacagacaaccacgggtactcctggacggaagctcatcacgcctcctcaaataccttcacccatgttcaggtcacacggaggtcaccatctcctcagcacacaacaactgctttggttcccagggttattttttctacgagttgaaaacccacggagcctaagccatctttttgtcccctaaggagagccccatagactaagagctacacttcctgtctgtctttcccacctttccatctcattctagcttaaagcttatcacgctactgagagcctgttctgtagttcaaggtggcagagaaaaatacgaaccttgagtgaaatctggagagcagtgcagggtcatccccagacgtgacgggccatatcctaggcgactcctgcagcttatagaagcagggaatttaatggacttcttccaggaaagccagcccacggggactcttaaaaagacaccaaccatttggaagatgcagcttgaggtctgggggactggactgattctgccaccatatagtgaacacgattaatcgggaggaagaagtaaggcactctgtgagttagtctaccaccctattgactttgacagagagaaaaccaacttttttcatatgatcacacagtagtactggaatatctcgactgcaatatcctctaaacaaatgcatgcaaagctttgtaaaagcagctgatgattaaaaaaattttaaaacattagggtttttctaatatatccatatgtgggacagtgatttaaatgtcattaattgtccagccacaacttgtaacagtgatgtgaaagacacaaaaaaggccccactggagtggaggagtggtctggctggtccccaagcaaaacagaatgggcttcgcataggctttagaacttattcataaatattgaccaaagtgtgaagcaaggtatccagtgaagattctctagggtctctacttctgctcaagagatttaatccagctttctctaaagcagtggtccagacttgccacatactaggttaaagataaagtgagaaaaacaaatactttggtttgcacgtctcttgaggggccctaggctgtatggaggaatatttagaggaatatttgtgagctgccatttgtgtttaaaagaacatgaaagcaagacgggccctaacccgcctgtgtctgtagctgaccaggaggccactgcttccttcccccagagcttctaggagagccccccaaaatgcaactctccaaggtcctgtggagtagtcccctcataatgcctccaccacacctgtgtctcacgatgccttaactgacgtagctcctaagtgatgttcacagagaaggaaatacttaggcaagcccatgtgtaacatgctcacagatgtgctggctttgccaatgctttcggactccaccatgctttctgattcttctggtcctagtcacgccttggcacggggcagaagcggccgagctatgctgacaggtgctgctgagagccaacagccattcagccgagaaggcgtttctaggtgagggcatgagagctggcattccaggctgctgagtgcggcatctgcaggtgcaccacattgctccacggtgtgttcagaagagaccagcatcttgaatctcaggctctgggctcattctttgcctctgccaagggaccattcaggggcttcaagccagctgctgaaaatcccccttttctggatttttccccatctatataaggatatggtggctgtgtggacaagaaattggtttcatctcagaagggtgcttccctacaaagatcttcagaaatttaattgaaaacaattttttgaactttttttgtttggccaggatgaatgaagctgaagtcacatcctgaatgtgcatgccagacaaagggtaagcaagcagtctttacaaatgccaatccctctgcactccaaaaccggagcccgtaatgaaggcccaggttccagtcatcacaggatcccccaagccagcacagtgcctgatgcctccctaggcattagcacatcccagcactctaattcacatcctcagcatccctgcctcctgcatccagggcttaggttgagtgtttccagagtgtcaagtacatttaaacacaaaccaaatactccagggttttgacctgtcacaatggcttttgaaaacaacagacgtacaatttgagagaaggactcgatggacttcttaggctgaggactaaggacatgttgctgttcctcttggtccaggacattcaataccattcacagcattcatcaccaactgacatagtatcgatcacgacattcaactgtttgaaattactgctattttggtcaaaaactaagaaatcagaaattgcacctacatagtgtgtctcctcattggagtcccatctctctgagcacagggatgggctcctgagctcacagccctgccctgcccccccagcagggcctcaccctcatggccctcagtgaatagtgactacatgaagggggcacttactagaggcctgagtaatggaatttcaattagcttctgcttcccttttctaaaaaagaaccacctttcttaagaataattaggccaaaataaacttgagtaatttgtacagtcaatattttgaagtttcggagttaccagtgaaatagcaaagctgttctccaggaaaggacatccaggttcccacccaggccttccttcctcagctcctgcagcctcatcctagtttaatatgaaggttgtgaatgggttaaaaagcagttcttaagcacctacttagatcttttcagtatctggaaatagcacccagggctgtgttagtaaagcttttcactgggtaagagtcatacaatttttacatttaatttgtttttttaaaacaaggcagtcttgttttacatattggaatgactagatattttttgacatttctggcacctctggttctgctgaattttaagggaggtgagtggtatgtacacaaagttaagattgctgcataataattcctttgcatttccaaaataaattacacaaatgtcacttttccttttctattccatagtactagttttagccagatctttgccaaacattctaggacattcagaaaagtcatccatggaattttggaatgccattctctctgtatctttgcagatcatgaggaaggaaagttgatgaactagtacgggatggctcagacttgtaaagtgtctaagtcacaacgctgcagagccagcttccgggtagcaatggcatggcctcagctgtgccaaggctacaactggagcttccttactcgcatctgaggcaaacacagcaaggctggcccaggccgcccacagtcaacagatgttcacgggagatggatcagcccctcttttgcttgttctatcaaggaaagagatctaaccatgggcaagggtggaacacacccggttcaggtcagggaatgagttgctctaagtgaacagtgaattcttacttctcagcctgtatcaattgtacccagggttcatgattactgtgacccactaagggatgatctttgaggaaacagacctggagggaggtaatttaaggagggaaagcgagtgggttttacagactgctttgtggcgacattcaggaacagaccattcaatggatgacttttcagtacataaaagcaagcagtaatggccaggagagagcaaagatgccctaagaatgacatcagactgaccaaatgtgccttttcaaataagttatgagaacgaatgaattggaattagagcaaggtattggacagaaccatgctagtctttgagagaacgtgtggattgggtggatgtttggaccgaatgaatggtaactttttaatgtgaaacagagaactgatatatgggctgtcatgtcaccctagggtactgtcgctctgtcatgtgtagcaatctttccaaatttttgttggtgggctgaacaaagataaaactaataaagtatgtgtggataccactag

SEQ ID NO: 14642 - DNA, 1457 bp, Homo sapiens
ccagggcggccgggcgccccatcgccacatcctgggggagcatacccagtgtctaccttcattttctaattctcttttcaaacacacacacacacgcgcgcgcgcgcacacacactcttcaagtttttttcaaagtccaactacagccaaattgcagaagaaactcctggatccctttcactatgtccatgaaaaacagcagagtaaaattacagaagaagctcctgaatccctttcagtttgtccacacaagacagcagagccatctgcgacaccaccaacaggcgttctcagcctccggatgacacaaataccagagcacagattcaagtgcaatccatgtatctgtatgggtcattctcacctgaattcgagacaggcagaatcagtagctggagagagagttctcacatttaatatcctgccttttaccttcagtaaacaccatgaagatgccattgacaaggtgtttctctgtaaaatgaactgcagtgggttctccaaactagattcatggctttaacagtaatgttcttatttaaattttcagaaagcatctattcccaaagaaccccaggcaatagtcaaaaacatttgtttatccttaagaattccatctatataaatcgcattaatgaaataccaactatgcgtaaatcaacttgtcacaaagtgagaaattatgaaagttaatttgaatgttgaatgtttgaattacagggaagaaatcaagttaatgtactttcattccctttcatgatttgcaactttagaaagaaattgtttttctgaaagtatcaccaaaaaatctatagtttgattctgagtattcattttgcaacttggagattttgctaatacatttggctccactgtaaatttaatagataaagtgcctataaaggaaacacgtttagaaatgatttcaaaatgatattcaatcttaacaaaagtgaacattattaaatcagaatctttaaagaggagcctttccagaactaccaaaatgaagacacgcccgactctctccatcagaagggtttatacccctttggcacaccctctctgtccaatctgcaagtcccagggagctctgcataccaggggttccccaggagagaccttctcttaggacagtaaactcactagaatattccttatgttgacatggattggatttcagttcaatcaaactttcagcttttttttcagccattcacaacacaatcaaaagattaacaacactgcatgcggcaaaccgcatgctcttacccacactacgcagaagagaaagtacaaccactatcttttgttctacctgtattgtctgacttctcaggaagatcgtgaacataactgagggcatgagtctcactagcacatggaggcccttttggatttagagactgtaaattattaaatcggcaacagggcttctctttttagatgtagcactg

SEQ ID NO: 14643 - DNA, 381 bp, Homo sapiens
cgctcaagtggctgaacaaatggccagtggaaattcttaacttccatgtatgtagcatggatatttgcagatgcatatacattcataaagatacatttcatttcatcagctttaatctctagtaaaattaatgtggtatatgtatcctactcaggatactgaaatacacacatgcgtacacatgattagtttctgttgcatacatatttacaacaatactagttcttaacgtatgttttactttcatttaataatgttcaactttggaaaatacttttgattatttgctaagaataaggaattcagcgctgcttgaatacagctcaaatttgtttatttgccaacacaagtttacatatatgcatttaataaaattttata

SEQ ID NO: 14644 - DNA, 1979 bp, Homo sapiens
gcactggtcaccctgacacgctgtcccacctacagatcctcatcttgcttctttgacattcttttcctttttttggggggggtggggggaacctgcacctggtaactggggtgcaaacctcttcaagaaggtaacatcaaataaataagtcaagcagaggacttcctgccaatctcttctgtgaggcatcatagacactgagcaaccaggaccacccccacgttcagaaatcagctggccaagtgactccatttgacttgcaaaccagccttttctaataggctaatattgctgaggccttaaaggaaatggacaaaaattatccagaaggggtacttttccattgtatctttctaataagggtttaaaatggtactattatggtattgtacttgggctttaacatcaatgttgctttgatgttgttggatataaataggaatttttacacattactattgtgaatggtgaatgttcatgtatgacctacttgtaattaacttgagttgtagtccacagcctcaggacaaatgtcgttgaggttacagagtaagaaatgatggcaaaacgtcaaactcttatttcagagcttcatgaatttagttagactaaacataattctttaagttcaacctaaagggctgagatcaataaatttaacactagacgaagtagacttcctgtctttttgagaagagatgaggtatatgttacaataaatctcagaacttcaagtagcagttcaaaagatgtcagtttttaaaattgtttttgttgttgtcttggcagttttactgaaccctttgcataaagaacaaaataaaagctcggcattgtaatttttttaatggacaagtcttatggatacgaagggtacatttttcataatgattcctttatattttcactttgtgtcattgcagaattttagactctcattcacaatgaaaagtttattttaaacattgtttaattaaaataccatacagttctcttttaaacatcaaaccataaaaagtgtattttgtaattttactctgacctgccgcagtcacctctcacttatctcttccacgtactgcacggtcgtatttcatgagctttctgtccatagcacagaaacagagcagaaagtagtacaatcatgttggaccttctttctgttctctttactcttctcacagatcagatcactccatagaagcctgtgggtttcgatggtttcttctatacacctttttggttgaccagtattactatacaatgtaagtgttttaaaaaatacgaaagtaatactctgcaccccttcctacaaagatgataaagcagtcacttctggcgcattttaataatttaaagatttttagtgcaatggcacggtaacctccaaacctgaattagacagagactcactcaggaagtgacaggcccatcatatcaaataacttattcacttttcatgtggcaggaaactggaatatcgcttttaataaaatggaaaaatatgcttctacatatttaccaccataggcgttttgttcatatgagcctggtttgtgcaaaattaaatcagaggcttctacaacatggtttatttatgttgtagcaaagttggctctacataaacattgttcttattttaaaattaacactatgtgttcagttttcttgtgggcttctgaaagttgccatcttccctccgtggagctccatttgctattttcattatacactatgaggtaaaatgtaataacaaaagagagagaagtaccactgtggctagatatatacacacacatatatatatggatggatgtaatatatgtagaacacacacatagatgtatataggatacacactcatgtatgtaaacgtatacatatgtgtatatatgatacatacacatacacacacacgagagacagaaggaaagagaggaagagagaagcaaacatgtaggaaaaaatataaatcagcc

SEQ ID NO: 14645 - DNA, 717 bp, Homo sapiens
agcagcaaggcccaggtcccgaaagatgcagtgactttttgtcgtggcagccagtggtgactggattgacctactaggtacccagtggcagtctcaggttaagaaggaaatgcagcctcagtaacttccttttcaaagcagtggaggagcacacggcacctttccccagagccccagcatcccttgctcacacctgcagtagcggtgctgtcccaggtggcttacagatgaacccaactgtggagatgatgcagttggcccaacctcactgacggtgaaaaaatgtttgccagggtccagaaactttttttggtttatttctcatacagtgtattggcaactttggcacaccagaatttgtaaactccaccagtcctactttagtgagataaaaagcacactcttaatcttcttccttgttgctttcaagtagttagagttgagctgttaaggacagaataaaatcatagttgaggacagcaggttttagttgaattgaaaatttgactgctctgccccctagaatgtgtgtattttaagcatatgtagctaatctcttgtgttgttaaactataactgtttcatatttttcttttgacaaagtagccaaagacaatcagcagaaagcattttctgcaaaataaacgcaatatgcaaaatgtgattcgtccagttattagtgaagcccctccttttgtgagtatttactgtttattg

SEQ ID NO: 14646 - DNA, 1575 bp, Homo sapiens
gcccagcgggcctgcggggacaggccaggcctgatcccacctcacttcctgcacgcgccactccgcctaggggccctcgggggagaccgcaggctcctctggccgccagcgcccactttcgggacaccagtgcgcaagctggcccacgtggggcgcagccagactcgcccgacggccacggcccccctcctgccctcgccagccggcagcccgggcctttctcgttcacaccggtggtatctaccccagatgcctgcctctgcccccactctggcctcctcttggcatcgccgagcatccatgcagttcgtggggaattaagcaactgagaaaatgcctcttggtgccccgacccccagggttcgtctaggtcccagagaccctctgcctggaggcgggccttccccagggctacatctgcacgccccgtggtgtcaccctcagccggcgccgggcaccctggacagtgcggtgggcgatggcccaggtgggtggccgcgacggtggcctcctgcagagctgggacccggtcctacattcgtgattttgttttctcccaagtcagaaaaatgttgagggtattagacatccctgaaactcagttaaccgaatttccagtctccaaagcggaagggtaggcatcgccaggcgctggtgagccctggtcaatgagcgcttccatggaaaccgctcggctgattacattttttctgtgtattatttgaatagagagtaaagctcctccgctgtttcgtaaccatatcctttcccccgctaactggaggctgatttctacatatttcttccatgtatctgagaatatctaactagaaggatgagaaggaaataaaatgttataatcagataaggctggttataaaagagtaatgtattacctcaatttttgactgactttgtaaaagccaataactggtttaatgtttatcttgatagactttaaatgtatcaagtcttaattgtattttaaattgaagccttacatttttaaaacagattttgtatttttcttgtggaggtctttgctctaataacacacacacactgtctctctctctctctctctctaattctaggcacacatttagttagatgtgaagcatttaattcattgggagctaggtcagctgccagatgagttgcaaaaacagaaaaaaacctacccattgaataacttctttgaatttggagataagttttcttttacttaaaatgaatatattaattctagaggggcaaaactagcaatgcttatgcaagtgacggtgctgctcttgttccacccccacccagatggtctctgagtgcgccgtcctgggcagggcacacggtctggagctgagagggtggagcaagagtgcactgactccgagccgagggcaggagtggctcaacttggtctcgtcttgcacttagtgcaaataccaataattaagatgcctagacttctgcccttggtcacagtaacaacaacattttgaagacttttccctggtggcatcctagagggaccgactttctgcagcctctgtcttccaagctgagcttctgctgcag

SEQ ID NO: 14647 - DNA, 186 bp, Homo sapiens
aaatcagaaacttgtggaaaagagcacttgaatgttggtactctatgtttggtgaagtttgcttttccccataaaacactccaggaacaactgacgtgacagttgaagaccgttttgtactaagtctcattttgtatactggtaaaaactacatgcttgattaaaccattaaatgcttgtaacttt

SEQ ID NO: 14648 - DNA, 507 bp, Homo sapiens
caatggaaaaggaagaacaaggtcttgaagggacagcattgccagctgctgctgagtcacagatttcattataaatagcctccctaaggaaaatacactgaatgctatttttactaaccattctatttttatagaaatagctgagagtttctaaaccaactctctgctgccttacaagtattaaatattttacttctttccataaagagtagctcaaaatatgcaattaatttaataatttctgatgatggttttatctgcagtaatatgtatatcatctattagaatttacttaatgaaaaactgaagagaacaaaatttgtaaccactagcacttaagtactcctgattcttaacattgtctttaatgaccacaagacaaccaacagctggccacgtacttaaaattttgtccccactgtttaaaaatgttacctgtgtatttccatgcagtgtatatattgagatgctgtaacttaatggcaataaatgatttaaatatttgtt

SEQ ID NO: 14649 - DNA, 3396 bp, Homo sapiens
cgggtgggaccctggccccagcgtcccctgccagcatcctcgtgggctcacagaccccggcctcggagcccgtctggcacccagagtgaccacaagtccagcagggaggcggcgcccgccctcgccgtgtccgtgttttctttttcagccccggagagggtcctgacctgggggcttctccaagcctcactgcgccagcctccccgcccgctctcttttctcccaagcgaaaccaaatgcgccccttcacctcgcgtgcccgtgcgaggccgggggcttctttcagagcccgcgggtcctctcatacatggcttctgtttctgccgagagatctgttttccaattatgaagccggtcggtttggtcagactcccgacacccacgtcccaggtacccggtgggaaagtggcagtgcgagggcgcagccattggtggttgcagggccccagagggctggggtgacctggcatcccggggctccccacgggctggatgacggggttggcactgtggcgtccaggaggagatgcctggttctgcccaaaataatccaaagagccgtttcctcctcgcccttcagtttttgcctgaggtgctgggtagcccatcctttcctctgtcccagattcaaatgaggagtaagagcccagacgagaggaaggcaggctggatctttgccttgagagctccgtgtcaccaggatggaagggggtgcctctcggaggagcctgtgtccacctccagtctcggctttccccggggggccaagcgcactgggctgccgtctgtccccagctcccgtggccacacagctatctggaggctttgcagggagtcgtgggttctcgcacctgctcagccctgtgtcggcttcctgtgtgctcacctaaagctgtggttttgctgtgttcacttcgatttttctggtctgtggagaaactgtgaattggagaaatggagctctgtggcttcccacccaaaccttctcagtccagctggaggctggagggagacacaggccccacccagcagactgaggggcagaggcacaggtgggagggcagcggagatcagcgtggacaggagcgatgcactttgtagatgctgtggctttgtgttgcgttttgtgtctctgttgcacagatctgttttttcacactgatccgtattcccctgggtgtgcacacagggcgggtgtggggcatttaggccatgctgtgctctacttcattgagtaaaatcgagtgagaggttccgggcagcaggatcgacgcccagtccagccggcagagggaacacacgggtccttcattgtcctgtaagggtgttgaagatgctccctggcggcccccaagcagactagatgggaggaggcgccgctcagcccctcaccctgcatcactgaagagcggcgcctctgcagcaagcagggcttcaggaggtgcccgctggccacagccaggttttccctaagaagatgttattttgttgggttttgttccccctccatctcgattctcgtacccaactaaaaaaaaaaaaataaagaaaaaatgtgctgcgttctgaaaaataactccttagcttggtctgattgttttcagaccttaaaatataaacttgtttcacaagctttaatccatgtggattttttttttcttagagaaccacaaaacataaaaggagcaagtcggactgaatacctgtttccatagtgcccacagggtattcctcacattttctccatagaagatgctttttcccaaggctagaacgacttccaccatgatgaatttgctttttaggtcttaattatttcacttctttttagaaacttaggaagaagtggataatcctgaggtcacacaatctgtcctcccagaaatgaacaaaagtcatcaccttttctgcttgctacacaggcaacgattcccccatcagctgcccggaccctttggcctggcttggtgtgcaggcctgtctgtttgcttaaagtcagtgggttctggtgcagggagtgagaagtgggggaagtgaaagggaaagcatccgtgagaaagcggccacggttttccctccttgtgtgcccatggggcaccagctcatggtctttttcagtcatcccagtttgtacagacttagcttctgaactctaagaatgccaaagggaccgacgagactccccatcacagcgagctctgtccttacatgtatttgatgtgcatcagcggaggagaacactggcttggccctgctccgctgagtgtctgtgaaatacctctactttccctcccatatccagaacaaaatgatacttgacatccttccacaaaagtcagcctaaagaagttatggtatcatatgttaaactaagctttcaaaaaccttagtgaaatagcaagtgactgctttcaagcagcagtcgacatgtaaatgaaggtgttcttagaattcgcattttgccagctcagcgcacctccacaacgaatgaaatgctccgtatgatttgcacaaatgacatagacctccccaaaagttaactggctctccttcctcacacagttcatcataacccaaccccccacccccgggtcatgaaaatcacagaacttataaacacattgaaccctagatctcaggcttcctgacctaccgccagtggccccttgctggccaccctatagggtcctccttccctggcagccccccatgtgggagaaatacctgattctcccaatctgcagtgggagagctttgctgaattccatcccaaagtcaaacatgggcaagaggtgaggatttcacttttaccctcaagtccgatttgtctgtgattttaaactaactgtgtatgtattgatgtttggaagattgtttgaattttaaagtgataatagtacttaatgttatccagtattgttcattaaatggtgttatcctaaagctgcacttgggatttttacctaacgctttactgattctctcaagcacatggcaaagtttgatttgcactccgttcatttctgacacgttttgctgcctcctacctttctaagcgtcatgcaaattcgagaatggagaaggacgctgccggtccctgagcggtgtggagagggcggaaggtggactccagcgcagcttgaggggctgaggacggaggctgcagcatctgtgtcgttctactgagcacgcttctctgcctcgctcctgactcagcactttgttcactggctcagcagttatgtttacacatcatttttatgttcctgctttgtaattcatgtttgagatgggtggccactgtacagatatttattacgctttccagactttctgaatagatttttttgaataaacatggttttatgaagtgtaatctttttctagcctaacaat

SEQ ID NO: 14650 - DNA, 72 bp, Homo sapiens
tgcccaagttttggaaatattctgttttaaaaagcaagagaaattcacaaactgcagctttctaaaaaacaa

SEQ ID NO: 14651 - DNA, 80 bp, Homo sapiens
cctggaggccaggcgtttctagcattgttgactgccagtttattcccagtaaataaagcaatacgcttttcaggaggaag

SEQ ID NO: 14652 - DNA, 1290 bp, Homo sapiens
gcaccacccacccagcagtaccgtccgcaccgccaggctcagcccctgcccaccccacttccacatggccctcgtcccttcctgcccgccagatgctgcctgcacttccgcagccagcacgctccacaggttcacctgtaagaggtgtggagctggctctgacatcaacctgggaggtaacaaacaggtcccgcacctcatgcctgtctgccatacacccgggagctctttccctcagggtctcagggagccagttcaaggtctggctgtcaagtgtccagagagccatggtgttggcccctgaggcagcctgtcacccatcctaatctgggagagaaggtgacacagctgggcccagaccctggagagacagctctgcagtttcccacactgtcagctccccaagagacagtcctgatgggcacaggctgccagagctcccaagccggagttcacagtcatcactgtgcaggacccaggttcctcccagacctgaacccctctctgcaactcctgtttgcaagcgctgggcctgccagacagaggcccctcttgtggtgcaagcccagctctgtcacctgagatccagccagagaccctcctccaccatccacagtcaatggctgtgctttcccttccaagccagggcttccaaagaccccactgccccggagctgaagccgactctgctcccatctcagccatgaggcctcaggacccactctgctcacaggtggcttccttaagccattgccctggctggggttgggctggtgcagcccagctggcggaggggcgaagctttggtgacagacggagagtgggggactagctgtgcatggcacctgctctgatccggtgggctccacgggtagtgcgacctcggttctgtgggctctggaaggccaccagggtagggtctccccagggctcctccccctgcacaacactcctgcacacgtgcaaacctgctgtcctctgcatttagaggaatggcccgtgcatccctgctagtctcaggcccatcccagagcactgagaggccacaatcgttcagccctgtgccctgaacaccactgcccccttcactgtctgtgtgtggtgaagaccacgccacaccaccctccagctcactggagacaagcatgagcttgagccccatggcctggtgcagggctgcgtgcattgaggccgcctctttgacgggtccatccagggggaccctctcctttctgtgaaagggaatcgtgtgtgtgccccaggcacgtgtaataaagaacccgagcagat

SEQ ID NO: 14653 - DNA, 528 bp, Homo sapiens
ggtgcagtgactgcgtcaagagaagcctgctgcacacaggggccctttccatgcagtgtcctgtgcatgtctgggtttcagtgtcgtcttgccaagtcgctttatcttccgaggccaccgtttaacaggagtccccgcagatgggttctgccctgtggagtatggccgtgagtccccgccccagcaaagacttccatgcggagctctggtttcagatgccagcagcctccccggccgacctagtgtctcttttcaaggtctgcccaggatgctgcttcccggcatgcaccttgtttccatgttgtcatcctcccatggcttcccctgccctcactcccctctggctggggaagtgtttcccaatcctttgaccattcctccccaaaagcattttaaagaggcggttgcaggactctgagctggaaattgaatttgagtttaaactccacgttaagctgtcagcatacacaaacacccaaattatgccatgatctcaaataaaaggaacattttttttccctcttttaa

SEQ ID NO: 14654 - DNA, 2041 bp, Homo sapiens
acaagatttgctgcatttccggcaatgccctgtgcatgccatggtccctagacacctcagttcattgtggtccttgtggcttctctctctagcagcacctcctgtcccttgaccttaactctgatggttcttcacctcctgccagcaaccccaaacccaagtgccttcagaggataaatatcaatggaactcagagatgaacatctaacccactagaggaaaccagtttggtgatatatgagactttatgtggagtgaaaattgggcatgccattacattgctttttcttgtttgtttaaaaagaatgacgtttacatataaaatgtaattacttattgtatttatgtgtatatggagttgaagggaatactgtgcataagccattatgataaattaagcatgaaaaatattgctgaactacttttggtgcttaaagttgtcactattcttgaattagagttgctctacaatgacacacaaatcccattaaataaattataaacaagggtcaattcaaatttgaagtaatgttttagtaaggagagattagaagacaacaggcatagcaaatgacataagctaccgattaactaatcggaacatgtaaaacagttacaaaaataaacgaactctcctcttgtcctacaatgaaagccctcatgtgcagtagagatgcagtttcatcaaagaacaaacatccttgcaaatgggtgtgacgcggttccagatgtggatttggcaaaacctcatttaagtaaaaggttagcagagcaaagtgcggtgctttagctgctgcttgtgccgctgtggcgtcggggaggctcctgcctgagcttccttccccagctttgctgcctgagaggaaccagagcagacgcacaggccggaaaaggcgcatctaacgcgtatctaggctttggtaactgcggacaagttgcttttacctgatttgatgatacatttcattaaggttccagttataaatattttgttaatatttattaagtgactatagaatgcaactccatttaccagtaacttattttaaatatgcctagtaacacatatgtagtataatttctagaaacaaacatctaataagtatataatcctgtgaaaatatgaggcttgataatattaggttgtcacgatgaagcatgctagaagctgtaacagaatacatagagaataatgaggagtttatgatggaaccttaaatatataatgttgccagcgattttagttcaatatttgttactgttatctatctgctgtatatggaattcttttaattcaaacgctgaaaagaatcagcatttagtcttgccaggcacacccaataatcagtcatgtgtaatatgcacaagtttgtttttgtttttgttttttttgttggttggtttgtttttttgctttaagttgcatgatctttctgcaggaaatagtcactcatcccactccacataaggggtttagtaagagaagtctgtctgtctgatgatggatagggggcaaatctttttcccctttctgttaatagtcatcacatttctatgccaaacaggaacaatccataactttagtcttaatgtacacattgcattttgataaaattaattttgttgtttcctttgaggttgatcgttgtgttgttgttttgctgcactttttacttttttgcgtgtggagctgtattcccgagaccaacgaagcgttgggatacttcattaaatgtagcgactgtcaacagcgtgcaggttttctgtttctgtgttgtggggtcaaccgtacaatggtgtgggagtgacgatgatgtgagtatttagaatgtaccatattttttgtaaattatttatgtttttctaaacaaatttatcgtataggttgatgaaacgtcatgtgttttgccaaagactgtaaatatttatttatgtgttcacatggtcaaaatttcaccactgaaaccctgcacttagctagaacctcatttttaaagattaacaacaggaaataaattgtaaaaaaggttttctatacatg

SEQ ID NO: 14655 - DNA, 372 bp, Homo sapiens
ccactgacctgtgagctgggtccaggaatgctgtgaggaacaacttaaaagtaagaagtagtggttcatccatcagggggccagaagcagcaactgtttttcatattttgagacttgcctcagatttcccccgtttgcaagctcctcccctctgtgtgtgccatgtcagagttttatgtctttctgctcctcaaaagggatccccttcattgggaaaatggaaatggcgtccagtacttctgcacagaatttggtaaagttaaaacaaaatatctttcaataaaacataatatagtatttgtttgataattagagttggaagaaaaaagagagaatttcttttgggcagtgaaaataaagcagttaacagtc

SEQ ID NO: 14656 - DNA, 95 bp, Homo sapiens
aatagtttttgactctaatactgtatatgcatttaagtggaatatttggtgccatttacaacattattttcatgccaataaaagattttttttgc

SEQ ID NO: 14657 - DNA, 66 bp, Homo sapiens
ctcattacaggtactaaggattgtttacttccgaacttttcaaaaataaatgaaatttacatattt

SEQ ID NO: 14658 - DNA, 1254 bp, Homo sapiens
gagttccgacgcatgcggccacggggcggagtcacagttcagaggcctcagctgaacctgaagttatcctaagctcgagccccagagtgaggactcggggtcaggcatccgattccccatcagctcctttactaaagctgtgcagagaatccgaggctatgagtgggggtgggggaaagatgtacaggatgctttggtttcactcctgagatacgagaacgtcctctgaacacacatgcagatagctggacttctagacagaggaaatccaaatcgtttctttcctcccagcataagggaacggtccggtaagagctggtgtttatcgatgctacgtgccagaatggggctgagcacggcgcctcactgtatcctaacgtctaatgaggcagggaatgtcactgtcacactctgcagacgaggaagccatgctgtcagcaggtacacatcttgccacaaaaccagtaacctgtggcactgagatcgcacaccggtcgtccactgccaagtccgtggcctccttctctggggtttgcctgcctcttgatggcggccatgcctctgtcctctcgcaggggctggctcttccagtggtcactactttttggttgcaagcagcagagattccctggagggcttgttgaaagcactcacatcaacggagcctcagaaagggagctgaggccatgcacggccctgcagtttctcctcaggctttggtttgcatccctggcctgactttccctcaacaagtcctgctatctccacaaggcggccagcccagccctgtcctcaccttccagccccagctgagcagcccctccccacatcatcttcagctgctgcccaggctccgcagagcaggtgtccaccgcccatccagccattgtgtttagagggcagagcgacctgccgggaccttgacaacacctggccccacccacacgtcctgcaatattcactgaggaatgcacagcagcacatatgtgcctcatgtgtcctgctgtgatgcagcgagtggcacacagcattattgtgtcaatcatgtgtcttgatgtgatgcactggttcagacagtatcatggatgcagtgtttctttaaaactgtcaaatttgaggaaacaatctaacaaaagccaattgatgaacattctgtaaaggtgacataaatacttcaaaaatgtctctgacacagaaagaaaaaaaacaaaaagggagctattccagattttaaaaataaaagatatagtaact

SEQ ID NO: 14659 - DNA, 666 bp, Homo sapiens
aatggaagtgagatggcaagactcccgtttctcttaaaataagtaaaattccaaggatatatgccccaacgaatgctgctgaagaggagggaggcctcgtggactgctgctgagaaaccgagttcagaccgagcaggttctcctcctgaggtcctcgacgcctgccgacagcctgtcgcggcccggccgcctgcggcactgccttccgtgacgtcgccgttgcactatggacagttgctcttaagagaatatatatttaaatgggtgaactgaattacgcataagaagcatgcactgcctgagtgtatattttggattcttatgagccagtcttttcttgaattagaaacacaaacactgcctttattgtcctttttgatacgaagatgtgctttttctagatggaaaagatgtgtgttattttttggatttgtaaaaatatttttcatgatatctgtaaagcttgagtattttgtgatgttcgttttttataatttaaattttggtaaatatgtacaaaggcacttcgggtctatgtgactatatttttttgtatataaatgtatttatggaatattgtgcaaatgttatttgagttttttactgttttgttaatgaagaaattcctttttaaaatatttttccaaaataaattttatgaatgac

SEQ ID NO: 14660 - DNA, 99 bp, Homo sapiens
tctgtgtgctcttatcaccaatcagttcagacctggttgattttgtactttggaactgtaccttggatggttttgtttattaaaagagaaacctgaagt

SEQ ID NO: 14661 - DNA, 820 bp, Homo sapiens
ccacgctggtttcagccacggcacacccttgtccccacctgagccagagtttgtggcctttaaatctcataaacaaggcacctctgtgccagcagtgagactgtgacagcaagaatgtactcctcaggacacctgcccgctctttccctggaataacagcctctgagtggattctgcatgttatgtgatttgttctgttcatcgagagggctcccaaacatctgcagctgatttgaaattaaaagtaagtcgcagccgctcctcccgcagccacttcagcagcatcttagattttaagcctcacgtgcgcagctggttcatgaactattggctgcatcctgcttaggtgcccaccaagaaggtttttacctacttaacaaaaaagaaagaagccaaagtgattagaaagaaatgaaatctctttttgggttctgtctactgaaatttaatatctcagtgaacagactaaaaggaatttagaatcctaacaacttaccagatttctcctgttttaaatatactgggactttaaaggttatatgtccggtcaccgtatgttttaagtcggtgttaatgctaacagtgttgaaaacaatatttcatgagatctaattgtggttgcccctataggtagcaggaaagtaaagttgcatttccctctcgcacattctacacccaagtgcctaaaagatctcattgtaagtgggtagtgttaccggaagccattgtgttcacacgggggaaatgccgtatatatttttcaacaaatattaacgtttatactttcatgtttgaaaatttaattaaaaatatttgtttt

SEQ ID NO: 14662 - DNA, 1589 bp, Homo sapiens
agacactactcattatttttgtacatttttgtatatactgggacagcgtgaaacactggaatccttcatggacgagggcatatacaatgatgggacagtgccacactccttcaataaacgtggctgctggccagaggacgtgagcgtgtgacgggcgccttggcgccacctgttgggtgctcactgcctctgcaggtgcagaggggtcagcagcaggagaagcgtgttgaacacgtggctctcagacactccttgtttttaacgggaagctctttgcatttgcatttcctcaacaaaggagcaaagcagaggaagctgagagtctggcgtgttcttgacgctttggtcttcagccttgcactggctcttctaaaggacttttggagggcagataatttcatctgttaaatccaacacacatttctttcagggaaaaacaatgtcaccaaattttcagagttctaaactcctttccttcaagccggaattttccttttttcagcaccagtaggtactaagtctccagatggggaaataactaaaatgtgtttttctgctttgttcgctcttacttctgaggaaggtttccagtcaggactcgctgtaccaatatccatggaggaatatgggagcgtttcgctctccttgtaggctgaagtcagtctgacttgaaggggcctggtttggatctaagcaaacacccagatggggttctctggtctcagcaaggcttttcctgttgggagtcacagtaaacagaaacccaaaaatctcatcttgggtgttttcagggcttgttttgagttttgctgaatagggagcgcaagacgccctgagcctccctctcactggtggtgataagaggagccgtctggtgtgtcagggtcacgaacccgttacatttcaggacgatcctttttccttcagcagcatttcttactggctgtggctggaatctgccttttatcacagctgtcaccattctcacgtgattcttgtgagactctttttggttataattactatttaatatttagactattttactgagcagactttataaatgagatatctacaaggcacttaaagtgttacagatgttttaccttaagaattatttaagttgtgttgggttaagacagttttcagtgtaccgtaaatgttgtgttttcagaaaaagacaaaacgatggtgctgactggttttctgtatattgcacaacagtcctcaaatacactgatgtatgaaactattcatacatcaagcagcatttttttcactctccttagaattggaactatgcagttaaggcagataaaatgtacagatgtttcatatattacaggttacatatataaatcaaaatttcctatataaaactgatttgggatttggggtggaaatattttgaatattaatttatttttaaagatgcaagataggactttgtgcaatgtatttttgtaaatgcttttcaaaatatctgtctttggtagtgcttctgctgctgccaccaaattgataagatgctattaagaggtttaaataaagagttttaatttttaaaagggcatgggatataaacagtc

SEQ ID NO: 14663 - DNA, 1012 bp, Homo sapiens
actggccaggccacgtggagacaccacggtcgacgacggctggagggacgtttcagaggcgagtcctgggtggctcctcgccttgggggctcctggccctgaggctggcggtggccgcatgccggcgcgtgtctgtttctgtgcggcggctcagggtggcgcggctgctgctcactgtgctgctgggacccaagagtggggcgtcgcccctgctggccgccgcgtcccccgagattgacccacaataaagcacaggccttaccgcggcgtcaccctctcccactcctttgttctgggtcctttcgggagggctgatgggcagcacaggaggcccgtcctcggggggctgcgcacatcacgctccttgccgggcgtccggcacagctgcggtcaccaaagcaggtgctggccctcggacctgagagcccagccagggcccatgtggtctgcaaatgggagcggctgtttttgaacacggggtcattctgcagtcaggacgaaccggtccccgtcgcagacggagtgcacgtgccctgcgccacatcctcacgctcggtggagggacgcgtgcggcgggacggtgcctacgggtacttgcagctgtgtcccatgtggcatcccagagctgcgccctgctggtctctgtgagcgccacgctgctgtgctggaaatgccgctttaaaaagggataccgtgggactctgcccgtctctttcataacgcaatatttatttgtattgggtgatgattgattctttcgacctaacattttgggttttaaccaaataaccggtccaggagtgagcagctccgttctgtcagatgctactccaaatgttaccagaacgatgacaaaaggggagacgctctattttttcacagttaaatgacagttgtagattgatacgcagttgtgcatgggaaggggaaacgcacagctttatttactgtaaagtggaatttcaggaaggcttgtgtgaaccgttgcgcataaataaaccctttctaccgg

SEQ ID NO: 14664 - DNA, 818 bp, Homo sapiens
gagctcccccagcccccaggtcctcctgaccactcccctcccagccctgggtcctcccaccctctctcctcccaccccacagctcggactgctctgggagggccctgaggactcccaccctcacccccacccccacagggtcagcaactgcttccggttacacccaggactacccctgcccgaccctgtgggacccccacccctctgatgctgtctgcagctcagtccctgccagcccccaggagcgcctccagggccccgcccactctcccacccctgaagctgcactcccacccacctagctccccccagggccccccagcacctacagctggggctgcagggagacaacgggtggctgcatccagccagagacaggcgcaggtgggtgtcctcagcgtgcgagccctgcaccccccaggtcctgggactcctgcagaccccactccattcccgctcctggaacacttcctgcagctgtgcctggaggcagtcggcctgcagtgccagactctgagccaagccactggggccatgcgtatgactggtgcagggaggcaaggcccacattctccttcagagacaggcactggcgccagaggcttccttggggcggggggagggcacctcagcccctgaagacaagcagcactgcagtggcaaaaatggaaacactgacccggtgcggtggctcatgcctgtaatcccagcactttgggaggccgaggcaggcgaatcacgaggtcaggagttcgagaccagcctgcccaacatggtgaaaccctgtctctactaaaaatacaaaaaaattaaccgag

SEQ ID NO: 14665 - DNA, 744 bp, Homo sapiens
gcggcccagccctcctggggagacgtgactctggtggacgcagagcacttagttaccctggacgctccccacatccttccagaaggagacgagctgctggaagagaagcaggaggggtgtttttcttgaagtttcctttttcccacaaatgccactcttgggccaaggctgtggtccccgtggctggcatctggcttgagtctccccgaggcctgtgcgtctcccaaacacgcagctcaaggtccacatccgcaaaagcctcctcgccttcagcctcctcagcattcagtttgtcaatgaagtgatgaaagcttagagccagtatttatactttgtggttaaaatacttgattcccccttgtttgttttacaaaaacagatgtttcctagaaaaatgacaaatagtaaaatgaacaaaaccctacgaaagaatggcaacagccagggtggccgggccctgccagtgggcggcgtgtgctagcaaggcctgccgggtgtgccgcagtcaccacagggttctgagaacatttcacagaagtgcctgagacgcggagacatggctggtgttaaatggagctattcaatagcagtgacgcgctctcctcagccaccaaatgtccctgacaccctccccagcccccacagataacatcagctgaggtttttttcagtatgaacctgtcctaaatcaattcctcaaagtgtgcacaaaactaaagaatataaataaacaaaagaaaggtg

SEQ ID NO: 14666 - DNA, 959 bp, Homo sapiens
acagccttggccgcataggcccagccagggtgtgactcgggagctgcacacacctgggtggacacaaggcacggccacgtcatgtctctaaactgcggtcagatgtggcttctggctcctcggggcctcgcgagggtcacgcttgcctggtcaccctggggctgcttaggaaacctcacgactggtcaccttgcactcctcacacagaattgctacaatcccaaagcgctcgccccgcagggtccaaaggccagcggtgaccagcctgtcacccagctcctccccgccaaccctgcctgccgctgcacctgcctgccgctgcaggaaacatttctgacaccgtcgaccaggaaagccacacggagaggccactgtgggtgaagcgcctcagttacacaggaaccctaaagcaaatctgccaccgtgggggaactgacgctggagatgcaaggtgctggtgggtctgagctggacgtcgcggtgtgtcctctgtgcccacggtctgagctagctagcgcaccgccgagttaaagaggagaaggaaaacatgctgctctggtgcacgcctgagcgtcctccatcttccaggatggcagcaatggcgctgtgcggcctcaccaggcccacgaggagcagcagcgctcggcccggagcagcaggaaggcccctctgtggagcgcccgccgtctgctccggggtggttcagtcactgcttgttgacatcaacatggcaattgcactcatgtggactgggaccgtgcgagctgccgtgtgggttagtcgggtgccaggacaatgaaatactccagcacctgtggctgacgaatttgtttctacagaaataacagctggggacaactgcggtgatgatgtaaaaaccttcccataaaatgtaagaaaagctgatgaggctggtgacgttcagcctttgtcaataaacctgtcatgtgcggatcctt

SEQ ID NO: 14667 - DNA, 2667 bp, Homo sapiens
tgccggccgggggcggggggtggcgggcggcgggcggcgggcaggcgggtgggggcacacccctcgtacctgtcactgggatgcagactctcgacatccgagtccaagcgcaggcccctcgggcgcaggcagctcacaccaggaagagactgtattgcagggtgaagagtgggctcccgtgggcccagagctgcacgccggtccacagacacactcacgcccgccacctgctccccgcaggatgtgtctgtgtgtgggaattggtatcttgcacccgtgggagtcgggacatataatggaaaggccctcgggaagttccgcgtcctctgtgggggctgccggaagacacggccccaggagtcaggcccctgtggtcaggtctagcatggggcttgttttccactcctgctgtaagcagccttcgacacctgtcctgccacggcctcccagccggtgcgggagcccctcactgccctgaccgactccgcagtccccggggaggagcatggatggtgtgtcggcagctccgtccttccagctgtcccgttgcagtgcccgtgatccgcgtctgccttagcaggggcctgcgtgagtgggcacggtgtgggaggtcgcctgcgtggggtggtgtctgtgtgtgtgcacgcacgcctgccatcaaagcagcagggctgagggggtgcagcttgctggtgttcactgggggagggcctgtgggcacacatggcagagagagtggctcacacgtcgtgaggtctcccctgtgctctggtgacccgaggaggtcgtgcagcacagcgcagaagcccctgcccacgggatccggccccccagacaccgaccccacaggccgtcccggatctcagcggacacaggcaggagcgccccatcatttgacggtgagcaggactcaggctgtgtgtcctggagctacttctcaccaactgtggtcagtgcagggggaacgaggaggtcttttgggggcctggcgaggggaagggctgctgcagtctagggagagggggtgcagcctgggggatgttggtggacatggatgtggaggtggaaggaggaggacgttgcgtggagtggtgggaggaggcgggagccgtgtgcgagagcaggtggaaagccttgaggggcaggaccaggatgcagctggcttgtagaagagctcaggagtgagcctggcactccagagggcgcggcgggtggggaggcagcaggcaccagtccaggagagcttcgtggacgtggctcctgcgcgcacacccccaggagcacagccacgggctgcaggtgtggctggcctcagcactcagtcctcacccggagcctttgcctgctcctccttccaagagcactgaggcaccagtgggcttggcactccaccttgggcttccttttcctggagagccgccttgagggtccctcctgtgactggggtctctgcagcgagagccgcgggggttgcggagcccctgcctgggggagctggcggaatgtgagccgccggccgggggccgccacataagacctgcaaggtggtgcctggggccctggctccttctcggctgcccctgcccacccagtaacagcccccaccagctacagagcccaggcgggtgccagccacgctgggagggcagaggacagacagccccggggctgcgacttggttctgtgtctactgttagaagttgagtgggaagctgcaggcccgccaggaccactgggtccctacagagcaaaggcctgcgtgttcccaaacagccgttgcccccgtggccgtggtaggtaatccatattggatgtcataaggaccagggggatatttaaagagagaaacagaaaatatatagagatataaaattatattcacagtttatctacagatttttcgtaacaatctttcttttccagtttgatactgtaaatctatcagagcagagccgggggcacgggcacaggtgggagttgggagcaaagcggaggcccgggctgcccgccgtcccccttcatctccccacggactgtaccaggcagctgggccccgcaggacaggccgcagcgggtggccggttctgtcccgtcttggggttcttggtgtccacgtcttgtgggccgtgggcttctacctgcccttggcctgcagtgctttgctggagaagggactccctggtccccagggtggacggagccgctgtcaccgcccagagctgggccggggaagcacggtgtgttctgcttttcttttcagattgttgaaatttcattgtcatgatttaatatatggatttttttatttaagaaaaagacgagggactctttgtcacgtgggtttgttttctgtctccgtgcctccggcttcccaaagagatccaggtctttgcgtttccagggcgtggggaccccggccccctatgccgccacgccgccacaccgcctcaccctggcttctgtgctacttggcagttccatttcattatttattttttgtgctgctttttatcatgatataaattattgaaaacagatcacatgtgggcccgtgtctggccgccgccgccctgccccgtccctgcggccaccacctaatttattgccgtgcgtcctgctgctgtgactgcttttgtacctttgcaataaagaattttctggtttcag

SEQ ID NO: 14668 - DNA, 144 bp, Homo sapiens
cgggagcccagggcagcccctgggcaggagacgtggctgctgaacagccgcaaaccatcttcacctgggggcattgagtggcgcagagccgggtttcatctggaattaactggatggaagggaaaataaagctatctagcggtg

SEQ ID NO: 14669 - DNA, 537 bp, Homo sapiens
gggacggactccgcctgctgttcccgcgctgagctacaggactcccgagtgtgagccgcggttcctctgttgcagcgcagccgtgtgtgctgtggagccgaggccgtcctgcaggaagccgcgtgactcccgcctcctccctgtgctctctggctctggactgtgactgcgcctggattctgccattgcgacacatttttgtgcctttcagcccctggtgtctgcagtgggggatttaaggcacccgcttccacttctttcttgtttggagttttctgttggaaccgccggcgttggctccgaagacttagcgacgccactggcggcaccttctcctgcgcccagtgatgtttccacggtgcctgtacacagccgagcagcatttccgttgaaggacttgcatccccattgcgggcagtgctggacgtgtcccggagacccaccgggagggcgccgccatgccttgtacccccaccgtgcaggttgtggccggttttctccgcaggttgaacatggaaataaaagcaaacttgtatg

SEQ ID NO: 14670 - DNA, 695 bp, Homo sapiens
aagctttcgcgttgctttttctcgcgtgcctggaacctgacgcacgcgcactccagtttttttatgacctacgattttgcaatctgggcttcttgttcactccactgcctctatccattgagtactgtatcgatattgttttttaagattaatatatttcaggtatttaatacgaaatgtggaagggaatgctggagtaaaatatcccctctcccctccgcccgcccacccgcccgcccgctcgcccgctcgcccgctcctgtggtttttctgagcgtgcgggcgccgggaggggatgctgaggctgatggagctgcctccagggctagggccactcaccggaggagggcggggcctgcacttgaagtcaggccgcacctgtctgtttttggaagggtagccgacaaatccttccagagggaaagttctttgtttaagtgttgtacttgaaaaggtcaatcttcagggcttcctgtttgaagtcaagtcagaggtaaaccggtcagttacagaagcaggatttctaggatttctaactccagctgttcccatactgtctagtttaaattatggctgttaaggccgggcgggtgactcaggcaggtaatcccagaactttgggaggcccagacagaaggatcgcttgaggtcaggaatttgagacctggccaacatggtgaaaccctgtctctact

SEQ ID NO: 14671 - DNA, 4572 bp, Homo sapiens
gtccccgtcactgtctccacgccgtgatggcagcgctgccgaggacataggaaccacgactggaaagataatttatcgtgttaggagaagaacgatgatacctacttaacacctcagcatctgcgtcgtgtctctttgtgcttttgtttgtggaaggagacccaaatgcctttactttattctctggggagggccagcggctcgcatccccctcatctccagctgcagctcggatggtggattttcagtgccaacagacacatctgccgtgaactcgcagatgccagggagccctgtagtgacacgttctctgacagcaccttgccgcctgcccacgaccttgaccgtgaggagctgctatccgcaaccagcgccgacaccatgccccctcttcctggtgacaccctcaacaaccaggatttgctcgatctcagcccagcaggccaggcagacacaccccgctgtgccttaggaaggtgtgagaccggcttcccccatccccacagcaaaacacggcctgtcccaagccagtgaggagctaaagacacccaggtccccaaatgatcttactccatgccccacccgctcacaccgtcctttcccgtcacccttgctatcccctggagcactgccctccagagctgcccttcccaggaaggaatttggttggattctgtcactgtggagaccaagattttttaaaattcccaattacaaaagcagcatcacacttgcttctgagaacagcagggtgatgtctgttcccaagctggtggcgggagccttagcctgtgtggggccacccggggaagaggaggagaggagggtgaggaggcaggctcgccgttccaagggacagcataggctcgtggtggggcgtgttgcatctggtgtctgggacagtccccgtcaccccatgtgtgcggcctctgcactcccaagctccatggctgggctgggctgggctgggctgggctgggccgggcgtgcggagcctgtggagccagcagctgcagaggcctaggagggagttcctgggggaagcgcacagtgtccagtgcccatctcttgcttgtgtgtgagattagcccttgctggggcgtcaagaggaagagccttagacctgggcgggccttcaggggcatctagacccctgcacagcccaggcctggtgtctgcatttccacagcacccctgtggggactcctgccggggctggccgctgtctcaggagagacccaatggttagaaagcccctttttacacagctgacagcttctcccaaggcttccgtccacggggacaggcttaacccctgggcgccttttctgcagcatggcggccttctgagtcacctaagctgagcctgggtcattctctgtggcggtcagaaggccgatggccccaacacagtggcttgtgaaagggagagaggaggctctgcatgtccacctgctctatgggaggaggacacaggtgtccccagcccagcctgttctctcccagtcactcagggatggggccacccaaagtgcaggacccgccccaccctgcggttcgaagcctggcccctgtctccacttagcttctgtttctgcagtgggtggaagcgagtcagcggggggcctggcttgtgtacgtgttttccttatttggtctgtgggttgccaagtccatttttttttccactgaactggctggtaacttgatggactgtgtaactgacacaggccctctttagacccctgccttcaccccacccgcccgggtccactccctggggcgctgtcccaagccatccctgcttgccagctcaaagcttcaggtcctaggagccagtccacctcgaaagccctgagaaagtgagacacctgcacattcgctgggggagaccctccgttctcttgtggcagctgctcccacttgttaaaccaagctgtttctgcgggacgtgctcactcttgggaaccagtggcctagagctttgggttacaggcatggagagggctttcctgcctcaggcttggaggccaatgttccatacataaaccgccatgtcctctggtgcagctgggctgctcttttaaaagccagcatccatcttgaagctcgctgggtaaatggcaatgcattctcaagccagtgtcttcagctgatgcccagtgtccagtgctggtcaccagtcccctttgctgggtacagcctgcctggctgttctgtggtcctggaacgctgcagtgtggttttgttccatggagacagtaccaagcggagaggcctccttgcccacggccccagggcctgggggccaggggttctggccctgcggggacttaggcaggaggggaagagaagcccatggagccatgggaggggtgagctgtgggcggggcctagtcatgggaggggtgagctgtgggcggggcgagctgtgggtggggcctagccatgggagaggtgagctgtgaatggggctagctatgggtggggtgagctgtggacagggcctagccatgggaaaggtgagctgtgggcggggcctagtcacgggagaggtgagctgtgggcggggcctagtcatgggaggggtgagctgtggatggggcctagccatgggaggggtgagctgtgagtggggctgagccatgggagcagcaagctggtggagtgggctgggcggagctgtgggggctgctggcagggcctaggaaagtagacaactcccgggggagacgaagtagagagtgagtccccaagaaagggactcctgccccagcgtcaagtgccaaagcaggccccatctaccacttcagggtcgacgttggtggcaggtgttgttcacggtgtactgattgtcactgcaacacctccacatcaccttgaacttcaagaacagcagcaaagctgtatctgctatcagaggctgttaggtagtccagctttaaaataacacactctttctctatcccatgccctttaaacaagcagccacaggagatgtcagtctccagggcctggccccactgtgttgacagcagtcacgtctgttgagctgacactgctgaggctgaagctggccccgtgcaggtggctggtgagccacaggtgcagtacccggaggtgtgctctcccctagaggcctgtccccaactcctcccctagaggcctattcccgctgctcacagacctcagcagaggcaccagctggagggctccagggacatccttggagatacaggaggctttcctggcacagggcacagctcttaggaggcctttgtaggacgctgtctccccagcgtgtcctgctcatccaggatggggagaaagaggaggaggccccaggctcagaagccagggacagactgccgacgattaccaaactgaatccaggcagtgccatgaccctgggtgtcccttggttcacatcacccaccagacagctgcggagagagtgcagggaggggctgggaccaaacaggccagaaaccagcagaaaagaggcagaagtgaggtgggtgtgcctggggcacgaagccagcgccggggggatttcagtggagccttacagccaggctccgtgcggactgtgatgccagagaggcgtgcagcctctgggcaagtcgggagagggcttgggtggtccccacaaggcagaagaggtggaagggccagagaagaccaccaagaccaccgttcccgcaggcctggggtgagtgacctgactgagactagcgggcagagccaagcagggctaaactccaacccagggcccggtgttggacaaagtagctttttctttgctcgtttgtctgtgtattaagaagagactaaaatagccaaacgacgctggtcgcatgcgctggctgtggtctgtctgctgaatgtctatttttgtctcctgacgagacgtgaggaccatgcccttgatccctccgatggaccagaaacccccttccttgcaaaaaaaaggcaattgaattaggaaaagatagcccaacctagctcagatccaccaagataagcacagcaaagcttggctgcatttttgaggaataaaaacctgcagaaagcaccgataaccttcaagatctgaatgagattctattataacccgtctaaacgattgcaaaattcctcctttggttttggaagcagcgtttgctctcccgtggctcggattctctgaggaccagggagttgacacacaaaccccgccatgggtccgagccagctatttctcaaggctcccacctcgccaagctcccaagggcctgctggcagtgcctacgctgtgccaactaccctgtctggtacagaccacggctgggtaagcacccttaaaagcaacagaaatgacgtctggaagctgaaatgtgaaactgtcaagatggcttaggagaggaaggagtggacccgctggtctttggcattttgtatttagaattattctaactttatacataatgtataggccgatcttttggaagggataaggttttcattcttgtgcaactcattattctcattattggccttttaaataaaaagttgttttgcagtgtgccttga

SEQ ID NO: 14672 - DNA, 3054 bp, Homo sapiens
accgcgcccggcagccacccaccccacgtgccaacttcccctccccgtgccagcactgccgcttccacctgggccacccaccggaccctcgcacgccgtgccaggcctgccccagacgcgtctgcaggccgcttgccctcctgtcccctccccgcaggggcacagtggagacgcaggggctctgggcccgtaccgccaactcgggtcacacctgaacgctgctgccagccgatgccccagccctgcacgccacccactatcccggcacgctccctctgcagatggtcgccgcacctacaagccctggccgcacccaacctgtgttgttgccgcccggcccttccctccacagctctccttcctcccgcccggcacttctgtggaccccttcttagttcacaggcacggctggggccgctctgtgctggcgcctgctggccactgagggacagggacacgtgccacctgctcatctctgccctgaggtcaccccgtggtccctccacgtgcccatctctctgcagtgccctcctcgcctgtgcagcccgcccacccacaggctcacccctcctgccggctgccagaggccccctccagcagggcctctctccgttgccccagcttcactctctccctcagcacctgccctgctggaggccccagccctccgtggacagcaggggccacgtggagcccgggccgctcacccgccacccagtgctggccgccttcttggtgccaaacccccttcccccacccagagactgggcagctgtgtctggttcgttctttgcactaaccacatttgtcatctctagggcaggctggggctgcgggctgagggggaccgctggcaccccccttccctcccttcttggttccatttccatccatgacaggtacagcatcccaggagcccggcctgaggggctggacccgagccggctgtgaacatccctcagcccctgctgtccccccttgggactaaccactaacctcacccccaaactccacgggtgcccctagctggcccagagccggcagtgtgagcccaagtccgggctggagccgaggccggagcagctgtctgggagtcaaggctgcagtagcgtttcttcatggggtgctccagggggtgccacagaccgacaggcagcccaagggcctggacacccctccccaggcaggtgctgccccaggaggactgtcctcgggaatgaacctcccgcgggctttggactgaggtccctgtggcctcggtctcctccccatgaagtgggagcgaggctccccaatggtgcttttggctttagtgtacgatgtttgctgtgcttcccgccgtggagggcagagccaccccacatcaggatcggacgtgctacccctcccggtcccggccctggcccagccagcccagccctcgaggctcgatgcctgtgccaaggccaggggcagccagagggcagctggatggccacgtgcaggggtcaaggctgggccctgcagtggggcgggccgccagccccagcagtttacagacgcatggctcttcctcccagagcagccggcagctacctggaccggaaatgtcctcatcccctccctggggccaggctctgccctggccttcctctgtgaacccctcctttctttgtgctggtgtctgggaccaaaaagggggaatatgggagggcagagtggggaggggagtccatgggcctggggccccaagccggggcgtctgagctccccaggcatgaccaaacctcagtggaggggcctctgcttcaggccccgcctggctgacattctgagcccccctcggaggccccgccacagccaacctgcccagtctttcctctgggcttgacccgccaggggagttctccaggcctagggccaggagagaggccctggcaccctggcgtgggtgcccgccaaacgccctgcgaccgctcagaagcacaaatgctgtccatggccgtgaggctgcctgccaggtgaatggacatagcgtgagaggcggtgaggccagggcttccagcctcgtgctgtctcgggactcctgaccgtggtgtgcgtgtgtgcccgtctgtgactttctactcaccaaggttgaagaaaggaaacggggaaaatcaaaaggggttcaaaccccacctcagtaggtggaggggagcgcctgccattggttgtatttttgttctgagttttcggtgccgtgttcctaactactccatcccatgacctcgccacacctactggggcatctggctggtgcctgctgccatggccagcccccactctcaccctgcacagggggtcttgcagcccccaggcccacagcctcgttgggaggacagggtggccctggggacaagagggaggagcccaggggcttacctcactgagagtgctccccagcaggcatccactaccccagggccccccacatgtcatggcaaggttggtagtgaatgggcctggttgggagcagcccctggcccattgcccacccacccatctcactatgcaattcgagttccaagcaacatttgctcctgccctggggccagctctgccccagccctgagaggggtggtgaggcagccccctggaccccagaaccccagacaagggggcaggcgggggaccagggcctctcctgtgggatctttgttttgtgtttaaccataatggttgtgtactgaaccacttcatatttgttatatataatatatatatatataatctccttaagactcagcctcctggtttacccccccggcctgggcatctgacctcccccaccccagtgtgatttaacatccaggaactgaggcctgaaccattttgcatttccccctcctccagcctctgtagggccatggctgtatgtactgtcgctgtgtttttttgtttttttagaactgggtttgggggctgatttttatttctttgggggctttttttcttggcaaatactaaaaatctcgtcaatgtaatttctgtggtttctattcagcttgggtttcatgttttaaaataaatttt

SEQ ID NO: 14673 - DNA, 2557 bp, Homo sapiens
tacagcaggggctgccctacgtctccttccctaaggatgctggccagcactgtccagtagctgaggccactactgacctgccagggataaagaggaagggtctgcctgggtggtggctcaggcctgtcatcccatcactttgagaggccaggagtttgagaccagactgggcaacatggtgagactctgcctctacaaaagaaaaattaaaaaattagctggatgaagtggttcatgcctgtgttcccagctattcaggaggctgaggtgggaggattgcttgagcctaggaggtcgaggctgcagtgggatgtgatcataccactgtactgcagtctgggccacacagaaagactgtctccagaaaaaaaaaagttctttggagaagccacagaccacctgtcttcaggcgcctccttcaactcctgagtcccagccagccgctcccaggggcctgcacacatggagaggcctccctgatcctgggtgcttctcgtggagtacaagccggactgtgctgaggttgggacagagccccctcccctgcagaggcagaaggaagcagcgtgcgtcctgtctccttccaggctgtgggcctgcccttcagttatttatagctggagctggagaggctggctcagatgaggagtgaccccgggggcacacaggctccacactgccacccagcttccaaggctgagtctcctccctaacggggaagtgacggggttttgtctctatcatctcaggcgtcaaccacatgcacacacacactgtcacgttctgtggcgctaacagcatcctgatcctgacggacttcaccggggctctccaggcatctcttctgacaaacactgcaggaggtgagggtgtctgacgtgcactgagggcagaggcccccttattcctgaggcggctacagctcaccgtggggaagatcaactgtggtgatgtttttgggacagtttcttggcaaaggtggccgcgctgtcagtaccaagtagctggaggtggtgatcagatgatctgtctttcctttttttttcggtctagttctgtcagttgctgagagaggggtattattgccatggctgggcgtttgatctgtctccctttagttttgccggattttgcttcctgcactttgaagctcctttacgtccctgcacatttgattgttgtgtcttcctgaggaattgacccttttattgtcacacgtaccccctcagcctgtggtggagggtctctgggagagagacttccggttctgacagcggaatcccttcggagtgacgagggcggggtcacagctcgcgcaccctcatctggagagaggcaagaacagggcagcttggaccttttgtgggtgggtggctcacacggttatggagggcttctaagaaaaacaaaatacaaaactaaaactagaagggctatgcaggtgaggtgggctgaggcttccttgtgaatctgacattggtggaggccgactgaaggctcccggtcctggtcccactccgtgttgacttcagagaagcaaagatgcagctcagaagtagcattaggatcttcgtcccgttctcttttgcgtagcttcaaaaaggcgtaacagtgacctgggaggggagatgaagagctaggcctttcagaaagtgaccaatggaaggtgccggcagagcaccctgcagtaacagaaggtgaaagccggagcctggtggctgttgctgcaaacaaccacccaaaacttagtggcttaaaatcaccacagtctagctcatgaatctgtaacttgggcagagctcggtggagacggtttgcccctgtggctcgactggagtgttcgttcacacggctgccaagtggaatttggctgggaatctcaggccttggttcctgcccacgtgagactctccatggaggaggggcatcttcttaggaaggcagctgccataccgtgaggaaacccgacaaacagggcagccagagccagacagcaggctcctggtcccagtcccggaaaatgcaaagggacaagtatgtgttgatttcagagaagctcagatgtagcattaggaccttcatccatacccttctcttttgcatggcttctaaagggcatgacagtgacctgggaggtaactgtgccagaataaagaggggagacgaaaaaaagagggtcactttcagaaagggacctgggcttcctcacaatatggcggttgccctcctaaggtggacatcgggagggtcagatggaagctctgtggcctttcctaactcggcctcacgtcacagagcgtcacctttcctgcactccacggcggcagtgacaaggaccccaccccaggttcacggggaggggacgtggcagggaatgtgagacaacacaatattgctgtggccattcatgaacagtcagtcagccccactcggcgttcactgtggggatttggctggtgcacctgcgaggtggcctgacctgttttccgatttccttcatcttctgcaaaaggttaaccgctggagtgatgcgagattaaacagaggtgataaaaat

SEQ ID NO: 14674 - DNA, 3613 bp, Homo sapiens
gcaaagcgccgcgcctccctcagggcggaacggaggcaactttccggagtctatttttgttaagacaatcaactccaataactgagctgaagtttttgtttaaaaagaaaaaaatctgataagtgatgattttacctacttgtggacactagatttcaattaggaaggtttttttaaacggctttttgtaacttcgctgcaggaagcaggtttgtttctttttcttttctttttaagagaaggtgtatttcactggtgcaatggcttggcacctccggggcctgggaggacctcagacctccccagccctgggtttctccgtcttcaagaccaactaggaagggtcaagcggggagagggagtggagggtcaggtgagatctcagagctgccccggccggcccccgtctctttctacctcctcttccagagaaccagcggctcacacccttctcaacgcaggacatcctcggcggctcctggggtttgaagagcaaacgtttttccctgggctcagtgcgttttgtcccaacttcatctgtttctgaaatgttctcacttggcagtgtctagtcaaggagtcggctttcaggttcctgacggccaggcagggatgctaaggtgtggctcagccgtcactgtctgtgtcactgcagtggtgcggtcctcaggcttttctgcctgtctttcccccttccttctcacctgacagcgagggagagggaagcctcttagggctggaagccaccacgctggccctctccttccccgaacacagcacacggtcaactccgcgggacacgaggacacgggacggcgtctccagaattgcttgttacgtaggaagcgtgcattgttaaccagagtatttttaaaatctttttatctttttttaaactatgtcacatgaaatgaatgcgtctttgctgtctccaggtgcctttttattaattgttcagctttgtacatgggaaagatgaaaagcaacagtgtctgcaaataaagcaaaacagctctgagaacacacgctcccgactcgcctcgtgcacaccaggccgtcccctccctctgtcctggcttctgctggctgctcgcagcagccaccgcttctccaccactggcgctgctgctgccccctctcccagtccgaggccagcttttagccttaacaggttttttggaaatgtttcttttttttatttaaaattgtcattgtttggtttaaatttttcagctagatgaaaagagtatgaactactttggaaaacttaacagctcagagatggccatgcctccagcccctcacgtcatctttgcaacagacgactgggctgccatggtccacccctcagcccgggtcccgggtctggatggaacgggagcactgctggtgcccactggcgtgtgtgccccgggtccctgtaagtgccccctcaccagcagcagcgtgacacacacaagactcaagaccaccctgtcagtgccccccagtgcacggcaaacgggcaggtgccgttcccccagtgacctgagggtaggggacaactgagcagtatctgaccagtgccacccaggagccagtctcctggccacatgcagaaagtgtggcccctgcttacctagatgttttgtgcacctccatgggcagagggtgtggatattgcctggattctgtgctgtcagcgttgctgagtatggccccaggagaccaaggagagttttgtataggctggaaaaccccttttcagtctttccaaaattagagggtatggcaagtttccttttttctctcctcccttccttcccctccttcctttcctttacccctcctttccttccttcctcccttcctctcttctttcctccctccctccctccttccctcccttccttcctctctttcctccttccttccctcccttctttccctccctcccttcctctctcccctattccttcttccttttctcctcctttttctgagtggagggggaaatattctaaaccaaaaatcctagatgctctgcccaaagccacttctgcatgagaatcgcaacccacagttccccggatgagactcaccacagtggacagtgccacctccttcccctcggccccggagagggcgaagtgggcgggaagccaggatgtgagcactggaatttcttggaagagaagcgataaatggagaccatggccagcgctgctttctgtgcactctgatgactgctctctgcagccatgaggatgtggctttacatgccagggagagtgttgagacgtcttaggttgaggatgagcagattcgagatatgtttgttgctctcgggttttcgatacaacatcatgacacttctgtttcaagctcatgttttccgtctcccctccactcttagtaaaccttgatctgtacggagcggcctgtccgaggctacgccggcctcctggctgctgctggactgtgcttaggacagcgcccatgcctcggagggactctgtcccatgagaaccacctgtgcaaaggaacagagctggatgtttccaggtagattttggcctcccagagcaatgcggcatttgagaagcaacagttcctaactccttatcttcagggaaggaaaagaaaatcacagcctaggaagatggaggttggattttaatctcggttttaaaaagaggacaaacaaaatgtctctaagccaggctagatggaatgtgctcccgctctctcctgccgtgctgaaagtcatgccttgcggatgcctcatgacagcagtggctgagtctccccacccacccccaacgtggctcatttcagattgcttcggccccaccctgcaaggatgtggtcacggagtggccaggaggctccgtctgagccacagggatgggtgtgcagagctccctcctcctggggtgccagggcagagattccaggcaggtgagcccagagagagctgccaggccacaccccctcggcctcctgcacggccaccttctgggtgaatcggtccagcccaagcccctctccccagcctcgccttcagcctctctcccagcctgcttttataaggcgcacttcactcaatgctgtagccaaaaaacgaggggccccagggagaggggacccagatggccacacacggaacgcgcctccacagccccgggaggtggctcactctgtacaggtcttcggaggccgtgtttgtatctaactgtgactgggctgaagcatgatgtttgcctaatggttcgtagcatggtttttatttcttacgcattcttggcacacagtgtagctatcctcctgacgagcaacccgtctgcgtacctaagtgtggctccccgtgggtcagcgtcctggtagcatggatccagtctgaaaggtgaggacaacgtggaaactcatgagctgagcctgcccgctgggacacgtctccttcccgcgtcaccttctggtttagggagccgtcaggtccctaaacgttccctacaactttttctgaaattgtgcagaaaaacagatctcattaaaagaaaaaaagaaacaacttgtaggaagacagagaggtgctatgggtacaatttttaataaaaacattattttgttcctt

SEQ ID NO: 14675 - DNA, 8979 bp, Homo sapiens
ggtcacctgcaacgcgggggagtgggactcacccagcggcgaccccgaagctggacccggcagctcaggcggccgcacccacagacggaggagaacagcccgcggcggcctgtgggcatcggcggcacctggacacacccagccctttccatttgatcgcctgccttcccgtggtttaagacaaaaacacataaacaagttcagacaactgattgtatgattctgggaattctttgctttcctttccttctccctcggcaccacctcctctccccaggcctccctgtcgggcatggggaggaggttggagctcagcatcttgaggaatgtgtcaagacagcccctccgctccgcgctgcacggccagccgcctttgtccgggaggacagacagaaacgcagcaaggcacacaccaaggctgccggggaggcccgggcaccggacagatgcctgttgggaagccaggagctgccgagccacggaccacctaacagcctctccgcccggaacgtgacatagagagtgttggcattaactcggggggtgtccgatttcacttcagaccccaagtttttctttgtttgtttaaacatggaattcagacttcattgtacacctgagacagacacaaaagggatcatgtatttttgaggattttacctgttgacgtctgatgaccggccgtaggtccagggttcccgctgggtttaatcccctcgaagagtaaacctgccgctctgtctgataacttcaagtaagagcagcggcttcctgggttggcgttcgcggtggaaggttcctaggatgaaaggtgagcctggatccgccggccgcagacatcgcgctgctggggacgattggggccgctgctctgcagaccagaccttcccgaattatccgtggctccgatgtcccggtgctgacggccacatggggacctaacagtgccaaacgccatctgctccagctgctttttcacccagttgcagagtcctcaccactcccacattgatctgctgttttcaattggaaccatttctcctgcctgaaactccagggcccctccctgggctgtccgtgagcaggagaccccaccccagcagcagtggtgagcaggcctgtgcctccacgcccagcccccgccaacgcgactggttttgtttgccacacggtgagaaccggaggacgggatgctccagccagttgggtggttctggggtccctgaggaagccccctcctgcacttccattaagacagccagtggttcctggatctttgtcaccaagcagcgttgagccagagctgtctaatgctgagcccagctcaggaaggagagaggagtccttcagtgtgtcttggagatgcgaagtgcgtcctcgtaaaggtcagctgtcagttttgctggccgctccggcgctggctctcctgtccgggaccacaacgagaaacagcgacagattcgacgcagagctccggaagtgcctgaggagcagtggttcttggaaatcgcccgtcctccgcatcacagcctctcaccagcaaagcagcctctgcccaggccctggcgggagagctgcagagggacccaggtgcctggagggcatttgagggaggtggctggacaggtgtctccctgaagaagaagggagaacacttttcaaagtgattccgaggcagtgcgggaggacacacgtgctgtgcagtggagtggggtcgcccgtggcccccatcagagtccccgtcccccaggacaagtgcagaacctctgtgggccccctccttccacctagatagagaaaaccccttgttcggtttccttcccgtgtcccgttgtttttctaagccccccgaattgagtcgtttctatggcactaacctttccatgggaaataagctctttgtggaagtccgtacctgttgccctgggtgaggtttcagagaaacgggggcaggatgaacacagccggctgtcctgggtgcagttacgtccgtggagggtgagagattgcgccccgttccacacttgtgtcgcctgctgttgtctgtgggccttttctttccgtggtgcctggtgtgtgcgtgcatggcgtgagagaacggggggtgggggttggaggtggctccccgacaccggtgcctgtgtggcctgagccggcgccctcccgggagcgcccgtcacggggggcctctgtgattacctgctgctgctctctcccgcgtggtgactatatgtcctcagggctgcctgtggccaccctgatgggagacctctgtttgcttctgggccactgcaggttggcctcctcaatacaagctgatgtctgcagggagcgccgcgtgctgggattgcaccacgtgttggtcacaaatcgaggtcgccttttggcctggtctgctcaggctggccctgacccacgtggtttcctggcttctgagacgcagcgcattcttcctgttagcggtagcgttctctgatttcactgcttcattgccaagggcgtggaaagggggtggtggatggagccgggaggtggcgagcacaggaccccggggctgcattctgccgtgtggggttctgcactgtctagcttctgcggggactgcaaagagggatgaagggacgtggtcctaggggtcggctcagactcggagcagggcagggagaggagggcaaggagaggaggcctgggtcctggatccactgctctgggctcataaccatgagattttgaaagagtttttggtcatctgagcaggtaccatgcctggctcatgccggaacttgtcttggaaccggtagccagaggcccaggaagggacagggcccaaaagggttgcatgtcccggccacaaagccctccctgtgtgccctgagccagcccagcaagcgcctcccagccaggcgctttcgcagaagcaagagcacaggccagggggaccgggagagcctcagcccccagcctgggcggcctgtgaccctgagccgtgtggagccaggacccaagaaccttctctaggttctcaagggtgagctgacccgggcaatgtgcaggaatgtggggagcaaaagtagctgattccagccccgttctggggtcactggggaggcagaggctgagggcctgttctctggtcaccagggactgggggcacggtccacagcggatgagaacagcaggtcacagtagtggctttgggaagggcccctcctgctttgccctgttcggaaaggggctccctcagagcccctgggcccagtaacccgcttctgtctcctgactcctgctggataaattgccaggtttatcaaatacaagaaaacacctgctttggctaggaggtaagtcccaaaaagaacgtcttaagtagagcaaaggcatccaccgaggccatttggtggcccctgggaagtggggaagcagggcctgagcgtccccaggctgctagggcagcagctggctcagggcacactctctcgtgccagcttctgccaccagcccagtgtccacggagccgcggggccagaggagctcagggagacctggctgtctagggcatggtacccagtatcccggtgtgtgcccatcctcagccacttgtgtctttctttccatgtgggagttctcccggtgacacctgccctccgttgagggtggaatctgtcactcatgcctttgagggacccagatggaccatccctcttctgcttgctttctacattcctaaaaacctcaacgttaatccctcaccagtcgggccgagtgtggcctcatggttctgccgcggcccagtcttctcccactggcttcacgctagagggcgccatgcgctctgggtgaaatgagacgctggtgtggggtccccatgtagagaccctcaggtccctatccagagaccctccaggcagtgctgggaagacactggtggcggggaccatgaccaggcgggtggagccatgtgtgtctcacacctgccgcccctcactttccttcccgaggtctggtaggtcctctttgggatttgctgtttatttgtatctcccttttctttgatttaagaacaatgccaagtgaaaaagctgggaatgaatttctgagttgctgagtgttccctgctcctaggtaccacgctctgtgcttctcaggcagggaggagatggattcggtggagttgggccaggacgggggcttcaccctgccccctccagactgccgaagcccccaagaagttttgagcccagctgggcctcgcctccccggctcctgggtccattttctgtactggtttgagatcacaggcatcattcagcgaatgctcttgtgtcctctgcataaagagggccctccctggagcacccccggggagctgggactctccagaaagccccgggtgagggctccgtcttgagagagagagaaatcccttctttgggcgattcagtgagttcaggaggaggaggaagcttttccttggctttgaaatcagtgtttttatggagacaaagaacagacctcagtgggaaaaatgaaaacgtaatggaacacggggaggtgtcggagaagaaaggattttccccttcgctttcagagccggcgggagtgcaggtctgttttgcttcagaagcctcacattctgctttgcccttgagtgacttcatgcgggatgaggaactgttgacccctctagagaggacaccccaagtccatcctgggctcctcctcacccctctgagaaagcccccctaaaaaaaggcttcagagtcaccggcatgccgcctcacgttgcaggacggaatcgcgcgctcctcacgctggagtaagttacgaaacatgatcgtcaggctctttgcaaacgcagagccccagaacgctggatggaggcctcctcggccctgcgggcggcctggctgcggtaggtctgctgcaaggagccaccacggggactgcgccacactcctgatgaaaacgtgtttacccacagcctcgcctcgagcctccttgacaataccgctgcttcaaagcaatattatttaatgagaatactttacattgctcacatgtgctgctatgaagacaggattagtctgtagacgggactcagctccagaggttcctgggtaatgtattgtggctcttggaaatgagggtagaatttgaaatataacaaatggtctctcgcccggttctgtcccttatttttagattgttttcctgcatcttacaatttccttttcttttcaaagttcctttctccaggcctgtttttcagtgctcaggacacggttttcatcacatacttactgtttttttggttgggttttgatacgaaaagctgctacgtttggtgaccagagggagggtttggaatctgtgctttgcaggggatctcggtgggtaccgcggcccctcgcagggtggcgagtggggtccgtgcctcgagaagggggcccttacccacaccgtgcggcttgaattctgtcggagttgaatctgtggaaaggattgtcccattagagctgctgcgtcctttcctctgtcctccctgtcacccaaaccccgaagtcacagctgcttagaagaatgggattttggggatacaaccacacacatttccctctggactgaaattttaaaaacagacccatttcactgacttctttttttttttttttttttttttttttttgagacggagtctcgctctgtcgcccaggctggagtgcagtggcgtgatctcggctcactgcaagctccgcctcccgggttcacgccattctcctgcctcagcctcccgagtagctgggactacaggcgcccgctaccacgcccggctaattttttgtatttttagtagagacggggtttcaccgtgttagccaggatggtctcgatctcctgacctcgtgatccgcccgcctcggcctcccaaagtgctgggattacaggcgtgagccaccgcgcccggcccactgacttctttagggaaaatagtttcagtcttgggttgtcttgtgagcccacgggcatgggaccctgtctctgctgggcttttccggccccgtcccagctcctcctcaggcagaggctgcagccctcagctctgctgctggatggaacatttcaaccccctccgggaaggtgggcagggtggagggcccagggctaggcctgccatgcaccatgagcaggggtgctacctgggtgtgtgaagttgggctggcttttcctggaggtgggtgagaaggctctccgggcaaatcagaaggccacgagagagagaggagcggggagagtggtgaggaggattcgtctctgactgatgaacctcgccgtgcctgtctgtcacatccaagtctgtgccagctgctgggaggtcagactcctgccctgagaaacagcccagtccttggagaatgaaaccctgagggtcagtgagtggaggccttccctcggggccagccattcccgggaggcctgagtgtgacctggaagctctgtgggtcaccaagactggcattttccttgtatttttgtgcagggctgaagtgagcgttcctcctctgaattggtgaggctttggaaattttttgtttcttctactcatcctaatggctggttttggctgcccggagtatcagagaatatcactaagagggcagtcagtttatttttaggcatctttctttctgtccagggagaaacccctcggaagaatcttagtcactctttgcacctgccctgtcattctcgccatggggaaaatgcgttgaaaagaaaaataccggggccagggagaagccgtgaatgtatttatttgctttggtgaagctgctgaacactggctgcggagggccccccgcccccatcccgcttcaggccccagtgacccagttgcgtcttaagttccatcgtccagatttcaggccaccagaggctgccaaaggtgactgaagcggtctccaagtcactctgtcaccactttttttttttttgagatggagtctcgctctatcgcccaggctggagtgcagtggcccaatctcggctcactgcaacctccgcctcccaggttcgagcgaattctcctgcctcaacctcccaagtagctgggattacaggcacctgccaccacacccggctaatttttgtatttctaatagagatgagagtgttaccatgttggtcaggctggtcttgaactcctgacctcaggtgatctgcccacctcaacctcccaaagtgctgggattataggcatgagccaccgcgcctggcctctgtcactttttttgctccttacccagtttttgttttttgttgttttgttttgttttagcgtgatactacaatggaaagactcctagttggttattctttatctcggattcttttttctggaattgtttgctcatttgagtggttggtggtttgccctgtgtcagacacggtgaaaagagtgcaggaaagctggggccaggggaagcgaagtggcttcaatccgggctgacagccaagaagagttttcctcccttcggtgacagggcctgcccctccgagtctagaggtaaaagcagcttctagaactggcccctaagtctccaaatgtgttggctaagctgaaatgagagactctgaattagagtttttgtttgtttgtttgttctctgcatgaagttcacaggcctgtatggatgttaaattgtgtctatagcctctaaatctccaggttaactggtccagattttttttttttaatcagtaacaatgggaatttaaaatcaaatatttggccaggtgcggtggctcatgcccgtaatcccagcactttgggaggccgaggcaggcgcatcacctgaggagtttgagaccagcctgaccaacatggtgaaatcctgtctctactaaaaatacaaaaaattagccaggcgtggtggcgtgtgcctgtaatcccagctaccagggaggctgaggcatgagaatcgcttgaacctgggagatggaggttgcagtgagccgagatcatgccactgcactccagcctgggcaacagagggagactctgtctcaaaaataataatcaaatcaagtattttaagtttggctcttctttttttcaagaaaggctttttggatacctagaataccttcatgtatgtggcttgatttctgtttcaggaaaaggggggcgggaggagagacaacagccgtgttccagagtctgtcctgagatgtcgctgagtccagacacttgggctgcacgtgccctgcagatgacaaaggccggcagctcagcacacgtgcaggaggggttaaagccaatattgagtttttgttcttgttgttttaatctgaacgattattctcctgtaaaaataatttgggaggggcgggtgttgttcggtgtgtgtgtgtgtgtgtgtgtgtgtgtgtgtgtgtgtatttttttttttacagtggcgcctgtctaaagtatttttcacaacatgtttgataatcagtgctttaaaaagcagcagtgtcctatgaagtggaaatgtcagttctagagcattggatgtgaagttctggtcatgtcaccttgcgtgtctcaccctggaggagtgaaggtgggcgcccggcgggggggtgtggctgcaccccagcaccgggagggggcacgcacgacaccagaggaagggacagccccacccatgtcaacagcaggcaacctgtgttttcatttcaagtgggatacagtatttttttaataaggagccatacttttttttaagagtttgagatctgaatgtgatttctaattgtatcagacgttaatgttttaaagctataacaaagtttaaaatttctactttttgtttttcatttattttaactgttcttttatctattaaattgttgtatgtggatggggaagttttgtttctcctcttagcatttgtttctataaccagaaataaaattctatattaaagaaatgac

SEQ ID NO: 14676 - DNA, 381 bp, Homo sapiens
agggacagtggccagggacttcggtgcagattaagagcctgggcagccagcttgctactgaggccaggctgataggagctcaggagggcgcgggagtcctgggagaggaggcaaggcccacggtgggcttggcaccctcacagacacgcggggctggcccccctgctcaccctctgggctttgtctccgagccttttgctcccaggcaacactgagctgagctgaggggtgccatggagcggctctgattggaggcttgaggccctgtggctgggtcgggtggaggctgctgggtctgtttcctagtcttttgtttttggacagttgatgggcaagaagagctgcagtaaaagtaaatctcctttaataagcgtctgtatg

SEQ ID NO: 14677 - DNA, 3887 bp, Homo sapiens
agtcagatctcaatttttagaaaactctctgaatataatgaatatggggaatccaataggaagtcaaagcgtttatctgagagttcgtgttcctgaacggtgagaagcatttaggcattagagtcattttaatccaaattttcacagagaagaatcccgaagaatgtaacaagaagcaaagccttcagcaagatcatacgactcatcggacactaatttatataggagtgaagttttataaatatttaatatttattttggattcaaattgtatttacatatcagggaatcatacaaaggcaaaatctgtcaatatggtgaatgtggaaaatatattgtcttggaaatttgttgtaaaagccatatttctaatggaaaatcaggtgtttacaggaaagatctcagaggctatgagctctgaataaatcttcattgtataaaatgaagtttttaaattgtcaggagttgatcatgaggacagtagcattaaataagtatatggccgttttttatcatgtcttaaaaatgcaatctaatggtaattctatgcaagtttggaattggatgacttgtgaagaggcagttttcttatttgagtattaggatggcaaaatgtattaagacaggacatattgttggtgagataatatttaataggtataaaatggtaaaatacctagttttctatttagaggaatttacaaatgggtttttaacaaatgcctcattagtacaggaggcagtcgttttgtaaagttttcaactgcatctgagtaagataagattttctaaaagactattttgataaactatacatacataatttggaattgtttaagtctatttcagtgaaagagaacaagcatactgcccatactctaaaatatccccagctctcacaccacccttgttttttaacccataggtttgagtgtgcctagtgccaatattttgtaatttagaaattttattcacaaacttctgtttggtacaaatacagtgtcattgttttgtgcattctcctttttcccagtatttcagaacaaattgattcaagtttctagcagatattttttgatcaattaacttaatgtcctcgctccatttcttgctggaacagtttaggtacctaccacttcttcacatgacacaggggaatcctgattagtcaaaataataatgatttcattctctttgccagtaacttgttttatagtggtcatatgacctgatactgggtaaacaaaacaaagatggacttgttctgggaaaaggtaaaatggtaatcaaatagattgtgttccaggaatgcaaaggtggcttaatattcacaagtcagttgctattatacaccacctgtagaaaagtaatctggcatgcagaacattcttgtggtacaattaatgttcgtttatgatcttagcaaatgatggattgaaagggacttacttaactgcataaagagacttaaactacaacaaacaatatgcttaatgatgaaatagtgaacatttctcctaagattataaaaataagacaaggatatctgctgtcaatgattttattcggcattgttcagaaggacctaaccagaaaactaatgcaaggaagagaaacaaaaggcatagagattagaaaagaagtaaaactttaaaaacgaaaaagaatataaatctctatttgcagatgccatgagtaaatttggtaagttccctgcataaaagttatgcaaaaagcattttatgatataccagcaaaaaacatggaaaatgaaattttgaaaagcaatgccacttcaaagatccctcaagtgcctagagggagaaaatgagttaatatgctttgaagaactgtatccagaaaataaaattacaaaggaggagagggataggattccaggacaatctcaaaactattgctttttcctaaattcattgcaaccttaaaatcctagcaagttctttaatgtaaattaacaagctaattctagaattcatatgcatattcaaaagtcgaataattgtcaaggctatcctgtagaatggacagagaggattgaaatttctaaatatcaagacctgttataaagccatagaaataatgaaggtgttaatttggcacaaggatgaaaaaactgactagtggaacagcatacagattcaaaagtagacccacgtgtataccatcacctgagttttgagaaaggtgacattgaagtgtagtgggggaaagggtgttctttccagtaaatgtactttgccaataaaattttgtaatttgataaaaagttatttggaggtggattgcagatctgaatatgaaatgtgaaagctttacaaagaaatcttaggacagtttgtaatcttggagtaagcaaaggtttattgagacccaaaaagcattaacccataaaattagaacttaatattaaatttgagaacttctatttatcagaaagaccaccagtaagaaaatgaacaggaaatcatggggaggagaagatatttgcagttcatgtatgtgacaacagcaccgagtatagcagaagtgttggcaaactttataaagcaaggcaccagatggtgaaaattttcagctttgtcacaactgctcatctttgctattgtgtgaaagcatccatacaccatgcattaaaaaaaaaatgagcatggctgcttcccagtaaaaccattcacaatcccaggtggcagtctggatttggtctgcactcatagttttctggtccctgatctcgaatatgtaaagagcacctacaaatcaacaagggggaaactggaaaaggcaaaagactttagaggatatccactcactttagaggatatccagacggccaataagcatgaaaagatgtgttagctttattagtaatcagggaaatgcaaacttaaaacatgtagcactgctacccatccatggaaatggttaaaatgaaaagcatgaaaaagcatcacgttttggcaaggatgtaagcaagaggaactgtacactactggtggaattgctcatcgataaaaccattttgaaagctggcactaaaagccaagcatatgtatactgttttacccaaacccagcaaaaatgcatgtgtctgtccaccaaaggacatgcactagaatatttatagcctaaaactgcacaaaacagaactatcttaaggcacatgtgcaatggaatgaataaagaagtggcatatgtccatggaatactgtaaaacagtgagcatgaatgaactagaagtccgtgtaataacgcagctgaatttaacaaaccttgctgaatgaaagactccagacacaaaagccaacatgctgtatgattccttctatataaattataaagacgggcaaaacttgtatacgtggtttaaaattagggtagcagttagccttggccaaggctgaaagggggcatttatctggtgctgggaataatctgtttctaaacctaggtgctaagtatttgagtgtgttttgagctgtgcacttaagatatgtgtatttttctgcatgtgtgttaaactttccataaaagttttctaaaatcacaaatggctaacatttgtgtcgctcatcactctaatcatatttttctagatgtgtatgaatatgctgcacaacaggaattaaatggcagattttgcataattctgtgcaggaaatacatatttatagtaattttgatggcaactactaagatttcctacgctgtccttaaagcttagcataatgtatattttaagtgaaatatttgagaaggttaaagaatcattacatactttgtcatcctatacttttgcatatataaataggtctgagctgcctcttcaataaagaagctaatgtgtaacatttcatatttccctaaac

SEQ ID NO: 14678 - DNA, 2907 bp, Homo sapiens
acttgacctgtgacctctgacccggggagcagagaacactggcttcacagaggactttgtgcattgctgctatgaactttgacctgagtcgggggagaggatggcagagactttattaaaaaaaaaaaaagattgtagtggtagtctaactccataacgctgaggaaatacatcattttcacttcagtggcttttaaatcctgcttatgaattttagctttttgtttgtttgttttctctttttgccaaaattaactgtttggtgaagcccgcaaaacctcctcgctttgcatgcatgaacgtgccaagccagcataggggagctagaagccactttccagccacctgccgttgggttttttcatatctgtacataatgccgagtgcgtaaggaaaccgtggcgtcgcgcacagtgggtctgcttgtcaaggccagttctgcagtgacaggcccaggggctgcccaccaggtgtgctgggcagacttcagctgggacagaagtccgatctccctagggccccacctggaccattttccctccgttttattttgttaattaaattctttccaaattggatcgctctgggatttcttccatggtggacttttgtttctgatcttgttttccctgtggatattggaggacagcgaggttctttctgatactaaaaacctttctttcaggcagcaaatgaacttgaaaggttgcctggactcgctggagcaaaggaaagcgattttgtttgtataattaaatgatctgttcttctacttcactcttcctgttgaaaaactgtgtgatttttttttttttttaagtaaagtttgtagctcctcccatgcccaggaaagcacagaactcaagtgtggtggccgtctgagctgtcctttcgctggccccgctgtccgcaggggcttcctacctgtgtgagaggtcgtagcgggagacagcaacagagagtaggcggctgggccacgtccttcacagggcgtcatgtgcctttctattttcatcttagaaaatttcctcagcaaaccgatgagagattgtggttgcaagcttcagtatttgcctcgcttcccttcccttttcatatttacagaattaaaacaacctcaagtacctcagactctgcattccaaaccaaggcacccagcagccaaagtgtcgagggcatttaagtggcattaatggcaggagagatggttttagaatctatggagtggtggaagttacggatagaagggaaaaggcaaaaactatttaccctgcctttgcaggctggggtttttgaaccgaggaaggctgggacgcctgtttccagatggttgtcatggtcacgctgggcgaagagctggaggggagttgtcccctcagctgagcggctgcggtgaaatgccccagtgttcctgggttggctttacggcaaactaaatgcaggggacgctggagtccgactcacctacaccggcttcctcccagccgctggtgtgcggcacacacaacatctgcattaggcagaggtgcaagtgggctgattgaacttttccttcaaaacctgcttgtctgtcctggacctttgatgaaatgggatcccggtcacgcaggctgagacagtggggaccgccgaggccagagtgggctatgcttgagcagggatgagaagggccgcggcagcacgcagccttgacccacgcctgcgtcttgtggtgcaaggccagagggctctctctagaacctgaccgtgcactccatctcctgggagccacttttggcaagagtgagtgtggggggaaaaagtgtgcacaagagatacggaaccctgagctagggtttcctgtcaccaaagagtgagctgcatttccagttctgcgttaaagtatcgtttgttctggtgcctgcctgtggtggtgatttggagactcaaatttcctttgccaggtctcttttgtctttctttgggattggtagtatagaagatgctgggaattgtcttcctcgctcagcctcggcttcccgcactgtaagatgaggcagttgcagaggaggcctcggacgtcctgtgaccctcggcccacactcccccttgggtggccctggcagggctggctaggtgcgttccctgcagaccacgggaagccctgtgcttgcctgggtcagggctaagctgtgcgccctagaggagggaggaggactgcagattcttggtcgagaagaatgaagaggatttctgtgtttgctgagcagccattgtggagggttacccgcctccactttcccgttgcccatttcactgccaccagctcctcttcctctgctcgaacctatgagtcccagcctcactggcggcctcagacatgctcaggagtgacggggacagagggaggccgctgagttgcccgttagaactcttactgctgcgccagtgacccaggtggagagggaccctgaaccaaacagaacgtgtgctaattttccgaactccaaactgtacactcatattcatttttaaattgtatttttccaaacttcaaaaaggacgatgagcgtgggggataggaaacaaaacctgtaaacgttgtgaatgggctcagtggactctgggaccaaaccttctgtaatctctaaaacaatgggaccaagagctggatggaacctggagtcaaaaagaactgcttcagtccccgctgtaccgcctgcctagctgtgggagcaggcagggcgcctgggagcctgcgttttctggaccgttccatgggactcatccctacctcacagggctgttgtgaggtgttgtgtgactgcgtgtcctgcaaacgcccagctcggtgcccagccagcggtgggcacccaataaacgctacaacataaatgtgtcttctgcaattaaacacgatttttattc

SEQ ID NO: 14679 - DNA, 1132 bp, Homo sapiens
gccagccccgcccactgccagggacgccgagggcctgaccaggggccccgaggcctgagggcccctcccctgtccccacctcagtgcctgcggggccctgagcctccccctgtgccagcagccccactccctcagggtccagccatgccccaccctggactgaagttctgcaaagtcctccgaggaccggaacacgtttctgcgacccggggctctggccagcactgtgttctgcgtttggtctcatacctgcgtctaccttccatctgtgtccagcggccccggctccagcccagccagcactctgcagggtcacacgcaccgtgtccccacccaggacagcagacacccgccagagtgtgcgcgcccagtgactgcaccccggccctcatcacccaccggcactgatcggggcaccgcctggcccagcctccaccagggacccctcctcatgaactctggagccctgagaggagaggggcagccccccaccttgtcaccctcagggcttccccttctgtcctcattcttagagactgcttctcccaaacataacgcgttagccatgaaggagtcggagccctgggtccgaatggacccgcctgcggtctgcatcagcctctgggaaaccacagcagtgatgccagctgggcacgtcaggacctccccacacacccacacgatgccacaggtcagggggctgtgcctgactagggagccctcccattgccttcctggcccgggatagaagaggggaggtaagtctgggggctacgaagccgggcccccacaccctggctgaagtcagcttgacctaggtcttgaccctcatccagcaagggactcgacagacccaagggtccctggaacgtagggaggggctgggggtcagtccagcccgggcctcccagaacaccaggcccgtgtgggtggcaccctgaggtcaggggatcctaagggtgtccttccagagacggtgtttccagggggaggaccgcccccgcttccagatccccggccccggctgtgactgccctgtttcacccctgctgtgtcccatcccccgtctgtccactaactgtaccgcaccggccattaaaagatgaaggcagaccgctgcaccgccgcctgc

SEQ ID NO: 14680 - DNA, 1180 bp, Homo sapiens
ggccggcccgtccttccccgcccctgcccacatggcggctcctgccaaccctccctgctaaccccttctccgccaggtgggctccagggcgggaggcaagcccccttgcctttcaaactggaaaccccagagaaaacggtgcccccacctgtcgcccctatggactccccactctcccctccgcccgggttccctactcccctcgggtcagcggctgcggcctggccctgggagggatttcagatgcccctgccctcttgtctgccacggggcgagtctggcacctctttcttctgacctcagacggctctgagccttatttctctggaagcggctaagggacggttgggggctgggagccctgggcgtgtagtgtaactggaatcttttgcctctcccagccacctcctcccagccccccaggagagctgggcacatgtcccaagcctgtcagtggccctccctggtgcactgtccccgaaacccctgcttgggaagggaagctgtcgggtgggctaggactgacccttgtggtgtttttttgggtggtggctggaaacagcccctctcccacgtggcagaggctcagcctggctcccttccctggagcggcagggcgtgacggccacagggtctgcccgctgcacgttctgccaaggtggtggtggcgggcgggtaggggtgtgggggccgtcttcctcctgtctctttcctttcaccctagcctgactggaagcagaaaatgaccaaatcagtattttttttaatgaaatattattgctggaggcgtcccaggcaagcctggctgtagtagcgagtgatctggcggggggcgtctcagcaccctccccagggggtgcatctcagccccctctttccgtccttcccgtccagccccagccctgggcctgggctgccgacacctgggccagagcccctgctgtgattggtgctccctgggcctcccgggtggatgaagccaggcgtcgccccctccgggagccctggggtgagccgccggggcccccctgctgccagcctcccccgtccccaacatgcatctcactctgggtgtcttggtcttttattttttgtaagtgtcatttgtataactctaaacgcccatgatagtagcttcaaactggaaatagcgaaataaaataactcagtctgcagcccc

SEQ ID NO: 14681 - DNA, 283 bp, Homo sapiens
cggatgacggctcaccgagagcatatctaaaaaacactctgcaaacatttggtcacatgcaagttagtggtcatatgacggactgcattcaggacaagggtaaagcaatacttgctttgaagaatcacatttcgactcggtctgctgatctgaggtttttagattttaaatatttatgtggaattaattaaaggtagttggctatatcgctatcatttcattcttttgacattatgtgaatattttactggaaaataagactaataaattgttaaaagttttt

SEQ ID NO: 14682 - DNA, 142 bp, Homo sapiens
attgccgtaactgattttaaagggtttagattttaagaatggtgctctttcatgcctattatcagtaaggggacttgtattagagtcagagtctttttatttaggccagttgtcaagtgtcaataaaagcatcatgtaattt

SEQ ID NO: 14683 - DNA, 1010 bp, Homo sapiens
attcaacgcgttcaacagaagccatccccagcccagcttaaattataaagatagacaataactctgttccaatctgcgtggtgcttctttagtaaatactgtacagattttaccatggagaactttttttttagtttttaccttttcttaattacccttattccgaatggacgaacactttctaccactgctgaccattgtaaaataccgtgtatataaatcccattgaaataatgccctggaatagaacatctcaaatgctgcttaattacagactcaggtcgattacttgtatttcatgtaatgttcctccaagttagacatctggtgcaagaccaaccgggagaccatggaattgtcaaaagtacaaactgacagtgtgtatatttaatttaaagacttatttaaaaactcacaagctctcacctagactttggagagcagtctgttttctgtaatgtctgatactagaaactaatttgcttattttagttgtattcaagatttgaagatgtattttatagacaagttctgtttttgaactttgtggaactgttccaatcaatcaatttcccagttatgatgagtatttacattatgaatgtataacccagacatgatttgtaaagccgacagtatgtttctattacacaacactttttgatacagcgtctcttgtcttcactgatactggagtctccgttgtctgcttggtcccttcgagtttctagttacagacacaatcatactgtgattttatttttaatatggatatgctatcaaactgtgatacacttataattcactggtcctgcatcaggagatggagtggggaaaactgtatttaatacagtttgtatctgaataatctgtatggtttatacagtttgtgttgttcagagatgtttaaagtttgatctttgtttttctaaagattaaaaaagcacttgccccactgtaaatatacagcatgtaaaatttctatagtatataaatggcagcaaatcaca

SEQ ID NO: 14684 - DNA, 1521 bp, Homo sapiens
atgtctcagcccctcgttcttggtcctgtcccttggaacctttgtacgctttgctcaaaaaaaaacaaaaaaaaaaaacaaaaaaaaaaaacaacggtggagccttcgcactcaatgccaactttttgttacagattaatttttccataaaaccattttttgaaccaatcagtaattttaaggttttgtttgttctaaatgtaagagttcagactcacattctattaaaatttagccctaaaatgacaagccttcttaaagccttatttttcaaaagcgccccccccattcttgttcagattaagagttgccaaaataccttctgaactacactgcattgttgtgccgagaacaccgagcactgaactttgcaaagaccttcgtctttgagaagacggtagcttctgcagttaggaggtgcagacacttgctctcctatgtagttctcagatgcgtaaagcagaacagcctcccgaatgaagcgttgccattgaactcaccagtgagttagcagcacgtgttcccgacataacattgtactgtaatggagtgagcgtagcagctcagctctttggatcagtctttgtgatttcatagcgagttttctgaccagcttttgcggagattttgaacagaactgctatttcctctaatgaagaattctgtttagctgtgggtgtgccgggtggggtgtgtgtgatcaaaggacaaagacagtattttgacaaaatacgaagtggagatttacactacattgtacaaggaatgaaagtgtcacgggtaaaaactctaaaaggttaatttctgtcaaatgcagtagatgatgaaagaaaggttggtattatcaggaaatgttttcttaagcttttcctttctcttacacctgccatgcctccccaaattgggcatttaattcatctttaaactggttgttctgttagtcgctaacttagtaagtgcttttcttatagaaccccttctgactgagcaatatgcctccttgtattataaaatctttctgataatgcattagaaggtttttttgtcgattagtaaaagtgctttccatgttactttattcagagctaataagtgctttccttagttttctagtaactaggtgtaaaaatcatgtgttgcagctttatagtttttaaaatattttagataattcttaaactatgaaccttcttaacatcactgtcttgccagattaccgacactgtcacttgaccaatactgaccctctttacctcgcccacgcggacacacgcctcctgtagtcgctttgcctattgatgttcctttgggtctgtgaggttctgtaaactgtgctagtgctgacgatgttctgtacaacttaactcactggcgagaatacagcgtgggacccttcagccactacaacagaattttttaaattgacagttgcagaattgtggagtgtttttacattgatcttttgctaatgcaattagcattatgttttgcatgtatgacttaataaatccttgaatcata

SEQ ID NO: 14685 - DNA, 439 bp, Homo sapiens
caagtgtatgactgcctttgagctgtagttcccgtttatttacacatgtggatcctcgttttccaagcatggcttgtttgttttgatttctgctgtgcttataaatcactttcggtgggcaagggagagaggggaaaatgggtgttgactgaggaatcccccttgcttgtcttcttttgaaaccgggcatctctgaagtcctggtgtcaaggggatcaagagatgacttctcagaggttctaggtgatgctgagaccttggtgtctctaaactctgggcatgtggacaggaggggcttgcggccgtgtctctgacctgtgtgatgtgcaggagggtctcattgactcagcgcctgcgcgttgtgcctggctgtgctctcttttatgccccctctattctcctctctcccccaggggattttcatctcaacaacagagtg

SEQ ID NO: 14686 - DNA, 563 bp, Homo sapiens
gctggcccgtgtgtgccttctgcgctctcgctggacgaagcctttcgagatggaaggggtggccggactcccagaagagaacctcggggaaggggtcgggcagcccctccccgccggcagaaccgtcttggtgtcacggagtccaggtgcttcccacccggtcgcattctttgacatgcagattggatggtggagggaagagtccagcctctgccgagagcctgctgcgtgcatttttaaaagatgccgatcctgggagcctctgttctctgcgcatttcagacacagcctgtgtggcgaggagtgtgacggcaggagccacgggtgcaagcccgtgtgtctggcctctttcctcgtgaagacgatgtgtccccgccagaaaaagtgggctccttctgcagccccgtgagctgagcccaggctgcgtagtgaccacaagcttatgtgcagcactgctcagggaggctgtcaggaattcccctcacctcggaaaggaacttctcagttttattgggggtgtctaaatttcctttcatatgttcaaataaatttttctaaacagt

SEQ ID NO: 14687 - DNA, 222 bp, Homo sapiens
agagacacgaggacacacacacaggcttaggatggcacgtgctgtaagatttcctgagcattacagttcttagcactgaactcgtcacagtgttttaacataccccttggcccactgcatctcaggtttcctacatggctggattacgggagttcgagaccagcctgggcaacatagtgagacccccccatctctgcaaaattaaaacatcagccgaccgtg

SEQ ID NO: 14688 - DNA, 621 bp, Homo sapiens
aagaaaatcatgaatgaacaaaggtaatatgtctagcactgcactgaaaaaggacttctgcatttctgacatagaacactggaatcccagtgaggaattctaagtgaacattccttatagaaacctttcacatgaatgactataaactgaagctttaaatgagctgtgaagtgtgttaaaatgtgttttgatacagtaatatataaatatgtctatatatatgaggaacttgtgttttttaaatggtggccaggtagaggaactagaaaagagattttgttgcctgttttctgaccatctgtgttattgtcactgagaaactaaaatagtaaatttactaaaactacactgcaccatgttagtaataaacagatctgccttaaagaaaagaaaattttagaaagaaatattgttgctcagtgttgttaatatagctcaagaattgagtttatatttgcagtatgctataaatgatacccccctaccacacccacacacacagtttttgtctaatgaaaatgttgctgtgattatttataattggtagtatttcttccagaagaagctaaaataagactggcacttaccctgaagtgcattaataaaaccacactttaaaat

SEQ ID NO: 14689 - DNA, 380 bp, Homo sapiens
aatgttaccaccttaagagaacccttcaagtgtggagctttctagtaggtgtccttcatagctcagaaacatacctcagaacaagccattcatgacttacctgtaatgggaaaataaatcattctatcagatcagcagttttgatgtttgagtgattttgatatgcttcacagagacaaatgctgccaaaataaacatcgaagtatagacatgagttctgttcagcaggttgaaaagtctgatttagaaaaactttctaagttttggttgaaattatgaacactctagaagcagaatttctggaagagccaagaacagactttgagcctatatcttcaaagctgaaactggatatctttcaataaaatatgtgcactttt

SEQ ID NO: 14690 - DNA, 2539 bp, Homo sapiens
aaaagggggagctggcctccaccctatgttccatggattcggaacaagatttcagacatctgcatgagtgacaaactttctgaacaccaccaccaccaataatacttatcagcatcataaagtatctcttaaacactgatcttggcagggacggaactcctattcagcagtttttgtggaaagcagtaatgcttgcaaaacgtgtgtgtcattcagcattttaagtggagactatgcatttcatagtatatttgacagattagtactgtgtcctgtgttttgttccagattcttcagtataaataagctctatatcaaaaagttgcctgtctaaatagaaaatgtcttgctgtgttttgtcctatggaaaatactgtaattcaggattatgtttacaattgatccaggtgtttgtttctaacttctgtaatacatacaatgcaaaaaaaaaaaaaaaaaaatggccacaacagttgcacagtgcccaccctatggcctagcttcaggtacttcagttgaagtctaaactcaggtaacttggaatgtatatcatattgggatattaaatatttcacagctaaaaagctaaagagggaacatcactcttttgcctttccttattttatgcatttccctttcctcattacattccacattcttagaataagaagtgcattcaatcctaggagaatgataatcctggacatgggtgaacatgaggagaaccagcaaaatctgtggtgtttgacatcactttgtcatgtggttacaagtaaaacaactgttgcattcactgtttcaacatgtgtacatgtggcttttttaaaagttcaggtgttgctcagtaaaggactgtgacaatgttgcaaataaagtgttcagtactggactgtacataaacattccacattgtgtgtgatgaaatttaaagacaagaatgtctagagttaatttcaaaataagtgaagtgtttgacggaatggttgagatttttttgtttatgttagccatcagggtcataactgttaccattttatctaaagacatatttatatttagtttctcccttggaaattctttattttgcaggtgaaaaagtgacatactttttgttattgtcttcctcaagcagtttaggtgcatgatcttcatttacatagaatacttgggtctcagaattgatgcaacataagcaggtttttttggtgacttacaagagcaatagtttgaagctatctcatttaagcctctcataatgcataatcatgagtagttttgaaatttgcaacctgtgaggtagagcataaactcaagaaaatagccttgaacttgcagacttttgacacaagttctccacaaagtgtgaagagagccccaggcattcctgattggtcaatgggagagcctaactttcattgttttcttcagtacaaagagtatccaaaagctaagtttttgtattccactactttcagttcaataaaacctagagttgtttcatctgcgcctaaagtgtatggcacaattttcttaagaattaggggaaccaggtgcctacagttaaaggaacgtttcagttcctttcattcattcctgggtttttcttttattttctaagaaggttgaagaaggatgagtgatagagaagaaagcaacaccattgatttttttttttaagaaatgatatatatatgtatatgtttgtgtgtgtgtgtgtgtgtgtgtgtgtgtgtattctgtgcattattttgtcatgatctcaattctcttctttccaccaaagtttgtcgtaatattttctcctgaaggtgcattctggctcctttaaattagtcagtgttatattgtaggagactgtcatggaaaaaaggactcagtttactttcgtcattttcacaggggaaccttttaaaacaatcttttcagcagcagatacctttaaccctaataatctcaggccttgatgaaaatactatattttgtagattatggttaaagggggaaaattactagttccgtaagataaatatgagctccatttgacttctgatgtctggtttagcattacataatatgttgatcttacactctgcttttgtccaaataaaatgcaatagtatcaatatcaatttcagaaaaatggactgaatatgcttttttggtgatgaaatctcatgtacgatatttatagtgatgtgcttttattttctcatgagatactaaatattaattgtgttgtacatttgttcttagcatatattaaagttttgaaccaaatgtgttaaagcttacgctttgccatgtaaatttcccagaagttgttgagctcaaatgtatcctacatccagctgtagaaatttgtcagaaattgtttaaattttgtatataattgtactgtttaattctagccattgcgctgaacagtatttgagttaccatataatatggctttacacaaggaaatgtgtggcttttgttttgtattttttcagtatagaagttcctgtgtcttatttaaataaagttattagtaaaactg

SEQ ID NO: 14691 - DNA, 1193 bp, Homo sapiens
aggtgaacatgggggtgagactgaagcctgaggaattaaaggtcatatgacagggctgttacctcaaagaagaaggtcacatctgttgcctggaatgtgtctacactgctgctcttgtcaactggctgcaaaatacactagtggaaaacactctgatgtaatttctgcccagtcagcttcatccctcagtataattgtaaatcatcacagattttgaattcacacctgaagacatgctctcacatatagaggtacacaaacacaccgtcatgcacatttcagcttgcgtctatcatgattcctgttgagagggctttcattgtctgactcataatggttcaggatcaactatcatcaaacggaaggattaactagacagagaatgtttctaacagttgctgttatggaaatctcttttaaagtcttgagtacatgctaatcaataatctccactcatgcattcctactgcttggagtagctgtactggtaaatactactgtaggagtatctgcttgttaaaatggaaaaatgtgtctttagagctcagtattctttattttacaaacacaacaaaatgtagtaacttttttccagcatacagtaggcacattcaaagtggtccaagatggctcttttttctttgaaaggggcctgttctcagtaaagatgagcaaacatttggaatttacatgtgggcagacattgggataacaactttcatcaccaatcattggacttttgtgaagttgacaccagctaaggctgcttaaaataagttctgatcattatataagaagggaaatgcctggcagacaccatgtaagttataagtgtctgtcttatctttactacacatattgtaacaaattcaatatcctagtcttcatttgtatgaatggtttgtattgtacatagtttaaccaagtgttatttgagctgcttattaatattaacttgtacttgtctctctgcttgttattggttaagaaaaaaggatatgaggaattcattttatcaatgtagctgtgaaggccattaaaaagacaaacttaatgtacagagcatttattcagatcaagtattgttgaaagctatacatatacaacattacagtctgtctgtatttagatattttatttctggaaaaaatgaaatgtacataaaaataaaacacttaaagttgagtttcaat

SEQ ID NO: 14692 - DNA, 1157 bp, Homo sapiens
gacccaactctgccacagctcatcctcggaggcaatcccggaaacctcttttataagtgtgattttaaaaatgtggattaaactctcgatagagtacataaagtaaaggagaacagctatattgtcctttctataagcttgtcactgcaaaaagttgccttttgcttgtcaggtttggatagaatataattgattggtttgttacttggactaacaaggcagtagatttgcctgtgtggaattttttttcctatttttcttctttttgctttttttgcacttatcagaaatatttgatgtgtgcattgttgaaaaatactggatacatgtcttgtcagaattgtcgtattaagtaatgtctttccctcttgcttctttggcaaatgttgatacacagtgtttggacttactgaagagttactgaagcctgtgggacttaataaatacaatatgctactccctgttgtgattgaacaatacaaataacaaacaagaaagacaatgcattccattagtctgctattctgtttccttcaacttcatacatagattcatatatgaagtactgcattgtaaaacaactatagactcatattaaatgttatttctatttataatattcagcaaaagtgaaagacttgtgaagcatatgacattctatttttgacttattagtcctagtgtgaaagcattaatattattagcatgaaatttttacttcagattttaagctcatgaataaagatatatctgtgttgatctctagatatttttagtaatacccaaatatattcagtccttattgttttaatataagctttctgtgttcagtataattttatttttctcaaccttaaatatgaacttaggaaataaggagggaagtacaaagattattgactatacaacctaccagctgaaagaaagatcttcatcaacatctgtatctttccagaggtatacagaattaaaatttgatcttcaagctttaatgatccagttttaagtcaacggcagaagtatgttgaatatttcatcactcaatcttgaactgatttagaagagactctttgctgaaattgaattgcacttatacatgtaaattgtcaacatgtaatttggaattttctgattaataaatgtggttttggacatct

SEQ ID NO: 14693 - DNA, 124 bp, Homo sapiens
aagattttctgtagtgtttttgaaaagtttgcagcttatgtaatagcagataaaatttctaattgtaaaatgttaaattgtaaaatctaatttgcaaaatgttctcaataaagtcattcaaaat

SEQ ID NO: 14694 - DNA, 5282 bp, Homo sapiens
aaactggaagagatggatttaaagaagaaatatctattgatatttcctatactctcaatgaagaggtatttcctaataggagaccttaaattgaacaaacctaaagtttacacttctaagagtacagttaaaagtatgtggacctgcagttcttgtaactctccactctgtgttaatgatatatttgtactaggatcttttacttgaatctaaatttactggttgatttccttctccagcctatcccctacagggaaaagctgatacttcccctatagtacaataaataattatttaaaagtcatagctccagtcactactgaaaacataattttggtgataaacataatttgagaaacttaatttctgaatgtttttatagaaaattactgaaagtctattactcatggaagacttttaaagaataaccttttttcctgttttataaattcccattgttatatggtagtatttcagctacacaatattttagcttttagctagacatttatagcttttcatttgttgaaatggtaatcatctgcatgtttttgtcacttatttcaggttagtgattgcctaacacttataagccaaaataatctttgcaaaattccatacctaaaattttgaaagcccctaatgttttcacacatctttctgtattagttatagttttgtgaaatctttgtgtgatcttcaaacattatcatttaatgtacaatactgtaaataaactgtgcatggcttttatacagctttagtaaatgtcaaataaagtggtacagactcattacaacaagtttctcataaaaatacaataaataggaaaatgaaattcagaaacccatagactgggaataggttccagttacagcttggatctggcataaaataaatttgaaataaaatattttgatgctccatttttttatgttgcttttcatactaaagaatggtgtagacatgttttgcaactgttaggtacccagttatcaattttatcaatgttttagaggaggaaattatttttttggtagaaattgttcaagaaatccttaattgaatgtcattaaatgatggtggccaaaataaaacctatttagaaatttaatcactttgcacatcacttggaatatgatgcctctagtagttacttttttatagttttctacttttggttttatttaaaattgttttcaaatatagattattgacttattcaactttgctgttttatattttcagtatcatttttcatttttttttttttttgtcttttcacttaccaagttctagggacatttaaaatatgtactaagtgtaggagtggttatgataccaaaaaatgtagctgggttgagattaatttcgttctgttttctcatgacagaaatcaggtttccctttccccacccctaagtgcctaacttaggtctgaaacagcctgtttattagtctgactctctcaaccataaaacataagctttatttaattctgcctttaaacacactcaggtttccccttaattttcatattattttctgcaagttttcttgagtatcttcaattcgttgaatgtggtttttggtttttttttgttttaacactagtcttcccttaattcattgctaactcaagccatccttactattaaacccaaatcagtcctttaagttcattatggcctttctagtatttaaaaaaaaaaaaatcattttcatttttcttctgctacgtttcctgactactactgcatacttctctgatacaggttctgtttgtattttttatatcattctcattttctcatttgacatgatctatgtctatatatgatataggtccccttttgtctcaaaatttttaattatgtgacttcaaaaatcacctgtatctgtagtagggcttccaaatctgcttctccatatgtgaccagtcacctgtctgctttcacatttagctagtgaactacacatttactaaaatgtgtaaattttacacatttagtgactgtgtaaaataaaaaaaaagttattttatcatatcctttctattatgttcccatcctgtcctcatgtcccatttactttattatcaccattcatttcttcaaaattatcttttagatacgctcatacaaaaatcaatccttgttttcttgcttgtgtcttttaaccttggaaaattacatcgtgtaaattaaacagatttttctgatgatctgtgcttcttatatactattagagtgcatgatagtatctcctgaaaaggatggaaagtagaagcatttgcttttagtcacttaattttgaatcttttttcttcatcttttgaattaattttttttattatatctacttttagtggagtttgagtcagaaaaaaacaagaatttgaaacaagtaaaaagatagaagagaaataaagatggtatgtgactactttcagagagagttaagtaactgtcagaataagcctggaacaaaacaggctgtaaattaataaaactacaaacacacattcaggtgaagcagaagtatagccataaaacatctagaaagagtgaatgaggcttttagcttttcttaggtcaatgtccagtgtgcttttttccatgggaataggataggtattaatacgcttttctaaactgctctcagaccttatccagaggacatggtaaagatatgttacagaaatttttctgatacttcctggaataactttaagttacaccctagtagactggtcattctaataaaatccagtactataacaaacctctgtatgttgatagcacattggccctttttagagttctttcctatgtttttcttacgtgatttcccacagttccatgagtccaacaaaggagagtgataggctccttatcttttagaagaggaaggaaaggcatgaagaagttgagggactggctgaagatcacgtacttactaagtagtacaactggagcaagatcaagtatctctgtctcccatatctgtgttctatcatttaaaatatatattggaaatccctgctgactcagattggtatgattaaaaatgagaggaaagttcaaatagttagtagtgacaaactaatactgctggactaagattttggtagcattgttttctaaaatattttaaatggagaatgaacacttataaaatgctttggaacataatctttagcttaattttctgttaaaatttagtaccccttcatcattccaataaagataagactgatccattgtctaaggaaattatttataaataatagagattaatttatttgagatttgaaataagaatagtatgaaaatattagataccacataaattgtttgaaattactgaataaccatcttaagtatggaacatttaaatggctatattttatttgtgtacagtttttctgtgccttgttaggccagtgaagcaattattttctctaagaaaatgacaataaaatataacacacttcagattgtctgatttacagtttggaaaggacaccgcaatgttcaaataggtaggagaccatcaaaaacacaattaaagtaacatattaggagacttgaaacttcagcctaataaatccttcatggttcttagccttattattgtgatataattctagatattttcttggagggcatgtgcccaactctcccgcaccccattttgtttgtcttttaaagttcttagaataaacagttctttatataataattatattttatttaagaaaatagtttgttaggtactttttaaaagatgtaaatttttaaatttacaaatacatatgggtctttgataagcaataggaattgaattacaagttactagggttataagcaaaaggttgcttaccataatgtcattaggtcacgatttttagctcacatctggaagcagcaactacttggctcaagtacatataagagtaattagttttattctctcttttttataaaatcgggtttcagatgagatgtttatcttagactattttagggaaaaattttacatgtttgagatggtggagtaaaaagactgttaaacatttcttttaaaaaattatttttacattacaacaatatatttatgatgtgttcagatcaaaaatttaacttctgtgtcccagatctactttcaaagtgagattttcacttgtcagcttaaatttctgactagaactaacatttgtgtatttttgtgcttagtcggaatacaaatttcacagtggatttttgaagtttgtccttaaattggataaaatcaagtgattaaagttactaaagagataaaaatggtaatttccatttttaaaagtaatttggttgtgtttatagttatttgtacaagtatttatcacagactctaaattgaaaaatgtagtatgatctatatttgaccctaaaaatgttggattaatttaacaaatatggcagatttttcataactaagtcttaagtcttctaaaaggaagctgttacccttctgtttttaattacattaattgaaatgtgttttaagagatacaatttcagcatattttatatattaaaaaacaaaaaaggattagtattgagccagtggccaaaaggtaatattactaccatgtagactgttatagttcaaattgtcccacttcacccagaattttagaaactagaagtctgggaggtactatatcagctgtagttgggtaattccaagtgctgatagtactattcatcttttttattattgtgtcagatgaaacaaatgccaagttgcaaaatatgcagatttttattatataatggttttaggcataaattattaacaagccatgccttatgtgtttcatcttatatttttctttagaactaaactataacagattttggaaaatgatttgacgtgcttgctcacttgattgacttggtcagatatttgaatgatggtattacctagattctaatccttgattctagttatataataaataatatagaatatgaaaatatgtttgggcatttactgtttatattatgtagtagcctccatcatgacacacttactacatttatgaattgagcagttctgtaattgtaattattattgctgttcatgtaacaaaacatgcttataatagcaaacaaatagaaatgcccccaaaatgctatttttttaattcagttataactgttactcttgtagttgtgtatgacgcaataaaatttgtaaaaaaatttcagcatgaaaaataaaatttgtatcac

SEQ ID NO: 14695 - DNA, 887 bp, Homo sapiens
attggtatttgtaaaaagcaaacaaacattacaaggcagttatctcattgctgttttgggagaggaacgggaaaagctttttgcttatttgtcttttgaaaattaaggctgggcgcggtggctcacacctgtaatcccagcactttgagaggatgaggtaggcggatcactggggtcaggatttcgagaccagcctggccaacatggcgaaacctcgcctctactaaaaatacaaaaaaattagctgcgcgtggtggtgcacgcctgtagtccctgctacttggaaggctgagacaggaaaattgcttgaacccaggaggctgaggttgcagtgagccaggattgcgccaccacactccagcctgggcaacagagactctgtctcaaaaaaaaaaaaaaaaaaaattaacctcaaccaaacgcctattttttaatgcttagttttggcttgaaattcttcttcacctggagttttcttacgttaatacattaaaataacctgaaggaaactttcgttatgggccaatattagctcttatggaaactgatttatatcttttttatgacctttcaaaagtaaaatactatgcataatctagaaagatttgtcagataggaaattttataatgcattagccattagtcagagttgttttttaacatgccagagaaaaagttgtaatgccttggaagttattctcttttctatagattgtgttcaaaagatgtgtatacttgcaataaggtttatgttaaggtggctttaacaattggttgctattttccttctttagtcaatatgactttgatgtcattaactgctaagtgttattttctaagaggaattttatcttttttttaaccttattaaaagcctttgaaaacac

SEQ ID NO: 14696 - DNA, 2074 bp, Homo sapiens
atatcaatacctattatatctgtgtggagtaggttttctctggtctgattttgacaaatagaagagtgtctacagcgtggtttgcctgtctgccctcctggatgctattaaagctttgttttgttgaacaatcagatgcccaactctgttgccttgtggaagatgagtaaatgcagtgcttcttaaagtggtctcttctccctaccccacaaatcttttggtactaccatttggggaagccaagcaaggatagtaaattgaccagaacacagttgtgggaatttggtctgaagttagtgaaataaaactttaaagagtgtctgcctagtgttttgtgcttacatctttcggggggaagcctttgcaagaaaattgcatacaaggctttgtaacgatcaagtgctaatcgatggaaatgttaaggtagattaacatatatgcagttatattgatcacattggtccaaccagtccttttttgaagtaagggacaaggagtaagtattttcttttttaagtttctgccaaatgatttttgacgctttctggaatcaagtaatttaatagtatagcttaattctagacaatgtttaagttggtctacctttattaaaaataagatatttggggtatattcaagtgcatggattagttttcctgacaaagcatgttttggtgtgtagtcttactttttagaaatagctatgcatcgttctacacaggtttaaaacaacttttttggggatttagggctattataggaatagtttgttgtcagaagcactttcacttgaagaacctaaaatgattgactcattcatagtaaatatgggcatgtaaactaataaatatgcactggatacatatatggatttatgaagaaggcgatttagtcaagaggatgtaattaaaatatgtggtctctaaaatattccagttacaagatatttgttttattaatatttgctggctaaaaacaaatgtggtttttatatatttttgtagtgtgttgagaagagcaaaagctttataaatatacctgatgcgctgtagaatgaaaatgtaaaagataacctgtatgtgttccgagctttaattttttgtttacaaattgaacagtgttacatgggctgtccagtcctgattatagagaggaagaaatggtaacagtatggcagataagaattacaattatagaaaatgaggggaaaataacaaacctgttttatgaaaattcactggtgctgtttacattggaataaaaagctctataaggaggaaaggcctttatctaattcttatctacagacacttacttccagtgaccatattttactaaatcagcttattttttatgtctaaagcaacagctgttctgaaaaatcaccaaaagaaatgcactttgctagcaggatttgttttggctttgggttttgtttttttgttttttttttttttcagtggcataacagtttttggaaccttgattcttgtgtcacacaaaatgaatgaagtagcttgatgtggagccttcatatgttaaatattcctgcactagtgatggtcacttagaatgtttatagaaatgtggataataactaccaataaactacttgaggcactaggagaacagtatttgactttgaattttaatgtatttccacttttgctgaagcttttaatcagatgtgtaaaaacaattgaccagctaggctatttagtcccatagtagttcagatctgcttagatgtgacaggcattgaaggctgtttttttttttttctcccttcactgatactgaaatcatggtatctgctgcaaacatgagtagatccatgatggattaataaagcttgctgaaaaaaaaaatctgtgtatcaattagatttaccagtttgcctgtactttctgtctacctactatgtaaaatagtgctgtttttaagtatttcaaaagcttgtgtgttgaccctttgtagcctaagtacgtaaacaaattaatgttatctaagtttttcatatttcatggacaacaaaagagaaaatggtatgaacactgtacaaactttgatttat

SEQ ID NO: 14697 - DNA, 434 bp, Homo sapiens
atggctcaacaagcacaatacctaggttaccacacaccactttttgattgggaatgctgaaccatttgagaagagaaacttggcttctgttttcgcaaaggaaaaaaaaaataggataggcttcccttgtgcagagggagaaatggttttgtttttgttttgtttttaaatggagccctgaggcatcagctattatacttgggactctacctctcactcactatatgctaacttaaagccattcaacaaggagtcaagtagatctgaaattaaatactcaacagactcctccttttttagctgtatttttcaggtactgtgtggtgaccgccccactggtgtctattacaggccactttggtagttgtgtatctgctcatgtatgtgatttgacaaaccagttttttaaaataaatggctttttaaaaatctgg

SEQ ID NO: 14698 - DNA, 1043 bp, Homo sapiens
tgagaaaacaaggaagatttcctttcgtattatgatcttgttcactttctgtaattttctgttaagctccatttgccagtttaaggaaggaaacactatctggaaaagtaccttattgatagtggaattatatatttttactctatgtttctctacatgtttttttctttccgttgctgaaaaatatttgaaacttgtggtctctgaagctcggtggcacctggaatttactgtattcattgtcgggcactgtccactgtggcctttcttagcatttttacctgcagaaaaactttgtatggtaccactgtgttggttatatggtgaatctgaacgtacatctcactggtataattatatgtagcactgtgctgtgtagatagttcctactggaaaaagagtggaaatttattaaaatcagaaagtatgagatcctgttatgttaagggaaatccaaattcccaattttttttggtctttttaggaaagattgttgtggtaaaaagtgttagtataaaaatgataatttacttgtagtcttttatgattacaccaatgtattctagaaatagttatgtcttaggaaattgtggtttaatttttgacttttacaggtaagtgcaaaggagaagtggtttcatgaaatgttctaatgtataataacatttaccttcagcctccatcagaatggaacgagttttgagtaatcaggaagtatatctatatgatcttgatattgttttataataatttgaagtctaaaagactgcatttttaaacaagttagtattaatgcgttggcccacgtagcaaaaagatatttgattatcttaaaaattgttaaataccgttttcatgaaatttctcagtattgtaacagcaacttgtcaaacctaagcatatttgaatatgatctcccataatttgaaattgaaatcgtattgtgtggctctgtatattctgttaaaaaattaaaggacagaaacctttctttgtgtatgcatgtttgaattaaaagaaagtaatggaagaattgatcgatg

SEQ ID NO: 14699 - DNA, 971 bp, Homo sapiens
ggtggcgtgagcctgtagtcctagctactcaggaggctgaggcaggagaatagcctgaacctgggaatcggaggttgcagagccaagatcgccccactgcactccagcctggcaatagaccgagactccgtctccaaaaaaaaaaaaaatacaatttttatttcttttactttttttagtaagttaatgtatataaaaatggcttcggacaaaatatctctgagttctgtgtattttcagtcaaaactttaaacctgtagaatcaatttaagtgttggaaaaaatttgtctgaaacatttcataatttgtttccagcatgaggtatctaaggatttagaccagaggtctagattaatactctatttttacatttaaaccttttattataagtcttacataaaccatttttgttactctcttccacatgttactggataaattgtttagtggaaaataggctttttaatcatgaatatgatgacaatcagttatacagttataaaattaaaagtttgaaaagcaatattgtatatttttatctatataaaataactaaaatgtatctaagaataataaaatcacgttaaaccaaatacacgtttgtctgtattgttaagtgccaaacaaaggatacttagtgcactgctacattgtgggatttatttctagatgatgtgcacatctaaggatatggatgtgtctaatttagtcttttcctgtaccaggtttttcttacaatacctgaagacttaccagtattctagtgtattatgaagctttcaacattactatgcacaaactagtgtttttcgatgttactaaattttaggtaaatgctttcatggcttttttcttcaaaatgttactgcttacatatatcatgcatagatttttgcttaaagtatgatttataatatcctcattatcaaagttgtatacaataatatataataaaataacaaatatgaat

SEQ ID NO: 14700 - DNA, 2315 bp, Homo sapiens
acatgaaatgcattgcaggtttggtaaatggatatgatttcctatcagtttatatttctctatgatttgagttcagtgtttaaggattctacctaatgcagatatatgtatatatctatatagaggtctttctatatactgatctctatatagatatcaatgtttcattgaaaatccactggtaaggaaatacctgttatactaaaattatgatacataatatctgagcagttaataggctttaaatttatcccaaagcctgctacaccaattacttctaaagaaaacaaattcactgttattttgagtttatgtgttgagatcagtgactgctggatagtctcccagtctgatcaatgaagcattcgattagtttttgattttttgcaacatctagaatttaattttcacatcactgtacataatgtatcatactatagtcttgaacactgttaaaggtagtctgccccttccttcctctctctttttttagttaagtagaaatgttctggtcaccatgccagtagtcctaggttattgtgtaggttgcaattgaacatattaggaatacaggtggttttaaatatatagatgcaaattgcagcactactttaaatattagattatgtctcacatagcactgctcattttacttttattttgtgtaatttgatgacactgtctatcaaaaaagagcaaatgaagcagatgcaaatgttagtgagaagtaatgtgcagcattatggtccaatcagatacaatattgtgtctacaattgcaaaaaacacagtaacaggatgaatattatctgatatcaagtcaaaatcagtttgaaaagaaggtgtatcatattttatattgtcactagaatctcttaagtataattccataatgacatgggcatataccgtaacattctggcaaataacaattagaaaagataggtttaacaaaaaaatttacttgtatataatgcaccttcaggaggactatgtcctttgatgctataaaatacaaacaactttgaaggcaacagaagacactgtttattcaagtcagttctttgtcaggttcctgctgttctcctacagaaaagtgattctgtgagggtgaacaggaaatgccttgtggaaacaggaagtccaagtgattcatgtactgaggaatgtaggaaaaaaaatctgaggatagtgctttactctttctgtttttaaagggcactctatgaattgatttattgtctaagaaaataacaccacaagtagggaaattgttacggaagcttttcactggaacatttccttcatattcccttttgatatgtttaccttgttttataggtttacttttgttaagctagttaaaggttcgttgtattaagacccctttaatatggataatccaaattgacctagaatctttgtgaggttttttctattaaaatatttatatttctaaatccgaggtatttcaaggtgtagtatcctatttcaaaggagatatagcagttttgccaaatgtagacattgttcaactgtatgttattggcacgtgttgtttacattttgctgtgacatttaaaaatatttctttaaaaatgttactgctaaagatacattatccttttttaaaaagtctccattcaaattaaattaacataactagaagttagaaagtttaaaagttttccacataatgaaagtccttctgataatttgacaaatagctataataggaacactccctatcaccaacatattttggttagtatattccttcatattaaaatgactttttgtcagttgttttgcattaaaaatatggcatgcctaagataaaattgtatattttttccatctcataaatattcattttcttcaaagtcttttttcaatctcataaaaaagggatagtgcatcttttaaaatacattttatttggggaggaacatgtggctgagcagacttttgtataatattacttcaaagatatgtaatcacaaacaaaaaaaactattttttataatgtcatttgagagagtttcatcagtacagttggtggacgttaattgtttgaatttgatagtctttgaatttaatcaagaaactacctggaaccagtgaaaaggaaagctggacttaaataatcttagaattaattgataaatgtctcttttaaaatctactgtatttattataatttacacccttgaaggtgatctcttgttttgtgttgtaaatatattgtttgtatgtttcccttcttgccttctgttataagtctcttcctttctcaaataaagttttttttaaaag

SEQ ID NO: 14701 - DNA, 1299 bp, Homo sapiens
agtgccaagtccccctctgatatttcctgtgtgtgacatcattgtgtatccccccaccccagtaccctcagacatgtcttgtctgctgcctgggtggcacagattcaatggaacataaacactgggcacaaaattctgaacagcagcttcacttgttctttggatggacttgaaagggcattaaagattccttaaacgtaaccgctgtgattctagagttacagtaaaccacgattggaagaaactgcttccagcatgcttttaatatgctgggtgacccactcctagacaccaagtttgaactagaaacattcagtacagcactagatattgttaatttcagaagctatgacagccagtgaaattttgggcaaaacctgagacatagtcattcctgacattctgatcagctttttttggggtaatttgtttttcaaacagtcttaacttgtttacaagatttgcttttagctatgaacggatcgtaattccacccagaatgtaatgtttcttgtttgtttgttttgttttgttagggtttttttctcaactttaacacacagttcaactgttcctagtaaaagttcaagatggaggaactagcatgaggcttttttcagtatctcgaagtccaaatgccaaaggaacctcacacactgtttgtaatggtgcaatattttatatcacttttttttaaacatccccaacatctttgtgttctcacacacaggcaatttgcaatgttgcaattgtgttggagaatgaagtccccccacctcccagccacacacacatcctttgttctcatgacagtaggtctgagcaaatgttccaccaagcattttcagtgtctttgaaaagcacgtaacttttcaaaggtggtcttaatttgttgcatatctatcaaggacttattcactcacctttccttttctgccctctatcaattgatttcttcttacctttcatcattcattccttcctttagaaaaactgaagattacccataatctcctcttattacttgagggccttgactatttagtttattttgtttactttacaggttaacacagttgttttgtctgattgcattttattaactgtgaagccgttgaaatgaatatcacttaagcaacgttgctaaatttctatgtgtttgaaatgtgttaatgaaggcactgcttatttgtagtcaccttgaactgacttaacctagaagctgtgccttcttgtgaaaaaaaaaaaaaacaaaaacaaaaaacagcctttaaacaagtttccttagtgtcaaaagtt

SEQ ID NO: 14702 - DNA, 62 bp, Homo sapiens
aaattctaagcaggtaaaactaactaaaattatattgaaaattatagtacaaagaaacattt

SEQ ID NO: 14703 - DNA, 5758 bp, Homo sapiens
aaaaagatttttaaacacttaatgggaaactggaattgttaataattgctcctaaagattataattttaaaagtcacaggaggagacaaattgctcacggtcatgccagttgctggttgtacactcgaacgaagactgacaagtatcctcatcatgatgtgactcacatagctgctgactttttcagagaaaaatgtgtcttactactgtttgagactagtgtcgttgtagcactttactgtaatatataacttatttagatcagcatagaatgtagatcctctgaagagcactgattacactttacaggtacctgttatccctacgcttcccagagagaacaatgctgtgagagagtttagcattgtgtcactacaagggtacagtaatccctgcactggacatgtgaggaaaaaaataatctggcaagtatattctaaggttgccaaacacttcaacagttggtggttgaatagacaagaacagctagatgaataaatgattcgtgtttcactctttcaagaggtgaacagatacaaccttaatcttaaaagattattgctttttaaagtgtgtagttttatgcatgtgtgtttatggtttgcttatttttgcaagatggatactaattccagcattctctcctctttgcctttatgttttgttttcttttttacaggataagtttatgtatgtcacagatgactggattaattaagtgctaagttactactgccataaaaaactaataatacaatgtcactttatcagaatactagttttaaaagctgaatgttaataggggacactgtaaagtatcatcaaaacctgaatagcttcattgtgcacaagtgtggagttttgtatcctcttacctggtaaactgaagggattgtttggccatttcatttatcttatcattaattcacaagatagttagaaattctgcctcaagcaaagtaccacattttgaatgttttcttagattttgattgcaagtagatatcagcattttttaaatgaaaagctatattatcttctcccttcaaggcagcctaaggatgttctttcccagaatcactccaacccttcttgccagaattcataaaagtacaaaattggagaatagatgatatcttagaaataagctttttttttttttttttttttttttgagacggagtttcactcttgtcacccaggctgaagtgcaatggcgcaattagggttcactgcaacctctgcctcccgggttcaagcagttctcctgcctcagcctcctgagtagctgggattacaggcatccaccaccgtgcccagctaatttttgtatttttagtagagacggggttttgccatgttggacaggttgatctcaaactcctgacctcaggtgatctaccctcctcggcctcccagagtgttgggattacaggcatgagccaccatgccaggctgctaattctcctttttagtgagttagggaactgagcctcagaaaacttaaacgatttctcagaaaacactcaagtgataaagtggccacattggaaaggagtttttatcttctcattgtcaggccagtgttcattgcacaatatcatgctacctcttgaatctttaaaatattcaattggcaaatgtttttcaatgtgatttactcatgtcttaagtgtatgaggaaagttcaaagcaaaatagaaaggaataattcaaactgaattgtccataatcagcttccagtctttcatgctaatcagcttcttaagagactgaagtatggcatacctacaggggaattccttcgcaccatagcctgtatgaacagtgttccctggagttctccagtgctcagcttgagaccttgatacacgggccatgagccctgtcttccccaatggaaatttatttacacttaccttatccctatggacttagtctgattttattggctaggagtctaacagtcctgtgtggatatacagttttgcccatgacaacaaaggaatctatccgaaatatctttttttttataataaacttccaagatttgctgtcttccagcacttgagttaaagtactagatactgcattttgatgaagactaaccccatctcatattctaccctaaagagaactgaaaaacctataataagttgttctggagccaataaacacagcagctctgttagatgtcctctacagccaagcactttcaatgctaacttgaactgcatttccttcctcaaatgagagattgacataattcagtactgtgagtcacttgtataagaaacctttgatcactaaaaataatgtaaaaattgggtttagtagcctaatacacataacgttcttcttaaaaaggaaaatggatggatgcctgacaaccctccaaaagaaaaaagtgtaagatagccattaagatgatgacaatttttgaaatgaacattatgatatttatgaacaataaacaaatttccgtatggaatgaattatccaaaaagagtataacaaaatgaaatccttaaaaatccagagtttatattttttttataccctcacttgtttgcactaactttatagtggaccaaggctgttaccataggaagggacaaacttccttgtaggcaactcagtgttagacgatgattgtggttatgcttgcaaagtcttgtgcttatcttttttgtttttacttaaaaagctaatttttaaagattgtagggcttgtattttacttgaataattgatatcttcctgtgtaatgatttgtgagatgagaattaatatttgactagttagaattaattaaatggtaagggaacacagggtactcttaggttaaataatgtatgcaaatagagtctattttcaactaatatggccacaggagccttttgagattcattgatattaaacacaattaatgaaattttaaattgttaacagaattgagaacttgaacaacacttttagtactgcagcatttttgtgccctaaagtatgtaatgatttataaatgtgccatacatacactacaacataacatttgctttgttatgcattttatttctctggggacaccattgcactgcagtgcacacgtatttataaacatttgttatatttttggaaacttgctaatatttattaagtcatagacttttctggaggacttaaaaattcactaaaaatctgattatgtcttaaatgttcagtttatctttggtttattaaaataaaaaaaaaatctaagattaaacacagtagatatctctggaggcaattttccaaaactcaacattaaaatttgtggatgcatgagatgcaatccttcaaagaatgaatctgaaatatatttttaatatttacttaatatccactgaagatatctttatgcaagacaagagtcagccatcagacactgaaatatattatgatagattatgaagaattttctctgtagaattatattcttcctggaacctggtagagtagattagactcaaaggctttttcttccttttcttactcctgttttttccactcactcttcccaagagatttcctaaagcttcaagcttaataagcctaatagtgaaaaataactgaatttaatggtataatgaagttcttcatttccagacatctttaattgatcttaaagctcatttgagtctttgcccctgaacaaagacagacccattaaaatctaagaattctaaattttcacaactgtttgagcttcttttcattttgaaggatttggaatatatatgttttcataaaagtatcaagtgaaatatagttacatgggagctcaatcatgtgcagattgcattctgttatgttgactcaatatttaatttacaactatccttatttatattgacctcaagaactccattttatgcaatgcagaccactgagatatagctaacattctttcaaataattttccttttcttttataattcctctatagcaaatttttatgtataactgattatacatatccatatttatatttcattgattccaagacatcactttttcaatttaacatctctgaaattgtgacatttcttgcaactgttggcacttcagatgcagtgtttaaaattatgcttgaataaatattacactaatccaactttacctaaatgtttatgcatctaggcaaattttgttttcttataaagatttgagagcccatttatgacaaaatatgaaggcgaaatttaaggacaactgagtcacgcacaactcaacatggagcctaactgattatcagctcagatcccgcatatcttgagtttacaaaagctctttcaggtccccatttatactttacgtgagtgcgaatgatttcagcaaaccctaacttaactaacaagaatgggtaggtatgtctacgtttcattaacaaatttttattatttttattctattatatgagatccttttatattatcatctcacttttaaacaaaattaactggaaaaatattacatggaactgtcatagttaggttttgcagcatcttacatgtcttgtatcaatggcaggagaaaaatatgataaaaacaatcagtgctgtgaaaaacaactttcttctagagtcctcttactttttattcttctttatcatttgtgggtttttcccccttggctctgatcactttaacttcaagcttatgtaacgactgttataaaactgcatatttaaattatttgaattatatgaaataattgttcagctatctgggcagctgttaatgtaaacctgagagtaataacactactcttttatctacctggaatacttttctgcataaaatttatctttgtaagctaactctattaatcaggtttcttctagcctctgcaacctacttcagttagaattgtctaatactgctctattaatcaggtttctagcctctacaacctacttcagttaaaattgtctaatacagcaatatttaaaaaaaaaacactgcaattgtcaaggatggaaaatgtgtgatttgtgtaaacaatttttaccaactttacattttcctacagataaatgtgaaattttgataagaagtctacgcaatgacaagtatggtacataaattttattaagaatattgagtataaagtactttaattctaaattataagaaaatatacatttgcacatattaatatagaaattcattttgtgtatatttaacatagcttttaaactattttacattagctacttcattatggtttcttgaacttctgaaaaaaattagaaatgtattaaacttatcagtaacataaaaacttattttgtttcacctaacgaatactgcgtttgtaaaaataaatttaatatagaatatatttttaaattaaatatttgaatataaaatagctctaagaaagaagcaaattatcactgaacatatttcttattatttctggctttgaattatacgtaacttaaattgtcttaaatgatacagaatattggagaatatgatactttcacataatatactatgaacctgttcatataactctgattgactactaacttctgttttatgtatttattaaagagctgacactgtagtttgtggtgagatgtttatttttctaacagagcttataacagttaggacaaggcatttaattaatgcatcattctgtttagtagtaggtgttaatcaatatgaaattctctgttttaaaataaaaatgtaaaaatctaag

SEQ ID NO: 14704 - DNA, 49 bp, Homo sapiens
tgctgttgaggtagcacatattttgatgttcgtgtaatgcaaagaagga

SEQ ID NO: 14705 - DNA, 3262 bp, Homo sapiens
aaagttatttataacagagacctctagtgctgcacttgtttacacacctttgaaaatctggaaatgggctggtcaagtggattacagagtaggaaattatgttttcattcttggcttctttaagtattccagggtttggggtcaacacgtgaagtgttgaattttaaaaaatacaaaaagcagactgatgtactggaaacagaaaagtatttcctccatactataagttgtagttgtttggaaatatatcacataacctttatacagaatcttcccatctcttaatatcatgtgttaacatgtttaaaaagaccttagtagtttgcaggctggaccttaattggacttattttctttgaaagtactttgttataaattcagtcagtaataatttacgtgtattctttttctctatagcacagaaaacagatagttaactgatgatagggataatactgtatttccttagcttgatttttggaaaatcaaccgaaaatagtttggccgtcttttctaaatgttagaaattcttcaacagttgaattaggtaagttccaaaacagtaatctgagatgcatctcagatctttattaccactacattatagtagtgtgtatgcagacaatcagtgaagtccaattactttctccatttggagacacaagaggaacatagagttaaatcttaggttaaattttaggttgacaccttaggaaaatgctgggaaaaaaatggttaaaacaaaactcatcatagcttcagaaaaataaaatgaggcatcttaacatgcaatgttctaaagttaggattgattatattcctaaccctaggttgaaccacaaaatttcatttaaaatgtttatatttggaaatatttgcatagagtgtaaattgttctgtagtttcatattttgtaaatatgagttatgttgacaatgtgcagaattctttatgctttgatgtggtagccaaagaaagaattacacttttttccaaggccagcagaaaattctcttttaactacattgtaattcttgttttcctctactaaaaattggccagtcccattttatttctagtgctatgtaagaaggtaattaggaattataacacagtaatgtttttatgttacatcaataactgaattttccctaaaaattagcctaatatataatagatatattatgaagcaaaacttttatttttgaaaaggcagaataattttcagtgaagtaagtgactaaagaaaaaaactatattattgtttatgcaagggtcttacaggaaagggtctttttttttttttttttgagatggagtctcgctctcttgcccaggctggagtgcaatggcacgatctcagcttactgcaaccgccgcctcccaggttcaagcgattctcctgtcttagcctcctgagtagctgggattaacaggcgcctgccaccatgcctggctaatttttgtatttttagtagagacagggtttcgccatgttggccaggctggtttcaaactcctgacctcaggtgatctgcccacctcggcctcccagagtgctgggattacaggcatgagccaccatgcccggctaggaaagggtcttactaggaaagatggccaaaagtttcatatgaaaaaaattggattataaaccagtaacttaaatattaataaggatattttatgttttaaaaaagtatttacacagaatcataatcagtgaaattgaccatttgaaaactaaaagtttttacctacctgctcaatttattaacatcattgctttggggactgtttgaatataggtacgtgttttcttgtgcattctctataatttcaggaaaagtactaatgcgaattctcttccaaaattgtgatgtttcttgtatttttgatgaaggagaaatactgtaatgatcactgtttacactatgtacactttaggccagccctttgtagcgttatataaaactgaaggtcttttgtgctttcagtttgtataaaaaagctttgagattaaaggaaaaaaaaaatttttacactgtggttataaatttcaagtttcttaaagcttttgtagacttgtaacagagtctttaaatttaagttggattttgtaaattgttttgtatattttatttaatgtactcttaacaactgatgtatctggctttaaaacatcagaattggtttgttgttttgtttggtacagaggagcatttggtagtgttcattttaattttattatataggagctgaaacatcaaatatatattttatctatcattatgctacacaatcagtgctataaatttttttatgcaaagaaactttcttaatgttttaatcatgtttcctcagagtgacactttttgttgttgttaataccaagtatgaacactctgcatcattattccatgaaccagttctaatgcaaacctatgtatgtccattagaaatggaagttattttttaatcaacaatgaggcctattataaatttatcagatgaatctagatagctttatagcatataaaatatgttaatttgtgttagcaggtgcacatttcaccactgaaattagaaatattttgacagtctgttctgcataccattctgagtctacttttctgtctttagaagaatcgtaaatttcagtgtcctttatttgactcagtgggatatagctgttataagtaatagggcacagatgtgcagtagagtcttgtttaatggcatttcactgttcattccctttaccaccgttataaaacttttctttattgtaattatcagtgcaaagctatgtatttatcatggtaaaactccagtgttagaatagttttttcttacagtatactttctttggttaggtttgtgtatgtgttgctgattacattagaacttgatgttaagtcatttatcacactctcatgagagcagtaataaaagtgtgtaatctaggagaaaaagttaatttgtcaaacttagataagcatgatgtttaggtcctatttttcaattttataactgttttattgcaacaatatttgtatttaagtctccattttaatgccttgtggtgtttttttatgcatgtcactaagttgtcatcccacataaattgatgtgcagcatagggtattaaatctacataatgattttaaaacagaaatagttgatggtaaaatgtaaatgttttgcaaaaattccttataaaaagttttgtagtaacatttcacttgtaaattttttttgt

SEQ ID NO: 14706 - DNA, 583 bp, Homo sapiens
ggtaacactggcattcctctagcctctgctggagtgcagtgaggattttctagcatgttgctgcactgttcccatgcacattattctaactttttagtaactcacacgtgcattcttttttcaacgctatccttagagtgaaagtcagaaaaaaatactagaaactaactcagggctgagcgtggtggcacacgactgtaatcccagttactcaggaggtaggagaatcacttgaacctaggaggcaaaggttgcagtgagccgaggttgcaccactgcactccctcctgggcaacagaacaagactccatctcaaaaaaaaaaaagtacatcataaaagtacatcatatgtgaacatgcaaaagcaatgcagccggaaagaacggagattttaatttttaacaaacaacaaattaaattattagcccttaaactctttcaaaatataaaagcagcaggccccaggtgagtcctgaaggaagaggctagcactctgtaaggcctccagtgtccagtgtctacaatgttgatggtccccttttgttcagtcaagttttaataaaaataaaactgttctacagtt

SEQ ID NO: 14707 - DNA, 428 bp, Homo sapiens
catgggcacctcagattgttgttgttaatgggcattccttcttctggtcagaaacctgtccactgggcacagaacttatgttgttctctatggagaactaaaagtatgagcgttaggacactattttaattatttttaatttattaatatttaaatatgtgaagctgagttaatttatgtaagtcatatttatatttttaagaagtaccacttgaaacattttatgtattagttttgaaataataatggaaagtggctatgcagtttgaatatcctttgtttcagagccagatcatttcttggaaagtgtaggcttacctcaaataaatggctaacttatacatatttttaaagaaatatttatattgtatttatataatgtataaatggtttttataccaataaatggcattttaaaaaattcagca

SEQ ID NO: 14708 - DNA, 1119 bp, Homo sapiens
aaaatgagtggacttcagactcatcagagactctaaaatatagccaccagtgctttgttccaggagtttggtgacaaagttttggtttggtgttttggtaaagaaagtttcaagtgaaatgaggttcctataaaatagatgtttcttttatatggatttccttaattcaaagatcatattttagctggccacaaaaccaagaacatatctagcaagaaaacttgaaaaagtataagcatttgttaaaaatgtgaatttcttgaatgaatttcacatttgtaactatgattttggcagaatagaagattggctcatcagtgaagcgcagtatcttagctctagattctattttcatgcatcacagaagtgctatacggttaggtctgtttgtgctcagtcaagaactaagaaatagtatgaattgtaagtcaagatgggcaactcagatggagcagcttagtctcacagtttgcttgtctatttattttatttagtgccaaatgtattccattttaaaagtaagccagagtgagtcaaggcatatacacactttctcacaaaacttcctaaacagatttgggggtttaatatgtccaactcctcatgaaatatattcaatccacttaaatatattccatctttttaacataaaatgtaaagcttagcacccatcattaatttatgtctctgttttatccagtggttaaaaaaggattctgcctctttagtcctcactgttaaataaaacccaatcatagtaagtgattaactagcaaaaagtaaagctatttatagcaaatttctagatcattagaaaagcactggtagttgtacaatatcagtgttgactttgaacttctttaacgagatcatgaattcttttcccttagccaaaacatgaaatatttaacctagttgtctctaaaagttttgtaatcatgagttagatatatgtcatctcctattcattgcttttatgtgatcaataaatcttttacaaacccaactactcatttccttcctagtaatactttgcctttttcactgtgtatggaatgaaacatgtaaagctgtcacaatcaatgtttttatctgataatattaaatattttttaactt

SEQ ID NO: 14709 - DNA, 260 bp, Homo sapiens
aagggcaattttaaatacaaaaaagaatgatgtttaaaattgctttgagtgattcatacagagatgtatatatgcatacatgtatatattcataaggaatataagcttccatcaatagtgattttaaatttgatttttttcttaactctaaatatttaagtaaaaagtaacaaaaactctgcaagcaagggaatttttttgtactgtaattttgaatggaactgaaaaattatgcacgaataaagtacttttctcatgcc

SEQ ID NO: 14710 - DNA, 885 bp, Homo sapiens
atttcgaccttgtttctgaagctcacttttcagtgccattgatgtgagatgtgctggagtggctattaacctttttttcctaaagattattgttaaatagatattgtggtttggggaagttgaattttttataggttaaatgtcattttagagatggggagagggattatactgcaggcagcttcagccatgttgtgaaactgataaaagcaacttagcaaggcttcttttcattattttttatgtttcacttataaagtcttaggtaactagtaggatagaaacactgtgtcccgagagtaaggagagaagctactattgattagagcctaacccaggttaactgcaagaagaggcgggatactttcagctttccatgtaactgtatgcataaagccaatgtagtccagtttctaagatcatgttccaagctaactgaatcccacttcaatacacactcatgaactcctgatggaacaataacaggcccaagcctgtggtatgatgtgcacacttgctagactcagaaaaaatactactctcataaatgggtgggagtattttggtgacaacctactttgcttggctgagtgaaggaatgatattcatatattcatttattccatggacatttagttagtgctttttatataccaggcatgatgctgagtgacactcttgtgtatatttccaaatttttgtacagtcgctgcacatatttgaaatcatatattaagactttccaaagatgaggtccctggtttttcatggcaacttgatcagtaaggatttcacctctgtttgtaactaaaaccatctactatatgttagacatgacattctttttctctccttcctgaaaaataaagtgtgggaagagacaag

SEQ ID NO: 14711 - DNA, 18 bp, Homo sapiens
aatattttatgcactgcg

SEQ ID NO: 14712 - DNA, 1592 bp, Homo sapiens
cagttgaaaatcaccttgtgctgctccatccactgtggattatatcctatggcagaaaagctttataattgctggcttaggacagagcaatactttacaataaaagctctacacattttcaaggagtatgctggattcatggaactctaattctgtacataaaaattttaaagttatttgtttgctttcaggcaagtctgttcaatgctgtactatgtccttaaagagaatttggtaatttggttgatgtggtaagcagataggtgagttttgtataaatcttttgtgtttgagatcaagctgaaatgaaaacactgaaaaacatggattcatttctataacacatttatttaagtatataacacgttttttggacaagtgaagaatgtttaatcattctgtcatttgttctcaatagatgtaactgttagactacggctatttgaaaaaatgtgcttattgtactatattttgttattccaattatgagcagagaaaggaaatataatgttgaaaataatgttttgaaatcatgacccaaagaatgtattgatttgcactatccttcagaataactgaaggttaattattgtatatttttaaaaattacacttataagagtataatcttgaaatgggtagcagccactgtccattacctatcgtaaacattggggcaatttaataacagcattaaaatagttgtaaactctaatcttatacttattgaagaataaaagatatttttatgatgagagtaacaataaagtattcatgatttttcacatacatgaatgttcatttaaaagtttaatcctttgagtgtctatgctatcaggaaagcacattatttccatatttgggttaattttgcttttattatattggtctaggaggaagggactttggagaatggaactcttgaggactttagccaggtgtatataataaaggtacttttgtgctgcattaaattgcttggaaaatgttaacattatattatataagagtatcctttatgaaattttgaatttgtataacagatgcattagatattcattttatataatggccacttaaaataagaacatttaaaatataaactatgaagattgactatcttttcaggaaaaaagctgtatatagcacagggaaccctaatcttgggtaattctagtataaaacaaattatacttttatttaaatttcccttgtagcaaatctaattgccacatggtgccctatatttcatagtatttattctctatagtaactgcttaagtgcagctagcttctagatttagactatatagaatttagatattgtattgttcgtcattataatatgctaccacatgtagcaataattacaatattttattaaaataaatatgtgaaatattgtttcatgaaagacagatttccaaatctctcttctcttctctgtactgtctacctttatgtgaagaaattaattatatgccattgccaggtagaagtttggaataattgtttagtctctcctattagatgtggacatttttgtttttgtttttgttttcagggatgaaataaaatatattatttctacct

SEQ ID NO: 14713 - DNA, 486 bp, Homo sapiens
agactattggagaaattaaaaccatcatccaagtatctttttcatgtttatttaaatgtaataatacagtttatttttcctgaaattatttactttttttttttactgtataaatgtcttttgggatgtttccttaatttatttaaataactaaaaatgcctattacttttgtcaaaactcataatttactactttgtatgtacctttctttctcctgacaaatgaggttattttatatgagtctgtctgagagtacagtaaatgtttttagtacataataatttaactgtttcaggtatttaaaaaattaaagatattatcaagggttttggacaaacatatgagccatttttttgtcattcaaaatagtaagttaaaaacaagagaacaaaagaaaaaaatagttaaaatcattaatttttttatttttcaaactttgtaatgttatgttttcaaataaaaactatctcaaaattttacaacca

SEQ ID NO: 14714 - DNA, 141 bp, Homo sapiens
attattattgttgttgttgcagaggttctttttaaaaactttggtttggttaatacacagaaatatctagaaatgttctgggactagttgagttgtatctttagtattcaggttgtgaaaaataaagatgtttggctatgc

SEQ ID NO: 14715 - DNA, 171 bp, Homo sapiens
tgggaaatgagacttgctctctggccttttcctattttcagcccatatttcatcgtgtaaaacgagaatccacccatcctaccaatgcatgcagccactgtgctgaattctgcaatgttttcctttgtcatcattgtatatatgtgtgtttaaataaagtatcatgcattc

SEQ ID NO: 14716 - DNA, 264 bp, Homo sapiens
tgattcagtaaggttaacaatgaaaattaaactcttaaaaagtgactgcaacaaataaaccttctactgagaaaatacatcacagatagaagattatctgctaagtccaggcatttttatggtgtagattgaaataatagtacacttctgaatttttatataaaatgtggttggaaggtgtactaatatataatttatcttaatttttctaactttgtatggataatctttctattcatatcacataaagaaatgcgttgaagc

SEQ ID NO: 14717 - DNA, 505 bp, Homo sapiens
gaagaaactgaagatggactctattatgtgaagtagtaatgttcagaaactgattatttggatcagaaaccattgaaactgcttcaagaattgtatctttaagtactgctacttgaataactcagttaacgctgttttgaagcttacatggacaaatgtttaggacttcaagatcacacttgtgggcaatctgggggagccacaacttttcatgaagtgcattgtatacaaaattcatagttatgtccaaagaataggttaacatgaaaacccagtaagactttccatcttggcagccatcctttttaagagtaagttggttacttcaaaaagagcaaacactggggatcaaattattttaagaggtatttcagttttaaatgcaaaatagccttattttcatttagtttgttagcactatagtgagcttttcaaacactattttaatctttatatttaacttataaattttgctttctatggaaataaattttgtatttgtatt

SEQ ID NO: 14718 - DNA, 1146 bp, Homo sapiens
ttgttcacattgttcttttatatatatttatatatatatataaaaattgggtcttagattttgatttactagtgtgacaaaataactacatcctaatgaaaatcaagtttgatatgtttgttttgaaagtagcgttggaagagttgttgggggttttttgcatccatagcactggttactttgaacaaataaataaaagctttctgtagttgcttcctttatcagaaaagaacatttgataccatggtatatcatttcctcttcattaaagaacagcttttctaaatgttgggggaaatgtccatagtcattactcagtcaaaacttgtgttctcatgagcctaaggaccattctagatttattacgtgttttttgtgtgtgtgtgtgtgtgtgtgtgtgtgtgtatccataaaatgcatatgtaaatttttttttgtttttaagcattcacccaaacaaaaaaatcacaggtaaacccatgtttctgagatgccattattccaagcaaaataagagataatcccttcaagttaaattgaaaattttcctgaaaccatacatttcaagtgaaataagtaattctagataggacaatttaaattggataattttaaagtgtctataattgcagtggtttatttgcaaaattcctaaaaggaaaaattttatcactgccatcacagcaggtttcctcatccagatgaggaaactagacaaatgctagtgtgttttaactagctaaacaaaactaagttaaatgaacatttaaaagtttccctagcgggccattccttagcaaaatgttggaatccctgttgctacattgactaaaaggtcatgatgaatggaatatgtaagacttggctcatagaaacctaatcagatggttagaggtgttggcagtttaggacctgctgtcataaatgtgtgaacaaccttttgtaacctaacctattgacctgcatgttttttctttaccccaattcattacatggaggctcaatcttgagtttgctttactggttcagcaaaagccaggaagaacaactttgtagtaatcaaaatgttatccaactgtatattgtttactttattgtaaatactggtgaacagtggttaataaatagttttatattcctttatgc

SEQ ID NO: 14719 - DNA, 1745 bp, Homo sapiens
aaaataattctaatgttactatcttaggaatagcaaattatgtccagtcatagagaagaaagcttcataataatacattcttacctaaagctcactgtcatgatgttaggtatttaaattcttaaagatgttgggttgtttattagtggtatttttatgttgtcttattttaggtaagcttctgtgtaaagctaaaaatcctgtgaatacaatactatcctttacaggcagacattattggtaaacaagatcttgccctccaatgaaatgacttacatgttttaaaaaaccgagttggttttattgaatttaaaaagataggtaactaagtagcatttaaaatcaagatagagcattccttcttgtatcagtggggcagtgttaccataaacacggtgtatatgttgttaaaccctatgaagagtaacagtgtagaccagactgcctctctcagatatgtgcctgatattttgtggatacctcccctgcactggcaaaacactatgcttttgggtgttagactgaaatattttaagagtatttaacctttccagtattctgtttcacgcttagatggaaatgtatcttatgaatagagacatattaaaataatgtttacatcttagaaaaaacatagatagtgctagtaatattacttataactgtaatatatagattcagaaatacattttcattatccaaaatcagcttcaacaaatggtttctggagacaaataatttgttttcattatcattgtataatcaggttaatgatttattttttgactaaatgtgcaatttcttatcactagataactttcagtatcagtggtggttacttattacttaaatcagaggaaggattttataaagattaataaatttaattttaccaataaatattcccataatttagaaaaggatgtcgacttgctaatttcagaaataattattcatttttaaaaagccccttttaaagcatctacttgaagattggtataattttcataaaatgtctttttttttagtgtcccaaagatatcttagataaactattttgaagttcagatttcagatgaggcaacattttcttgagataattacccaagtttcatccatgttgaatggtacaaaatatttctgtgaaactaacaggaagatattttcagataactaggataacttgttgctttgttacccagcctaattgaagagtggcagaggctactacaaaaagcaaccttttcattttcactaagagtttaaaagctattgtattattaaaaagtctttacaatgcttgtttcaaagaaccaacagaaaaaaaagctaagaaaactgagaactaacattaaaaaaattaaatttagaataagaatgatttctttaatttgtcctttttttctttggtctaaaacattattaaatttttgtaaatattttgatttaatgtgtcttagatcctcattattttaatacaggaaaagaaaagatttagtaatttcttaccatgctaatatgtaaagttcatgccatccaggcatttaagagcgatcctcatcccttcagcaatatgtatttgagttcacactatttctgttttacagcagttttgaaaaacacatactatgccaccaattgtcatattatttttagatgatgtaacatagccatcaaaattaatattatgtaatgcctaatacttagtatgtaaatgtcacgagatcatttttacattaaacgtg

SEQ ID NO: 14720 - DNA, 148 bp, Homo sapiens
ggggccgccggctggctgccggctccatgacgcccgtggggtcaccccccggccccgggactcagccagcctcgctcctcgctcctcgctcctcgcccctaggacgccaagggggaaaggagagggcggaaaaggaccagcgggatcc

SEQ ID NO: 14721 - DNA, 938 bp, Homo sapiens
ttactttttattatgagttaatatagtttagcagtaaaaaaaaaaaaaaaaaccacacctaaaatagaccactgaggagaccatagagcggatgctttcatgcaccctttactgcactttctgaccaggagctactttgagtttggtgttactaggatcagggtcagtctttggcttatcaataaattttaatctctgttaatcttacctgctttaaaaaaaagttcttgtgtgttcgtatctttatttattccctagtttgcagaactgtctgaataaaggatacaaggattatttcaatgttactgcactgaaaaacgtgtatgtattagtgtgctagattatttagcagaatattcacaagtttctgttgaccttgttgattgagcatgactactaaatattatgtaataaaaagcatttgtcataacagtcttatgaagtagttcttcgaatatagaaagttctataatttagcccatgaaatgataggtttttaattttcagaaatggagctgcatgtagaatgagatcacatgcttttatatgtgaaatattggttttagcaattaacagaaggcatactttgctaattttatggcaaaattttagaataacctgaatgattatttttaaactatcttgaagttgtatgtatatatctaatgggaaaatggaacaagagatgtcagtataattgttttcctattaaatgatctcataacaggggtgtttgtggcataaaaatcatagaatatatatcagtatcttttttacattttcctgatgagaatataaatttgaaatattctcagtaagtgattaaaagtacaatacataaacccaaatcaaagtaatgtgtttcttcagttatgtctgtgctgtatagaactgtcactaacattaaagaaagaggacacatttttcaagatctgtaa

SEQ ID NO: 14722 - DNA, 6613 bp, Homo sapiens
aatgcaccatcagacctggcctccaagaagagctgtagcgtaccatgcgtcctttcttttaagggcatttttagaattaactcagacctggaagactcctcagttcttcaaagactggctttcatttttatagttattatggaaatgttgtcttttatacttagttatataagaaaaaagggagttatgcaattaatatctatcagcttgggaaacgctttggtgcttttctccagttttctggtaccagttacttgtttataaactgaaccttttctgtatatagccatggtttcattcttatcagtccaaccctttgcctgaaacattgaatcttgttaaaccacagcttttagctaaaatgaggtatacctagatgtcaagtaagacagatccaaggtaactgggtaggaaatcttttgacatcttaactcatgttgagtttgtgctgtggtgtcaccagaattccagataaacacacagcctttcccatacctttttttttcttactataaaatattataagatccattgatgtccaaataataccaccaagcatctcttcacctctcctcctcttggtccacttgctaatgcccagttttcttctccatttccactttttcttaggctccctatttactattcattttgacttccttctgttttatttttttccctttagcattgcatgtgaataagaaaataatgtttaaagaaaaaaaaaaaaaagcaaacctccaaaacgtggacctaaccattgcttcacttacacttcacccacagctggagttcattcaactcttgcttttcacaaaatagtaaccaggagatgtttaatgtgcctgatttaatgtttttaataatcacagcaaatgaaaggtggtttagttataagtgaagcatggttgaataccagctggggagacactagggaagggagctttgtaagccttgattgcgaaagtccaaattttgatgtggggctataacatgacacccttggattgcgactggttttatacggcctgcctataacgttgaaaatccatgtactacataataattcagaagggctctattcactacacagattacattgttcaatcatcagctgctaatagcctaagatttatttttttttttttcttaagcctatggaaccggctttgctgttctggggggtgaaaatagactaactactggagaaacaaagagagaaagaaaacccagtgtttccataggggcacttttagccttcccacaacagttaagcactctttgactgctgaaggaaccccatggatgaggtgcaggctacttcactctttttttttcttttttgagacagagtctcacctattgcccagactgaagtgcagtggtgcgatcatggatcactgcagcagcatcctccgagttcaagctatccttccacctccgcctcctgagtagctgggaccacaggttcacataaccatgcctggctaatttatttttacttttattttaaaataaaagatgaggtctgtcttatgttgcccaggctggtctcaaactatcctacttcttcctcccaaagtgttgggattataggtgtgagccactgcacccagcctacttcactcttctgaattattctgatttattttcaacaacttttgtgaacttgcccgtgatacaaagcagatagtccctgaaccacagtcgtgcctccttgaaacaagccattctactgtgctaatgttttaatatcacatctcacaaataacaggggtgaatgtttctctctagcaatctaggcaggtgctggtgtttcatctccatttgaatgcttgacctcttaatgtgtgtgtgtgtgtgtgtgtgtgtgtgtgtgttcatgggttttaaaagaacagtattttacaaaaggtgtagcttttataagagtgcagaaaagggaaggatgtgtttttttctctcactatagtataagaatctattttggagaaaaaaagaaaatatgagggtctcgaagcatgatttttatataactagtttcagttttatctaataacttactttttaaatcaatatttatcaacaatctttccttgtatgcagtgctttcaaaagatggttttgagtgtccagtgaaacttatgacttggatatatggttgaagaatcaaaacaaaagcaaaaaaaaaaagcaaaaaaagaaaagagaaaaaaagaaaaaatgcaaatggaataattttctattatattttagacaaacatatcattttcgagtattttaaatactgaattcatagttgttgttttttaaattccaacagtaacagctgaatggtttaatctgactggcttcctaagaaatgtttaagactcagctttaaaaagaagttaacattcatatctctgttttgaaatcaaaaatcatatttcaaaattctttcctaggaccatctatgtgtctcccctcccctccacaaaaaggagaaagagtgcattaaaatgtttagttgggttttttaatttttaatttttatgttatgttttgctttgttttaagtaaacaaaaatttttctttctttactgcatgcatagcacttaataaaatggatttttaaaaaatccactagtaatatcagaatgtccagggagtgactgtcactacaatgatggtttagtttacttctgttccaccttttgattgaaatatttagttgttaggctgaaagcctcggcagttaagaacttgcctgagttttcttcgttcagcaacttgacagtttgactgatgtgcattatatatagctcaattatgtctgttttttatgctaagtaggaaaaccaaccacacacattagcaaaccggcctcaacatataattagaataaactgtcttcttgttctactcagggcctttaggtgtgttcattcacggtatggaaatacagtaaatgaaagattccaactagttgtcagtgcttcttgaaattccaaacagaaagatacattggtcaaatccaacacttggcttatcaatattaagtcttttacctaaaggcccagccgtcaccagacaacagaataatcaatctgcctgaaaatccctcctccttgtcctacactttttgcctgtttgggagaatatctttgtactccattctcctccctcagccagttactgggtcacccatccatgtgttcatgaatcaatcatcacggcctgcagagcacctgtcctaaggagggaaaatcctgtcacactgcctctccccattcgtgtgtggttttcttgatcggtgagatctgtctctgaagtcactgccagcctccctgggaacgtctatagtgcctcccctgccttatgtgatgggagttaacaactcagataagtacacctgagagcatttctatcaggtaaactgtcacttaaatggaggtgtccacatcttaattgtttctccttgacacatttctcaatccacgaagccaggagaggtagagtgaaaatcccagccatggatgaatgtactaatttgaaagccaagtgttaagtcggatgttttcccgttacactactactcagccctctcctgcggccacatcaacggatgcaagtcacagtcttaacacagcctgtgggagacaagcagtttgtgtgctcacagtatatattatagtaattagggtgacttagagcaaatactcttcagatcctatgtagtcagtgaaacaaaatggagagcgtattctgatagaaggacgtcgacggtgaatgttctggtggttgttgcctgttaagtaaactttagtgtgtaagttgagtttgtcattaaaatcataaaccagctgcggtaacagacaagcctttggctggggagttttaagcctcggtaactgctataaaactagccatccagttaggatagaatgtgtttctttctggttaaaaaaaggaaaaaccatctaagaaaatatatatgtatgtatgtgtgtatacagtggaattcaaaggaccaaagcaaaatttgaacaggaatctattaatttagaattttataagatatttattaataaatgttatttttaaacattccatttgaacagtattctgtaggatctacttgtttttaaagtgttagtccataataaactactatagttatgtgtattttcatttttcagggtttcaaatggctattctccatcatttggtggaaatgtttgcttagatctctgtgcatagacatttcaaggatttttattgctctgtgagttattttttaatcaacattctgaacagttttttttaaacatttatttctgtgtgttcatttttaaagtaagctctttcatttaggaagcagagttcagctaaagggaatcagtaactctaactggaacagctttcttgtagaagtgtaaaaacagcttcatctctgcctctctccaccccaccccaatttcctagaaagccttgcactattcagctcccttagtgctttttgtcccttcccgaacaatatgcagtagctttaagccattcaagctccattatgcagtatatctgagaagggaaaggaaacaacccatttaaatttgaataaaaccgtgcctatgcgaacagtagcaatttagaatctcttttctgcttttaaaataatttatatttaaaaattgcactttagctttttgatccctttgtatttctcttattctctttctaacctcttctctgtcctcaaacttgcctttgctctcctttacaataccccccacccctcctccaaggctctgagcggcatcatttaaaatactttacagatatttgcaccaggtacatttatgtgcgtccattggtagcacagctgagacctgtgtctcacatcagcctaggtgaagcctactacaagaatgccaaggagaagagccagtacactatatggtttatactctttatccctttattcatagcatgttttttaaaaatgttatattatgcaacagatgtgaggcagcagctaagctatacttaagaattttctctcaccttccaaaccaaagtgtcctgaataagccaggagacttattcttttgtgcaccctggtgcacatctgactgttgtcctagccatagactctctgaggccactgaaagaacagtggccctatcgatttcattcctaggtctcaaaaatacaatgttgccttgtaacataattagggacagcacctctatttcacaattataatctaaggtaggataagacgacacagcagcaataaacttacaagtaaaattcaataccaaaacaaacacaaagaaatttaaaaaacaaaaaacctagctcatcatgttgtgaaaatgaaaaagtgaatgtccattcaaaatattttactatttcttgtggagtttttcagtgatgtaatgcttgtagccaaattgcttaaagagtgtttatatatttttttccttataaattgtctattttttaaaaaagctatttaaccacagctgaagtggggggtaaggccaaattgccaacacttgttaaaagattaatactcttaagtggcactctgatacctttccaacttgtcatcagaaaggaatcaataattaccaactgttgtatttagaccaacttacaatatctagctcattagaagccaggatctagaaagctccttctaagccatttaagatattcttacattgagcttcatattatagaactttataggattggatattttacaatagaataatttagcctcaggactgagaatgtggaagctgaataaattagctttaaatacatcattaaaatcttatgcacaataagctcattagattctagttttctcctttagaataccaatgccacagacactacaggagataatgaaaggtatcagttgtgttgagtggagggagtttaagagaaaggacccttcccaaccagcagccagtagaaaatacaacctactcacctttttcccttctaagttctgctaaatcacatctgcctcatagagaaaggaatgttgcctttgagaactgtcttggagaacagataagcttgaaatgttctctctagagaggacatagggtttgggatcctctgaaaaggcccagaaaaatagctcagttcaaatacaatgttctaggacaattggaatataaatattgtccaaaaatataattaaaagaaaaaagtttagcactgtgtaaagtaagtgttaactgaggaagtcccaaaaaggtgctgtcactttaagttctggacttggggttctttgtatttgtaaacagcaaagcatttgtgtttgtttgtctatttgtaaagcaaccaccttccttattggaaggagaaaaaaaggggtacatacatgtaaatacttgctgcagcatttaatatgtttaattttgtgttaagctttttgttgcatcgtgaacacatttattgttaccaatggacaatgagttcattaagactgttcaactaggtcagatttttacatctctttctagcaagaagagacaagattttgtgcatttgtacaaatgttaatatcactgcaattccaatataataaagcactcaaatgcaaat

SEQ ID NO: 14723 - DNA, 1592 bp, Homo sapiens
tccatcagggaaatgagctgaatggccccagcaccatccaagttgacacagctaaaggaataaaaacatttcttaccacttgatttgttttccaagcaagtgctagaatttcctggactgcagaggatcgctgagtggggtactgtgtctcatagacatgcgccacctccacgtgagaacaagggtgaaggtgagggaagcccctcaccttgggtcttttgctgtgcctcctatgtatgtctggtttgctggaagagtgattaatacatctttaatttattaaaaaacaatgtagacctttaaacttcagtcttattggtaataaaagggaacttaattcatacaggtacttgatacagttatacattttccacttacaaaaagaagacaattctgttaaatgaaacgtgtatcgtaaaatgtatttttattttacccacgagaatgttgttatttttagcaaatagaactcaatgcagtgcattggttattaccctgtgtaccttgtccctcattttgctgtgacaccctgaaaaagctgaccacaaatgcagtattatcttgacatacctctgtcctcctcagtgctttttaatgaaatttcacctgccccttgtgttcctgctttggatagtttttgctcttaagcattggcattcttctattgtatggtatgtatttatagcaattgtaggatggtctgaaatgtccacacactttctatgcatacaaattttgtgaattcccaaagtatgctttggaattggtcatagtcttttcgtatcatgagtgtgtatcccagaagatacagaatgcggtcattttacctgaaattatttgagaacactggatgtatctggtctgtgtaaaaagttagcacttaccctcttttcttcctggccaagccctctgaattcatctgttaatatcaaattgtatttttgccacatttctgtattggtgaaaagcgaatctgcagaataactgtcaacgtttttcattcttgttttacaaacctattttttaaagtgagaataaggttggtttttaccaaatatttgttcctccttgacaaaagtagctctgtgtggataatatgattttattactacagttccagtcacttggttatatttatcttagcatgagcctttcacaccaagatttctatattttgtaacataggtgaaatatttaaaacatcaaaaactgtaaatctagatttttaaaaaatccaactgcaatgtcttttcctttgattgagatgatttgtgtaaactcaccagtcttgctttggagtgagcagaagagaatgactattttacgtggagcatcattgtgtgactgttgacctggacagtcccaagggctatgcagatggactccattggcacagggaggtttgacctcttccctgctattatccctcctcccaactgtacagatttgtttgttgtagtttatgtacttcttgatactgtcaaaaaattatctggaaatggttttattttgtgaagtgaacaatactttgtaatttatgatagtgtaaatggaaggcaaagcatcacatgtattaaattcttctgtctatt

SEQ ID NO: 14724 - DNA, 576 bp, Homo sapiens
ccccaatagcctgcgcgctccaggactgcctacccagcactaccccaaacccccagttccaaacccgagacttcaggcccgcccccttacgcgttgtctcattccaccaaattcagaatatttacacaatgccttcatgattttatttttctggaaattgaagtgtcaattgggttctcaatatttcatgactccaaggatgcattaaatatttatttgtggtaagagaagatacctgccgcggaggagggtggcataattatttttttttcaaaaagctattctggggccctggccccctggctcctgtcacagctcagcttgaactctgtagcctctcaaatgaagaaggtggctgttatttaggactctgtggaaagcaaatcacagtgctgtttttaatgcctgagaaatgcactttaggggtagacttataccttaagtgaaggagtgggggaggaagaagcattcttaagtagaagcattttaaaataaggcaggattgcttttaatgttaaactacaaaactgtacagcctattttagtgtggactattaaaacccttgcactgtaagg

SEQ ID NO: 14725 - DNA, 560 bp, Homo sapiens
caccaaaacataccctgatgaagatcctgaacttcaagaatgaagaaagaattcctcaccattcaggcagaaaaagcaagtcaccaagggacctcaaacttcctttccacaagattctgtgacgggaaacaatgggggagtatttccgaagttctgagtaggaaaaaagaatgactcaaatgtattattgccaaccaagtcgtcaaatctaatgtcaagttctcttaagcaggtaagaactcagaacataatacctgagtgccttcttaaggaaaccatttgataggaaagatgaaccaaataactcaatgatggatgagctggtagaaaaaaagctggtggtgaaccaaggtcaaactggaaattatagtcacagtatagatatagattataaatattacaaaccctaagatagctaataaattgggaatgggagaagggaggatataagagcactaatgccctcttattttcatagcagagacttgatactgtctcaacttttttcaaaaacacaatttcttaaattttttggtaatcttttaaataaacagatttct

SEQ ID NO: 14726 - DNA, 5217 bp, Homo sapiens
atctgggggctcccctgagaaggagagtgagccccacagtaacctaggtggggtcactgcccctcctgggttagcattttgcattagcacttcgaaataggacatctggctcccagcatccaaattaaaatgaaatacctttttaacgaccacaaaatatctgtgatgagctttgctcagaagtgacctgaatttcactcccgcttcagtggggtttctatggagttgtcttggtagcctttgccattttgaatttagagtccattttgtggctgactattctcttaagtttatgttggagaattaacattcgctgactcgaatgtagagaactctgaatgtattaaggataggttttgagtcctcacaggtgaccttactgagggaaagcatggcagagaagaaatgcagtctgcactttttatgtactttttaagtgtccgtaagtgaaaggttttgcttataaagcatgaattttaatatctagtcattaaactgcacaagtgcaaatacaagggcaggaaaggataatcacttagctttggactaagagggtaagagaggcccagaagcctttaagtgttttgccattactgagttacctgggtatgtagcgactggttcgtggttaggtgtaaatgttacttgcttgttcgactgtttcaaaacatgctaattccaaagccacttttgaagtctatagtggaaaatatagatggggtgaaagatataatgtattgatttttaaagctgtttataagccgtcccacgtataaaatgaaacattttaccttctctctttctaatgagatggccgcttgttaaatcatgaaaacatccagaattcaagtgccgcttaaactttgaagccatagataaatttgttagaaaagtaaaccaggattaaaagtttttaaaaatatggtagaatccttctttactttttaagtcttttatttaaaaaaaaaaagtcaaaaaaaggattccattgtgtaatttatttaaaaatttaatcacatgtttcgagggacttaattgtggtgtatttgtaaagggacacgaaggtaggaatcttttaatcgtgggttagcttggttaacagggaacgttttaataatcaagatactcagacaactcacagaaacaacttctgtaataactggaaatactgctgttatcgtttagccaacaattacttactggggacatcctttgtaatgctaacatggaattattcctggacccttctgcatccctggttttagttaacctaggatgcggaatgcctcctttacaacactagattaaacctagcatctggggtgggtacgtttaaacagtcacacatgtgcctgttaggttgtgaaagttttgaattaaaaacaagcagtagcagcagaggccacagaacttatgggagtcttgtatatcttccaggcatgtcggtgtaaacctgattgtctcgacattttctgtttaattgattggtgctgtgaggagttcggctgctcgtggtaaaacagcgtactccagttttaagtcatcgggtaaaataataggacagtgatttccatctgtgcttcagtacccactttgtgttcttttcttgaaaagtcatactaaaggttaatttcaagtaaaatgaatttccttccaagtagcctattagtaaaacacaacttagtgtttcatccattggggtgagcatatactgccctttgcagccctgcctgtgttctgattggctccattcatgagcaaaggtgattgtgagctgtatattacacaggtgtcgcccaggtttcgtaacctccactttaatgcagtaagccgcaagaatgacttctgcaagtgaaatgaggaagcttcactagcttgctccattggaaggtaaactgaaattttatacgttgaagcttaaaatctaaatttatgtatgtttggaaatggaatggacattaacataaaatgtattttatcaaaaaagtgtttagactttgaccaaatacatgttggtattatcatgttaatgttctctgtttataaaaattgagtggagatagatagactcggccattctgtgggctgatgagaattctgggctttgttttgcaccaggggtaggaaacagagaacatgtctgtatgttacttaatctccatagcaaaatcccaaacagcattagcagatcgaattgtttcttctaagacttcctttttctgaatgtgtgcacatcccttctcgtgctcacacacttgcccacacactcacttcttcctgcgctgtggctgctctaagcagggctgtgcatggtgcaaagctgcagtcagtgagcctggcagcctgtggtttctgttatggaaatggttccatggtgaaacacatccctgacccttcacagacttacacatttactcaccaggaggtggcagcggtgtgggaggaggagtgttgaccttggacgcaggagagacacctgggttctagttcaagtcggccaaggactgtgtgaccttgacaagtctaactggtctgtgaacaaggggcatttgcccttccagctgtaaacactgcccttctgtgcctgccttatgtgtgtgtgtgagtaaggagcaacagtcaaggaaacttttagggattcgagaagaaaatacatgtgggatcttgccaaggtgctgcctttaggatgctgacccctgcactaccttagaacatgttgatctgtgagtgcccaagcccctgagggctcgatctcatggggcagatgaaattctcttccttagaggaaagggaaaggtgaggccccagaggacttatctcagctgtacatgctctgcctgtggagacatggcttttctttgtgctgtggcagactggggctttggaagtggtgtatgtttaacttacctgagagtgagagatgtgtaggaagaatagctggaagaaagtgaaagatgagtgccagtacttttggcctgttatccagtagagagaaagtgacagtgaaagtaacgtgagagagaaagagtgtgtgtgtatatgtgagagagagaaagaaagagaaaggaatgcttgattgcttgttgttcactgggccagctctgaaatccaaaatcatgccttgataacattacaaaaccgtgatcctgggtttgagtgaatcctagagacattgttcttatggccgcctggtttccgcagcctgatcaccatatcgagcagacgtcaaggaatcagagtgaagtacggagccagggagggaggtgaggccccgtgtagtgcctgtcaccactgtggattcacctgcactcaggtgtccactcctgtctcccaggcccaaagcagcacatggtgcaatggaaaagtctcttatgtagggatcctccttgtgtcctggtgccagaattagatttccagtgtacttcaacgaaaacctctctcctttatagttgctgtcatctttcatgtataaacagaaaccgtctctagcacaatatatttctgaatattgtttctgtttcataagagcacaatgtacatggacctaggggagctgtggtcccaagtgtcattggaatttatattttaggaataggctttgcatgttaaaattcacaagttgggaaactggtatgaacagatctgatttcttacagagaggcatgaaggaataggcaggacttaacttggggtgggaggagatgaataagggagaatgggagagttggggtctgacagttaccacctgagccccaggaaaactgttttcattttcacggctgtctcactgggggcctgctttcctcaaaggaactgactgtatgttgagaggcaatgccttgtgttggcatggctttgccactttaaaagtgccccccagccaaggagaccaacaggaaccctgctcatctggtagggctctttccttcagtaaaaccagctgccagcctgagaagcctgtctttcccaaatgcaggcagatctgagaggggctccaggcacccggcaggtaaatcacaaagcaaacttgggtgtccttggcagcggggaggaagcaggagtgccccctcaggccagagggcagggccaacctcctcactgtgcttcaaggttgtagaaagagcacaattaatgcttaagcgatcacagacccctctcccctgcagtgggtgttagctccaaagagatgccattgctgatcacccagtcttcggagaagcctaaaatttctttgaattaaaaactgatcctttttcataaagacccagtcacttctcccagtttagtgataacaggtatgacacaagaagctgaagtcttttagattttatagagagtaattctgaaacctgccagaatgctggtagcctgtggtgtccatggcaatgggtgtccatggtaaaatatctatagcttctgctcactgggcaaatataaaagacaacatattatttaacataatatgttgtcttttatatttttatttaaatctggattacgaaaatatagtacccatgagcatttcatgttagaaaccccatttaaagcactataaggctgaataggcacaagcgattaaaagtagatgccaggccacataaaaataaatgttttaatttacttagagctgtattcaagttgtttgataccagacagaaagctgacagtctgttctttgtaaactgcctttccctgtttttctgttttgttttgtttctcaagtttcattttttactaagccccttctgacacctaggcagataaagataagagtagtgcgcagtacaaatgtcagctctgaagaggaggaagtaaatcttcaatgctagggcagatcttcactatccgtgatccagtcttaatttgagcatgagagcaaaatttagtcatctacacaagaagcaaaagcaaggaatagttgttgggtttttgttttttggttgttgtttttttttttttttaggcaagaagtgttgccggtagggtatgtgtgctttctttgccttcctatttcctttcaaagaaatctcttgtaaattacaaaactgtgaattgggttgccaaaaactgttgcccttcgttagatgcttcaaacagtgtaaatcctatactgcaccctgtccacctctgctccctcctccctcccctgagagtgaggacctcatccgaccatgtaattaccattcgcttgctattaaagagcctttcaaactctgg

SEQ ID NO: 14727 - DNA, 1657 bp, Homo sapiens
gttttcttgtcttgacaagatgcttgaaaaaccaagaggatatgaaaatctgtctctggagaaacaaagacgcaggcatactcagccagaaatctgagttttgtgagacttggtaatacagagatggacaatcgtactggggtaaaaaaaccctgctgaagagaggacagtgaccacagaactcagtgtaccaaacatgcatacaaaggacacacagggattttgaaaatgctgcacatcccttaatagtcatctacataggtaatactgataaacattttgtattcagacgccaaagttaactgatttaaaagttgatttactttttattaagttctccagagctgcacaactagttatgttttgatttgttttgttttttaatttggggtctctttgttttccccaacataatgttcataatgtttctgcattcatctgttcttaaattgaaaaacatataatttacttcttataaattgaagtcttaaatgtgaaaccaagaaatgtaatcaagcagtaaaaacatctgaatgtagaccatgatctcaagttcttccattttctcccccacgagtggaaaatagacttctacataggaaagctaaaatatgttaatatttttaaattaaaggtttaatatcagaatgcagtccaaagagcaaatcatattacataattacattttaattaaatatagaatattctactgaattgcaatttattaaatattcttatcctcttaaataaaactgctcaacagttaatcagcagtgaatcatcttgcagctatgcaatttaaaaaaaatacagattaccaatttcaagtgctgccagctaaaataactgttttaacgggtatcttttgtttgttcttttcacttaattattttattgtgctttgcatctccaggcagttctctcacatttgggtaaaatgtttagcaggctgtaaacttaagaaaagggtaaaataaaattttctggagaggaacttggaatttgagggagattttatatacctttaaaaactgtaatttaattgggatgccaggtttatagcaatttgcaactttaattttccagataatctggaggttagcatttgataaatgattttttaaagtagatatgaagattttgttaatttataatttattcatgtgttattactgtaattgaaaatgttatagacacttttaaattcagtttgtgtagaaagaaatgtgttaaacaaaattatgttaataaatattcccacataatacatctgaatggttaaaaatactggaagagttgtcagggctacaatagtgaatgtccttttttttaatatcaaaaatatcgataagtaggttttgtgttttcaacgtagggaaaatgttatcagtgaataggtggtgtactttacttggtataatttaaagttgcacagtaagtactgtttccttattttaatctttctttactcataatgtatttaagaatttgctgttttatttaacgctgctactcttaatcttctctaaatttttccccctactttcttgcttctgtttcacattttttaaaagggcaagtacaggagcaactgctgctacccagaaaaatgtgtgtattataaataattaaagagtttttaattgctttctgtatg

SEQ ID NO: 14728 - DNA, 170 bp, Homo sapiens
ggacaattttgacaacttttgaccacttgcgctaataaaaaaaaaaaaaaactactcttatgtccactttacaaaagaaaacagcattgtgattactcccagggaccgtattttatcttcagtggctgcctgattttacccccacaattaaagttgaaggaatcctgaac

SEQ ID NO: 14729 - DNA, 1751 bp, Homo sapiens
gccaggagggccagccagaggtctggtcaggctgtgaggccttggccatctgtatgctagagaggggtgaggaatggatactgtctaacagtctctgatttcaacactaacattccatcttctgaaattctgagattctaacatccttgttttagaattctaagtttccaacattcctcattctaggatcctaggagtggaattttccattttctaatatactaagccttacagctatcttagatgcgatctgactcctgtgtgactgtggagcacccagggacgtggttttagagtctacctaatatgttaaggacaaggaaacctctgagtctacctaatatgttaaggacaaggaaacctctggacagtggtatattggggaattttttttttttttttgagacggagtctggctctgtcacccaggctagagtgcaatggcacgatctcggctcactgcaagctctgcgtcctgggttgacgccattctcctgcctcagcctcccgagtagctgggactacaggagctcgccaccacacccagctaatttttttttttttttttttatttgagacggagtttcgctctgtcgcccaggctggagtgcagtggcgcgatctcgactcactgcaagctccgcctcccgggttcacgccattctcctgcctcagcctcccgtgtagctgggactacaggcacgcgccaccatgcccggctaatttttgtatttttagtagagatggggtttcaccgtgttagccaggatggtctcgatctcctgacctggtgatccacccaccttggcctcccaaagtgctgggattacaggcgtgagccaccgcacccagccagggggaatgttctataaccagctctgtaaaggaaaagcactgatgtgtggtagtcaccaatttctgtggtgtaaatactcccaccatggttgatttcaagccaccagtggtttaataaccagctcataaatctcctaaatattttacagttgactctcatgagctgattggagtcagctggaacataccactgcctctagactaaggtcagcagatttagcaaatacagactgccccagttcattgaattttagataaatgaaataaatctataaggttaagtatgtccccagaactgcatggaacatgcttaatctaaacaatgatttgttgttcacctgaaattcaaatttagctgggtgtcctgtatttcatctggcaaccctacttcagacccaggtgtaaggtacatggatgtgctttggtcaaggaataggccaaggcagagatccatgcctgcatgactcagtgggtttggtgcacaggcacacacctccacttgttatataacctgtttgtgtaagttcatacttggtctgagccactgttgtctgtaaaaggtaattgtcctgctaatgctgtacaggggctcttggggttcggctcagctcaacatggcttgacatggtgggcacactggcgcccagtaagagagagagagagccaaagctgtccgttttgcagatggacaggaaggagccaggacacagctcagcttgctcacgcccagagagagaaaaagttaagctgctgaccctgaaggcaagggagagcaggctgcacagctgtgtgtggaagccacgggctcaagcagccaaggcagggcggacagtgtgagagagctagtgtaagctgttgatgagagctgttgctgaataaaaccatattcacctgcc

SEQ ID NO: 14730 - DNA, 381 bp, Homo sapiens
ccgttggatgtgggtaaaccctgtggtccaccactcatcacctcatcaccgaggatgacagctgaaccccaagcctctggggcaggtctcatgtaccccaacctgggtcagcatgactgcagaagcatccagagcctccctgccccttccatgaagggcccacccaagactgtgctggggacccagtgtgttgctgggtcccctcccagctgagctgtgactgctgagtactggaaggaggttgccagggtctctgctacctttgtctgcatccctcccttgctccctgctgggtggtccctcacccaggcctccaatgtggttggccctggggactcattacttctggtagctggctttctataaaaatgggtcaaaccc

SEQ ID NO: 14731 - DNA, 1887 bp, Homo sapiens
aaggggtctggcccgggcatccacgtagggggcaggggcaggggcgggcggagggaggggaggggtgaaatccatactgtagacactctgacaagctggccaaagtcacttccccaagatctgccagacctgcatggtcaagcctcttatgggggtgtttctatctctttctttctctttctgtttcctggcctcagagcttcctggggaccaagatttaccaattcacccactcccttgaagttgtggaggaggtgaaagaaagggacccacctgctagtcgcccctcagagcatgatgggaggtgtgccagaaagtcccccctcgccccaaagttgctcaccgactcacctgcgcaagtgcctgggattctaccgtaattgctttgtgcctttgggcacggccctccttcttttcctaacatgcaccttgctcccaatggtgcttggagggggaagagatcccaggaggtgcagtggagggggcaagctttgctccttcagttctgcttgctcccaagcccctgacccgctcggacttactgcctgaccttggaatcgtccctatatcagggcctgagtgacctccttctgcaaagtggcagggaccggcagagctctacaggcctgcagcccctaagtgcaaacacagcatgggtccagaagacgtggtctagaccagggctgctctttccacttgccctgtgttctttccccaggggcatgactgtcgccacacgcctctgtgtacatgtgtgcagagcagacaggctacaaagcagagatcgacagacagccaggtagttggaactttctgttccctatggagaggcttccctacacagggcctgctattgcagaatgaagccatttagagggtgaaggagaaatacccatgttacttctctgagttttagttggtctttccatctatcactgcattatcttgctcattcttcagttctctactccctcttgtcagtgtagacacaggtcaccattatgctggtgtatgtttatcaaagagcacttgagctgtctgaagcccaaagcctgaggacagaaagaccctgatgcaggtcagcccatggaggcagatgcccttgctgggcctgggggttttccaagccctcagctggtcctgaccaggatggagcaagctcttcccttgctcatgagctcctgatcagaggcatttgagcagctgaataacctgcacaggcttgctgtatgacccctggccacagccttccctctgcattgacctggaggggagaggtcagccttgacctaatgaggtagctatagttgcagcccaaggacagttcagagatcaggatcagctttgaaggctggattctatctacataagtcctttcaattccaccagggccagagcagctccaccactgtgcacttagccatgatggcaacagaaaccaagagacacaattacgcaggtatttagaagcagagggacaaccagaaggcccttaactatcaccagtgcatcacatctgcacactctcttctccattccctagcaggaacttctagctcatttaacagataaagaaactgaggcccacggtttcagctagacaatgatttggccaggcctagtaaccaaggccctgtctctggctactccctggaccacgaggctgattcctctcatttccagcttctcagtttctgcctgggcaatggccaggggccaggagtggggagagttgtgatggaggggagaggggtcacacccaccccctgcctggttctaggctgctgcacaccaaggccctgcatctgtctgctctgcatatatgtctctttggagttggaatttcattatatgttaagaaaataaaggaaaatgacttgtaaggtc

SEQ ID NO: 14732 - DNA, 282 bp, Homo sapiens
gctgcctcatcacgccactggagtccacacttgaatttgggcagctaccacgggtctgccatgctctggaggagcaagggggccacatccccaccccagctgttacccagcccggggcaggtgcagcccttcctccctgtctctgcatctgactctcttttgaggtccctgtatgtctacctctgacttctgtggtccctctgtgtctgctctcatccattcctcttactggggcctggggctctagcccaaggctcagaggagccaataaacctgtaaatg

SEQ ID NO: 14733 - DNA, 65 bp, Homo sapiens
ctggagggggattcaatgtgtctgtctcatccaataagcactcatgacctcagccccatactctt

SEQ ID NO: 14734 - DNA, 13 bp, Homo sapiens
gccatgctcccct

SEQ ID NO: 14735 - DNA, 860 bp, Homo sapiens
atcagagcaggtttgttaaccttcatacaaaatataaaggcccagaacagatgtagcaaggaaatttcaattttccccaaggagaagggtctgccaacccattgtcagctatatctctcatattctaccctttggttaaacccaagaggagtttagaatactctaatactcattcagtatagaataactgagcacctagtatgtgcctggcacagagtatgcaacagtgactaaatagtatacggtctctgccctgctagaacttacagtgtagtgggggagatagaattgcaaacaaaaagtatctgagacagacctcagtcaatatagaagtttattttgccaaggttaaggatacacacccagaagacaggtctgtgcctttctccaaagatgattttgaggccttcaacatttagtggggaaagggtgctaatggggaaagaggtgtgggtacataggaggcaaacagttgcatttttttgagtctgatcagcttttctcatgagagaaggggtagaggaactgtcacttatgcattcacctagctcagtggatctgcacttttacagaaggtaaaataaacatagggcagaggaagcaatcagatatgcatttgtctcgggggagcagagggatggctttgagttctgttctttgtcctgtacctattaagagaagctatcaatatactttgtcaggataaaattcaacagaactgttttagactaaagattttagggaccacaaggaatttcccagtgggcaaattgtgagggaggtatttagcttttaaaaaaatctttgtagctatctcatttagaaataaaatgggaggcagattgcctgatgcagctcct

SEQ ID NO: 14736 - DNA, 1171 bp, Homo sapiens
agatagttcccctgagaccacttgtaaataggttagattggttccctgtggtgacctagagaaaaaatagacttgtttctgctctcatttttgtcatcgtctgacttgaagattcagacaccttctccccaggagatgtatgccatcaaattgccagtcacctctttgtctctctcttctttctgagtatggtttctattctgtgttttgaatttttattttctaatgcagtggaaaagaaacagatcatcctaaatgaggaggtaacagggaaagcactggggttcggtttctgcatcttctggatcaattcacggaacagagatcgtggattacatgggctccttcttggtttttgctgctgggcaggacttgacttagcattatccaagcaccagtccaagtggggttccctgttgccagttagagaggtgagaatgtttggactctaactcaccgattgctttgcagacaaaggtcttttatttctcctgtcctatcttaagagtccaaatgtctctggtgatgttcctaagacccttgtcccagatactctaaatgtgaatgtatgagctgggggagtcaacccagcccaccatgccttggctgatgataccagaggcagagagtgctggtctgtctgggaagcttagcaatgtatcttcaaatttatttttgtttttaaaaatatttcttaaacatgctgtcccaacatttgtgagttgtgtcacaagtgagtcattatcaatggtagataaaatatcaatgtttgtgatgaatttactgtaaaaaaattaaggtcaatgaaagccattctgttatttttagcattctcacttatttagactctattacactttcttggatgagaggggagagtgtggtgttagctagtgagcagaggtctgtatattgtccttgccccagcctgcaatctgtggatgcccaggggaaggcatacaggcctcatccaccaggcaatagacaggagagaggtgagaactatttttagaaggaggaaaagtagatacgcaaattgtcacaactaagagtgataatttggtagctctgtatgtatgctggttccaactgtttaatcccttctgtctttctgttctcacaaagatggaaaagatacaagagcttgccggaaataaagctacatctatcc

SEQ ID NO: 14737 - DNA, 260 bp, Homo sapiens
gcaaggcgtcagaggctgctattgctttctgaggtttaagtgtcccctgtctgtctgctgctcccaggctgttactagccacagatccacagcaggggaccatatgtcgaactgtttacatggatgttgctctaagtgaatgtttcgggatgccgaaatgatgaaatcacagccatagcagggatggctttccaggttggggtttcaattgactacttttatttcagtctgagcctgattaaaacatacagtgaaccttc

SEQ ID NO: 14738 - DNA, 1579 bp, Homo sapiens
acctggcatgaaccagatggtgccagggagtacgtgacaccaagccacctgtgtggcaagacgtgcagtgagggtgcaagggtctctcagaagttgcatcattagccagtagtaggtgggtcacatagtacctggtgtacacatcggggtgggttgatatatggggtgagaagtttgggctgatcgccagtgatagtaaacaaaatctgtgcagagggccttagcatgggatgtgtccagtattgaaaaggctgcactgccaaccatgatttgtgagccttctgggaaattttgttattaaaggaatatatagtgtcagacggaagttataatcatcttggaggaaccataagaaaaggtgtccagggtatctatataaagagggttaaatttttttttaacttgctggttaaaacattttagaaatattctagagatgggcaggagagtcaaagggcttgcttgccccagcagagttcccagcagacagccatggctcttcccagcagcctgtgcaaattctgatgatggccccacccccgcacacgcacacgcacatcatgcttttccagctcatcacaccccgccccactatgggcctaccattaatagtgtataacttggaggttaaaagagccttttggacagaaaactgggccaggaaaaggcatctcagaccacaaatagagaatttgattcctcatttgccacataagtcatctgcttagcttttcctttcctttttttttttttttttttttctggaggcagagtctccctttgtcgccaggctggagtgcagtggtgccatctcggctcactgcagcactgtctcggctcactgcagcctccgcctcccgtattcaagcgattctcctgtctcagcctcctgagtagctgggactacaggtgtgcaccaccacgcccggctaatttttgtatttttagtagagacggggtttcactgtgttggccaggatggtctcaatctcgacctcgtgatccgcccaccttggcctcccaaagtgttgggattacaggcgtgactcaccatgcccagccacttagttttttcttattcccacctttctatcccatagaacactcttttttatcttccctgaaccatattgatgagataaatagggctgggggctgggccccgctggtcactcaacagagtatttcccttggccgagatggaagttttgtcccaatagatgagctgctgagcatcaacaaggtgacatttttctgctgcccatttgtgtcctggagacggtggtaccctgaaggcagaggccagctgccgcaagacagcaatgacagtccacctgccgacctgattcctgcatcatggaataaccacatggctaccttctatcctctgttcccaaatggtggtggcacttatcctgaagtcgtcaatgatttccctttgaaactactttattttactaatttaaactattttgtactgatgtagccctgaggtagttcatgaaaatgctgtgcactcattccatggaataaatgttggaaagctgatcttttctgatataaaatgttgaatgatatt

SEQ ID NO: 14739 - DNA, 842 bp, Homo sapiens
ttcaagtagagttgtttggttgagaggaacatccccatctcaaggccgaacctgtgtgaacctcatgccaagcacagatatagggctggcgcaggtgcttcctaaagctcaccttcctggagatgacatgcatagaaagaggggttgggactttttacttcactaggagaacttgtaacaccatggggaagtcagctgaaacttgtcttgttttgccaggaaaggaagtagttgcctttggtcatccatctgctaatagtcacagaatacagtgaaatgacatagttttgggttagattttataatgcaaagattcagatccaaaataatttcataccccattttttcacagaattcttatatagtaaatgtatcaagtttaataaagcatctcattgtcaaataatatcttggattttatttataattagagggatttatgagtgattgctctacattatttcttcaaaggaaaggaaaggaattgaagactttgctactctctggtaagacttgaatgtgattattttataaataaaagaaccactatgaaactttcatgtgatttgttctattaagctaaacgtggaagaagggaagttttctagtattgtatgaaaatgtttaaatattttcaaggaagctagtacattaacatccccttttcattaccccattgggtggcaccttttaaaaatccaggttattaaaggattcacactttattacagttaaaatttaaggtttttatgtgtaagaagtgaaagaaactttgctaatttcaagttcgaattacagttgtgagattgatttatttaaataaaaatatgcctttgccagtt

SEQ ID NO: 14740 - DNA, 2599 bp, Homo sapiens
cctttgtttcgatccttaagactctgaaatctggtgactttgacactgaagcggaagagccaatgaaggactgcagtatttgtgtgcccgattctgtaaacacacacacacagagtatatatgtgtatatatatatagatatattcaaaaacattgcatcatttatatgaactatagggggattattatatgtatattttttgctataagacatgtattgtttctaggatcctaacctgtaagccattgaacatgttgtataaatacaccaggtgtttttaatttaataaggtggcatgcagatacattggatagtgttaacatcacatacatttgtcatttttaaggaagttttctaagagccctcaattgcctgcctgtattaattttagttttgagtcaggatttgtaatggagtgggaaatgtgtttctctggagaagggcacatttatctaggggcatttcaggtttccaaagaaaggaatgtatgcctgggaaagacagcaggagattggtgaccggccctaatggtgcatgaaaagcgagtgataggctgttagaatgtattaggtcatgggctaacattatttccaaaattgattggctggttgccaagaaatatatatttgtcactagggcataaccgaagaatcaagtgatttcttgccatccttgcgtagtcctcaagtcttctaatcatctatgtgtgtatgatggatgtgaccatttatatgtcatgtgttgaaattaaagggtgtctggatgccatgttaattttattgagcatgagaaagtatttgaagaaactgttgcacaacatatgatgaaattttgatttctctgaatctcagagtaatttaagatgggcaaatccaatgagttgatgtaacccatctacattttgtggctatttcatgtataaaatgaaaggctttagttatttctagaggagtcccatccaacactatttggcgactgttaatatgttataattattagacagtggaaaagcctttattgactaattgatttaacctcagtccaaagaacagtctctatacttgccctcatttactgataggctgctactagttaccatttgattgtcttgactttcgtcttcagttgaattggtgaaaacatcaacaaaaacaaaacccactgtgtcttaaaataaaatgttctgcattgtagtcaataaagggcttaagatgtaaaacaatgcattttctctctcaagatgtcctgtgttatactttacaattagttgtatcaacttcagattcattaaattttaacagctgtatttagttataatttttgtatcttacaacagtatatataaagactattattaatagacaaaagcaaacccacgtttttgacaagccagcatattgccaatgctcgtcaaagacatttatgtttcttttacattcatgacagctaaagtattaacttggaatttttttttttttttttgactggaaaatccctagttgtttgaattaactgaataaagtgcagggcgtaatagtgactggctgggggcactgggcctttgtgttttttttcattcctgtgtttggatactaatcaccctcgtatctgcagcctgaggtagtcaggtcattgtttcaatgctgcccttggaaagaagactttgacttaggtgctttgggatctaagtgtggtttgtgactatccccattatttaagcatttgggggtctcacttttgcttatctgtaacacaaagaggccatgtagtatagtgagcagggttgagaatcgggaaaactagacccctgccactaacaggctaggagactttgggcagtaatgggaggcactgagggtttgcaaatactttcctacttgtaatctcattgattccctgctctgccctgacaggaggggtagggaaaatcagttgacgttgcctggtggttcctaccttctgtaaaacgaacagattccttaagattagctttaaatcccttttcagttcactgttggttctcatctttgaaagagggcagcataagggaaatgatggagaagggagaattgtggatggttatttatagctcatgattcatccaaggactgagttattctccccatgaggctaaccggcctctttcccaacacttaatcatggcagccaggatgggtgaatgatgaaagctcttctgcatgagccggtttcatcatcttgggtgggttgattacaagtttgtgtggcattcctttagctggggattagcttaatctctgtacatttttctcatttctaattgaagaagaaagggagggcagagaggacagaaaattacttgggtttactaattcaaagagccatctctgatgggagagggtgaggaaatcagctgaatggttggcctgcatattcttttttaggccacaggctacagctgagcaatggcttagtctaatgattgggcacaatgaggatttaccaagtgcttcaatgagagcagtcctgtttcattcacatgggatgttttcaattggttcttcaactaagctcttgcagagtgagatgacttgaaataaaaatgttctatgaatattg

SEQ ID NO: 14741 - DNA, 323 bp, Homo sapiens
accctagggcagtgccagtgctaggctgagcaccatcagctctcccaggtccttgtcacctgcttgggcacgtgcatggaacccgagccaacttcaccccaccctcgtcattacctgggagatgcacaagacaaatgttctaatgactgcatgcactgcttaagtattggccaacacgaactccccagttattcatgccagccaggaaggaaacgccttccttccccaccattcccagccctccttcccactggccagcacctgaacccagtgaacacaggcattagtggtccagggtcctggcttggagccagtgagtagac

SEQ ID NO: 14742 - DNA, 148 bp, Homo sapiens
cagctctcaccctgtgctgcaggtggccctgtgcctggtgccacttctcactgcttaccagggcacaaggacaccagtggttcccaaaatgggtcacagcaggatggcctgcatcagattcaccagggagggctataagaaggcagac

SEQ ID NO: 14743 - DNA, 1014 bp, Homo sapiens
actctctattgaccaccagttaacgtattagttgccaatatgccagcttggacatcagtgtttgttggatccgtttgaccaatttgcaccagttttatccataatgatggatttaacagcatgacaaaaattatttttttttttgttcttgatggagattaagatgccttgaattgtctagggtgttctgtacttagaaagtaagagctctaagtacctttcctacattttctttttttattaaacagatatcttcagtttaatgcaagagaacattttactgttgtacaatcatgttctggtggtttgattgtttacaggatattccaaaataaaaggactctggaagattttcattgaggataaattgccataatatgatgcaaactgtgcttctctatgataattacaatacaaaggttccattcagtgcagcatatacaataatgtaatttagtctaacacagttgaccctattttttgacacttccattgtttaaaaatacacatggaaaaaaaaaaaaccctatatgcttactgtgcacctagagcttttttataacaacgtctttttgtttgtttgttttggattctttaaatatatattattctcatttagtgccctctttagccagaatctcattactgcttcatttttgtaataacatttaatttagatattttccatatattggcactgctaaaatagaatatagcatctttcatatggtaggaaccaacaaggaaactttcctttaactccctttttacactttatggtaagtagcagggggggaaatgcatttatagatcatttctaggcaaaattgtgaagctaatgaccaacctgtttctacctatatgcagtctctttattttactagaaatgggaatcatggcctcttgaagagaaaaaagtcaccattctgcatttagctgtattcatatattgcatttctgtattttttgtttgtattgtaaaaaattcacataataaacgatgttgtgatgtaa

SEQ ID NO: 14744 - DNA, 2336 bp, Homo sapiens
tgacaccaaatccatgtgtccaccctgggacccaggagggcacagccaaggaatgagccctgtggggtgacgcttcagggcagagctgccttttaatttttattctcagagcatcagcacttgaggccttgccccacgccttctctgtggaccattcaggacctccagtgggggtggcgtgccaggcgcgtaccccaccaggtgggcaaagcagaaacctgcggggagcggagacgccttttatctctggatgccacagacctgagcagcattgggctggctgtccgctgctgactggatggcagcacaaagacaatatgagcagagggaggagaagaaggggtgctcaggctgcgggccacagtccagcagcgccagaagcactcatttctgaccaccaggctatgacgttcctgctgcgcattacagaaagcttttaactgtgatcaggcactctgctcagatacattgagtggcgatttttagttttgttttgaaaaaataaacagattaacctgcctcgctgcagtgagagcatgggacaagtccgccacagccctcccccgcccccttcccccgccccccaacgcgcagtgtgtatttgcaccacggcaggtgcctctgtgtggagctagggtcaagccctgagcagcttcacttcccctgcgccttttatgtccccaccttgaggccttgcagaggcgcctctcaaggccccatcagctcgccgggacctctgtgaagcctctctgtcatctccccttcccagcccctccttcatcccctgcctccttcaccagcctggcttttgcctggagcactatttgtttagttctctttgcaggacaagaattctctcagggtggtatcacctcctccctcctccccactcactccagtttttagcccggagcctcctgtggttgactatcaggaatgtgtgctgtgtcaggatacataggaagttgacctcggggtatcatggagagtgtccctcctagtggctggaggtagggacagttggttgtggggctggagagaggttgtggggaggaagcgaggatgcgtgcctgccactaggcatctgcatccccgagcccaagccaggagggatttcccttaggcaacaccatcccagggagatctgccacaatttgcgtttcacagctgaagacgctgaggcttagagagctcgacctcctcaaggtcacaccactgggtaaatagagggatgcagactcaggttttgctatgtgctcacatttcaactttatgcttaacatgaatggaaaaatatgaaagtaaatagtgaaaaggtaagttatgagcttagattacctagattattccagtatcccatggaagctgaggacttattccgctttccacaccgaacactaaatgtggaccagtatcaagaaccctcctgtccccacgcagtgtaaacccagtggcttctctgacctggagctgatgggccgtgaagggggcctatttttctccaaaggccatccttttggggccacctggctccaagaagcatcgctggtcttggggacgggaagggaaccctcttccaggagctctaagggtacttgggaatcaattgtgtccattctgaggtctctccagtgggagggcggcagctcctgtccctgggttcaggctgtgcttctggaagcatcgaaatgggatgtctgagccttgaggaaaagcagcagggttagcattaaagtcaagaggggcagctcaggatgctaccagggagcacatcgtttctggtgcctcatctaaaggtgaaacctcccctacattcaccagccggatgtcccaaatccctttagccagattgctttttgcaaccaaagctgtggacagaaaagcctccttaagtgagctgaggggacaggaaatccaatcagatgacctttgtgttcgtaatcgggcttgagccagaggctggggagctgagtcccagccaaacctcactggcccttttgcttttcacgcccagggctcagtggcccaggaagtgtgctgggcagcctgttcttactccagctcaacccattgggtgttggctgtttttggttttagttgttgttttgtattttgttgttttaattaataggctttatttgtaagagcagttttatgtttacagaaaaattaggcacaaagggattcccatatccctcctcttctttgcatatttccccctctaattagcatgttgcattagcatggcactttgttacaactgatgaacttgtattcattattagctacagtgttcatagtttatattaaagttcactctttgtgttgtgcatcct

SEQ ID NO: 14745 - DNA, 1189 bp, Homo sapiens
accgggaaatttccatgctatctagaggtttttgatgtcatcttaagaaacacacttaagagcatcagatttactgattgcattttatgctttaagtacgaaagggtttgtgccaatattcactacgtattatgcagtatttatatcttttgtatgtaaaactttaactgatttctgtcattcatcaatgagtagaagtaaatacattatagttgattttgctaaatcttaatttaaaagcctcattttcctagaaatctaattattcagttattcatgacaatatttttttaaaagtaagaaattctgagttgtcttcttggagctgtaggtcttgaagcagcaacgtctttcaggggttggagacagaaacccattctccaatctcagtagttttttcgaaaggctgtgatcatttattgatcgtgatatgacttgttactagggtactgaaaaaaatgtctaaggcctttacagaaacatttttagtaatgaggatgagaactttttcaaatagcaaatatatattggcttaaagcatgaggctgtcttcagaaaagtgatgtggacataggaggcaatgtgtgagacttgggggttcaatattttatatagaagagttaataagcacatggtttacatttactcagctactatatatgcagtgtggtgcacattttcacagaattctggcttcattaagatcattatttttgctgcgtagcttacagacttagcatattagttttttctactcctacaagtgtaaattgaaaaatctttatattaaaaaagtaaactgttatgaagctgctatgtactaataatactttgcttgccaaagtgtttgggttttgttgttgtttgtttgtttgtttgtttttggttcatgaacaacagtgtctagaaacccattttgaaagtggaaaattattaagtcacctatcacctttaaacgcctttttttaaaattataaaatattgtaaagcagggtctcaacttttaaatacactttgaacttcttctctgaattattaaagttctttatgacctcatttataaacactaaattctgtcacctcctgtcattttattttttattcattcaaatgtattttttcttgtgcatattataaaaatatattttatgagctcttactcaaataaatacctgtaaatgtctaaagg

SEQ ID NO: 14746 - DNA, 157 bp, Homo sapiens
aactttgagaagataatacatatgttcacgtcaatatacaaccatttggcacagcttcctgggaggaataataagaaaaacatgctttggaggaaaactcaagatacaaaaatgaatggctatgcataataacaataagaatgtattccccaaacaa

SEQ ID NO: 14747 - DNA, 1541 bp, Homo sapiens
gcctgtgcatagggaagcggcagcatcggatgtcagccccctgcggccccagctggagatggatatgagactagtcaagatgtgaatgctaattggagagaaatataattttaggaagatgcacattgatgtggggttttgatgtgtctgattttgactactcaagctctgtttacagaagaaaattgaatggcgagggtgtggccatatgaactgactagatggctaatatggacactttgggtatttctaatgcctgttcagggctggttttctgcatgcacgggtatacacataatgcagtgccatgcacatagggaagggtcagtaagagaagtttgccttggcagcaagtatttattgttgacattattcagaattagtgataataaaaagcagagtgattttggtcaattttattattaattcttaaattccctgcagagaatgccccctttattgctgcaccagggttggcattgctcccactgagccctactccaccctgtccctgcactcccttggttgccaaaaaaatgataacttaaatcccttccagacttaagaattttatggcatggcccaattgatataaacatttagaaggaaatgaaaagctaaaataggaagtaattattcctctaaagaaacattttgagcaaggcagtttagagaatcctaatgtctacactggcatagcacgagccatgtaagcttcttttttttctatgcaagagtattgatgtatgtgctgaatcttcacagacttgtcaatacacaggcagtattctaaaatagcactgaacagggagtcaggagactattgtctcctaaacccaggactagagttccctcgtactgtcactcctttggtcattaaatgcactgggcttgcccgcactttggccttcctagaacactgcttcataacctctctgtctgacttctgcatctccttccaggtcagctcattcacaagagttgctcccaagcctggatgagttgcaccttgcatcttgagcatgcatttctcacaataattattaagctgtgtgataatttctgctttcaggacactcatccattatcttggctgtgagctccttgggtacgggtaccttgtatgtttacttttatatccctagcacaaagcaagtgcctggcacatagtcagtgccctaagtattcgtagagtgaagaatgccagcctctcttgtccctggtttccttatgtgttgaatgtggttgagtttgtccattgctagggagagacttccagtaataaaatttactattctagatgcttctactgttatgttttatctgcccatttatctttcttagttaccaggagaaatgtgtgacacctatattataatgaaaacaatctcattacttatagtttatctatattaaacaaatttaattgcattttaaagcattctttgatactgttgcttttgcaataaatatggataatcttggttataagggagttaaaacaatgctgtaataaataaagtgcttcatgtgatcaaaat

SEQ ID NO: 14748 - DNA, 746 bp, Homo sapiens
tgtgaaaaaccctcacagaaagtcatcgaggcaaaaagaggcaggcagtggagtctccctgtcgacagtaaagttgaaatggtgacgtccactgctggctttattgaacagctaataaagatttatttattgtaatacctcacagacgttgtaccatatccatgcacatttagttgcctgcctgtggctggtaaggtaatgtcatgattcatcctctcttcagtgagactgagcctgatgtgttaacaaataggtgaagaaagtcttgtgctgtattcctaatcaaaagacttaatatattgaagtaacacttttttagtaagcaagatacctttttatttcaattcacagaatggaatttttttgtttcatgtctcagatttattttgtatttcttttttaacactctacatttcccttgttttttaactcatgcacatgtgctctttgtacagttttaaaaagtgtaataaaatctgacatgtcaatgtggctagttttatttttcttgttttgcattatgtgtatggcctgaagtgttggacttgcaaaaggggaagaaaggaattgcgaatacatgtaaaatgtcaccagacatttgtattatttttatcatgaaatcatgtttttctctgattgttctgaaatgttctaaatactcttattttgaatgcacaaaatgacttaaaccattcatatcatgtttcctttgcgttcagccaatttcaattaaaatgaactaaatt

SEQ ID NO: 14749 - DNA, 105 bp, Homo sapiens
agagatgcccacccataatcagaagcaaaattcacagaaactaaactccacccttgggactccacaacaacaacaacaacaaaatttaatttaatttaaaaatag

SEQ ID NO: 14750 - DNA, 166 bp, Homo sapiens
aattaccttcccttttctaatgaaaataatgttcagaacatttggtttcctaacaatcgaaatttgtactggtttctgcatcaaacacctcaactgtagggttaccctttatggaagtttgaaattaacactattgtcttcaaaattaacactattaaatgtaata

SEQ ID NO: 14751 - DNA, 1871 bp, Homo sapiens
tcaaagcccaaactcctttcttatcttgaccatactaataaatataatttataagcattgccattgaaggcttaattgactgaaattactttaacattttggaaattgttgtatatcactaaaagcatgaattggaactgcaatgaaagtcaaatttactttaaaaagaaattaatatggcttcaccaagaagcaaagttcaacttatttcataattgcctacatttatcatggtcctgaatgtagcgtgtaagcttgtgtttcttgggcagtctttcttgaaattgaagaggtgaaatgggggtggggagtgggaggaaaggtgacttcctctggtgtttattataaagcttaaattttatatcattttaaaatgtcttggtcttctactgccttgaaaaatgacaattgtgaacatgatagttaaactaccactttttttaaccattattatgcaaaatttagaagaaaagttattggcatggttgttgcatatagttaaactgagagtaattcatctgtgaatctgctttaattacctggtgagtaacttagaaaagtggtgtaaacttgtacatggaattttttgaatatgccttaatttagaaactgaaaaatatctggttatatcattctgggtgtgttcttactgacaccaggggtccgctgccccatgtgtcctggtgagaaaatatatgcctggcacagcttttgtatagaaaattcttgagaagtaactgtccgctagaagtctgtccaaatttaaaatgtgtgccatattctggttcttgaaaataagattccagagctctttgatcgcttttaataaactgcaagttcattttaaatgaagggccagcatatatacttgcaagataattttcagctgcaaggattcagcaccagttatgtttgaatgaaccctccttttctctgagattctggtccctggaaatccctttctgctagtggtgagcatgtaagtgttaagtttttaatctgggagcagggcataggaagaaaatgtcagtagtgctaatgcattttgcactagaacgcttcgggaaaatattcatgcttgccatctgttcatttctaaatttatattcataaagttacagtttgatacaggaattattaggagtaattcttttctgtttctgtttataatgaagaacactgtagctacattttcagaagttaacatcaagccatcaaacctgggtatagtgcagaaaacgtggcacacactgaccacacattaggctgtgtcaccattgtgtggtgtacctgctggaagaattctagcatgctacttggggacataatttcagtgggaaatatgccactgaccgattttttttttttcctctttgcagtggggctaggacagttgattcaacaaagtatttttttcttttttctcagtcctaatttgaacaggtcaaagatgtgttcaggcattccaggtaacaggtgtgtatgtaaagttaaaaataggctttttaggaactcactctttagatatttacatccagcttctcatgttaaatatttgtccttaaagggtttgagatgtacatctttcatttcgtatttctcataggctatgccatgtgcggaattcaagttaccaatgtaacactggccagcgggcccagcaatctccatgtgtacttattacagtcttatttaaccaggggtcctaaccactaacattgtgactttgctttgagacctttcctctcctgggtactgaggtgctatgaagccaactgacaaagatgcatcacgtgtcttaggctgatgccactacccgatttgtttatttgcaatttgagccatttaaagaccaataaacttcctttttt

SEQ ID NO: 14752 - DNA, 568 bp, Homo sapiens
gtatctgtttttcctcaggcacatcatttttatctggaaagacttttctagctgcaatttaaggcagcaatccaagagacttgaataataataattcaacaacagctttatttttatgtggagaagggtcttgcatacaatagtttaaaaaagacaaaaaaaacctttgcttaaattcatgctgttctaaaaactagatcgattgtacatcttcacaaattctagttaacaattttattttgtattcttgcagttttaagtggatgctaattttaggggcataagccttttatggccctcttgcagatcttctgaactatgcacatttgtgctttttttgtaagtttggaccaacttttatgtaacaaacagcccctccccacctccagttttacaacaatcagaaagggcactgatttatttggtatttttctttttacaaagctacctttagtcaaaggtcactgtcagtctttgcacctgctttcagtgttattgtgaaaggtgtactttgtgctcatttcagaaaataaaacacaacctttctcttgatgcaacagttttataa

SEQ ID NO: 14753 - DNA, 279 bp, Homo sapiens
caaaggaaaagggctcttcctcataacctcgatccgaatacactggcaaaggcaacactttgcttggacccttctccccagttctgataccactaaaaagaagatttagagtaactccagatttcttacatggcatctccagaatggctctggtattaatgaatctagtgccttttaaatgtatcccacgttttgttccctaccatcttttttttcagatgatgatttcattatggatttgtgggatttttaaaaataaagttttaatttttttcctgg

SEQ ID NO: 14754 - DNA, 276 bp, Homo sapiens
caccaaagatgttaaaagggtaacttcacagtaaatcatttctcctgaaatagaggaagattctttatgttgttgtgcttgtttttaaatcatcagtatagtttaacacattctttctaagcagttttgtgtgggataatttgaagaatatattatgagtaaactccgaaaattttgtttatccaaaggctcaatggattatgtttctattatatacaaggttttaagtaaacataaaatttccagaacaaaaataaaaaatttaaaattcatagc

SEQ ID NO: 14755 - DNA, 1413 bp, Homo sapiens
ggacatggaacctcgcctgacattttcctggccagtgacatcacccttcctgggatgatccccttttccctttcccttaatcaactctcctttgattttggtattccatgatttttattttcaaaccaaatcaggattgacaaaagctgtgcatgaagaactgccttcttctaagatctaaccttcaggcttctctcctctgttttcaatgaactgctagcctgtatgcaatattaaaaaacagctgtctcaaggtctgtgtatatctccacatacctccattactaacaatgaaatatgaatgcaagttaagctacacttgaccaaatggtaataaatgtttacttccatttctatcattgaagggaaaatgtgagcattaagcactccaggctttcatatgcccatgtcttctgagcagagccaccattttttataatttctaataaccaactccagaactaggagctgatcaactctttgttttcctctccatctacttttccctgtgcataatatccatccaaaggacaacagtggcaaagctgaaatttttatacattcaactcatgattcacatgtggcatcagtcccatcagccggaactagcctagacatacggtgcaaatatgacacttctaacgattaacaacagcaagaaaacacctgctgctgatgcaatgcaatgcatcccaatggttgtggggattgtgggctcaactcaagagaagtttaggagggggagcatccctagtgaatactcacaccacaagaaggacaaacttgtgcacatgtccaagaaagaaagcttcttgattgaggtagcatgaaggatgaggcttcagcccccattgtcttatgtagaatgtggcaatgccaactggagaaagggaagaaggacatattaccttggtttgaatccctgagttctgtactgttctgttttgtttagtctagccacagttcttcacaaaggaaaaaaaaatgtgtagatgataccatgacttttgttaaagccatgacttttgtttgcttggcagacaaaccctttttttaaaactttgatatttttttttcacatttttttttccttttcctttcttaatcatggagttcaagttcctttgcattcgattgtccatcgggaccacactaggaagctgcagagagtgatggtgcttgttagggatcaagggcaacatagtacttctccttcacccatagtaatcctcctggggcagaaacataacaccccaaaggcacgttgatttgtatcaaaataaatatccagtttcttttagcattcagtgaaaacatatctcagaaaacttcatgttgtcagaaaaacagctgcaggctccaaagacagcctaacctctcaactacatttgaaataaacccaaccataatggt

SEQ ID NO: 14756 - DNA, 2536 bp, Homo sapiens
gcaatatttccctttagaacttcaagatttctacattgaaaatgttaatattatttatggacctctggccaaatggtacatgtactggaagtggataaccagtatcacttacacaaacaaaaataactttgtcaaatttgtggagttaggtggaagccagattttaaaagttgccaaccaggagatttaacaggtacagttacccgtttcaatgttatttttaagaagggagatgttggcacctttgaattctacatcctgtttctccagaatgagaatttgtgtacaaagatatttgtattcactttctttaaaaaatccaagtaaaagtgccaaaactacacttctgtaaatctcttgcattattcatatgtgtatctatatctgcataatgtttgttaatgtctactaaaattgctactttttcactttggatttgtttttggcaaaattttagtctaaacagacatctaaattttcgagacttagaataacattcactaaagtttgataatgtcttttttaaatattttcttactgctttatagtgacttgatttggtttctgttgtgtttttgcctaaatactagtaacatatcagtgaaaaaccctaattttttttctcttcaatgtcactagtaagagaggtggtaatttttcacctctgaaattattctgggtttaggtgtcagctcttgagctgcttccctcatcacaccacactcacatgcatctgttctctctcacactctatacccctgccacttcctggcacctccccccatgcttgtcatttaattttggccacttgtaggtatcagtgtgatctgatcaacactctggttaccttggtcagtgaaaagatgctactatattgcttttgtcccaaagtgagtaaaatcccctagagcagagagagagagagagagagagagtgtcttcatgccaaccacagcctgtttctgctgagtttcttatcagccctcaagctatgctaggaaaagttataaaatgccaaaatatttataaacatttactttgtccataaaaaatttacattggatactctgtaagtaggaggtactttgtcccaaaaagatgtataagaatgtactaatagttttatttgattaggattgaacagttcagttgtatctatgccccacagtgaccagtaaagtccaattaaaatatggaaatgtaaaagtgtatgccgaataccttaaagtaactaattatccttacacacaaaaggctcagtgcattaaatatttgcctatcacctgtgtgctgtgtaccgtggccatgcctcgctctgcactatgaacaactcagacctgtcccttcacggtctgattagggtgtcacacaaagctctctccctaacatggtttctcaactgtcaaaatcatgaaaatgacagcacctaaccactattttaaagtatgtacagtaaatacccaaatgtgtgtaaatgtcatagacatatacaaagtcagtaatctcacccagtcctgctgtgtgaacctgtcaaagcacctgggagtgccctttacaccattaggtgaaattcatcaggcacttcagacaaccaggttgcactgttttctcactaaattggctttatttatacagtttcctggaacctagcattcctaaacaagctccaaaatgcagaagaagaaattgtgccacagtgatagagtttttaatgaatatccatggccacagttttgagtctcaggtaagtcttggaagaagttaaacacagtattaggcaaatatttatctctctgaaaaaatagggaggaggtgaccaggaaaaaataaccactattgaatgacacgtttgtacttgatggatctgtcatcaagttttaaaatcagaatcatttgggctttttaaaaaccattttatactcgtaataaatatatttaatataattgctgtatttgtgagaaagatctgttttcttttagctggccacttcagtttgctgcgtatctttagctgctgttgtgcttaaatactgagtcatagggtgcttttttaagaggcccttcagaatatacttgtaaaggtgtattggcattttttggtttataagataaaaacagggcatgaagagccttcatagtattaggccaaataaaatctattaataactgccagctagctctacacttatctaaagctgttaatgttcctttttttctatcaccaaatttataaaggactaaacagtactattgagtttactcggtttataaatccagttttaactataattcaacaatattttggtgtggtgaaacgttgtttatgaaatgtataaaatgtataagttttaatcaactgggaaatgatatttgattgatcttgtgttttgttgttttcaaatgaaaactaggaggtaattaatacctttctctagtagtggtatagaggaaggacagatgctcattgttgaatctcttaaatttttccagctaacctcagtttggaagaaaaatgtattaaagggttataaagatc

SEQ ID NO: 14757 - DNA, 102 bp, Homo sapiens
gaggaggaggtgatgtagcacttccaagatggcaccagcatttggttcttctcaagagttgaccattatctctattcttaaaattaaacatgttggggaaac

SEQ ID NO: 14758 - DNA, 869 bp, Homo sapiens
gtgccttggaggttttacatgagacactgtccaagagaagctggcagagaggtcttcccttaaaactttgggctgttggctgagccattcaaagagcatcatctgttcttcaaacaaatgttggtcacccactctctccagctgcagcatgttggtgccattttcagcaattacggctttgacagtgccacctctttgatgccaaatcagcaaccattgttgttatgatctgcagtcttcctggtgacactggaatctctctctctgccgcctcagtttgtctgctggtctcttggggggccaggccctgcacgtctctcctacccggcctcaaatggtgctgctgcccatgatggtaccacaccagggcctcagcctggcccctcaccacataccctttgccttttagaactcagtgccatcctgggtgcccagggcagagcaggctttgttcgcacctcatctgctgcagaaccacatcctgaggagtctcagcttatcctggagggaattgggaacagtgtcactgggaagtgaaggcctagccctgtggcttccaccagtctcctcctgcagtgccacgtggtggcatttctcgcctcacaccaagaagcagcaagtggaaaatttcaggatacaaagcacataacaccccataagagatgattatgtttttagaagcaagagcaaaattatgaaacctctagagatttgggtcatgttactccatttgatgaagattctcactaccgcccgctcctcccataggagcctacactaagtccaagtgtgagccattcacagactagaacacaaggagggagagagactcttaaacgtaaataaaaatgcaattcactcacaactct

SEQ ID NO: 14759 - DNA, 1457 bp, Homo sapiens
aacaccggacccaggggagatgtggattttcagcaggaactttattccaatgctaatggcagacaccaggaaggaggagaggaaccatttgtgcagatcatctagaagaacctggaccattcttgatggagctgaatacagtgatcacgttgtcctcctaggagcaggggtggggggagggggatggggtccttctaggagtccttggagaaaagtaagaaaccaggagtgtttccagttccaccctttcctggggcaccaccaccctttttatattgctgaattccaacctccctggggcggaacctggaggtcctgtttcttacggacttggttgccacagtccaggagcatttgaaggcacaatgcaggggctcagattggcacagaattcttttgtgaaatatcagtgccacagattgtaacagatagcttcatgcacactctgcattttattggtttgtttggaaaatgttggccattgaattattcatagatttatttcaaatagtttggaaattgttgtacttttgaaaacatgctgttcctgtagttttttgatgagagttatagttgttatatatacataaagataattttcttttcatttttgagacaattctttttatcctaaatattttatcatctttaaatttgtttctgtattattatatgtgctcctgaagcgagcactctttttatctatgatacttccataataatctcttctatttatagctattggtagttcccctaaattctgacgatagaaatttttatttgctgtttaggtttgtgactgaattgtgagaattcagttgtgatttttaacatgtgtcagatatatatactaacacgtctaatatatactattttattggtttattttgaaaaacatgggtatagaattatttaaatattattttatttatttaaatatttattaaatatatttatttatttaaatgttattattactttaaatattattttaaatattttggaaatactggtatttttgaatagatgctgtttctataaagctgtgtgatggtattataactgttatatacacatacatataattttgttttcctttttaagagaggattcttttcatcctaaatcttttacctttcaatctttgtatctattattacacgtgctgctgaagggagcatggtttttatctatgatacttagttaacatatatattacatttatagctatgtagtagttcccctaaattcttgtaaaaataaatttttatttgatatttcatctatgtttgaaatgtgagaattcagatgtaattttttaccttgatttggcatgtttgtatgttactttaaagaggatgtgtgttctaaaggaggacatgagctgtgtgttttcaagagaacaatagagtgtgtctcttggggaaacgtaataaaaatgaacttttctcaccttc

SEQ ID NO: 14760 - DNA, 798 bp, Homo sapiens
ggctgagggcacatcttgcccttcccctctcagacatggcttccttattgctggaagaggaggcctgggagttgacattcagcactcttccaggaataggacccccagtgaggatgaggcctcagggctccctccggcttggcagactcagcctgtcaccccaaatgcagcaatggcctggtgattcccacacatccttcctgcatcccccgaccctcccagacagcttggctcttgcccctgacaggatactgagccaagccctgcctgtggccaagccctgagtggccactgccaagctgcggggaagggtcctgagcaggggcatctgggaggctctggctgccttctgcatttatttgccttttttctttttctcttgcttctaaggggtggtggccaccactgtttagaatgacccttgggaacagtgaacgtagagaattgtttttagcagagtttgtgaccaaagtcagagtggatcatggtggtttggcagcagggaatttgtcttgttggagcctgctctgtgctccccactccatttctctgtccctctgcctgggctatgggaagtggggatgcagatggccaagctcccaccctgggtattcaaaaacggcagacacaacatgttcctccacgcggctcactcgatgcctgcaggccccagtgtgtgcctcaactgattctgacttcaggaaaagtaacacagagtggccttggcctgttgtcttcccctattttctgtcccagctcatccgtgtctctgaagaacaaatatgcttttggaccacg

SEQ ID NO: 14761 - DNA, 298 bp, Homo sapiens
gatcagcgtcctaccaagaccccagcccaactcaagctacagcagcagcacttcccaagcctgctgaccacagtcacatcacccatcagcacatggaaggcccctggtatggacactgaaaggaagggctggtcctgcccctttgagggggtgcaaacatgactgggacctaagagccagaggctgtgtagaggctcctgctccacctgccagtctcgtaagagatggggttgctgcagtgttggagtaggggcagagggagggagccaaggtcactccaataaaacaagctcatggc

SEQ ID NO: 14762 - DNA, 2011 bp, Homo sapiens
tgcagcctgccagaggcccaatgctggaatggcaccatcattcacatcagaactgcagcccctggaaaagaagagacagccatagacgaggagccagagtgggggcagactggccatttttattttgaagttcctgcgagaaatggatggtggaagggtggcgaatgttcaaattcatatgtgtggtagtgattcttggaaagaatttgaggtccccaaaggtgtatttttgggcaaatgaaaccataaactccgactggcttctgtagatgccaaagggctctttttcagctaaccctgggaaggctctgtgggagggaggtcggagccagctgtttctcgatctttggtatatctttggatcttatttgtacattaatgatattaacactccagtggggggtggggagtccctgatgctagggctggggtgggtggagtttgaagactcttgggaaagcctctcctggggccactgttgggggtgggagtgagcccaccacagaggccacaggcaggcccccacttcaggcccaaggcctggggcggggggaacagtcactgggtctcagattctgagactgttgtttagcttacctttctgctaggattggcttcccgcagagggcagggcccatcctaagcagcttccaagtcccacaaaggtggcttgtgggaggatttggaaggagctgcattgtgggcggggagtgtgtgggttgggttcgtaccagcaagtagactaggaactgagcccaggaaagggggatgttttcctggtgtttggatggtcagctgggagtgtccatcatcaggggaagatcaaacacaggtgcactcagctgcccagggcctctgggacacttgccttgacttgcaacttgccttgaacatcacgatcaaagcagcaggtgctgtggtctctcaaaattgatttttatttgactctgtggctctaagactgccttgaaccgcctgaggcctatgcatctgaacaagtgggtctctcccttgagcaccaggagtgggtgccagccggccccgaggattcccagcaccccacctatggtcttgccagcataggcttgctagttccttcttggtcagaggtagctgcagaggggggaggccaagggtttggtctaagctgtgccctgccacctggcaggaggcccactcactgcccaagtcatggcaacaggctggagcagcccaggagatgggcctaaaatgttctggatcccttgggtcctagtgttatgttccagtctgcccacctgtgctcaggatgcagccctgggatccagcacccatggaagcttctgctgggatggtgtcacctatgggttttgaaccagtgtggtatggtccttgggagctctgctctgagcttgccacactgctgagagcacccactgtcctgaccagagtctcagtggtcctgacccccaatgtgggcaggggctgggcaggagggtggggtctgctgtgggttcagaggactccacctcctggctggtttacctgctgctgcccattttctctgggtactgctggccagaggactttagcctacccctgaagagcctgtccatgtcattttcctactgccatagataccctaagcccagggccccttgaggcccagactcagcctgcccactggtgccggagacggagtggagtgggcctggatccgagggatgctacctctccctttcccacttgaggaccctggggagagatgggggcggggaaaatggaggtatgaatttggggtaagaggaagtgagatctccgcttgcaggtcagcccctgccttgcagggcgggctggcttgactcaggccctgtgagatagagggcccagcccagccccacccacagatcccctgctcctgttgtgttctgttgtaaatcatttggcgagactgtattttagtaactgctgcctaacttccctgtgttctatttgagaggcgcctgtctggataaagttgtcttgaaatttc

SEQ ID NO: 14763 - DNA, 1070 bp, Homo sapiens
atgctgcctagggttgcttgggccactgccctctccacacccatgactgccccttgcttctcaactaaagaatagtgcctcagcgctgcccacaccaccgccctcctcgctgtgccaccacccctccctctgctctcataggagttaggctgtcgtccccctccagtgcttggctgccccacaggccacacgctgcccaggctctgctgacttctgagcagttttccaggaggccggggggagcaggaggaggaaaggtagcccccgagggatgtccttggggaggggtcagctctggccacaatcctccccaccagtctcacccactaggataggaactgggccttgtgtgctggcttccgctgtcacccagcaaggcacaggctcctgtatttgagactaggatagcttcatcttgagcctgagccttagaatctgtagaggagcctggagtcggatctagccatggctggcagaggtttctagggtgggccccagccgtggcgtgaactgaggatgacccggggcagctggcaggagagagccttggcctgacctggcacagaaagggcagcttcagtctctgcagtgtccattatctgctgttccttcgagggttccaggctgtgtgtggggcccaagcatgccccacccacccctcctgggcccaggcagcacctggagcccacagagtctgtgtgtagccaggaagccccgctcaggtagccaccaccggggcactggctgctctgtcttggtcctgttaaccctccacctcctctcttggactccctccccaccccaaccactctttctttctcctttaacccaatggagactttctgatgcatcgttttctttgctgtgccaaagcaggtcagaagagggagaggaggggctgggggtgaggggccaggccatggccaaggggccagctgcccctcatttatcactctgaccttcacagggacagatctgatttatttattttggttaaaaaaaaaaaaaaggaacagaaacaactttgcattgcattggcttgacccataaactaagttatatccgtgggc

SEQ ID NO: 14764 - DNA, 368 bp, Homo sapiens
cccagagccctgggtgcatctagactttaaaaaaatatttaaagtcggccgggcgcagtgtctcacgcctgtaatcccagcactttgggaggccgaggtgggcagatcacctgagttcgggagttggagaccagcctgaccaacatggagaaactccatctctactaaaaatacaaaattagctgggcgtggtggcgcgcgcctgtaatcccagctactcaggaggctgaggcaggagaatcgcttgaacccgggaggtggaggttgcagtgagccgagattacgccattgcactccagcctgggccaacaagagcgaaactctgtctcaaagaaaaaaataaataaataaaaaatatatgtatatgt

SEQ ID NO: 14765 - DNA, 2254 bp, Homo sapiens
tcctgtgtttaccccaagcccggcggggacacgctcacagatgtcaccacagccctgcccttcatgcccagccccatgggacacccggtggtctttcccaaacctcccccaaaacacacctggagccagagccttctgccgccagccctgcccctgaattggaagcagccctgtgctcgatgggaggggctcccaggccggcagcccttgccacctccctctgccaagcctgctgctgcagaacggtttttgctgaggtgcccctgcccagccctgtccagccttgtccacacacacatctcacgcccctggtctcacagcctcacaccttgtccttccacccctgcctgcccccacccagcctgcttcttgtccagcattgatccttctgtttcaacaactcctccactgggcagagctgggcatctggcagggctggctctgtcccctgggcctttggctccagtggcccctgtgcccagcagtccagctcttggaacctcgctgaatggcagcctcttgggggcctggagctctggcagcccagccgtgtgtggtgtcaggttcctctccccaccccagcttcaagcagaggcctcggggtgggggagctacaaagcacaacaatgtacatagtgtagaaacactaacagctgggagaggggagccagctgtccagccagcatgttcctgttgtacagcccggtctccctgcgcgctctgctccttcccatgtgcagacagatcagggaggaacctccaatgggtgggggacagtgagcttcggcctggccgaggtgggtgggtgggctctcagattcagctctgtgtaaagattctctagcgggctgcgctcccaagttccccttctctgtgaaagtgaagaattagtacagctgtgttttttaaagccacctctctgtctccaccccatgggcccacacccaggtgggggaggaggaagccactgcatctgttggctcagggccccagcctgtgcgagcagggcgcctgggctgttgtgtctcctgtctgtgccgatctctattaaaggactccctcttggtgggcctggccgagtccctcctttgtgctcccagggactattttctcctcgtaagccagcgacctgcctaaagcttgggctgtgcctgcaaagcttgtgcaggacctgggggccaggtcgaccttcaagtggcttttggggccccaggttgagctctggatgtttcaagccaaggctcggctattcccgccccatagtaaatttccttttccctggaattttccaagttggcttcagctgaagagctgttttgtgaagcatcccaggcttgcccaggagagacatttgccactatgtcaccttatctgggcttgccctggggcactgagacagttgtttggcagccccagcccagccaggggctcatccttctcagctcttgtccctgggaggcctctgcttgtcacttcccagagattgcagaggtgtgtcctgcctaccatctgcctgtccagcttggtgggggtccgggtcaccatttcctccagtcctgggccccatccttgagggccttcccagccagccagcaggagaggcaagaactgggggaacacaggaacctaggggaggaggggagcgctgggcatcctcaggctggcggccaaggcctgcccctggaggcactagaggagggcatctgtctgtgggagcccagaggctgcagggaggaggaggagggaggtatctggtgtgagcgttgcccctgcgacatttgggaccacacaggtgggcttccttattccctgacaaagcctctgtttccagctcttccgccctctctggatgagggaacagaagtggaggaaacaaaagaagcagcagcacgcacagtcctgtcgctgggtgcggagacagcctggcaaagtcccactcagccatggcctgatgcaggccccaggccctcctttcttgggtgtcaaatgactgtgtcctggacatctgatgcaccacctgccctgcctgttgcaaacgtgatgctcccggatggagtggagaaactaggagactgggacaagcaaaaggctgcaaacaacccagaagcccatcctcagaagactggagaaatgattgaggaatgcatgggcaccgtggccctgtgctccatcacaaacacctctcagaaacaacgtgggatgaaaaagcaagacagttcatacagtatgatgccatttttataaagctcaaaac

SEQ ID NO: 14766 - DNA, 1694 bp, Homo sapiens
gtttgacttgtgttttatcttaaccaccagatcattccttctgtagctcaggagagcacccctccaccccatttgctcgcagtatcctagaatctttgtgctctcgctgcagttccctttgggttccatgttttccttgttccctcccatgcctagctggattgcagagttaagtttatgattatgaaataaaaactaaataacaattgtcctcgtttgagttaagagtgttgatgtaggctttattttaagcagtaatgggttacttctgaaacatcacttgtttgcttaattctacacagtacttagattttttttactttccagtcccaggaagtgtcaatgtttgttgagtggaatattgaaaatgtaggcagcaactgggcatggtggctcactgtctgtaatgtattacctgaggcagaagaccacctgagggtaggagtcaagatcagcctgggcaacatagtgagacgctgtctctacaaaaaataattagcctggcctggtggtgcatgcctagtcctagctgatctggaggctgacgtgggaggattgcttgagcctagagtgagctattatcatgccactgtacagcctgggtgttcacagatcttgtgtctcaaaggtaggcagaggcaggaaaagcaaggagccagaattaagaggttgggtcagtctgcagtgagttcatgcatttagaggtgttcttcaagatgactaatgtcaaaaattgagacatctgttgcggttttttttttttttttttcccctggaatgcagtggcgtgatctcagctcactgcagcctccgcctcctgggttcaagtgattctagtgcctcagcctcctgagtagctgggataatgggcgtgtgccaccatgcccagctaatttttgtatttttagtatagatggggtttcatcattttgaccaggctggtctcaaactcttgacctcagctgatgcgcctgccttggcctcccaaactgctgagattacagatgtgagccaccgcaccctacctcattttctgtaacaaagctaagcttgaacactgttgatgttcttgagggaagcatattgggctttaggctgtaggtcaagtttatacatcttaattatggtggaattcctatgtagagtctaaaaagccaggtacttggtgctacagtcagtctccctgcagagggttaaggcgcagactacctgcagtgaggaggtactgcttgtagcatatagagcctctccctagctttggttatggaggctttgaggttttgcaaacctgaccaatttaagccataagatctggtcaaagggatacccttcccactaaggacttggtttctcaggaaattatatgtacagtgcttgctggcagttagatgtcaggacaatctaagctgagaaaaccccttctctgcccaccttaacagacctctagggttcttaacccagcaatcaagtttgcctatcctagaggtggcggatttgatcatttggtgtgttgggcaatttttgttttactgtctggttccttctgcgtgaattaccaccaccaccacttgtgcatctcagtcttgtgtgttgtctggttacgtattccctgggtgataccattcaatgtcttaatgtacttgtggctcagacctgagtgcaaggtggaaataaacatcaaacatcttttcatt

SEQ ID NO: 14767 - DNA, 412 bp, Homo sapiens
tggacagtggatgggggggcacccacaccttccgcgcagtcgtcataggccttcccagaaggagctgcccagacctgcgtgtcagcccttggtggtggccagggagaggcgcccggtgcagatggccccgggcggcccaggtcctctactgtgaaggagcagggagctgccgagggacacgagcctcagtgcggggtggaaggctctttgccttgtccaccagggctcagccaagccctgcagtgtgtccccgctcggggagggcccggccgagcgggcagggagagccagtcctgtcggctgggcccttggacggctgtcagttttgcacatgatgttcctattgtaactctcagagaccttaaaaagaagtttactgcaatgtgaataatttaatctctggttgccaagc

SEQ ID NO: 14768 - DNA, 836 bp, Homo sapiens
gggtcccggtgagatggagtgggtcacacctggcaagctggaagaaagttccctggggatgggagagcgggtgggtgctgccaatctccagctactgtggccacaccccacctggtcatgggcagacccctcccttcctgggctgacctgctccctcgaggccagcctgctccctggctgaggctcaggctatccgcccaagctctttgctcattctagggccagtggaggaaaatgtgataaggccagagcttgtgtgctgggcacagaaatcacctgctgcatcctgtgctccgcaggctgggccggagcctctgcccgcaggtttctatgctgtttcttagcacagaatccagcctagccttagccgcagtctaggccctgcttggactaggactccttgcttgaccccatctctggttcctgccctggctcctgcaccagccccagctcctgcctacatccaggcagaaagataggcaggggctcttggaagacgttccgtgctgtgacctccgagccctcctggtgggaagacagctggaaaggctgggaggagaagggaggggctgggggttcccaggagccatgcgtggcctgcagagtccattccatcatgatgctgtgcccgctatgggctgtgtccatgaccagaggctggagtgggggtgtgttagagcccctcaccgggacttgctgtgcggatggggcctgggcctccttcctacaggggctcctctgtgggtgaggggccctctggaatggcatcccatgagcttgtggcctctatctgctaccatctgtgttttatctgagtaaagttaccttacttctgg

SEQ ID NO: 14769 - DNA, 9118 bp, Homo sapiens
tggagcccacgtgggcctctggggtgcacatggggtgggaatgctccgggggtgacacaggccacggtggctccagccaggaccagccagaccagcagagcagggagccacttgccagggtggaggaggagcattgtccaggcatggcctgtggcccgagggccaaccaccgagcaggcacagcacagcagtgactcggtgaggggaggacacccgactgtgcacacttccaggcctccctggagaggtgtccactccatccttccctccgtggcgtagggagcactgtttctttccagcaagcctgttcaggtttggccaggtcggcatcaatgtaaggaccttcagagcatcccagggttacagcaagagccactgaggtgtggctggcagagcaactgaggagctctgcgagagtgtgccctctgagacagccctgtccgccccgcccaggtgggacctgacatacaggcggctccagccctgggcagcggcttcaagagccagagtgggaagtcaggcctctctgggaaggtcacaaggcctggggttgttcacaccacaggcacaatacagagctgtccactcttgaactggaccgtctggggagaattgagaagctgcctctcactgcatggatagtggtggctgctggctttcaagcgtggttttttgctaagagccagaggcaggtcttctggagttctcaggggggccctgtgaccccctctccacaaccatggccagcatcggcttcttgctgcacctgtgcattctccacccctccgccaatggcttccagctcctaaaacacctggacattccccatcctgcaccggcactgtgtttgttcagagaaaacgaagggtgtcatttcttcttttccctgtggcatcgtggatcctttacatttagcaacaacagtgtgaggctccacttctgttgaatatgagcggctgtcacacccatgagcaagtttccttgatggaagatgctgtttctccggcagaaccaaccctccaggacgaagtttcagaattggctgatggtcgtgagtgcaggtgtccctgttgtaatttgcagggaaattgactgcaggtgatagtgttgacgtctgacgtctgacaacctcctatgtgcatgtctaaatagtcacaatgaagatgaaaataaggatgatggggacggggtccaggagggccactgggaaggcactatccagaaatagtggacagaggtctggcatgtggaaaccttggatctcggtcacagggaggaaggcagctagaaatgggagggaagcttctgggtaggcaccatagtaggggaatgtctaaagacccactgctctgagatgtggtcagagaggtttctgtggactgcagatgaggcctgagccctgcctatgctcaaagccagcagggttgggggtccgcctcctcactgctcctcaacagctgtaaccctttcctgagggccccgacttttcagaataggagcagagagaagcccagacttccttccctggagtgtagacctgtgtgtgggacctgctccaggctgatccctgtccgcacaggtgggtgatgtccttggctgctgccgtcagaggcagccccctgcacagggaggggctgatcctgcctcagctgtgtggccatgtgggggcagcaggggcctgggccatagctgggggaggccagaccctgagggctttgcagggcggccagtgcagtgatgcctggcgcttccagctgagacaggagtccggacagaggtgggcagggtggatggcttcgggcagggaaggcgggtagaggctgcatgtgggggcccctgtctgcctgtccttagggtgtggattaggctctggcttctgtgatggtgcaagaggcaggatggtctccagacaccttcttgcagagtgattttgaccaatgcctttccagcaccttcccctggttatgacagggagctcccaggccaggccacatgaccccacaggtaggctgaccccatggacccactggagactttgagggcagagctcgggcacctttcatcttccttgggtggtcctcatgtcgctgtccgctcatgttcctggtgttctggcatcaccttgtgccggtgggggctgggctcccgtgaggtcctagggcagaaggaggtgcttgcagggcctctcgctgctactgggacatccacaggacctaatgtttatgtggaatctccaggctgccatcgagggctcctgagctcatcctgaggacccagggtccatctgagctggctgtgggctgagatcctggctggggccctgctgtcaacctctcctccaggccctgccttgtccctgctcctgtgctttcctctcttcaggacaaatggtttgtccttatggtcccctttccactaggattttctcatcctcatctgtctatcccagccggatttaaagcagtcacttcagacaggagccacagggagcctgtgagggagtagtgcggtggtggtgagtgtggctgccctggctcccccagctcaccgtggtgctgtccttgacccacgagctgttgagaagggtgcagagcccctggcacagccaaccctgttgcccccagtgccgctgcccagcttcggccatccaggtggtgggtagacagaggagtgaaccccaaaggtgtccatgccccagttctaagccctgtggccaggtgctgtcacacagcaaaggggactttgcaggtggaattagggttagggatctaaggatgggaggggaacttggtttatctgggtgggctcagtgaccccttggaatggctgagggaggcaggagagcctggaaagattcgaagtgtcacagagatggtgccgtcattgctggcttaaagacaaggggccaggagccaacaccagaggccactccacaaccccagcgccagtcagcaaggaagccgggtgtcgctcacacaaccagaaggagctgagtttggcaacaacccaagtgagcctgaagcagattcgccccagagcctccaggcgtgagtggagcccagtccagcgacaccttggtttggcctgtgagactgagaagagagccagccacgccatgctgtgcctggggtccacagagccgggaggtcacacatgtacatcctggaagctgcccaaggtgtggccacttgtagggcagtgagaggaagccgtcgcggggaccatgctgccttctctgggctcacgactgttctggaaaggaccccatggcagacttggcaaggtctccacttcaggggcaaacatctccatcatcagcaactccaaaccccagccacttcctgggagttcaggaactgtgtttagccataatgtcccttggggtttggtgaaaaacaacttcctttttatttgtgggaaaactgtattatattgccttatttatttttaatcatgtacaatattcatgtacaaatgttagagccattcgggtaggattctctctaaattatttattgaagaggctttgtaaatagtgcaccagtgacaggtgctgcctgtttactcgtaccaaaaatgaagacaagccccacacccacctcagcccttgcttggccatgctgtggccctttggaaatgaccctgtgtgctcccctcgcgacccttgcatgcctttcatgcctgatgccgtagagtagaacacagccccggaatgcttccagttgcttgcaagggaccatgccggcccgggtggtccatgcctgcggggtgtctgtatcctgcaggaggacgcccctacagacccagcaacccaagttgccagcccgtgtttctcagactttaaagccaccagggcttctggaacacctgtcatagaagcaataactctaactctatactgtagagatgagtctggtccgaagcagattagtaatttagagataagccatgcatacaagtttgccccattctctggcttggggtggtgggaggcggggagctgccactcccaaagcctccaccccttcctgaagacccagctatgaaaccgcagttcctgtgggttgggctgcccaggctggtcagagctcagcaccccaggtctggtgagcagacagagccggcgttaaaccccgatcaggtcattgtcaccacacccttgcttggatgaggaaggaaggaggcaaaggcacccactccatccaagatccgttccaattgatgagcctcagtactggcctcacactgaccaacggtggtatgctgcagtttgttggtttggtgcagagtctaaaggataacatatcaaggcttacctgtgataggccattttaaggaaatggtggcactctgaaggctgtccccattcaccttccacaatgctggtaccatcctggtagaagagccctctgaacaggacacctgttcaggcctgggggccccatgctaggcttgcctgggtgtgagaaggtcgaactgggtggcttaggccttcaaattgagcttgggggtgtccaagagaggggtcttattcgaggaactcacataccccaaataaccatcagtgcacaaatcattccatgctctttggcaccaggcaggagatgctgcaggcaggtgtccgtagttggcaaaaatgggcagtaggggaaatggagttgcttcaacctttctcagtcccggccctcactgcacccaccaagtcaagcagagctgggtgggctgagaccagcatcccagctggactgagcctggggggaggggctggagccaaggagcccccctgggtgggggcatcaggagcaggggcagggcctgaggactgctccccctgcatggagggcaggccaggatggagcccagggtagactttgaggaaggctcagtgggctcagcagaaggaaggctcttctcatagttgtggtttttcacagatggatttgggtgatctgagtgtggtcaggccctgccgttggggaatgaatgccacacggggtttgtctgtaagctgcagtgtctgtgattctgtgtgaactgacagcagggagctgaaggacaggccccggccttgggagaggacacgggcatgggctgctggatgcagggctcccagggctgtgaaggcagaggggtctctggaggcagacagggtgggctgggggccagcagcagggggcagagccccagccagggcagctgcttcctgcacatagacattcctcctgcgcagggccaagtgcccatgagcacagccccagacagacacggtggggagcttggagccctccgctcacctagaggagccctgggacacgcactggaaagtattctaggggcttcctgccttatccttctgtttgttcatacacttagtgaaagcagatcctgtactaggatgtgaggatatctgtcacctgcgtggtccattccataaacaccagattccatttcagttgccacacattttggggctagacttccctaaacaacatgccattgtgaaataatgcatatatttgtatttttaaatttccctgaaaatttaatctattctgttccatatgaagtctgtttcactaccttaaaaaatagatactccactagaggctgtgcttaattcaaatccatgtgtgtgcctgcattacatgtgtgaacacgtgtttctgtcgtgtgtgtcatgcacatctgtgtgttgcatagcataagccaaatgaaaatcatttgttcatgggattcatatgaggaacaaaattaaatttgaatacagtcagataactgccacgcagggcatttggggaaccatccccgaatgccctgatgtgatttccctcagaaaatccttgttattagaggagaaggtctgggcaggggcagcagcatctcagacatcaagtcaactttatcatctactacatcagcactgaagtccaggggcattgaggcactaactaggttccattttctttggtttggttacttattttttctttttgggttctcggtgtgcagaggctgtagagagagcctcagggcggtgaccgctgcaggaattcggccctccagctcccctccagttaccaggagccgatttggaggccaggccttcccagctgagtgtctgtcagcttcattctctctcagctgtgcagtggaagagcaacaacagacaggtgaccttcttgggttgtgcttcacaatggactgggaaaaacatctttgaaatcaggaaatcaggccgggcgcagtggctcatgcctgtaagcccagcactttgggaggcggaggcgggtggatccattgaggtcaggagctcaagaccagcctggtcaacatggtgaaaccccgtctctactaaaaatacaaaaaaaaaattagctgggcgtgttggcgggagcctgtagtcccagctacacgggaggctaaggtgggagaattgcttgaacccgggaggcggaggttgcagtgagctgagattgcaccattgcactccagcctgggcgacagagcaagactctctcaaaaaaaaaaaaaaaagaaagaaagaaatcagaaaatcgaccacagtggtagccacctggcctaatgctgtgtttttgtacctgacaggggtcactcattttaggcacaactccttcattctttgtgaaattagtgagtttccttctacccgtcaccagattcaatatgttctattaatacaccgataaccacaggggaagggcacttgtcgctctcccacctggttaccacagtctccatgggtcttttgccgtgaccacaaataaaggaaacactcatcactagtatctaagtcgggctttacagtaactatgcaccttctgtgtgcttcacctcactctctacttcaaacagcccatggagggaggtattattatactccttatgttgacagtgaagaatctgaggcccagagaggttggggacttgagtaaagtcacacagccctgagaggcaggaccagggttccattcctgctctatccagttccaagcccttgtgttttccattatgtttagtgcctctttgctaacagcaacatctgcaagatttgtgttggttttgatggagaactctagctcatccacatgctagtgcccaagtggtggaggggccacctcagcaggtgggttctgaatgcagccaaggctgtccccgcaatgggtgagactcgctccaactgcccgccctcagagcaggtgcctaagtcctccctggcactggcaggccttacctcacattgctaaattaaagcaatgcaattcctcttgggtaagaggaattcctccttctttactaactgatccccagcaaggaaataaaatgttaggctttaaaaatccctactttgtcatatcagactatattctaaaactatatttgagcgaaacctgtcattgcgtctaatttcaaatatacagaatctccttaagagctgttgccttatttttttgtaaagcctctctgacatcaaatggggagaaatggtggcacctccagacaccctgaaactacacaccatttcttccctgctcagcttctgctcaggagttctgtgagctatgggaaggccattggttgtatttgctacttttactttcatcttcctctgctgtagagccatttaatgttattgtcatatgctgctggtgaggtaaaggtgggtccgggtgccttcccaggggttagaggatgttcaaagggccgatttcagcaggagttcagagggcttatgatggatggtgagagatttgacaaccaccagagcacatgtgctctgaccctctcctgggcattggttcctgctggtaccgggcggttcagaccttcaaataggttgctttcaaaagagctttcaggcacttattgagaattaatgtttaaacagacataatagcctagatgaactcccaagagatctattaaatcttgtgggctgaataaatatctcgtgcaggactgtgcaacagtagcccagagcatcctgcctgtgggcatccacctcccaggtgagggcagtgggaagctggcccgacggcagccagaacttgtttctcacctcccaccagcaaccccccacccaactctgggccccaggcacacgaagcacaagtctcaggggaccattcccacattgggggatcctgagggagcccatcaccgcctcttgcatacaactgtccactaggaggcacgcccagtgtgggagagatgtatggtcttgccttccacctgtaaaaactgcacatatgcaagccatttgcactctggaactgcatgccgtgaaaactcctaatggtgtggaacttagtttgaatttgaaatcacgccgcatgcacaaagggacaggcccaggcccgacctcaggtcatccgcccgctggctgcagagcatccctgggagccaaggcgaggcccgtggagcctgagctttgtgtagctcgagctttgtgtagctcgtgcacttattatgcaccacctcccttcagtcaccactcctcttcctccgccatcctcatttatactgattgcacaccccccgctcaaacaacaatgtccttattatgatgaccatctcgtagtggtacattccattcctatttaaggtaagcccaaagcccacttttggattttctcgactgtccgagaaaagttgtgtaagcgcctgcgttcttctgggtttggctagatagggttgtgtccctctatggaatggagagtgatgtgggcaagggtgtcattttctcgcacaatacaactcactgaggatgcttctgtagaagtgagaaacacgatgagtacattcagaattacaataactcactctcactgggtaacttctcatgatagatttgtatgatcaatacgggtctatttttatgtcaactgaacactgtagggtaccttccagtctttttcaagattgttaaattgagacaagtaattgaataatttgtcctatttttattttaaaaaaagtgaatggactgaaatgttaaatgtgaatgtacatttcttaattgcaacttttctactgagtgtttgcactatactttctggaatcttatttaacaaaaataaagggaaaaaattgcttgact

SEQ ID NO: 14770 - DNA, 576 bp, Homo sapiens
aaccagatgaaataatgttctgtcacgtgaaatatttaagtatatagtatatttatactctagaacatgcacatttatatatatatgtatatgtatatatatatagtaactactttttatactccatacataacttgatatagaaagctgtttatttattcactgtaagtttattttttctacacagtaaaaacttgtactatgttaataacttgtcctatgtcaatttgtatatcatgaaacacttctcatcatattgtatgtaagtaattgcatttctgctcttccaaagctcctgcgtctgtttttaaagagcatggaaaaatactgcctagaaaatgcaaaatgaaataagagagagtagtttttcagctagtttgaaggaggacggttaacttgtatattccaccattcacatttgatgtacatgtgtagggaaagttaaaagtgttgattacataatcaaagctacctgtggtgatgttgccacctgttaaaatgtacactggatatgttgttaaacacgtgtctataatggaaacatttacaataaatattctgcatggaaatactgtt

SEQ ID NO: 14771 - DNA, 249 bp, Homo sapiens
ggaggcagaaaattccacttaatttcactattacaatgctcagcagaaaaaaaaaaacaaaacaacttggattactgagctacagaacacccagactcatagcactgggacttccaggtcttaccttacgagtgggtcacaacactgacaaaggggacaatatccattagccattatcttgctgcgtatgaataaccctctctcacaaaaataaagataaatatgttctgaaataattgataagattaa

SEQ ID NO: 14772 - DNA, 375 bp, Homo sapiens
gcgctgccctgcacctccgcagacctgctgtgatgacttgccattaaaagcattgtccaaaatcccctgttgtgtggactttgagcacactttacacaagaatctagaaaatcagatcgcgattaagagacagagaatcttggattaaccgcatgggagatgttcttccttttgaagtttcattggagcattttcaatgatgttagcctgatttggggtttcttcaagaacattctaccaaatttttgtactatttctagggaaatttttcagactttaaaattctaatggtagtcagatttcatgtcactaaacaagaaatctgacaatagtgccaggaaactaatttcctgatacattaaaaaaattccatgc

SEQ ID NO: 14773 - DNA, 1983 bp, Homo sapiens
gcactaaagaagtttccataaggaataaaaccttgtcttccattacaattaacagtcaaggataaaacaagcacgcgcacaatcaaggagctggaacacactctccaggccgtcaaattattctcttgttcattttctattttgaatctccttgttagttaataaccaccaaatggaaaggtcattctttctgcagacttttggggagctcctccaaaacatttgttctctttaccatgccagatggacaccagcttctttgtgacaaaggcatgaatgatttgacagtgtccaaactgagacattctggagctggaaagcctgtcacactagagtgtgtgtgacatgtccactctaaacatgtcacttttctgttaagaaaactgagccccctccccacaggttaaaaaactttagtaacttgtttgtatagaaaatagtaacaaggactattttctattgttgtcatctatttactagatacatgtttttaatgattttaatgtaagcttttattaatactgatgacattatatggtatgatatgaaaaaatcaccaattttttacatataaaagatacctttttaaaaaaataggttttaagagctcttttagtatacactttagcaaaattaattaaattgaactagttactctgtatcaattacagtagttctaccagaatctcccaggttataatttatgagggtagagaaataaaatgtagatgcattttctttttcttcatttggatgaataattactgttttttgttattctaagtcagtgtttttcaaagcgtagtggtccccatattagctgcattgccatcttctgggagcttgcaagaaatgtacattctcaggatccactccagacctattgaatctcaaattctggggcttaaacaagcacattccaagttaagaaccaatgacctaagggaatgtctggttacctcctagttatacaagcaaaatctgcatagtatgtagtcttttttatttatttattttttttttttgaggcggagtctcgctctgtcacccaggctggagtgcagtggcgcgatgtcggctcactgcaagctccgcctcctgggttcacgccattctcctgcctcagcctccccagcagctgggactacaggcacacatcgccacacccggctaatttttagtatttttagtagagacggggtttcaccgtgttagccaggatggtctctatctcctgaccttgtgatccgcccccctccacctcccaaagtgctgggattacaggcgtgagccaccgtgtccggccgtagtttattttaaaatatatttttaaaagctttgtaaaaattatgtcattctcagaattgttgtcttcaaagcattgtcagatgtagagtgctcagatgtggctcttaaagactatatacatctgaatttttcatcctatagttagtaagatgcataaaatcaatccactactgaaatagtttccagtcagacatttctgagttcagacatttctcaacattcttttaacaacatttttctgaatcctcaatagaaaatcacattaatcttattttaaaatttggcctttttcaacactaacgttgagtaccggtagcttgtgatcaaaggcatatacttccttatgagatttctttactaaagcaagatttcattaaatctctatttcctaaatatcattctatacaaaagatattttttaaacggtaaggattaagacaatcactgatagctttgttgtgagcaattttgattcccatgtatcacatgaattacacttccttaaataaattacagtttatggctgtatgatttattctctaattctaacatagtctagttgtcaaaaggaaatatgtaatctttttatgattgttgaatcaataaataccaatttgtgaaacatgaatgtgtttaaactgcagtgaataaatgagatgtgctttaatttaaccc

SEQ ID NO: 14774 - DNA, 357 bp, Homo sapiens
acgcttcccagaacacaaactctgactttttctagaacattttactgatgtgaacattctagatgactctgggaactatcagtcaaagaagacttttgatgaggaataatggaaaattgttggtacttttccttttcttgataacagttactacaacagaaggaaatggatatatttcaaaacatcaacaagaactttgggcataaaatccttctctaaataaatgtgctattttcacagtaagtacacaaaagtacactattatatatcaaatgtatttctataatccctccattagagagcttatataagtgttttctatagatgcagattaaaaatgctgtgttgtcaaccgtc

SEQ ID NO: 14775 - DNA, 4473 bp, Homo sapiens
agccctcccgcgcccccaccccagaccccgagccaccccaggaaaagcacaaggactgccgccttctcgctcccgccagcagcatagactggactggaccagacaatgttgtgtttggatttgtaactgttttttgttttttgtttgagttggttgattggggtttgatttgcttttgaaaagatttttatttttagaggcagggctgcattgggagcatccagaactgctaccttcctagatgtttccccagaccgctggctgagattccctcacctgtcgcttcctagaatccccttctccaaacgattagtctaaattttcagagagaaatagataaaacacgccacagcctgggaaggagcgtgctctaccctgtgctaagcacggggttcgcgcaccaggtgtctttttccagtccccagaagcagagagcacagcccctgctgtgtgggtctgcaggtgagcagacaggacaggtgtgccgccacccaagtgccaagacacagcagggccaacaacctgtgcccaggccagcttcgagctacatgcatctagggcggagaggctgcacttgtgagagaaaatactatttcaagtcatattctgcgtaggaaaatgaattggttggggaaagtcgtgtctgtcagactgccctgggtggagggagacgccgggctagagcctttgggatcgtcctggattcactggctttgcggaggctgctcagatggcctgagcctcccgaggcttgctgccccgtaggaggagactgtcttcccgtgggcatatctggggagccctgttccccgctttttcactcccatacctttaatggcccccaaaatctgtcactacaatttaaacaccagtcccgaaatttggatcttctttctttttgaatctctcaaacggcaacattcctcagaaaccaaagctttatttcaaatctcttccttccctggctggttccatctagtaccagaggcctcttttcctgaagaaatccaatcctagccctcattttaattatgtacatctgtttgtagccacaagcctgaatttctcagtgttggtaagtttctttacctaccctcactatatattattctcgttttaaaacccataaaggagtgatttagaacagtcattaattttcaactcaatgaaatatgtgaagcccagcatctctgttgctaacacacagagctcacctgtttgaaaccaagctttcaaacatgttgaagctctttactgtaaaggcaagccagcatgtgtgtccacacatacataggatggctggctctgcacctgtaggatattggaatgcacagggcaattgagggactgagccagaccttcggagagtaatgccaccagatcccctaggaaagaggaggcaaatggcactgcaggtgagaaccccgcccatccgtgctatgacatggaggcactgaagcccgaggaaggtgtgtggagattctaatcccaacaagcaagggtctccttcaagattaatgctatcaatcattaaggtcattactctcaaccacctaggcaatgaagaatataccatttcaaatatttacagtacttgtcttcaccaacactgtcccaaggtgaaatgaagcaacagagaggaaattgtacataagtacctcagcatttaatccaaacaggggttcttagtctcagcactatgacattttgggctgactacttatttgttaggcgggagctctcctgtgcattgtaggataattagcagtatccctggtggctacccaatagacgccagtagcaccccgaattgacaacccaaactctccagacatcaccaactgtcccctgcgaggagaaatcactcctgggggagaaccactgacccaaatgaattctaaaccaatcaaatgtctgggaagccctccaagaaaaaaaatagaaaagcacttgaagaatattcccaatattcccggtcagcagtatcaaggctgacttgtgttcatgtggagtcattataaattctataaatcaattattccccttcggtcttaaaaatatatttcctcataaacatttgagttttgttgaaaagatggagtttacaaagataccattcttgagtcatggatttctctgctcacagaagggtgtggcatttggaaacgggaataaacaaaattgctgcaccaatgcactgagtgaaggaagagagacagaggatcaagggctttagacagcactccttcaatatgcaatcacagagaaagatgcgccttatccaagttaatatctctaaggtgagagccttcttagagtcagtttgttgcaaatttcacctactctgttcttttccatccatccccctgagtcagttggttgaagggagttattttttcaagtggaattcaaacaaagctcaaaccagaactgtaaatagtgattgcaggaattcttttctaaactgctttgccctttcctctcactgccttttatagccaatataaatgtctctttgcacaccttttgttgtggttttatattgtaacaccatttttctttgaaactattgtatttaaagtaaggtttcatattatgtcagcaagtaattaacttatgtttaaaaggtggccatatcatgtaccaaaagttgctgaagtttctcttctagctggtaaagtaggagtttgcatgacttcacactttttttgcgtagtttcttctgttgtatgatggcgtgagtgtgtgtcttgggtaccgctgtgtactactgtgtgcctagattccatgcactctcgttgtgtttgaagtaaatattggagaccggagggtaacaggttggcctgttgattacagctagtaatcgctgtgtcttgttccgccccctccctgacaccccagcttcccaggatgtggaaagcctggatctcagctccttgccccatatcccttctgtaatttgtacctaaagagtgtgattatcctaattcaagagtcactaaaactcatcacattatcattgcatatcagcaaagggtaaagtcctagcaccaattgcttcacataccagcatgttccatttccaatttagaattagccacataataaaatcttagaatcttccttgagaaagagctgcctgagatgtagttttgttatatggttccccaccgaccatttttgtgcttttttcttgttttgttttgttttgactgcactgtgagttttgtagtgtcctcttcttgccaaaacaaacgcgagatgaactggacttatgtagacaaatcgtgatgccagtgtatccttcctttcttcagttccagcaataatgaatggtcaacttttttaaaatctagatctctctcattcatttcaatgtatttttactttaagatgaaccaaaattattagacttatttaagatgtacaggcatcagaaaaaagaagcacataatgcttttggtgcgatggcactcactgtgaacatgtgtaaccacatattaatatgcaatattgtttccaatactttctaatacagttttttataatgttgtgtgtggtgattgttcaggtcgaatctgttgtatccagtacagctttaggtcttcagctgcccttctggcgagtacatgcacaggattgtaaatgagaaatgcagtcatatttccagtctgcctctatgatgatgttaaattattgctgtttagctgtgaacaagggatgtaccactggaggaatagagtatccttttgtacacattttgaaatgcttcttctgtagtgatagaacaaataaatgcaacgaatactctgtctgccctatcccgtgaagtccacactggcgtaagagaaggcccagcagagcaggaatctgcctagactttctcccaatgagatcccaatatgagagggagaagagatgggcctcaggacagctgcaataccacttgggaacacatgtggtgtcttgatgtggccagcgcagcagttcagcacaacgtacctcccatctacaacagtgctggacgtgggaattctaagtcccagtcttgagggtgggtggagatggagggcaacaagagatacatttccagttctccactgcagcatgcttcagtcattctgtgagtggccgggcccagggccctcacaatttcactaccttgtcttttacatagtcataagaattatcctcaacatagccttttgacgctgtaaatcttgagtattcatttacccttttctgatctcctggaaacagctgcctgcctgcattgcacttctcttcccgaggagtggggtaaatttaaaagtcaagttatagtttggatgttagtatagaattttgaaattgggaattaaaaatcaggactggggactgggagaccaaaaatttctgatcccatttctgatggatgtgtcacaccttttctgtcaaaataaaatgtcttggaggttatgactccttggtgaa

SEQ ID NO: 14776 - DNA, 362 bp, Homo sapiens
gaatctgggctctgctacccacctccggagacacaagcccacgtatctactttcacttgctcatccttgctctacctcaacgtggggccctgacaccacgttatcaaacatgcagcccccacacccctcgtctgcccgcccccagatcttccctctgtgctccctgccaccccagcagctgttgatttcagaacccttgccttcgccctgctggccctctcctccctgcccttcttcctgcccttcctctgaaaagaggcatttcgggaaggcttgctttttctccatgtctcccagtttgtatagttaaattgtccagttgtatagttaaatatttgatcttattaaaaacatttgtctgc

SEQ ID NO: 14777 - DNA, 170 bp, Homo sapiens
tctaaagtgctgacttttttccaatatcactttctcttcttaaagcaaagagcaaatcgcctgtaaaatctacggagcggacagcaaagttgaccctaaactccaagcaccaccctgcacccactgtactctaattcactacacaaggagcgcctgcttccggaagcata

SEQ ID NO: 14778 - DNA, 1720 bp, Homo sapiens
ccacggaggatagtatgagccctaaaaatccagactctttcgatacccaggaccaagccacagcaggtcctccatcccaacagccatgcccgcattagctcttagacccacagactggttttgcaacgtttacaccgactagccaggaagtacttccacctcgggcacattttgggaagttgcattcctttgtcttcaaactgtgaagcatttacagaaacgcatccagcaagaatattgtccctttgagcagaaatttatctttcaaagaggtatatttgaaaaaaaaaaaaagtatatgtgaggatttttattgattggggatcttggagtttttcattgtcgctattgatttttacttcaatgggctcttccaacaaggaagaagcttgctggtagcacttgctaccctgagttcatccaggcccaactgtgagcaaggagcacaagccacaagtcttccagaggatgcttgattccagtggttctgcttcaaggcttccactgcaaaacactaaagatccaagaaggccttcatggccccagcaggccggatcggtactgtatcaagtcatggcaggtacagtaggataagccactctgtcccttcctgggcaaagaagaaacggaggggatggaattcttccttagacttacttttgtaaaaatgtccccacggtacttactccccactgatggaccagtggtttccagtcatgagcgttagactgacttgtttgtcttccattccattgttttgaaactcagtatgctgcccctgtcttgctgtcatgaaatcagcaagagaggatgacacatcaaataataactcggattccagcccacattggattcatcagcatttggaccaatagcccacagctgagaatgtggaatacctaaggatagcaccgcttttgttctcgcaaaaacgtatctcctaatttgaggctcagatgaaatgcatcaggtcctttggggcatagatcagaagactacaaaaatgaagctgctctgaaatctcctttagccatcaccccaaccccccaaaattagtttgtgttacttatggaagatagttttctccttttacttcacttcaaaagctttttactcaaagagtatatgttccctccaggtcagctgcccccaaaccccctccttacgctttgtcacacaaaaagtgtctctgccttgagtcatctattcaagcacttacagctctggccacaacagggcattttacaggtgcgaatgacagtagcattatgagtagtgtggaattcaggtagtaaatatgaaactagggtttgaaattgataatgctttcacaacatttgcagatgttttagaaggaaaaaagttccttcctaaaataatttctctacaattggaagattggaagattcagctagttaggagcccaccttttttcctaatctgtgtgtgccctgtaacctgactggttaacagcagtcctttgtaaacagtgttttaaactctcctagtcaatatccaccccatccaatttatcaaggaagaaatggttcagaaaatattttcagcctacagttatgttcagtcacacacacatacaaaatgttccttttgcttttaaagtaatttttgactcccagatcagtcagagcccctacagcattgttaagaaagtatttgatttttgtctcaatgaaaataaaactatattcatttccactct

SEQ ID NO: 14779 - DNA, 500 bp, Homo sapiens
gcctcatgccttcacgtgtctgttccccccgcttttcctttctgccacccctgcacgtgggccgccaggttcccaagagtatcctacccatttccttccttccactccctttgccagtgcctctcaccccaactagtagctaaccatcacccccaggactgacctcttcctcctcgctgccagatgattgttcaaagcacagaatttgtcagaaacctgcagggactccatgctgccagccttctccgtaattagcatggccccagtccatgcttctagccttggttccttctgcccctctgtttgaaattctagagccagctgtgggacaattatctgtgtcaaaagccagatgtgaaaacatctcaataacaaactggctgctttgttcaatgctagaacaacgcctgtcacagagtagaaactcaaaaatatttgctgagtgaatgaacaaatgaataaatgcataataaataattaaccaccaatccaacatccag

SEQ ID NO: 14780 - DNA, 106 bp, Homo sapiens
attatcacatgaatataaatgggaaatcagtgttttagagagagaacttttcgacatatttcctgttcccttggaataaaaacatttcttctgaaattttaccgtt

SEQ ID NO: 14781 - DNA, 105 bp, Homo sapiens
taaatcttcactgtctgactttagtctcccactaaaactgcatttcctttctacaatttcaatttctccctttgcttcaaataaagtcctgacactattcatttg

SEQ ID NO: 14782 - DNA, 2420 bp, Homo sapiens
aaggtgcaaaaagacaactaaaatacccatttggaccaaaagccaccagattgcttagtgcctgacacagaaacaactgggaatcctgaaagagaagcagacaccgtcacaggcccctctggttagactagcatgagtgaccgaagccatccatcaacattttctaacagcaccctcatcaatataaaatatgacttcttcacatacagattctctgtagtgtttgcatgtttcttggtgtttgttgtctccaggtgtaagctgttttaaatggaaggcccttctattcctgagggctcagagctgaccatgcatgaatgtatggcagtgtccacttttctgtataaaatgtataaagtggggtttcttccatattgacaaatgagggaacaggtggtgtctatcttgtatatcagaaagattatctagggtctatcctagtgataatacattgtcagccttttctgtggcaccttccagatgagaatgagggagcgaccactccaaggacggacaggaccagcagttctgcaggggcgtgctggggtggtttgggagtgcacagctgaacgcttcccgtttggattttacactcaccttcgtgttttaaagaagcctcagagtgcattgcagctctgtcagggccccattcccagcagaggcttcaggtgctttgtgtagagtccagggcagctggagctttgttggggagacttctggacccaaagggagctttcccaagaagcctttgatggccacactgtaggcagcagtgactaagcactggcagttccagaacatttacccaggtatatgttactaaaacaggctccacctcagtttatcaacattataagttactgttctaagaaaagtaaatacagttccagatgggttattgcagattaacagaaagacactcaactggactcatgtccctgcaattaaacttacttcaaccttttggaaagttatcaaaatctaaatttggaatgaatgcatttcctattttttgtctacttttgggtgataaaaagtactagcccttatttatagatatgagaaacataatgttctaaccaacaacattatggtatttgtgtgacttttatttgaaaaaatgtgagcagtaatttgggttagcctaccttcattaattctatcacatagatttcagtttttagaagggtttctgtcatcatggaagaggtggtctgggactaggtacttctcgtcttgtgagctaaggcttgtgtcatgaaagacaagaggcctctcttaacagcccagtccttgtctgcagggggaggcctgagcatttcccagccccagtgtccacacctctcagaaaagagaaaaaagaatgtcagtttaggagaaaagcttcctttttacttgtgtggttatgtgtggggctggcacccgaaatgtgtgacattcagcttctaaacgatgcctggagagtctgtttgctgcagacacccttgctcctgagtcattattttctttcatgttagattgatgacttctgtgaatagaaatcatcctgatcctattttacctggcctccagggcctgttgatgggctttgcaggcagtccagcagcccacacctgcaggcaggatgctgtcgtcaatgagctgagggtagctgctttgctgaagacctcacacgatgtccaatctcatccaaataacattgttcccatcctccccacccaccacatcaaaacataacacatcacagcactcagtagaggtcctgcctccccatttctcaagggaagccagtaggcaacacagccagcacggtgctctccagggcagcccctctcagacgaggaggcagcgggtgcagccaggtgtctgcagagcagccacaaaggtggcctaggatgcgggtgtctccccaggtgagtccatccacacacgtttgaaaaacactattagtctttctaacacactgagggaaagattaaaatctgtggaataaaggaggagattttatttacagatttttttaaaagccacctgggttgacaccttcctacttatccactagatgtcatcagaggtgctgttccgtggttctgcattaacccctgcctcatgtctgtaacatgtgacagtaattccagctcggtccctccaggcaaaggagaaacgggacttacttcacaggacagaggattgacagaagtcagtttaagataagtgtttgaatcagatttcagtacatctcattcatttcttagatttgtattcacaattgtgttctctaaaatgtgtctaaattttaaaaatatgtacatgcataatgtcattttaaaatctgaaggaaagaatttgaagtccacaaaaagtgtttgaggttctttggttttgttagtaaaagccagttctgtggtgatgacctatgg

SEQ ID NO: 14783 - DNA, 734 bp, Homo sapiens
cttatggtgggggaaatcagataaatatataaatgtaggagattttttggtcagacctttttatcccattcaatatcaaattattcatagtggagagaaagcttatacataaatttttgttttgttttgtttttgagactgagtctcactctgtcacccaggctgaagtgcagtggtacaatcttggctcactgcaacctctgccacctgggttcaagcgattctcctgcctcagcctcctgagtagctgggaccacaggtatgcaccaccacgcccagctaattttttgtatttttagtagagacggggtttcaccatgttggccaggctggtctcgaactcctaacctcaggtgatccgcccacctcggcctcccaaagtgctgggattacaggcgtgggccactgcgcctggccataaactttcaatgcgtagaaaccaaattaatttagaccttaaactagcagcatattacattcccaggaggggttataaaaagaaaaaataatttattttacaaatgagattatatttggagtcatgttccaaatctgatataaaactttttaaaaaatcagaagtccttatccaggcatggtggtgcacacctgcaatcccagctactctggagactgaggcatgagaatgacttgaacatgggaggtggaggttgctgtgagctgagatcatgccactgtactccagcctgggcaacagagcaagactctgtctc

SEQ ID NO: 14784 - DNA, 160 bp, Homo sapiens
agcgggagtggaagaaggatctaaagggaaaaactgacatgtttatgttatggaaaaagaaatttttctaagtttcatcacaaactgtgtccagtttctctgtggtgtttatgaaatagctaaaagcaaatgaagtaaagggcatactatggtttttcac

SEQ ID NO: 14785 - DNA, 1106 bp, Homo sapiens
agctgtagagtttctatgtgcctacatacatttctgtgacaagtatttgtcgtaaattaattttaattgtgtatcaagtgaaaaagaaacactgaggttttaagctgctgtatatagcttgtgagaaacctcttttctttaaaatttacataatcacaagaaaggaaagaattacagttggactgattgtgacagtgccttgtcgtcctctttgaaacaccccgtgttgtccagtataccttataacactgagccacttctccccaccctccagaaggggtccacgttgaattctgaatcatcttgaaaataagattccaaccacaaaaaaaatttagccatttctttactaaaaaaaaccaaaaaacaaatctgttttataatcacagatttttagacaaatttcttgtatcaggaagaaatacaaattttgtcatgtttctcaagcagtttttctgagtagtttctgaggaggaacaaattacaagtgtacccaataactgaaaatgttttaactcactctcatttgtaagcagtccacatagtagacaatgggttttccaagctgggcaaggtacatttaatcagtaaatcagtttcacatcatgtattgtgatgtttcaatgtgagacacaaaaacaatggcttgaaacttgtgtatcatatgtgattttgaaatgaacaccttgaatagcactaatttttatttgtggtatttttctataacaaaacaagtagctctaggaaaagaggttttattttgtaaacgatcatttgtgacctcagacactctctggctaatattttaataagctcacagcagataattctgagatcatgggtgaggggtggtgcatgttgagatttaaattggcataaagctgcatactttttgtctagctgtttgatttcattttttaatatagtatgccaattttgtgactgttaccatgtgaaagtcctgttgaaatgaacaattgtctgccccacaatcaagaatgtatgtgtaaagtgtgaataaatctcatatcaaatgtcaaacttttacatgtgaatgattttctcaaagaacatagaaaagtcaataaaatcctcttaatttccac

SEQ ID NO: 14786 - DNA, 904 bp, Homo sapiens
attgaagcttcctctgtatctgaatcttgaagactgcaaagtgatcctgaggattacagctgtggaatttttgtccaagcttcaaataattttgaaagaaattttcccatatgaaaaaaggagagaacactggcatctgttgaaatttggaagttctgaaattatagtatttttaaaaattgcactgaagtgtatacacataaagcaggtcttttatccagtgaacaggatgttttgctttagcagcagtgacataaaattccatgttagataagcatatgttacttaccttgttattaaatatttcttgaaaagcaaattttaatggtttaattttatgtggacgtatgttaaattatccaactaccctattgttaagcatttggttttaaaatttttatgctaatataaatgctcaagtaatttaaaatattgaaagcatccctgttggtataaatttctgagtaaatgcattggatcagttggactttgaacgcctttgaaatggctttgctaaaatgctcccgccacaaagttgtaggaaatgggaagaggagtcaactagaggcaagggagttgagagagctgcaactgtaaagggcaagaacaggcagaggtaaaaagatgatggaaggtgtggtgactaagggccacggttattgggtgaaatttgagattgtaggccaactgtattttcaagcttctgaacttaggcaaaatattcatcgcaaagtctctagcgtcatatttttctcacccaaattacgtttccacgagattatttatatatagttggtctatctctgcagtccttgaaggtgaagttgtgtgttactaggctgtgttttgggatgtcagcagtggcctgaagtgagttgtgcaataaatgttaagttgaaacctc

SEQ ID NO: 14787 - DNA, 1059 bp, Homo sapiens
gcagccgggtggtgacaaggagaaaagccttctagggtcactgtcattccctggccatgttgcaaacagcgcaattccaagctcgagagcttcagcctcaggaaagaacttccccttccctgtctcccatccctctgtggcaggcgcctctcaccagggcaggagaggactcagcctcctgtgttttggagaaggggcccaatgtgtgttgacgatggctgggggccaggtgtttctgttagaggccaagtattattgacacaggattgcaaacacacaaacaattggaacagagcactctgaaaggccattttttaagcattttaaaatctattctctccccctttctccctggatgattcaggaagctgacattgtttcctcaaggcagaattttcctggttctgttttctcagccagttgctgtggaaggagaatgctttctttgtggcctcatctgtggtttcgtgtccctctgaaggaaactagtttccactgtgtaacaggcagacatgtaactatttaaagcacagttcagtcctaaaagggtctgggagaaccagatgatgtactaggtgaagcattgcattgtgggaatcacaaagcaaatagtactccagaaagacaaatatcagaagcttcctattctttttttttttttttttttttttgagacagggtctttctctgttgcccaggctagagtgcactggtgatcacggctcactctagccttgaattcctgggcccaagcaattctcccacctcagcctcctgagtagctgggactacaagtgtgcaccaccatgcctggctaattttttgaatttttgtagtgatgggatctcgctctgttgcccagggtggtctcgaactcctggcctcaagcgatcctcccacctcgacctcccaaagtgctgggattacaggtgtgagccacctcgcctgggcccccttctccatatgcctccaaaaacatgtccctggagagtagcctgctcccacactgtcactggatgtcatggggccaataaaatctcctgcaattgtgtatctcag

SEQ ID NO: 14788 - DNA, 2365 bp, Homo sapiens
ttgatcctacaagcttactacacataggaaaattcatactggagagaaactacaaatgtgaagaatgtgttaaagcctttaacaagtcttcaactttttctgcacacacgaggtattttatactggtgagaaaccttacaatgtaaagaatgtggcacagcttttaactaatcttcaaaccttactgaaagttgagaaaattcgtactggagagaatcctacaaatgtgaaaaatgtggcaaatcctttaactgatcctcaacttttactaaacataaggtaattcatactggagaaaagccatacaaatgagaagaatgtggcaatgcctttaatcagtcctcacacctttctacacataagataatttatactggagaggaactctatagttgtgaagaatgtggcaaagcttttaaccaatcctcataccttactatacagaaattcatactggagagaaagcctacaattgtgaagaatgtggcaaagcttttaaccttccttaacccttaactgtagataagaaaattcatactggaaagaaaccctacaaatgtgaagtctgtggcaaagcttttaactgattctcaactcttactacatgtaagagtatttatactggaaagaaaccctacaaatgtaaaaaacgtggcaatgcctttaactggtcctcacaccttgctacatataagacagtttatactttgagagaaaccctgcaaatgtgaataatgtggcaatactttaaaccaatcctcaaacctcactaaacataagataatactgaaaactttacaaacctgaatgatgtgacaataattttgacaacacctcgaactttctaacataaatcatactggtgaaaaatcctagaaatgtgaaaaatatcacaaagcctttaaatggttgtcacacttgattgtaggtaagaatccatactgaagaaaactcctggaagtgtaaaaaatgtggcaacacttttaataaatgctcaccccttattgcacaggaaagcatttatacttcagaaagattgtacaaatacaaggaatgtggaaaagccattattatctgctcagattttactcaacattagagagttagtacgtaataaaagcattataaatgcaatttttgtcaagagatctttcagaaaatataagcctttaaagtgaagaagaggagccagttgtgctggctcacatctgtaatgccagcactttgggaggccaaggtgggtggatcacctgagggcaggagtctgagaccagcctggccaacatagcaaaaccccatctctattaaaaattttacaaaaattagctgcgtgtggtggcaggcccctgtaatcccagctaattgggaggctgaagcaggagaattgctcaaacctgggaggcgaagattgcagtgagctgaaatcacaccactacactccagccaaagcaacaagagcaaaaacttcgtctcaaaaacaaaacaaaaaaagagtattcattgtgaggacaaacaatacaaatacgaagagggttgtagtacctttacttgtatcacagatacttttgtacccattttgcactagaggaaaaccatgaagcagttgctcaaatgttgttcaacaccagaaaatttatattggagaaaagcactgtaaatgtaatgcatttgtgaaaacattttttaaaaaactacagcttagaaaataccagaggcctcatactaaaatatatttttgcaagtgaagtaaatataaaaataatttaatccaaaattaagtctatataaatatcagagaattcacagtagaaatatctaaggtactgacacttcagacattgctgagtatagaatcagaatgctgagtatagaaaataatttaaaactaaagttggtaggtaaataatgtgtatataactttaaaagaagtagaatttttttgtagatgtataattacattcaaattatattttttcttgaaaaattagtttttgaaaagcaaatgatgtaattcaactcaaattcatgctcttcattcctattgtattcacatgtgaaagcatgtgattaatttttcatgcatcaaagatatgagaaatcatttctgttaggtcggtattatttatgacactttctatgaaagaataaggacattaaaatgtaagatgcatgatgaaaacctgagtgaagaggctgtttgtgtttaacttataatattgagtgatccatgaagtaggttttcagagcaatattcttctgcattatagtaagagaaaaccatttttaatcttagttaaaattaaagtgaattagtagtatatcattttactatttgtacttttatgtaataaaatgcaatgtgttt

SEQ ID NO: 14789 - DNA, 1125 bp, Homo sapiens
caacttactgaacataagaaaatttacactagagagaaagcctacaaatgtgaagaatgtggcaaagcctttaaccagttttcaacccttattacacataagataattcatagcggagagaaaccccacaaatgtgaagaatgtggcagagcttttaaccagtccgcaaagctcactgaacataagttaattcatactggagaaaaaccctacaaatgtaaagaatgtggaaaagcttttcaccgatactcaatccttagtacacataagaaaattcatactggggagaaaccccacaaatgtggagaatgcggaaaagcctttaactggtcctcaactcttattacacataagataattcacagtggagaaaaaccctacaaatgtgaagaatgtggcaaagcttttaaccagtcctcacaccttatgagacataagaaaattcatagtaaagagaaaccctacaaatgtgaacagtgtggcaaggtctttaagaagtcctcaactcttactgcacataagatcattcatactggagagaaaccttacaaatgtgaggaatgtggcaaaggttttagccaactctcaaaccttactaaacacaagaagattcatactagagagaaaccctacaaatgtgaagaatgtggcatatcttttaaccagttctcacaacttgctatacataagatgattcacacttgaatgaaaccctacaaatgtgaacgatgtggcagttgttttaactagttctcgaactttactatgcataagaaaattcaaactggagagaaactctacaaatgtgaagaatgtggcaaagcttttaaccaagtctcaacacttactatacataagataatttatactggagcaaaaccttggaaattcaaagaatgtggtaaaacttacaatcctcaaaacttcttacacctaaaattcatgcaggagagaaacaccacaaatgtgaaaaatttggtaaattctttaacaagtcttcaaccctttctgcacataatataattcatactggagagaaaccccacaaatatgaagaatgtggtaatgcttttaaccaattctcaaatcttactaaacaaaattaatactgaaaatgttacaaac

SEQ ID NO: 14790 - DNA, 2537 bp, Homo sapiens
aaatgtgaagaatgtgacaaagcctttaagcggttgtcacacttgattgtatataagataattcatactggagaaaactcccagaagtggagttttccttattgcacaggaaagcatttatacttgagaaaaattgtataaagaatggaaaagtcattaatatctgctcatatcttaacatcagcgagttggtatttaataaaagcattatcaatgaaattactgtcaaaagatctttcagacaatataagcctgcaaagtgcagcagagtatttattttgaagagaaacattaaaagtacaaagaggtttgtagtacctttgtttgtatcatagatcttattgtacacattttgtaccagagaaaaaccctgaagcagttgttcaaactttgttcaataccaggaaatttatattggagaaaaaccctatgagtgtaatgaatttggaaaaatatttttttcaacaacagcttagaaaacatgggaggaattacactaaaatatatttttgcaaatgcagcagtaaatatgaaagaaatgatccaaagttaggtttatataaatatcagagaattcacaatacagatatctaagatactgacacttcagacattacacaaaatcagagtgctgagtacagaaagttatccaaaacaaaagttggtagataactaatagtgaacaagtttttggcagaggtatatttacattcagagtacacttttctttggaaaaaattacaggttttttgaaaagtgaataatgtaattcaactctcaaattcatggtttttttttttttggttttggttttgggttttttgtttgtttgtttgtttgtttttgagacggagtttcactcttgttgcccaggctggagtgcaatggcgtgatctcagctcaccgcaacctctgcctcccagattcaagcaattctcctgcctcagcctccctagtagctgggattacaggcatgtgccacacctggctaatttttgtggttttagtagagacagggtttctccatgttggtcagtctggtctcaaactcccaacctcaggtgatatgcccgcctcggcctcccaaaatgttgggattacaggcatgagccactgcacccggcgcatgttttttcttcattcctattgtattcacatgtgaaagcatgtgatcaacttgctgcatcaaagatatgagatttttttttttattaggtgggcattatttatgaccttttctgtggaagagtaagaacattaaaatgaaagatgcatgatgaaaatctaagtagagaggctcttgtggttaactgataatattgagtgatgcatgaggtaggtgttcagagtaatattctgcattatagtgaaaaatttttaatattaaaattcaattatatcattttatgaattgtgcttttcataatgcagtacatttcaaaatttttagattatgtatgaacttagatttttaaacatgttttaacatgttaagacttgtgcattcagtgaagcgttattatgccacaaactaacctacctcaccttactcaatggtgtaggtaaaagatgatagcaatatattatttggttacatagtggactaacatttttagtaatctcttttgccagtggctttaaactgcagataagttaaatattcccataggttttacatttatattttttcttatttaaatttattgttcttatttttcatgggtacatagtatgtttttatgctgtatatggcatgttttgatacaggtatataatatgtaataatcacatcagggtaaatgaggtatcccttactagcatttatcctttgtattttattttaaaatgtacaactaaattgttatggactacagggttatttttatggtcataataaaaattacaaaagtatgaataaaatacatacatttctgagtcctgaatatttttaaaaatttgttatatatttttcttctaacatgtggcctctttgcctgcaaacatataaagactcagttttgatttacatagagttaaatatacatatattttactttaaagataaatcttaagtgtaagaaaattgtagagtaagtgtgcttgtgtgagtatgtttgtacctgttttcaaaagaaaacagcaatattggaacaaaacaaatcattttaataaggtgactaatttattagaaaactaacaacctcaaaaatgctgaaagcaaatctatactctctctgctttgtactgaattcattactgtaaaatattatggcttatggttcagaatctccccatgcagatgttctgtttttacttgcctggtactcatggtagagccatacatttcttttttcttacaatttcttttacagtttatgaagtattatatgagctggtcagggattacaacaattattttttttataaaatttagtagtgcacaaaaagtaatttttagatgtaattttactattagtctattaagttatattttatttatttagttaaaacattgccctttgttcttttaattggag

SEQ ID NO: 14791 - DNA, 1209 bp, Homo sapiens
aagatgtgacaatgattttcactacacctcaaacttttctaaacataaaccatattggtgccctagaaatgtgaggaatatgacaaggactttaaatggttgtcacgcttgattgtaggtaagataatttatattggagaaaaatcctccaagtatgaagaatgtggcaaacttttaaccaatcctcacaccttattgcacaggaaagcatttatacttgagaaaaattgtataaagaatatggaaaagccatttatatctgctcacatgtaaaaacatcagttcatacttaataaaatgcaattaccgtcaaatctttcagaaaatataagcctttaatacgaggaagagtattcttaagatgaacattacaaatagaaagagggttgtagtacctttagttttatgatagatcttattgtacacattttgtaccagaggaaaaccctaaagcattagttgctcaaactttgttcgacatcagggaatttgtattggagaaaaaccctgcaaatgtaataaatatggaaaaacattttttcaaaaactacagcttggaaaacatcagagagttcatactaaaatatatttttgcagatgcagtaaatatgaaaaatatttaatcccaaattaagtctatgtaaatatcagaattcacagtagaaatcataaggcataaggcactgatacttcagacattacactaaattagagtgttgagtataggagatccaaaactaaaattgttaggtaagttatttatatataactttaaaagaagtagaagattttttggagatttataattacattcaaagtatacttttttcttgaaaaaaattacagattttttgaaaagcaattgatgtaatttaactctcaaattcatgtttttcttcattcctattatattcacatgtgaaagcaagtgatctgttgttgctgaatcagagatatgagagattcttttttataggtgggcattatttatgcccctttctgtggaagagtaagaaaattaaaatacaagatgcatgaggaaaatgtagagatgctctttgtgattaacttagaatattaagtgctacttgaggtacatgttcagactaacattcttttgcagtatagtgagaaaaaaacattttaaaattaattatcattttgttgattgtgcttttatgtaataaaatgcagtactttaaaacattt

SEQ ID NO: 14792 - DNA, 512 bp, Homo sapiens
cgcccgacagactccaccctaacagtctcaagcccctttccattcagtttattttgcagcaggtttttattattattattattattattattcacaacagacactttccctaagaatctcaaactgatttttaaaaatccggtaaattagaaggggccctcgctattttctgtgtcagtcttcattttaaatatggatacaaaaaggatacgccgagccaatcaaagacaagctttaactttactttgaagtgtttctgaaatgataaaatgtagccctagccccctgccctcaattgtaaagtgagcaaccattgctagtaattctttaatgtgtataaattcaatttcaggtataacaaatgtgatcatgacatgaaaatattctagaatagatactgtattaaatattgccatgtttacaatatgtaatatgtttttagccgatggatttaaacatgtagattcaactagaatccatttgtgatatttgtaaataaaggtagaaatatt

SEQ ID NO: 14793 - DNA, 422 bp, Homo sapiens
gtcctcccacacctgccccctaataaagtgggcgcgagaggaggctgctgtgtgtttcctgccccagcctggctccctcgttgctgggctttcggggctggccagtggggacagtcagggactggagaggcagggcagggtggcctgtaatcccagcactttggaagggcaaggtgcgaggatgcttgaggccaggagtttgacacagcctgggcaacacagggagacccccatctctactcaataataaaacaaatagcctggcgtggtggcccatgcatatagtcccagctacttgtaaggctgaggtgagaggacacttgtgcccaggagtggaggctgcagtgagctatgatcacgccactgcattccagcctggataacagagtgagaacctatctctaaaaataaataaataaacg

SEQ ID NO: 14794 - DNA, 2207 bp, Homo sapiens
aagagcacagctggccccggcgtttcatgaagtcagaaggcctggcagccatttcctggacgttgagaggattgtttatttgatttttatcctcatcccagcaggcctggctttgtggttagttgggtacatcacaaaaataagttaaaaagaaatatttgtgccttggggagaagaaacatggtgaaaacaggctgaggttgtcagggcagagagctgaaggtggggacagtgaccgcggacccctctgtgcttgaaagatttcctccacggcctttgccccagttgtggggaggtctctgtgcacagcggggaaaatgcttgtgtcgcctttggtgggccatgtcctaattagtttcatctgcttccctgggaacttactaaggggcccagagcactgttggaagtctggttagagtccccagagagttactctaagttaaaatgagccactgaccttggctcaccttagaggaatttcctcgagaacaacagagataagaaaagaaccggcctggccaatccttcaacagctctagagccccttttctctgctggcaggggctttgtttaccagctcactgtttaggctaaatgttagggaccagatcactgcagttgaaaacgggcactccaggcttagtgacagtggcagcagaaacagtgttggctgcctttctgaccaccccactttcctgccctgagacagcagcccagggcaggtgcttcatattcagaccaggtaagcctcatttgcacaacagtcaaattgtttgttcctttaaaaaggacacaattagcctggcacggtgactcatgcttgtaatcccagcactttgggagggcaaggcaggcggatcacctgaggtcaggagtttgagaccagcctcaccaacatggaaaaaccccatctctactaaaaaaatacaaaattaaccaggggtgatggcacattcctgtaatcccagctactcgggaggccgaggcaggagaatcgcttgaacccgggaggcagaggttgaggtgagccaagattgcaccattgcactccagcctgggcaacaagagcaaaacttcatctaaaaaacagaaaatattaagatgattaccatgtgaaaacctttttaatattcaggatttggaaagtatagttgccccaggcatgtggttgttgccttaggtcctgcgaatattgctgaaaatcggattttccacattcactttcttccctgttttagggaagaaaatgatcatagacattcgattttccaaattggcgctcttattttcaatgctaattggattacttctcttccaaccctcctgcccgtccatccatcccagtccccaggcatcttaaccttaccatctgagcttcagctgaaatctgtttataggcaacattgaaagtaccagattggggccaggtgtagcggcccacacctgtaatcccagcactttgggaggcggaggctagcggatcatgaggtcaggagttcaagaccagcctggccaacatggtgaaacccccatctctactaaagatataaaaaactagccgagcgtggtgttgcatgcctgtgatcccagctactcgggaggctgaggcgggggaatcgcttgaaccggggaggcagaggttgcagtgagccagatcgtgcattgcactccagcctggccgacagggtgagactccatctcaaaaaagagaaagtaccagattgtacttttaaatctgtctagcgtattgagaattttagtgggagctgttgatttatttctcagggcatacatgtgccaatctgtctcattgttgtctctctcttttttttttttttttttgagacagtctcgctgtgttgcccaggagtgcagtggcacgatctctgctcactgcaacctctgcctcccagattcaagcgattctggtgccttagcctcctgagtagctgggacttacaggcacgtaccactataccctgctaaaatttgtatttttagtagagacagggttttgccatattggccaggctagtcgtaatgtctctttttaacactgaatatgttaggtggtttttcttgatggatttagggttaacctagttaataataaattgtttccaggtaattatcaagttttgtcattttataaatctgaagagttaatattgtcatcgatacaaataaagtgaaatctgactgaggct

SEQ ID NO: 14795 - DNA, 548 bp, Homo sapiens
gaaagattgctgccttttcagcagaagggaaattcctaggattggctgtcccctgccaagcttggtggagcgtctgcaccttggctgcgccgcctgtgcatttgccagtttcctcccactgagaggatggaggtgtccgcacagctttgggcctcgtgagggatctgcctcctgagcaaagagctcttgatcccgatttcatgcacagccctgcagtaaggagcccagaaggaacatgtgtttcctgttaaaactcctcttgttctcttttcttacattatgacgtttgttttcaaggagagggtttaaaaatgggatcctgtaagcagacttgggcagtctccttttgaaataggttgtctgtacatgttctaatgttttgtagaacacgtgtgcctgtttaagtgtattgatgtgaataatattaaatatcctaattatttaattcattgtattgtttctgagaagttgggaaattaccattatacatttacaacctaatgacttttgtattttatttttcaaaataaaagctttcaatgtgaagc

SEQ ID NO: 14796 - DNA, 1598 bp, Homo sapiens
gtagccccggtaggcgagagtcccatcagggaggatgtccaccttgcttggtggctctgggagtaagatccctgaaggggctgctgactgccccagaatctgccgaggtgagaacagcatcctgaggcacagctcccaggggacagaggtgtagctccaatctccctgactgcacctcagggttgggctcagggcttgcggcctgcaggcactccagccagcgctcacctggcctttcctcaaggcatggtagtctttccttgaggctgatagctagggcttgaccaggaagtcccgagaagttttgtcaccttcttgaccttgcaagagagtttctgcccattttagagccacgttaccaaatcgatgtaggcctaatcacttcctcaaccctgttcaagcgtccctcccttgtgctcagtatattggtgtgaacacggaacatgatgggggatttacctgaccagccaccccatagcccctggctgaagaagaaagagcatcttctctcccactgcaccccttctcctccaagaatagttgcccacattcccaaaatgtggaaagacttttcttttccttccggaacatgttcttcaccaccttttggagatttaaccatagctgccaaagctatgcacccagttggccttagaaaaccacaatgtttacagccctgtcttagggccgcggcttctcttatcttccaccaccttccttgcttgcagggttatcttctcacagggctggaatgcaaatttcagaggcttcttttgaagattccccaagtcaagcaggcaagatgcctagatcttctgttatctttgacatgtaacatcctttttagaggctcagaacacctccttggctgctatctcatgtgttagaatccagtttgtggtgaacctctttggaaggggaccccctctctttaaaccctgttcctctgtcctggtaacattctccttctaggagagcctctcttctgagaaggtaaaggaagggctgggtgagacacacagctatcctaggagccgtaggaagacaaaacttcccttttgttttactcctcactcctctatttttgttttactcacttctttatattttgttttactcctcactcctgtatattttggtttacttactcctctatttcagaaattgaaaaagatccccaaggatctgttactactgcatttccttcttgctctgtctacagcctaggccaactagtcagggtctggacatgcatctcctaaaggaagaactgtgtagcaccattgatcacaatgtaacatttccatgctgcattaagggtgtctctctctaatcatgattgtacctgtctcttcctgggtaaagggagatttttttttttaatgtgtaaagaattgatgcgagccaggaacatgtctgtagtcccagctacttgggcacacgcctgtagtccaggccactcgagcacacacctgtagtaccagctactctggaggctgaggcaggaggatcacttgagcccaggagattaagactgtagtatactatgatcgtgcctgtggctagccactgtgctccagcctgggcaacaccatcgt

SEQ ID NO: 14797 - DNA, 2175 bp, Homo sapiens
tcacaatttagtggagagtatttatttgagcctaaattgtaggtagcccttactacactcaactgattgggatctagaatgtaactaaattgcttataaatgtcagcattttttaaaggtacagtatatggggattgtttcgtttttcctagcaggggaaccttagttaataataaaatactacttatttgagttactgatacagattcatttaaggcttgtgtgcaaattttgtctcaatcttttttccctccatgattttcctatgtgcttcctctggcattcactgtggttttggtaaataattgccttttaaaggattaaacaaatgaatgctacaaagtgtatgttcaagaaaattaaatggtaccactcttccacagtttggaataattttataattgtaaagatagaaattatattgataagtaaatatgtaaaattgtaaatatgtaaaaaaaagaatggtgtctgctgtgcatggcattttatatgttaattttttagtttaaaatgaagtatattgaatgtttgcctttagcaccattttatttggtttgtcccactaaaatgactcgagaagtgtttagacaaactccccttaagatgtgcactccatctttaagaacgtgttagccttaactttgaggttctatatagtcagagactatgacaccactaaggttcagaataaagtttaggccacataaaattgctgtttaatgtagtcgatggaagactttaaactatgcttctagcttatttttccctcattcattcagcaaatctctattgagttcttcagtgagaaggagcaggcactgggcctggaatggaaggcgggaatgaatgggcctctgatggtgagaggtgacggggtccctcagctgtgagatgcaaggggcgccttgcagcctccataatatacatttgactttgcaaacgtctagacatgttttctgaacctttttcaggacatttcaacctcgggactattcatattagtggcctgagaggtgtttgttgtggggccaccctgtgcatggtagaatgttcagcagcattcctgccatccatatccattaggtgccagtagcacccccgctagagctgtgaaaaattctctccagacatagtcagatgtctcctggggccatatcacccctccgttaagaaccactgatgtcttttacaaaccaggagttatcctcctggtggttaatatggtgtaaccaaagaatcttgcactcaatgcacagtgtgatgttaactaaaacgagttaaatatttaggaggcttgacagctacctgcattgtagaaccttttcttatctcagtggaaccttctataacctaaatataccattgatgattcttcttccattcagtgacatccacagattatgcagctatacttgtgaaatcgtgcatgaggccccagggcaccgttctagaacaacgtcacttcacacaggcagctgagaaaggttctcttgcttttccagtatcttcctaaggatggagcccaaaattgcagagcagtaactttggaataaaaccagggtgggtataaaacttcttattcttaaatttacatataagatctattaagcttgacacatctgtgtcatcacgcactgaagacaggaagcagttcactgagtcagctggttcccaagctcgcacagaaggtgataagttactatcaaatgccagtgagaatcttcttatagaataacctgggcccaagtgattttagtacaaaacttgcccttctttggtttaattttctatgtgcttttaggtgtgaatccagatatgcggtcttaattcctttggaaatacacagttcgtttagttactgtacactctgtttgttcaataaactgcatatcaacttcccacaaaagctgacttttttgggtctcttacatataaagtaggttattgagttgatttttttggaggtatctcatattggtcgaattcttctggtatggactcttgccttatatagaggcttctatttctcttaagtcagcatcaatacaacggccggagtttctgtttttgcaataagaagatgttggtattttatgtagggtaaatgtgactggaatacacctttggaacggaattctttatcaataaagtttcacaatccgtccctcttcc

SEQ ID NO: 14798 - DNA, 3028 bp, Homo sapiens
ttccacagctccttgttttttgagagagactgagagaaccataatccttgcctgctgaacccagcctgggcctggatgctctgtgaatacattatcttgcgatgttgggttattccagccaaagacatttcaagtgcctgtaactgatttgtacatatttataaaaatctattcagaaattggtccaataatgcacgtgctttgccctgggtacagccagagcccttcaaccccaccttggacttgaggacctacctgatgggacgtttccacgtgtctctagagaaggattcctggatctagctggtcacgacgatgttttcaccaaggtcacaggagcattgcgtcgctgatggggttgaagtttggtttggttcttgtttcagcccaatatgtagagaacatttgaaacagtctgcacctttgatacggtattgcatttccaaagccaccaatccattttgtggattttatgtgtttgtggcttaataatcatagtaacaacaataatacctttttctccattttgcttgcaggaaacataccttaagttttttttgttttgtttttgtttttttgttttttgttttcctttatgaagaaaaaataaaatagtcacattttaatactactctagttaggacagacttgtgcttttatcctgactaaaaagttaaatatttaagtcacatacatggtaaagatctaagtttcattttccacatggatgaccaggaacctggtcttgttggagctggcataggaggttctactgtcttgtcgtccactcttgtccctcccttctgttatcaaagttaaagcgcctcttcactcaaaagggcttcaaaatgtaaatggctctagagttagagtgactgtttgctcttctgctttctggaatgcagatgacagtatggaaagaaagaataatgattctatctaataggaaaggatttcttctttcttttttaaagagtgggtggattttctcccttttgttttgcttttattttcatgctactaacatatcttcagaaggaaatggcaactagtagatcagtaaaattacgaaaacgatgcctgcaaaatttgaaggaatgcaattctgatttgccatttatcagggaaaactgaaagcatttttcttataactttttttctttttctttttttttggaggggggaggcagggtcttgctctgtccctcaggctggagcttagctcagtgcagcctccaactcctgggctcaagcaatcctcccactttagcctcctgagtagctgggactacaggcgtgtgccagcgcgcctggctaattttaaaatttttttgtagagacagagtctccctctgttgcccaggctggtctggaactcctagcttcaaatgatcctctcacctcggcctcccaaaatcctgggattccaggcgtcagccactgctctcggccctcttacaccattttgtttgattgtctagtccctgtttctttttctttctaatccttattcatttaagcaaaaccatacattatcttttccagtcctttcttgtattcttactgtttttttaaaataactttttgccttaatagctcattgtcactaataacttctgtgttctcccaggcagtgttataacagaagggcaatgaaaacattggacatgaccatgagtgcttcctttccttaactctaggtttgtagtctgttttaaattaggattagttcctgcattctgaaatacattggcctagaacattttatcccaggcatttttgaatagaaaacagttgcgtgcttttattgaagattgttaaaataatcaccatagtaacttgatatgttagtatttttctttttccttttagtatgtttcaagtgcagtaatcgtacttgtctatccagtttctatgtatgatacgagttgcttacacgatgcatggctaacttgttaatttagttttctccttagagactttgagacccttaagagacaagattgagaaagagccatgtggcttggctctagaaacgtcattatcattaggaccatcagattttagattaagctgctattgaattaataaaatcccaatgaagcagagttatagggatagatttatagctggcagagtggtatcaaaggagaaaaacagtgaaaaagccaatttcactggttcgttcaatccagcttgttgctaatattagttacccttgttttaatgacagagagtggctggaatctgtagctaggggaggggcaacactgttagatgtgaggaaaggaagtgccaaaaatgcctggacagatggcttgtcccaaggccaggacacacactttaaaatccaacattcacctaagcaagtaattcttaaagatcttacagaaacgcagagtcaatcaggtttataaaggaaggctgaggggagagaggaggcctgggggcctggacgaagaggcctaggacctgaagagactccagcgagtctcgggaagcccaggggacctgtcaccatctgggcacttcccaggctcaatgctcagccagagtttgctggtggacctcaggattcgaagtgtgcaacagacggagtgcgcttgctgttcagggcggccccgtgcaggagcaccagctcaccctcaggcatctcggactggagggccagcagaaggtcagcaacttactcttaaaacgattgtttcggatcatattgatctctttcctttttccttttgtcctttcactgtatgacttgaatcagttttgattctatttgtaagtgtttcttgtcgtgaggcacctgccatgtctgttgcgttttcctcggcagcgtgtagggcttcagcttcctgggttttcacccttcctgcaggcactgtggggtcctgagggccagtgggtccatttcacctcttgctgcatgatggtcagtagctgatctgttatggcattcacttccagattaattttccgtgtttgaagtatgtgcatatgtgctttacagaataaaacatctgaattt

SEQ ID NO: 14799 - DNA, 980 bp, Homo sapiens
gattatctgatttcaaggtactgaaggacaaaaacttggatggcctcaaaaggttcttgaacaccactgtgattctccaaggacgaattacgtaaattatactttcatacaaaggagacgataaggcagtaaacatggagacacgggggacagcgtccacactcagagggcctgggccacagccccgatgtttcttttcagaactcagcccctttcctgattttacttctaagaggaaaattattttggggaggaactacacagtcgtgattagaatttatctgatggttttgtattataacttgtaagacctgccagaatgctagtcccgagagtgtcagacaaggaagaagtccctgggcctcttccccttacccggcccttagatttcatggagcagccacttagcattgaattgcactaccctgagctaaacgtgtctgtgctttctaagataagagcttgatccctttcttctatcttaagacagcacctcctgaaaagaatcgaagttgtcacaactctcaattattttttaaatactgcatagattgagttttggtttattaccaacccttcccagaattgcgttggatctaaaactactagatctcatcccattcccatgtaaattaccacagaccgcagtaccggggctggagcggagtgaagctgtctgctgtaagaggagtggccatgtgagggcatggagtcattagtctcacaaacacactttggactgaagaggatcatttctttttgttcgtgaggtcactgtccaggcctctcatatcatgaccagacggcgggtctccatcttctttcactcctgtggccctggctgctttacacaatctgttctataaggttcaggtgttttcaagttggaaagatcataaatactcaaaattgttttcaagttagcaagttcttttaacagtcttttatgcaaaaattgaattaataaaataatcttttgt

SEQ ID NO: 14800 - DNA, 1872 bp, Homo sapiens
gccgagaacaggagcaagaacgaggaagaagaaaccctaggcagacaccaggccaggcttgagagacagaactcctgcatggctcacacagactgggggggaaagccccaccccttccccttgtaaaaaatgtatagactcagtgcacattttgaaatgttttgtatattatatgttgagatttttcagatcttttagcccagtcatatgttctcacgtctcctactttttgtttctcgtataaaactttttgatttgaaccaaaacagtgaagatgacaacacacaccaattggatgataattgtagcgggggcggtgggggggagaagtccacgccatccatcatgcaaaattctttcagatgaggtgggaaggccgtgtacatagttatgtaaaaagagattgcttcatgagctaatggttcatatatgcaaaagggtaagatgaaagctttactttgtacaaatgtaaatagataaagtaacataatacattaatacttcttaaaatgtgctatttgcaaacttacttaatatcagtgaacacagtcggctaaagctgtgttcccatatattgttatagacagctaaacccttcaactatgcaatgaatgttcgggcttttcacaaaagcccgcctaactcaaaggagccttttcaaatccatttacagcatacttaaggtcatattttccctgaacaagcgcttacgtgatatgactctgttttccttgcttgttttttttcaaacggagaaacatcctgttttgcaaattggaccccaggctggaacttagcatctgaagttgccgcttgtgggctctgggggaaagtgtagccccggagaggtaactgaggacatgagcaaccagtgccagggagggtgggatttgccagatgccaaaatcaggggacgggtggtggtgtctgtcagacacacacaggtcgccagtgacttcacacacacctcatgtgagaaccatgccttttttagtgtgtcctatttcatacctgtacacacttcctcgttttgtaatgagatttacttacacccaaacagatcctgaaagaaagcttcaagttttctcagatgatggatatgttttcactgtattcaataactgacggatgtaaggtgcacgtttcctgatgtgacgcactgtattccagctggtgatcaagtctgggaacagccgtaacaggtcaaccttgtggagccatcgcgagttagagggtgaaagatggcagaaaaaaaagtcttgtgtgtgagtgtgttttttgagtttgcatcaatcttaatgtctcttcataatacttttataatacattaagcctcttgtctacatatttggagagaatatgactttactagcagagaaatacaatatatcttgtctactggactgtaaaatatatgtatgaaataaaattagttccatttggtcttctagtatattaaagtgctatctgacgttgttatcctgtttttgcaaaaaaaaaaaaaaaaaaaagttaactacagaccattgtttctaataagcagagagatctattttagtagtaaactgaaggtttagttgtgagcttcagattttgtgaactccagatgttgtgcggtgtttttttttttttttaagacaacaactaaaaaaaatgcaaggaatatgtacactggaactgtagtggtagctttcagtattgtaaagagattgttctatacggacctttttgctgtttatcctgtatgtaataaagtcctttctagatcctatgtgaaaagaaaagtgaagcaactgaatcttcagcatgttctcatcggcggagccttcttgtgtaatgtaaactgtgccatgttattaaaaaatgtgaact

SEQ ID NO: 14801 - DNA, 1452 bp, Homo sapiens
agggagggagctggggcactggagcctggcccccaggacatggctgctccccccaacatctggaccagctgccctggcggagagacagcaaggggccggcaggtgctcgatgggccccccagggcttctccagggcagcacagggaccccggatgaagactctgtcccccctcaggcattcagctgcccacaagtttcctgcaccctggaaaagccccccacccttcctctgggaaactgacagctgtcttccacagcctctgatgtggacctggtactgaggagcaagactgtccagttctcctccacatctcccatcccagaatcaggatctgggactggcagggtcccctcctgtgtctcatctcttgcagcagcagctgctgaactccagccatcaacacggtgggaggcagcgggggcttcagccatgtcctagctccccgccctaaaaggaggcagtgaggaccaggcactatttcctccgaggttacttctacccagatgacacctgcctgttcacgccccaaggcagctactgcccctaacccttcccaccagggtagctttgggcactgcagctctggacttttctggcccctcctgagatgacctgatggagctgatgctttctctcctaatccctgggcactaggctcttatcagtgtgcttgggccagctctcctgcctgtgtctagaggaagccagagacagaaataggctaagcctgcagtaggatctcagccacaagggccccgcaggatggagctgggtcaaggaccagggagccctgactcccagaggctgccaccggggagaagcagcggtcctccatccagaacctaagggctgaagcaaaggctgccaggacccttgaagatgcttttggctcacctcatttcaccccacgctctgctggctggcagaggagaaggcagtcgtttcctctctgaagagtatttttttcgattgccctctggttagggtgcacatataaatcagagttaatatatgaacgcgtgtgcatgcacaagtgtgtgtgtgcctgcgtgctgtgcgtggcagggtgtgtgtgtgtgtgtctggctgtgcgttccggagtgtgtgacgatgctgacctagctgtgtggccttgggcttgctgcttcattactcacctggatggggacgagggatgagaagggtgtgggtttggccccatgtcactggccggaaggatgtgtctcagccctgccctgtggggtgcccccgatgggaggctgtcccatctcccagtccccatctctttttccccacactgtccctggccaagccctgcccagagctgaaccctgtagctgcccccttgccctgtgtgggattcgcagtgtctcatttggtgacgtcttactggtgatcatctcctcaccccatctcccaccttgtggaataaatacatgttagcacttccc

SEQ ID NO: 14802 - DNA, 2064 bp, Homo sapiens
cctttgtcccctgtccctgttccccccaccccttccctaaatctggaccttggcacctgctaggaagagccttggacccttccagttgcgtaaagcaaacctaccccggatctctggcttcagccgccagggggcagtggcagccctggggccctttcccttctggaggaagcacaagcctcagggaaggggaagcaggatgcggagggccaaagcccgggacctctacttgaacagttctactggggaggctggagaactaaggaaacacctgtacatagtgtccgctgccctgactcccgcttagcacacccttaggcaggcgccccttccacctttccccgagaccgtcgtcgctggagggggcagggtccagcccgcctggatcggtggtgtgcacctgatgggatttgggaaatgggctatccgtaaagctttatcttgcttggcttagctgtgagaagtggttctcttcctctggtcccttctggggactctgtttccccatttcttgctgctgtgtccctcaccagttccttgcaggattccttcgtttttaaatgcccttgaatctagctttgccttggagaccccagtgggtgctgctcctgccgttttcttcctgccaagcctgaatcaatgtttcatctccaaccctctgccagtttggcccctcagagcttggtggctcaagactgttagcctggcagagccaggggtgaagggagaagctcttggagcaggcaggatgcccaccgctgcttcagctgcctcctcgcccagctaccctttggccccattgggccctcgtctgcctctccaggattgtatgtttcaagccttgtcctgtgttcctttgtctgacgctctgtgtattgctctttgaatcgagtttggaggaagagttgagttgtatgagtggcggcatgttggtagtgccggacttcctgtttcaagttttctggggcctcgctaattgaatgtggaaagtagcaccacttgacggctacaagtgccgactcctgaattttcccatggtgttctgacttcaagggctggcagccagggagaatgggcccaggggaagcaaagacctcttccctctgccgtttctgtcccacttaactgacctcactggaggctacatcacccaaagtagatgttagaaaacctaaattaatgaaccatatttttaaaatcctatttttcccaaacagggccctctgcagcccatcctttccttccgtccttctgaaaccacataccccaggcccaagcgccttgctgccacgcccaacctctttgggagaagtatgaatgcgtgtgtctaaattaaaagaaaaaaatatttaaacgttttttaacaaaaatttatttttgtatttaagctaaattgccttttaaattccttcaagcttggttcattgaggtggttaagtataaatgctattaactaggaattagctgtatagttaagttatgcctgtgcaaagaagaggctcaaatgctgtccccggcagctttcctgggggactagagctccttctggccatgttatatgaaatgtaattcttattttataaataatgtgatgtaaatgtaactggtgccccctccccgatgtgactgagggtgagtgagtggtggcggggctgctccttcccacccctcagaacagctctgatcctcgttaatacctggctgcgtgtgcagctgaggagggagtgaacctcaagcctaaatacctgttaggattggagggtctgggtgggcctgggcctagcaatcaagcttctacctgtaccttatgtaaggtagaccctcctagtgtcagtacctgagctagtttacctcagttccgcaggcaggacagccggtccgggaaccctgagtgagaatgagtgtggatgtgtacagtacacgcactggacggcagcgggaggctgggactttccattacaaatagagacttcattcctgttgagtctagttggaatttttagtatgaatgtgagatttttctcctgcttgtgacattaagaataaaaaactgtgatctatcgt

SEQ ID NO: 14803 - DNA, 452 bp, Homo sapiens
gttcttcacctaccaacgaggggagagagctgtggttctccatcattgggggagtggaagggagctcccagcgcagccgtggcagccaccttccaggagcaggggctggaatgtcctgtggccgcatctctcatggacgcggctgaaacgtgttttcacaggtgctgttttctgttttccgtgttcgtaacagaagggaggggaaagcgcagctactgacaagtagaacactgctactttttttaaggcagtttcttgtttttttagacggaattagtccttggcttccctcccagtcccagccctgcttccggctgcgaatgtccctgagtcaacaccaatagagattgctttgtgtattttgtagggttctctgttttgaagacagaattatgttacaaatgtttttgttgtaaataaataaaacacttccttgtccttgcaagatccag

SEQ ID NO: 14804 - DNA, 336 bp, Homo sapiens
ccacacaggcctggcgcggggtggctgctgccccctccttgccctccacgccctgccccctgcatcccctagagacagctgactagcagctgcccagctgtcaaggtcaggcaagtgagcaccggggactgaggatcagggcgggaccccgtgaggctcattaggggagatgggggtctcccctaatgcgggggctggaccaggctgagtccccacagggtcctagtggaggatgtggaggggcggggcagaggggtccagccggagtttatttaatgatgtaatttattgttgcgttcctctggaagctgtgactggaataaacccccgcgtggc

SEQ ID NO: 14805 - DNA, 325 bp, Homo sapiens
gtcaccacgcggttctggaaaggcacttgcctctgcacttttctatattgttcagctgacaaagtagtattttagaaaagttctaaagttataaaaatgttttctgcagtaaaaaaaaagttctctgggccgggcgtggtggctcacacctgtaatcccagcaccttgggaggctgaggtgggaggatcatttgaggccaggagtttgagacctgcctgggcaacataatgaaacttcctttccagggaggaaaaaaaaaaaaaaaaaaagctctgagagcatcttattttgtttaaaggcaagaaataaaatttccttttgtgg

SEQ ID NO: 14806 - DNA, 853 bp, Homo sapiens
ggtgccacggctccactctgttcctctctgctttgttcttccctggactgagctcagcgcaggctgtgaccccaggagggccctgccacgggccactggctgctggggactggggactgggcagagactgagccaggcaggaaggcagcagccttcagcctctctggcccactcggacaacttcccaaggccgcctcctgctagcaagaacagagtccaccctcctctggatattggggagggacggaagtgacagggtgtggtggtggagtggggagctggcttctgctggccaggatagcttaaccctgactttgggatctgcctgcatcggcgttggccactgtccccatttacattttccccactctgtctgcctgcatctcctctgttccgggtaggccttgatatcacctctgggactgtgccttgctcaccgaaacccgcgcccaggagtatggctgaggccttgcccacccacctgcctgggaagtgcagagtggatggacgggtttagaggggaggggcgaaggtgctgtaaacaggtttgggcagtggtgggggagggggccagagaggcggctcaggttgcccagctctgtggcctcaggactctctgcctcacccgcttcagcccagggcccctggagactgatcccctctgagtcctctgccccttccaaggacactaatgagcctgggagggtggcagggaggaggggacagcttcacccttggaagtcctggggtttttcctcttccttctttgtggtttctgttttgtaatttaagaagagctattcatcactgtaattattattattttctacaataaatgggacctgtgcacagg

SEQ ID NO: 14807 - DNA, 20 bp, Homo sapiens
atgtatccccatctgcctct

SEQ ID NO: 14808 - DNA, 1206 bp, Homo sapiens
gcttcctaggacccctgactcacgacctcatcaacgttggtgctactgcttggtggagaatgtaaaccctttgtaaccccatcccatgcccctccgactccccaccccaggagggaacgggcaggccgggcggccttgcagatccacagggcaaggaaacaagaggggagcggccaagtgccccgaccaggaggccccctacttcagaggcaagggccatgtggtcctggccccccaccccatcccttcccacctaggagctccccctccacacagcctccatctccaggggaacttggtgctacacgctggtgctcttatcttcctggggggagggaggagggaagggtggcccctcggggaaccccctacctggggctcctctaaagatggtgcagacacttcctgggcagtcccagctccccctgcccaccaggacccaccgttggctgccatccagttggtacccaagcacctgaagcctcaaagctggattcgctctagcatccctcctctcctgggtccacttggccgtctcctccccaccgatcgctgttccccacatctggggcgcttttgggttggaaaaccaccccacactgggaatagccaccttgcccttgtagaatccatccgcccatccgtccattcatccatcggtccgtccatccatgtccccagttgaccgcccggcaccactagctggctgggtgcacccaccatcaacctggttgacctgtcatggccgcctgtgccctgcctccacccccatcctacactcccccagggcgtgcggggctgtgcagactggggtgccaggcatctcctccccacccggggtgtccccacatgcagtactgtataccccccatccctccctcggtccactgaacttcagagcagttcccattcctgccccgcccatctttttgtgtctcgctgtgatagatcaataaatattttattttttgtcctggatatttggggattatttttgattgttgatattctcttttggttttattgttgtggttcattgaaaaaaaaagataatttttttttctgatccggggagctgtatccccagtagaaaaaacattttaatcactctaatataactctggatgaaacacacctttttttttaataagaaaagagaattaactgcttcagaaatgactaataaatgaaaaacctttaaaggaa

SEQ ID NO: 14809 - DNA, 1223 bp, Homo sapiens
gccagggccactcagctgcccctgtccccacctctggagaatccacccccaccagattcctccgcgggaggtggccctcagctgggacagtggggacccaggcttctcctcagagccaggccctgacttgccttctcccaccccgtggaccgcttcccctgccttctctctgccgtggcccagagccggcccagctgcacacacacaccatgctctcgccctgctgtaacctctgtcttggcagggctgtcccctcttgcttctccttgcatgagctggagggcctgtgtgagttacgcccctttccacacgccgctgccccagcaaccctgttcacgctccacctgtctggtccatagctccctggaggctgggccaggaggcagcctccgaaccatgccccatataacgcttgggtgcgtgggagggcgcacatcagggcagaggccaagttccaggtgtctgtgttcccaggaaccaaatggggagtctggggcccgttttccccccagggggtgtctaggtagcaacaggtatcgaggactctccaaacccccaaagcagagagagggctgatcccatggggcggaggtccccagtggctgagcaaacagccccttctctcgctttgggtcttttttttgtttctttcttaaagccactttagtgagaagcaggtaccaagcctcagggtgaagggggtcccttgagggagcgtggagctgcggtgccctggccggcgatggggaggagccggctccggcagtgagaggataggcacagtggaccgggcaggtgtccaccagcagctcagcccctgcagtcatctcagagccccttcccgggcctctcccccaaggctccctgcccctcctcatgcccctctgtcctctgcgttttttctgtgtaatctattttttaagaagagtttgtattattttttcatacggctgcagcagcagctgccaggggcttgggattttatttttgtggcgggcgggggtgggagggccattttgtcactttgcctcagttgagcatctaggaagtattaaaactgtgaagctttctcagtgcactttgaacctggaaaacaatcccaacaggcccgtgggaccatgacttagggaggtgggacccacccacccccatccaggaaccgtgacgtccaaggaaccaaacccagacgcagaacaataaaataaattccgtactccccaccc

SEQ ID NO: 14810 - DNA, 1791 bp, Homo sapiens
gcctgcggttgggagggaatggggcgtggggggttagagcaggaccacagcctggtgagtccccgggcagccgtcctgcagccgccactcctgcgcctgccattggcctcctcacagcggaaacacagcttgtgagtgcatgtcagctgttaacaagtggtttttagtacattctgggctttgctgtatctatctagtgcctgtttgtgcgtttttttctttcttccgctgcttccccattttccttctgtcctttttctcctgctccttgttttcccagcagcacatggggttcctcggaggagcagaggtggccgccgtgggggggcgtttgggctgcggtgctgcgtcatttttcctttgctttctctttactttagacactggcccaactccaggcgtttcctttcattccctcagtgcttctcttctgacctgcatgttgagttctgtattgctggggcttccaacaaaaaccagagtcactgacagagggaacagcagagaccttgttggtattcagctgtgatggatatagagaatcagaggcaccttgttttcacaactaggataaaaatatctgcagggtcctttccattcctatttagagggagtcctggctccatgaccccctcccgagtggactgtccaagcagataggctcacacgagaaacagtgaggctgaaagggggggctatggaagagcggtagggagtccacggagaagatgcagtgaatgcttgcatgcattcacacgtgtgtgtgtcccagctagttcactcctttcgccgtgcgtggtggaggctggcctctctggctgggtgcagtgaatggccagcgggtttcttttctgctgggccaaggcgctttgggggtggagggggtggtgctggtgctgcactgggctgactgcggcgctgacgcagcgtttccccccatccctgttgcctgtgtgttgtgtggatctgttcctagtataggcaacataatgagatactgtgcttcccacctccccttcagttcagagccaaaatgggtctagaatctggcactttactcatttcctttgataaattgtactatgcagagctgtcaggaaccttcagatagcagtagaggactgcagctgtctaggtctgcggccacatcttggggacacactggactgttcccatgtgcagggttcagcagttatgtgggagtgctaggggttaggcttttgagcttgaacgcctgcgtgtgaacagatgaaaaatccttcagtacccaagtcccagtctgtcctatggggagcagtttgggggcggccggcagcaggagcctgggaaagaggccctcgccaggtgatggcagggccagggtggcctggggcacccagcggaatgtgcttagtatttggtcaccagccgtcatcctgggcttttcctactgtgtcttgttacaaggcctcagcaatccacagaactctctctccttccttccacctgtcagcttctctgcttctgagataagaaccatttgtgtaacaccaacacttaacttcagaaagacatgcattatgtggtgtaatcaaacccgatgctttcagatgacctacttacatcttcaatgtggataagataaagaacaaaacacatgcatctaaactgctgggcaatccagttgacttttaaatgtaagaatggaattccaaacacttaacacattcagctatatgacagaaagtaaatctatggatatggtattttgtgaatgatcttttaaataaaagaaaaccttacgtaatattt

SEQ ID NO: 14811 - DNA, 890 bp, Homo sapiens
gagccaaggcaaagagggaccactgtgctcatggacccatcgctgccttccaaggaccatttcccagagctactcaacttttaagcccctgccatggttgctcctggaaggagaaccagccaccctgaggaccacctggccatgcgtgcacagcctgggaaaagacagttactcacgggagctgcaggcccgtcaccaagccctctcccgacccaggctttgtggggcaggcacctggtaccaagggtaacccggctcctggtatggacggatgcgcaggatttaggataagctgtcacccagtccccataacaaaaccactgtccaacactggtatctgtgttcttttgtgctatgaatttggattcctaattgctattgttggttgctggggttttaaatgattgataagcttgtacagttaacttatagagggggagccatatttaacattctggatttcagagtagagatttctgtgttgtctcctagaaagcattacatgtagtttatttcagcatccttgttgggtggggccctggctctcttcccctttggtgggacctcccctttctttgggcttcagttcactcaggaagaaatgaggctgtcgccatctttatgtgcttccagtggaaatgtcacttgctacagacaatagtgcatgagagtctagagaagtagtgaccagaacagggcagagtaggtcccctccatggccctgaatcctcctctgctccagggctggcctctgcagagctgattaaacagtgttgtgactgtctcatgggaagagctggggcccagagggaccttgagtcagaaatgttgccagaaaaagtatctcctccaaccaaaacatctcaataaaaccattttagttgaaaagc

SEQ ID NO: 14812 - DNA, 2094 bp, Homo sapiens
tcctgaggggatactgtggagcagcccagtccacaccagagccccacgcggctgcccggcagtacctcctccaggcaggagccgggactgtcactttggagacaaaacagtgtttgtaacaataacgtactcaccgccgcggacaatcccccaccccgatccctcgccagaccaggacgcttcctcaagcccagccttctacagagagtgtgaacggtacagccccggcctgacccggggaccttcagcctggacacccggcagcttctggagtttgtcagtggaggcagaggggatccggccaggcccctctgtccagaaggagctgccctgaggaccatcttagcggccctgtcctctttttccgcccattctccctcgggtctccccagaggggccggcgggggctggggagggggtaagtttatccatgcagacaccaagggggagcatccagtctttaagagccaagtgggggccccttttccgaagccacttccaggccaaggcagtcgccagggcttcttgtccccaccttctgaaccttcttcaaacagtagtacaagctcccctcagccagcctgcctgcccagcgaggcccccaggttcaaggtgttggcgggggcggagggcaggggaacgggatccttctcccgctgcccaccaacaccaacacacacacacctctaagctgctggccgaagatgtcaccaaggccaaagacacagtattatgaaggtttggaaacccctctcctcacctcccaccgtgaccttgggcaaaccctggctcggagcccagggcagaggcagctcagagtggaggctctaggcaggtttgacaaaggtcagtaatacggtttcccctggggttgaccagatgttccaaaatatctgcatccacctggagatgcagctaagtgggtccttatgtacacaccacgttcacacacacacagagggaccacgtgtgcacgcatgaccgtgtgggtggcggcgtttgctgtgaaccacgctcaggccacacagagacacatacttggtttctgggactgagacccaggcctggcaggaccgtgcctacagatactgcaaacgttcctacagcctagaggtgcgtatacacacccaagtacacgcagccaggcattcaggggtgtgtttgccacatggagcatcccttcctggtcttgccaggcacctgcacagagcgtctccagccccatctcctaacgggggctgggggtaagagaaatctaactgcgctcccccaacccctcgccctgccatcttcccctcaagcctgctaagttatcccaggcctgtgcgtggtggaaaaagccagccttggccctgcagcctccacctcgccgctgggggaccaacaggttgcttacagctttgcaccccggcatcagcacaggggtccctgccccaccctccggcagctcagggagtgttttcctgtgaggcctcccccatcagtggaccagagggagaagcccgatgccccatcccggctttcccgtaacgcacaggacacgtgtgcaattcataggaacggcccagatcgccctcatgagtgccacctggtacaggtaggtggcgctcacgttcctgcccaaatgcagcccatcggggagtcacagtcagtccccccggcccccctcccagtccctgttggctttcggtagctctcgcatgcagttctattaacagccgtctagaagcgatgctttagtggcctaacccagggtcaaatacagctctttctagcaaaatcaggcagctctgccccatcggtaggggcaccgattagtctactaacagccagaggtccatctagcagggtgccgggaggagctgagcccccggaggtgggctcctggtgacgggtgtccaagaagcggtttccttgggagcttctgcctccgtgggcctctcagcccgccccgtgtggccgcccgggtgtggctcagccatgtcccctccccaggtccttcattcacccctcccctccccacagtggaattgttgaagtgtggcgagtctgtgctcgggacaataaagcttgtgacaggtccaggaccccggc

SEQ ID NO: 14813 - DNA, 150 bp, Homo sapiens
acctcagtactgaatcaggacctcactcagaaagactaaaggaaatgtaatttatgtacaaaatgtatattcggatatgtatcgatgccttttagtttttccaatgatttttacactatattcctgccaccaaggcctttttaaataagt

SEQ ID NO: 14814 - DNA, 1145 bp, Homo sapiens
cttaaagtatcagtggttgagaagagcttttcggacctgttactaccccaagctgtgtaatatacttgtataacagaaataccttctatacaaacctttttttctacttttagatagaaatgtctactttttcagcagttctgtgaattaaagagcagagtgactgtgggtctggaatggctggtgtacttgggaatgtactatcaggattttacagcaatgctgggaaatgacagggaaaatgacaggaatgaatctcaccagattttttatgtactcagcagagccttgagttacggtgtttattttccaatcaagtgaagatatctcctacttctcctactggaacatctcagcttctgcagtgaagaaaaattcctgtgatagttcagttctttagtttttctatttgaaaaaaaaaaatcatttaaatgatcctttgttcacggctctccttaatgactgagtgaacagttcctatctgtatatttgactaaaccttttcctaagctatctctcatggttcctatgtttttttatcataattaaaagcaaaaccatctggatcacctaacagtcagaggtcagtatctcagcgtgtgaattatagaggaaatacagagagaacctcttccacttttacttttcgtccaaataaaatgcatggtgtaccagaagttgaagatcgggttgaggattggggctagctcgatgacactaaggccccaacatcgcgggacctgctgtggcgcggattcttaggaacgctgttctagccggccccctctccaggggtcgccgtggccggcattatttcctagttcttcttgtaaccctgaggtgccagcgcggggagtgaggaggggtcagggggctaaggatgcaacctctgacgttctgcgccttcctaggagagtcttacatgtgttgagatttcacaagcaatgcgagttgtaaaataccagctctacaagaagctaggctctgtgacggcatagttttcagtagctttatcacaatattcacaatggagaattatatgacatggtagcagaaataggcccttttatgtgttgcttctattttacctcaaattgtagatatagggtaatcaataaaatccatccatgcctttcacacactaa

SEQ ID NO: 14815 - DNA, 75 bp, Homo sapiens
tctgcacaaatggttcctctcctccttcctgatgtctgccattagcattggaataaagttcctgctgaaaatcca

SEQ ID NO: 14816 - DNA, 519 bp, Homo sapiens
tggagagaaaactcctggcagggccctatggtgggaaaggctggagtcttctagtcccaagggattgggagatgacaaaatgaattttttttttcttttttgagatggagtcttgctctgtcgcccaggttggagtgcagtggcgtgatctcggcttactgcaacttccagctcctgggttcgaacgattctcctgcctcagcctcccgagcagctgggactacaggcatgcgccaccatgcccggctaatttttgtattagtagagatgaggtttcaccatgttggccaggctggtctccaactcctgacctcaggtgatccacctgcctcgacctcacaaagtgctgggattacaggcatgaaccactgtgcccagctgacaaaatgagttcttaaactttttttttttttcagttttttttccactttgaatcagaaatataatctgcagtatcatacttgtttatattacattgtatgcctcactattcattaaaaatcaagaaagttttattgt

SEQ ID NO: 14817 - DNA, 817 bp, Homo sapiens
aaccaggagagattgcttgcttcacttgtacaaggcaggaacggtggcatggggtgggggaaacttggagttggaaggtggctaatctttgattctatgtttttgatcctcctggcactccagacctgggtgatgtgcaggagagcacactgatagaaatccttgtgtccagtgcccagcaactcctgcctcagcctcccgagcagctgggactacaggcgcccgccaccacgcctggctaacttttttgtatttttagtagagacgggttttcaccgtgttagccaggatggtcttgatctcttgaccttgtgatccacctgcctcatcatcccaaagtgctgggattacaggcgtgagccactgcgcccagcatgttagacaatttttaattcatcctctctgtgctgttgttttctcagctgtgaaaggaatattctggtggggacaaggttacagagttgctgagagggtctcatgacatgaaggtactggccttggcacagtgcctgggggggcggggactccgcacatgcctgtgatgtcacagttactgtcagttcacagtgaaccttccctccttttcctgttgactttcccacactcctgtaaccctccctccctcccttcttcctctctctctctctcactcacgcacacgcacacacacacacacacacacacacacacactccattcactgtctccatgactctggagtaaactaacgtctcgagttgccattggaagccccattgtcctcattttgttttgttttgtttgtttgagacggggtctcgctctgtcccccaggctg

SEQ ID NO: 14818 - DNA, 397 bp, Homo sapiens
taaccttggagagagctcagccagggtctggtggctgcgggcacgggcatctcagctccactggttcctccattcagcttaaccagcgcctcccaagcagctgcctatagctggctctataactgagcctggggaagatagaggaaagtcacatccctgccttcaagggtctcgcagacaggtggggaggcagatggtgaactgtgggtacctagaacagcagaagttcactcaagctacagaaatactagaggagggtagctcatgcctgcaatcccagtactttgggaggccaaggcaggagtattgctggaggccgggagttcgagaccagcctggccaatgtagtaacacccccgtctctacaaaaaatacaaaaataaaaaaattagttggg

SEQ ID NO: 14819 - DNA, 186 bp, Homo sapiens
cagaggctccaggctgactccttcctggtgggaaaggaagatgcctgtcctctccgtggaggaccctgggccctcaccgcaggcagcagtttgcattttgaaaggttattgggtcccttcctcgggctgtgttcttgctggtgagcaaaagtgttgcctgcagaaataaaatgcagaacgtactct

SEQ ID NO: 14820 - DNA, 373 bp, Homo sapiens
gggcctgcctgccccacccaccccacagactccggcctgtaatcagctctcctggctccctcccgtagtctcctgggtgtgtttggcttggccttggcatgggcgcaggcccagtgacaaagactcctctgggcctggggtgcatcctcctcagcccccaggccaggtgaggtccaccggcccctggcagcacagcccagggcctgcatgggggcaccgggctccatgcctctggaggcctctggccctcggtggctgcacagaagggctctttctctctgctgagctgggcccagcccctccacgtgatttccagtgagtgtaaataattttaaataacctctggcccttggaataaagttctgttttctgt

SEQ ID NO: 14821 - DNA, 200 bp, Homo sapiens
gccgctgtgacgggtggccagtttccttaatttatgaaggcatcatgtcactgcaaagccgttgcagataaactttgtattttaatttgctttggtgatgattactgtattgacatcatcatgccttccaaattgtgggtggctctgtgggcgcatcaataaaagccgtccttgattttatttttcaaggtcccttctgt

SEQ ID NO: 14822 - DNA, 122 bp, Homo sapiens
agccttagcccggatgcccacccctgctgccgccactggctgtgcctcccccgccacctgtgtgttcttttgatacatttatcttctgtttttctcaaataaagttcaaagcaaccacctgt

SEQ ID NO: 14823 - DNA, 14 bp, Homo sapiens
aagaagaaagcaat

SEQ ID NO: 14824 - DNA, 387 bp, Homo sapiens
cctcgcaccccagcacgcccgcctctggtggccaccccgctgccccatggctggctgggtggccaggcaggaagtgcccagcccgagaggctgggaggtttgttgagggtgtggggtgtgccccacctgaagccggggctccccctgcctgcctctctctcctcctcccctctgggaattgggcagccctgggcagttgtactcatgggggcttaggatgcagctacctcagtgcgcagggcccgtctgtcctctgggggctgcttcgggcccgcggtgctcggggcctggtgtggggcgagtagagacttccccagcctggacgggcgtgggttctgggtcagcttcttttacctcaattttgtttgcaataaatgctctatagcc

SEQ ID NO: 14825 - DNA, 214 bp, Homo sapiens
tctcgtgatattgagtgagcgcttgtgggatctggttgtttaaaagcatgcagccctcccacttcactctctctgtctctcctgctccaacatggccagacgtgcctgcttccccttcgccttctgccgtgattgtcagtttcctgaggcctccccagccatgcttcctgtacagcctgcagaactgtgagtcaattaaacctcttttcttcat

SEQ ID NO: 14826 - DNA, 336 bp, Homo sapiens
atatgtgaacaaatccaggcctctcaaggaaaagacttcaaccaggcttccttgtacccacaggtgaaaaatgtgagcataatacttctaatattattgataagtaaggtaaccacaattagtcagcaacagagtacaacagggtttctatttacccaccaactactatacctttcatgacgttgaatgggacatagaactgtcctacatttatgtcaaagtatatatttgaatcgcttatattttctttttcactctttatattgagtacattccagaaatttgtagtaggcaaggtgctataaaaatgcactaaaaataaatctgttctcaatg

SEQ ID NO: 14827 - DNA, 789 bp, Homo sapiens
ttcagggagctagaagacactttaagttatactggaaaattcaggtgccactgaaagccagatttatagtattccatctttaatatgtgggactaacagcagtgtagattgttaccttaatattttttgctgggaccatctacctgccttatactacacttaggaaaaagtattacatatggtttattttgaaacttcaagtattattgccttaatgtctcttaaccctgttacacgctgcttgtagacatgttaatatagtaatacctttatgatatattgagtttaaggactactctttttctgttttatcatgtatgcattattttgtatatgtacagggcaagtaggtatataatttgataaagttgcaattgaaatattattaacagaagatgtaagaaatttctgcatggtctaaatctttgtgtactttatttgtaaattatttgccctggagttttagaaaatagtttctgaattttaaacttgctggattcatgcagccagctttgcaggttatcagagatcaaagattgtaataataattttgtaaattgtaagcaaaaagttatttttatattatatacagtctaattgttcatcctaattgttcctgttttcatctagtcagagattcagtaagtgccttggaacaatattgaattctcttagcttgtgtgtgtttctttaatatttgaactcaagtgggattagaagactatcaaaatacatgtatgtttcaggatatttgacctgtcattaaaaaaaacaaacagttttacagtg

SEQ ID NO: 14828 - DNA, 518 bp, Homo sapiens
atttgcatataccatctaaaatccttttttaaaaaaatttaatgtaataaagattcatgaattctgaaagcaagccaaggacttgctcctatgtctgttacaaaacatagtttatgtagctttgtaacattcctcagtgcctgtccataactgtgaagtattaagcacttagggccagatgcactgtaaacattgcaggtttaaacataaaggagtctttaaaaaaaaatcatttacgttggaattttaggttttagaatagagctgacattaacatatatatatatatataaatatatatatatattttgtaatatgagccagaattctttttcaacaatttaaagcttttccatagagcttatttatatccttttttttcattttaaatgtgtcagcactgtagtgtaaatagcttttaaatatctttttagtgtgatttatactgaaatgtgagccacttaataaaggttcatatgttcatattaataaatatgttttctgttgagtctgtaaag

SEQ ID NO: 14829 - DNA, 2344 bp, Homo sapiens
caattcaaagaaaagaagatgtagcctcttttccagaataagagtactgactaagctgcctgaaagcttgtcactgattctttgcttcaggagtctcagctagggagttgaagtgtttacatcagactgtcttgtgcaattcttatatttattttactggttcacttttttttacatttattttagtctttatatttttatttttaagcattgatgtacttagttgttgaaagggtgatgaaactgatatccagatacttgagatcctggtaattggtcataaataattggcaaaataacaaattgtgaaaatagaagccattgctcagcaccgtttctccatcaatgccgtgaacttgccttacttgaggaaaaattctttaactttggaatattgcattgaactcagctatacacataaaacattttctttggtaaatcaagatccagtcagggtttctcttgaattattttggaacaatgccaggatccaaactgattaagttacagtttaagcacccttcagtattaatatatacggtattatataacaggtcaacaagtgctctttgatgataaaacttgtaatagagcaataattgtaaatggttaccatactgtaagatattttgataaaaattaactagtaatacttgtatttatttgaaacactgggctgtttgcacagctccaactgtgcatgctcaaaatgtgcactttttaaaattgttacttttaatgcgtatctttatatgggatctgttatagtatactagggcatgatatggtatccttttgagtgaggtatatactcatctcacaagtgaagtgcctactgatattactaaagtacattatgtttactcaagtaaataattttctccccatggtacactctagtgtaggctattcataccacactgaaatgaacaactgaagaataaggctaagaaccaataaaatatttctctaattgctagttgtaaaactgtatccaaattttcagaaaagacagcttcagcttgcaaattctatcctctaaacttatctggtgcattctccccaccccacccccattatataagggctattttagatgcttttaacctccccaacaaataatttgccaagtgtccaatgagaacttatcatgttggtgtgttaggtaaatcgggcaaatatgatagtgtcttacattgggccttgattttaagttgttatatttgtacaatcgagtattttagaaattacatgaaacatgaaacagtttttgcaattttttttaaactgggcatctggtttctaaaaatttatttgaaacaatctagaattttcttggtgcaaagtgtatcatgtggaatatcctcatatttttaccatattttaagaactttaagacgattaattgtaaataatttatttgattggtgcagttctaatccctaaatcataatcttaaaatcaggaatgtgtggagaacagagccatgtcatatcactttgctcttaccattccttttgatcagcctcaattcagcctcattgtgtagtatgttttttctttctatgaaaaacaacagaaagcatttcattttatttgcctatgttcaaatatgtttaataatgaccaaagtgcattctgagttttttcaaggaatgtaatactggagctttaagaacatacttagtttctcatgtgaaaacttaggctttgtctgatgtttttccttcctctattgtctaatgttgaggttgtttttaggaattatgttttataaactttttcaatataaggtacatgcctatacagaacttaacattttgcacagaatatatcaaatatattttgagaaaaaaagtacggcatgagttctgttaggaataaaagatgaaactattgtatctcacaaaaaatcttatttcagaatggaaatatttttgagaaaagtagctgagtatactggtttaagaaaatgcttgttttagattgaggttaacttagagttgggagttgatttattaagtacagtatacctctcaacagtttataaataatatgttgaattatgtcagtgtgggcagcagtagaatactaaaaggaaaatgtcatgttaagcaatttcagaacattaactgaactattttcaaagcagaaaaattgacattgctgcctttaagaataccatgaatgtaagaaattgaaagaaattgtaaaatatcacataatatagaaatggcagttcaaagagaattgtggcagatgttgtgtgtgaactgttgtttctttgccacatgtgttgtatttgaaagttttacagtaagtttaaaataaaacattctgtgac

SEQ ID NO: 14830 - DNA, 837 bp, Homo sapiens
caaggtggttcctgctgccctttaggttgtacgactgaagcctacaagaaagtttgcctccttggggtgcctggctcacgaggttggctggaaataccaggtagtgacagccaccatgggggagaagaggaaggagaaggccaagatgcactacaggaagaaaaagcagctcatgcggctgcagaaacaggccacaaagaacgtggagaagacaaatgacaaatacacagaggtcctaagaccgagggactccctgtttgagaccagaaaagactgtttattcctcatgcttggcctggcctacccttctgccattgcgaccttgggatatgggggagcctacccttcctgcatcaccgccctgggatgtgggggatccaagggcagcaatataggtgccatgggcagcctgggacttaagctgggggcaagggaagggccttagtcactgcctttctataaggttattttaaacagctctaagatttgtacaggaataatttgtctatgacctacttgttcaggacagagttttagaaaaccaatagagcaaccagttactttggttttaatattggcaaaagggacctggaacattaattggagggagccccgcctcgtgaaaggggcatctctttttaactcccaccttctcgtgctatactctgtggctgttataatatgaaaaagtgcttagggacagcatgatcttactgttattcaaaggatattatagagaagcttagactaggaagatgtgtgaccaagaggtggcaggggtcgcccttgctccttccctgtattttgtgaccagaatgaaataaattactttcaaag

SEQ ID NO: 14831 - DNA, 1916 bp, Homo sapiens
gttttgcagttcatggtaaaatgcattttcaaaccaaatgagtacttatatatggatctctgtagactagagtcttgcagcaacacagaatgtaatataaggcaaatgcatctgggacttgaccaaagttgttctgttttgtttttttaactgaaagtaacagaaggacctttcttaaatgtgacagatggtcctgcagtgtgaaactgaaggacagtgttaaagctgggctctagtatattgatgatttctgcataagtgtaaatatgcaaatgtatgtatacatgtatttatgactttagttttcgacattatttttaggttttaagagtggcaacttaggattttagggtgatggctttggaaataacataaatataccttgtactgaatgacagactattactacgtttgccagttttaaacagctttatttatgttcatgtcctgtaaatttttaagtacagtaattaatattaggaaacattacagcccttatctagattatatgtatacttgtattaataaaaatgttatttgtacaaacattgcacagactattttaataacatgatttgttctttaaattttatgtgttttattgaaatgttcttaagatgaatacacctgcctttggatcaactatttaaacattgtatgcattttgatttttcctactttaagaaaataaaataatttaattttacattagattccacgttagatttggtttgaaaaactaaaatttcagatttctgaggatatactgtcttagacttattgtacacacttagtttttattcacttgttttcactctgaattttaatatttggctgatatgaatgcattgcctcaaaggtgatgtcatcttaatttttattcactttaaataactacatttttgtttataactaagtttggagggatcctaagagcatttttgtgggtaaaaaaaaaacctgtggacataatgaattttgagacattgattggtgaggcttttatttcccttgaggagtctcttgtacctagcatacatgatagctccttgttgggaagataacaagaaggatctttgaatactctattgctgatataatgcaagatttaaatttatacatataactaatttcaaatgtaattatcacactatgttaaaattacttttttcccttagataattcaaatttctccacttgcttgagattatatcatttctttttcaattatactattatttctgagaatgaaatggacgattacacttagaaaatgagtaatagtgtttaataagtcagtgattatatgtgtgctcaaataagtgttatgtatcagctagatactgagctttgatagaataattttcttttgattattcatgatgtgtcatctctgaccttgtttcagcaaagtaaacagcactccccaccccaccctcctttttttactcatcttggaaaaggttagtctttcagtacacgttgctggtaagtagtttccaagttacgtgttgtcactgggttgaagtatatttgtgtgtgtgtgtgtgtgtgtgtgtgtgtgtgtaaccataaactatattcatatctgtttcatttggaggattttcttctttgtaatgtaaagaaattcaaagttatcaaagttccttaaatgtgttagtttagattctttatgtgcctttcatgaaagatatgttttcattaattttactggtggacctgtaatatccacattgtgaagctgtgtatgaaattcaactataatatgaataaatttgaatcatgagaattatgggttaaaaagccacaaagaagcacatattggtgaccatcattaatgaaatcctgaactttattctgtgtaattgtgttaataaatcctaataaatttaaatttttaaaattttacaaac

SEQ ID NO: 14832 - DNA, 624 bp, Homo sapiens
acctggctcaagcacaaaccaatttgtgttgttctgattcaataattggtttctgggtggccaattcagaagaagagtgtacatgctcaacaaatcctaggccctgcattcctgtcatcctcatccgggggaaacaccatcatcccagtagctgccctattcaactgcaacagtctccaggaccatcagtatactgcatttcatgtgcaccaaatattttgaaagacatttataaataattggcttatgactcatatttctctatgaataccttcatacagcaggtataactcttttctttatgggcttaaatattttgtcactgatcctgcaaatggacatcattttagcacactagcggtttatattttaaggaccttcattctctgttctgcacctcttctggaaattgagtaaattttgcttttttttttttactcagttgcaacttacgcttggcatcttcagaatgcttttctagcattaagagatgtaaatgataaaggaattattgtatgaaatattacaaagcgtagactatgcattgttattcattataatattttttgctgtcataatcgcctcataaagacaggtttcaaccattaaaatatgttcttcctt

SEQ ID NO: 14833 - DNA, 269 bp, Homo sapiens
gtaagtatgtaccaaaaaatattgcttcaataatattagcttatatattacttgttttcactttatcaaagagaagttacatattaggccatatatatttctagacatgtctagccactgatcatttttaaatataggtaaataaacctataaatattatcacgcagatcactaaagtatatctttaattctgggagaaatgagataaaagatgtacttgtgaccattgtaacaatagcacaaataaagcacttgtgccaaagttgtcc

SEQ ID NO: 14834 - DNA, 520 bp, Homo sapiens
ttgtgaattgcagttcagttcttgtgtttttagactgttagacaaaagtgctcacgtgcagctccagaatatggaaacagagcaaaagaacaaccctagtacctttttttagaaacagtacgataaattatttttgaggactgtatatagtgatgtgctagaactttctaggctgagtctagtgcccctattattaacaattcccccagaacatggaaataaccattgtttacagagctgagcattggtgacagggtctgacatggtcagtctactaaaaaacaaaaaaaaaaaacaaaaaaaaaaaaacaaaagaaaaaaataaaaatacggtggcaatattatgtaaccttttttcctatgaagttttttgtaggtccttgttgtaactaatttaggatgagtttctatgttgtatattaaagttacattatgtgtaacagattgattttctcagcacaaaataaaaagcatctgtattaatgtaaagatactgagaataaaaccttcaaggttttcc

SEQ ID NO: 14835 - DNA, 1188 bp, Homo sapiens
aataattcttagaaataggcagttcaagcaaagaaggcacactgttaattacaacctcttcaaagaaataggagcaacccccaagaggcttaatttaccaatttaaatagccacagtccttaagccacacacattgttgctgctatgactttttacctcctttaaacacatcatctgaggttgagttttatgacagtatgtagttgagtggaggctgggagttttaagcataaatccctgtttagtgttacatgggaataaggaatttcattcacttcagccactaagaaaagtttagaatcacgaaagcttaactgctgtggtttaaagtacagtttctctaaagatcagacatggcactgtctcctctcaagcctggttgtagttcagatgagtcttttcaacatggtcttcaacatggtctagagcttaccagtgatcttctgatcttcaagaagactaagtttgagacttgaccagcatacaagtatagagacctaggaggtggtcttgtggtggtacatttggttaacccattgctggcagtgggagctgatttaggcagggtaaacaggaaagcattaaaagttaaaattcactacaggttttttgttacttttaaagggaatatggataagcatagtaacaaaacccaccagaatctaagcagttttcaccccctcagaaaccactgtcattagtttacaaagttagcactttgaagtaaaactaaatgaggaaggaagtaatgttacctatccttgataccatgaccatttattagatgttttgctatataaattaccgagagaatagtttgtcatccacttagtgtgttagctggtggggtacaatataacctctcatctcaggctattttaaaaaaacaatatttgcttctataacaaaaggaaacaaatctaagaatcattcctgtactacagaagggttaaggcaaaggtagccttttgggctttttaatgaatatgacccctatagaaaagtcaagaaaaaaaaacccttgtataaattattttatttattattgtaattagatcttcacaaagttgtcttttcactgtgttttgtcaacgtgaaattaaattgtagttataagcaaaagttggttgcctagggaacaattgtatattcagtttaacagaaataaaagaatatttgtcttaagat

SEQ ID NO: 14836 - DNA, 1149 bp, Homo sapiens
agatgaatcatctattaagcacttaccaaaacatatcattaaactgagtgctgggagtgagttggtaatatgagatgggaaggaatgttgacttgctaacattcctttaacaagttaagaaaacttgttaaatgtagaaattagtagaatcatgctctctaaatttattctgccatagaaggtagaaatatttttaagctcctctgatgcagcagcaatgcaaattatgacatagtgaatatagaactatgcagtatttaagcctcaacaatccaaatctacaaactttaacaatgcaagtcttactctaatttttaagtatttttgttggtacttacatgggttataaatcctctctctggacatcaatgtagagtccatctttcaagcactttaatttttttagctgccaaagggtatgaattacattattgtatgctaatttccctgaaatcaatgccttctatgttcaccacagggatacaagcctgttatgtttgatgggaaagaccactacaatctaatggtgatctaaaataacttttttgggctgggtgcagtggctcatgcctataatcttagcactttgggaggccaaggtaggaggattgcttgaagctaggagtttgagaccagcctgggcaacagggtaaggtcctgtctctacaagatcaaaaacttagccgggtatggtggtgcatgtgtgcctgtagtccaagctacttgaaggctgagacaggaggatcggttgagcccaggaggttgtggctgcagtgagctgtgatgtgcccttatgctatagcctgggcaagagcgtgagaccctgtctcaaagaagaaaaaaagagaaaaataactcttttgaacaaacagacaaattagctagtagtatggagatgtataccctctattacacacataaaaccgtaacaaaattcattgtggtgtattataattagttttgtgaatagaaaaataaagcacttatgtttaaatttgttacagtgacttttaaaggattaatgttgaatcacattgtcagaattttttcctcctcgctgttcaattttgtagtttttactctcaaaaaatgaaattctcaaaattatatagctttttgttttgtttgaataaatgattcattcctgtt

SEQ ID NO: 14837 - DNA, 410 bp, Homo sapiens
aaatttttgtgtaaaagccaaaactttttatgttgtaaatgtttaatttacatgtttgactgctgggaagacctttgaaattttatattgttctggtacatgtctgaaattctattgcttggagagaatcccctccagataagagattttgagtgaaaaacataatgatcctgccatttttcatttttaaaattcttacatttgtcattgagaaagttcaaaatggaataggctttaaaaaaaaaaaaactttcaaagatccgccaaatcattcatagcaaattgtacatattgttcagctgatttttatatatttaaatacaccttagtggccagagactgacttcaaggttttattccagagactccagagacttaagctaagtattttttcattctttcagattttc

SEQ ID NO: 14838 - DNA, 1378 bp, Homo sapiens
aatttaaaaaatgcatacttttcagaagtgataaggatcatattcttgaaatttttataaatatgtatggaaattcttaggatttttttaccagctttgtttacagacccaaatgtaaatattaaaaataaatatttgcaattttctacagaattgaatacctgttaaagaaaaattacagaataaacttgtgactggtcttgttttacattatatatatgttcgtaattgtttcctgagaattacaatgaataataatttgctttgtcactgaaaaccaccagtgaagtgcaatttggggaatatcaaacttagcattatacatttggatattctagttgtattgtaaattttaaaagattatcaggataacatgaccttgccttgaaaaacctaaatttcatacagaaaggaaaaatacatttctatgcttgaattctggaaatcatcagaaatattgacacttgagggtcactggtggaccatgctagtattttggtgctgagtaattagattatgtataggggtaactggaagccatgaaggaaggacttaaccaggctaccaagtggaatataatttatctgctatttttaattacttaccttgtaaataactttaataatattcaaaagttgactctcctgtggctcatgccacaggatcccagcactttgggaggccgaggcaggctgatcacgaggtcagaagatcaagaccatcctggccaacatggtgaaaccttgtctactaaaaatacaaaaaattagctgggcatggcggcatgcgcctgtagtcccagctactccctccagaggctgagaattgcttgaacctgggaagtgcaggttgcagtgagccaagattgtgccactgtattccagactgggtgacagagtgagactccatctcaaaaaaaaaaaagttgactctaccccctaatttggtaggagatgaaggagaaaaggatggcattgaattatagatacagttttgggatatatacaaggattgccttgatctggcacttactgatacaagcatttggagaagagaaaattcaaatataagaaatttcaatttgaatctgtggatataaggcatttgcctttgagtatgttcttgtaggagtaagactaccaccagtgacattcaattggttctattgcatagtacatgaatctattgtcactaaaaattaggttactaatcttaatttttttgaaatatatgattctcagtacaggactaattcatatgcttttcctgcatacattattttgatcatttggataacatcaatgaacactggctttttaacacctttgtttttcataccagtacctgaagtaggctcaataaaagagtctttacagtg

SEQ ID NO: 14839 - DNA, 641 bp, Homo sapiens
gatcaactgtttacatgtgatacatcgaaaactgtttacttcaacttttatagaaacccaggctcatggaatcactgcaaatctatctgctcttcagacaatacgaagaccctctgagatgctacagaggagaggaagcggagtttcacatctggttaccattttctttttgtcattggcttaggatttaactaaccatgaaaagaactactgaaatattacactataacatggaacaataaaggtactggtatgttaatggataatccgcatgacagataatatgtagaaatattcataaagttaactcacatgacccaaatgtagcaagtttcctaaggtacaatagtggattcagaacttgacgttctgaggcacatcctcactgtaaacagtaatgctatatgcatgaagcttctgtttattgttttccatatttaaggaaacaacatcccataatagaaatgagcatgcagggctaaggcatataggatttttctgcaggactttaaagctttgaaaggccaatatcccataggctaactttaaacatgtatttttatttttgttttgttttttacttttcatatttatattagcatacaaggacaattgtatatatgtaacatttttaaaatttt

SEQ ID NO: 14840 - DNA, 85 bp, Homo sapiens
gtctgaacctctaatggaaaaaggcactccaaggtcctgtgcaaatagtgtcaaaagtaaattaagcagatagtcaaagaactgt

SEQ ID NO: 14841 - DNA, 92 bp, Homo sapiens
aattactgtttacacacatttttgttcaatattgatatattttatcaccaacatttcaagtttgtatttgttaataaaatgattattcaagg

SEQ ID NO: 14842 - DNA, 5053 bp, Homo sapiens
tgacaaatggtgttcacagctgccatataaagttctactcatgccattatttttatgacttctacgttcagttacaagtatgctgtcaaattatcgtgggttgaaacttgttaaatgagatttcaactgacttagtgatagagttttcttcaagttaattttcacaaatgtcatgtttgccaatatgaatttttctagtcaacatattattgtaatttaggtatgttttgttttgttttgcacaactgtaaccctgttgttactttatatttcataatcaggcaaaaatacttacagttaataatatagatataatgttaaaaacaatttgcaaaccagcagaattttaagcttttaaaataattcaatggatatacatttttttctgaagattaagattttaattattcaacttaaaaagtagaaatgcattattatacatttttttaagaaaggacacgttatgttagcatctaggtaaggctgcatgatagcattcctatatttctctcataaaataggatttgaaggatgaaattaattgtatgaagcaatgtgattatatgaagagacacaaattaaaaagacaaattaaacctgaaattatatttaaaatatatttgagacatgaaatacatactgataatacatacctcatgaaagattttattctttattgtgttacagagcagtttcattttcatattaatatactgatcaggaagaggattcagtaacatttggcttccaaaactgctatctctaatacggtaccaatcctaggaactgtatactagttcctacttagaacaaaagtatcaagtttgcacacaagtaatctgccagctgacctttgtcgcaccttaaccagtcaccacttgctatggtataggattatactgatgttctttgagggattctgatgtgctaggcatggttctaagtactttacttgtattatcccatttaatacttagaacaaccccgtgagataagtagttattatcctcattttacacatgagggaccgaaggatagaaaagttatttttcaaaggtcttgcagttaataaatggcagagtgagcattcaagtccaggtagtcatattccagaggccacggttttaaccactaggctctagagctcccgccgcgcccctatgcattatgttcacaatgccaatctagatgcttcctcttttgtataaagtcactgacattctttagagtgggttgggtgcatccaaaaatgtataaaaatattattataataaacttattactgcttgtagggtaattcacagttacttaccctattcttgcttggaacatgagcctggagacccatggcagtccatatgcctccctatgcagtgaagggccctagcagtgttaacaaattgctgagatcccacggagtctttcaaaaatctctgtagagttagtcttctccttttctcttcctgagaagttctcctgcctgcataaccattcattagggagtactttacaagcatgaaggatattagggtaagtggctaattataaatctactctagagacatataatcatacagattattcataaaatttttcagtgctgtccttccacatttaattgcattttgctcaaactgtagaatgccctacattccccccaccccaatttgctatttccttattaaaatagaaaattataggcaagatacaattatatgcgttcctcttcctgaaattataacatttctaaacttacccacgtaggtactactgaatccaactgccaacaataaaaagacttttatttagtagaggctacctttcccaccagtgactctttttctacaactgccttgtcagtttggtaattcacttatgattttctaatgttctcttggtgaattttattatcttgtaccctctttttttttttttttttttttaaagacagagtcttgctctgtcacccaggctggagtgcagtggcacgatctcggctcactgcaagctctgcctcccgggttcacgccattctcctgcctcagcctcccgagtagctgggactacaggtgcccgccaccatgcccggctgatttctttttgtatttttagtagagacggagtttcaccgtgttagccaggatggtctcgatctcctgacctcgtgatccgcccgccttggcctccaaagtgctgggattacaggtgtgagctaccgcgcccggcctattatcttgtactttctaactgagccctctattttctttattttaataatatttctccccacttgagaatcacttgttagttcttggtaggaattcagttgggcaatgataacttttatgggcaaaaacattctattatagtgaactaatgaaaataacagcgtattttcaatattttcttattccttaaattccactcttttaacactatgcttaaccacttaatgtgatgaaatattcctaaaagttaaatgactattaaagcatatattgttgcatgtatatattaagtagccgatactctaaataaaaataccactgttacagataaatggggcctttaaaaatatgaaaaacaaacttgtgaaaatgtataaaagatgcatctgttgtttcaaatggcactatcttcttttcagtactacaaaaacagaataattttgaagttttagaataaatgtaatatatttactataattctaaatgtttaaatgcttttctaaaaatgcaaaactatgatgtttagttgctttattttacctctatgtgattatttttcttaattgttattttttataatcattatttttctgaaccattcttctggcctcagaagtaggactgaattctactattgctaggtgtgagaaagtggtggtgagaaccttagagcagtggagatttgctacctggtctgtgttttgagaagtgccccttagaaagttaaaagaatgtagaaaagatactcagtcttaatcctatgcaaaaaaaaaaatcaagtaattgttttcctatgaggaaaataaccatgagctgtatcatgctacttagcttttatgtaaatatttcttatgtctcctctattaagagtatttaaaatcatatttaaatatgaatctattcatgctaacattatttttcaaaacatacatggaaatttagcccagattgtctacatataaggtttttatttgaattgtaaaatatttaaaagtatgaataaaatatatttataggtatttatcagagatgattattttgtgctacatacaggttggctaatgagctctagtgttaaactacctgattaatttcttataaagcagcataaccttggcttgattaaggaattctactttcaaaaattaatctgataatagtaacaaggtatattatactttcattacaatcaaattatagaaattacttgtgtaaaagggcttcaagaatatatccaatttttaaatattttaatatatctcctatctgataacttaattcttctaaattaccacttgccattaagctatttcataataaattctgtacagtttccccccaaaaaagagatttatttatgaaatatttaaagtttctaatgtggtattttaaataaagtatcataaatgtaataagtaaatatttatttaggaatactgtgaacactgaactaattattcctgtgtcagtctatgaaatccctgttttgaaatacgtaaacagcctaaaatgtgttgaaattattttgtaaatccatgacttaaaacaagatacatacatagtataacacacctcacagtgttaagatttatattgtgaaatgagacaccctaccttcaattgttcatcagtgggtaaaacaaattctgatgtacattcaggacaaatgattagccctaaatgaaactgtaataatttcagtggaaactcaatctgtttttacctttaaacagtgaattttacatgaatgaatgggttcttcactttttttttagtatgagaaaattatacagtgcttaattttcagagattctttccatatgttactaaaaaatgttttgttcagcctaacatactgagttttttttaactttctaaattattgaatttccatcatgcattcatccaaaattaaggcagactgtttggattcttccagtggccagatgagctaaattaaatcacaaaagcagatgcttttgtatgatctccaaattgccaactttaaggaaatattctcttgaaattgtctttaaagatcttttgcagctttgcagatacccagactgagctggaactggaatttgtcttcctattgactctacttctttaaaagcggctgcccattacattcctcagctgtccttgcagttaggtgtacatgtgactgagtgttggccagtgagatgaagtctcctcaaaggaaggcagcatgtgtcctttttcatcccttcatcttgctgctgggattgtggatataacaggagccctggcagctgtctccagaggatcaaagccacacccaaagagtaaggcagattagagaccagaaagaccttgactacttccctacttccactgctttttcctgcatttaagccattgtaaatctgggtgtgttacatgaagtgaaaattaattctttctgcccttcagttctttatcctgataccatttaacactgtctgaattaactagactgcaataattctttcttttgaaagcttttaaaggataatgtgcaattcacattaaaattgattttccattgtcaattagttatactcattttcctgccttgatctttcattagatattttgtatctgcttggaatatattatcttctttttaactgtgtaattggtaattactaaaactctgtaatctccaaaatattgctatcaaattacacaccatgttttctatcattctcatagatctgccttataaacatttaaataaaaagtactatttaatgatttaacttctgttttgaaatgttgtatacacgtggatttttttctcattaaataataattctagt

SEQ ID NO: 14843 - DNA, 2182 bp, Homo sapiens
atatattaaaaatggtattgatggaacagtatttaatgcttaaaaacaaggaaatcctttcatctgtgacaacctggaggacatgttaagtaaaataagccaggcttagaaagacaaatgctgcataatctcactgtggaatcttaagttgaactcatagaaggagagaatagaatggtggttatcaagggctggtggggcagtggaggattgaggagatattggtcaaaatttacaaaatttcagttagacaaggcaactgagttcaagagatctgttgtacagcttggtgactgtaattaacaacaatgtattttgaaagtcactgagtaaattttaagtggtttttccaaaaaagcacataaggtaatgcacgttaattagctatattgagccattccacaatgtatagatatttcaaaacatgttacacatgataaatccagtttttctacgtcattttttaaaattatatttaatttttttattttgaaagttttttcacagatcttttttttagtattattaccttctgatatatgtgtcattattgaagaaccataccttttaaagttattattttgtaattaagtatgtcaacagtaaaaaataaccagtggccaggcatggtggctcatgcctgtaatcccagcacttttcggaggccgaggagggcagatcacttgaggtcaggagttcaagaccagcctggccaacatggcgaaaccccgtctctactaaaaatataaaaaattagccaggcatagtggcgcatgcctgttgtagccccagctactcaagaggctgaggcaggagaattgcttgaacgcgggaggtggaggatacaatgaacccgaggtcgcgccactgcacttcagcctgggtgacagagctagactccatctcaaaaaaaaaaaagagctaaaaaattacattttacaagtttatggccagcccacctgtaataacattctctgatattcctttacttaggatgtccctattgagatcattttttaaatttatgtggaaggattctctagattattattagaatgagcaattcagttttgtttgtttttgagcctgtcttgtacctggttgcactaaatatataatagttatcttttgtggagaccttaaaaccctaaatttgaatacatgttcaatgatagtaaagatatgacagaaactagaagatagctgtttatgatttgagcttttggaaaattttcgtttcttgaatgtaatagtattttttcctgaattggaggagactgatctatattgtttcatttttcttttgtcctagtctatttcactttcttttgtcataatctatttaatttcccactttcttattttagtaaagagagaataaatagcaagtgcaggccaggcatggtggtgcaggccagacatagcggtacatgcctgtaatcctagcactttgggatgccaaggcgggaggattgcttgagcccaggagttcatgcctgagcaacatagcaagaccctggctctctataaaacagaaaacgcaaactttaatattatcaacaatcaatatattataagagattgcaatttctaagtttctacctgagtgtttcacaaatacaaactggacattttccctttaaatgagttttattataaaatgtacatattgattgtaaaaacaaaaaattcaaatagtacaaaagcatataagtaactaataaaagctccctttctgcattaggcccctcagttcttcccagggaaaatgattaatagtttacattcttgcagaaattttttatgtataaatttttacccaaatgaattcattatataaattttttccaacttagtgtttttttacataatagtagcaagttaaaaaattgtacttcaggccaggcacggtgggtcacgcctgttaatctcagcactttgggaggctgaggcaggaagaccacttgaggtcaggagttcaagaccagcctggccaacatggtgaaaacccatctctactaaaatacaaaaatcagctgggcatggtggcgcatgtctgtaatcccagctactcgggaggctgaggcaggagaatcgcttgaacccgggaggcggaggttgcagtgagctgagattgcgccattgcactccagcctggaggacaagagggagacttcctctc

SEQ ID NO: 14844 - DNA, 2541 bp, Homo sapiens
tggggaaatagttaattgttaaagaaaacttcttgtagcctcacattccccttgtgcaaagagctcttttggacctacatacattttcctttgtttttgaccaatcaatgaagccaaatttatatgtcctagtagaatgaagtgctgctagtttttatgagaagtatattatattaaatgtgaattttttaaattttgcttcttatactggaaggaattttagccttcatattgatatctaattaattatttaagtggaagaggcctgcatcacaattgaggtaatgtagagcaacatgttaaagaatgatggttagcagaagctgttgtatacaatcttcatgaaaatttcagtgtgtatttttctttttctataatacctttaactgcaaagaaaaggcagtttcaaatataagaaatttatttcaggtaagggtaatattttaatagtagtcaataatctagcttaaggctgtaactcttctatcggggctaattgtatgaataggtgtcagtatgttgaagattactttcttttgtgactttcttctacctcatgccactgtttaaaagtaaaacgtattttaacgatgttagaataagactaccattctaaatatcacctacttatgaataacatgtaataatttttaacattaatgattccataaattgtattattgggattagaatgtgctttatgacaggttagtgtttcctctgaggcagaaaactcttttttggagatatcttccatcaagcagtactcgtgcccatatacaatctcttagtggctaggagaaataaataaaagggccataatggtttgttctctttcagacataatttagtaggggacaagaagtctgttcttcagtgagtacactagagatttactctggtgactgccttttgagttatgggtgaagtaaggtatggctttaccataaccttgattcattcacccttgattcatttctcgcccccgtcactgattatttccttgagcatatatctctgcctaacactttagtaggtgctatagaggatacatgaaaagtatgagatctggttccatccagtaagacattttaatagagaagatcaaaatgttacctggcagttggggaataatctgacttcgttggcagttggccttaacttcttaatcattgatccaggaatatttcaaccagagacacaactttctggcagacagacaaattgtacaacaccaacaatatcctggaccttgaaattctgtttacttcagtccattgtatcctttaaggcacctgtgctagcctagattttgtaataacactgatttatgagaatggacaaaagtggtagggaaattgttccctctccacttctgaaagtatgatgatgtattaaggatggaggagttattaaaaatgtctcttctgatgaggtaacaattagatgaaaccatgttaaagctgagatgaacacttagaaattcagggatattgggtctttagccttatgaatttgagctgcttatttaattggtgtaatttactacatattagtactatattcgtaaggattttttattaaccattacagattttacaaacagctagttatatggtaaacagattattatgcctttttgcaattctgaatatgattctagtatttgtgtagatgtatttggtactttttcccctaattccaacactagtttatatatatagcgaataaatctagttgtataaatttttaaatgccgtcagtagaaagcacacaaggttatgatttttttaattactggcttctgatttctttcacttctgatccttttcctttttctcagatgtagctgagtcttgatcattttaagacaacgatgggtagaattttgagattaatgttaattttccctttttgttaatttcagtcccctctcactatgcttttgtccagaaggatcaagaattctaccatcccttgggtctttgtgtataaacaatgttaaataaaggtagactcagtctttaagatattagacagtttttttagtccatgggattgtaaatataaacattaactttcctataagaatattttggctttgtaatctatagcctcaaattggtatttattatggattcactagacaaacagctgtttccttattgtcttttttctttagtgtttctgatttgctatcagtagctgtttttaaagccgtccaaggaaaataattatttacagtttttgaagtcacttttgagccctcatcaagctctcattgtgatgggagggatacctttttgttgttaaaagcctattattgttaaaggccttttatggaaaccaacttggaaaacaaccttaaatgtggatgtatcagatttggtttatccagccatgggagagaaaacaaacctaagtttactttacttgtacatatacactacaatggatagtatatttgctgtaaactacaatgtaaaacctcaataaaagtgcgctgtacttcttaatgtttattaaaagatgtatttttac

SEQ ID NO: 14845 - DNA, 3425 bp, Homo sapiens
gattaagttgtcatcattctgggaagaaaaaaaaaacattaatgaagaggccaataatatgaagggaatcatggatcagttttctttcgctccctgtggtggatttcacttacaagaaaattgaagctggcaagaccctgttttctctgcaatttatttaaaaccttgcacgcatttggataccttgtgatttccaagaactacgtgaagattaagctttgcttactgatacatggcatgtattcttttcagtcttttgtgtttgattttgtttgatttccctctgcagcacagcgtctctgtaaaggtttttatgctttcaccagccatgtcttaaatacattaagacaacacatttggtgttcacacttcttcagtaatgtctgaacttgaaagccacagagtggcataaaacaatgtgtgttttctttgagagcagtgcacattttgcaaccactaggaaggaaattttctgctaaagcaaacccctgttctctgacttgacaacttggccccggactgtggggccccacctgttgcttaccttttgaggtaattttgcaaatgtggtttttttacttggaaataactgcacatttatatataggatattggactctgcttagcattttcaagccacatagcatgactgttttttgaataggttggaattgaaaaaacaattatcaaacgttaagaacaaagacagggataaattgcttacatttcaacctctggagattgaggtaactttttgtgtctgggtcttgtcaacatctaatttttttccatccattctgttacactttgtattttctaactggagaaaagagtgaggaacagaatgttttaaatctggtgcaaaagaactatatctgctggatgagccttgaaagcagtcttggcctgttagggcttacaaagtaaattacaaagtgatccagttcaaagtttgcttagttacaacaaagcacctttaaaaaaaatacattttaaaaaaacattccaagccaattggaagacatcattgggttcttactttaagacatctcctggaataactgttcaaatgcaggttttagaaacaatgcaggaatcttgctttaaagatgaaaaagggaatgggccagcttcccttactcaaggagttgagggaccttggaggatgaaggcgagtatgtgacactggagaaaagtggaccaggcatgtcttttgctttgatctggagggagggctgcctgatgcaggccggctcccagtggggcaggcctcgctgcagaatgcccagtagtactgcggccaaggggacagttaggagacttcatctaaagcatgaaacctagctcctctacacacaaattcctatggaaatacctttgtgtacagtgtcttacattttcctattagtcagaaagaaggagagaatgagtgagtgcttgaaatgtgtcatactgttttaggatcaagactaggaattaggagccaggttgacaaggactttttctgagagttgggtgagggtaaagcttttctataatcaagctcaatacaccaaggaaactggatccagaattcctaaactttaaaatggtactgtctgcggagtggagtatggatggttatgtcaaagtcatagttcatcctatccagatgtagcattcatggtaaacttttaagtgctaagcaaggaattatttactgattggttttaaagagagcagaaaacacccaagtgtagaatgtctactgtttgctacctagaaatcttttccattcctctttcatacattccaacccactggaagtctttagaggtattttgatttaaagtatacttaaattaggatttcttaaagaaaacatagggagaaaactttacatgcaattaaaaatggactttcctgtgatttgtttttaatcattcatttggagaagaggcatgacctttgtatttcactaagtttaaagcaagagcaactgatgattaaatgttgctttttaataaggtttttaacttgaaaatttgaaaatatttaatgttgaaagacttcaattagggctattagagttatatctccctgtcgtaggcagcttcttcggagaagtgaaatataacattactcagtggacggagaaatctgttttgttacagagacatgcctctcagaaggtcaggaggttttgagtacctatccttgccacccatacaggaaatccaaagtttggtgtctctctctctctgtctctttctttctctttctccccccaaacccctctcactccctccctccctctctccttcccctatttgcaatcatattctccctctgcttcttttctcttctgccctccttgtgggcagtcatgaaaatcaattcagactgtgttgattagcagatttattattctattgagaaagcactggaatgttttgtgagattatttttatatgaaggaatagcctgaactcaaacagatggtaagaatagtacaaacaccttagcacatcactgcacacacagtattctgaaaggagatttgacacttaattcccattttcttaaaataacagttttgttgacttaaaaatatgagatacataggatgtgaaaaaaaatgtttgcagtactcagcaaaaaatagggtacataaagcagggtggctgtccatccactgattctggggtgagaagcgatttctacctcgcaagagtgactagaaagtttctaggagcacctccaggcttgcaaagaaagtgaggcctcttggtatcctttcctcagtgtgtatatgacagccagtataatcaataccctaggttatgcgtctatatgatactcatctgtgaatattattggttttgtaatctttgttatataagaggatgtttaggctgtatatactggggtagattattgcctgccccttatacataggaatatgctgcataattgcgcataacttccatctcccttactggcttgtaggcagaggaaactgtatatgttactgccttgtacttttctcatacaccaaaaacacaccaaaaaaatcaataaaataagcaatcttctattctcattccttttcccacagcagcatattttagaggcacatacaaaacctacattctctagttgggagtggatttttaaagttttccttttatcttttatttttttttgtatgatgcactgagatgtgtactttctaacaggggattggtacctaagaaatgtggtagcattattcagaaaactattatactttcaaatgacacatagtaaggagaatggaataatacatgttgcatatttgttaccagttgtaatttgtctgtattatgaaagatgtaatggtttgtcagctgtcactgttgttttcttgtaacatgatatggaataaagtatagcagaatctccgt

SEQ ID NO: 14846 - DNA, 1992 bp, Homo sapiens
gacccggggctcagcccatgcccaggcctcggccggggcgcagcgatcccccaaagccagcgccgtggagttcgtgccaatcctgacatctcgaggtttcctcactagacaactctctttcgcaggctcctttgaacaactcagctcctgcaaaagcttccgtccctgaggcaaaaggacacgagggcccgactgccagagggaggatggacagacctcttgccctcacactctggtaccaggactgttcgcttttatgattgtaaatagcctgtgtaagatttttgtaagtatatttgtatttaaatgacgaccgatcacgcgtttttctttttcaaaagtttttaattatttagggcggtttaaccatttgaggcttttccttcttgcccttttcggagtattgcaaaggagctaaaactggtgtgcaaccgcacagcgctcctggtcgtcctcgcgcgcctctccctaccacgggtgctcgggacggctgggcgccagctccggggcgagttcagcactgcggggtgcgactagggctgcgctgccagggtcacttcccgcctcctccttttgccccctccccctccttctgtcccctccctttctttcctggcttgaggtaggggctcttaaggtacagaactccacaaaccttccaaatctggaggagggcccccatacattacaattcctcccttgctcggcggtggattgcgaaggcccgtcccttcgacttcctgaagctggatttttaactgtccagaactttcctccaacttcatgggggcccacgggtgtgggcgctggcagtctcagcctccctccacggtcaccttcaacgcccagacactcccttctcccaccttagttggttacagggtgagtgagataaccaatgccaaactttttgaagtctaatttttgaggggtgagctcatttcattctctagtgtctaaaacctggtatgggtttggccagcgtcatggaaagatgtggttactgagatttgggaagaagcatgaagctttgtgtgggttggaagagactgaagatatgggttataaaatgttaattctaattgcatacggatgcctggcaaccttgcctttgagaatgagacagcctgcgcttagattttaccggtctgtaaaatggaaatgttgaggtcacctggaaagctttgttaaggagttgatgtttgctttccttaacaagacagcaaaacgtaaacagaaattgaaaacttgaaggatatttcagtgtcatggacttcctcaaaatgaagtgctattttcttatttttaatcaaataactagacatatatcagaaactttaaaatgtaaaagttgtacactttcaacattttattacgattattattcagcagcacattctgaggggggaacaattcacaccaccaataataacctggtaagatttcaggaggtaaagaaggtggaataattgacggggagatagcgcctgaaataaacaaaatatgggcatgcatgctaaagggaaaatgtgtgcaggtctactgcattaaatcctgtgtgctcctcttttggatttacagaaatgtgtcaaatgtaaatctttcaaagccatttaaaaatattcactttagttctctgtgaagaagaggagaaaagcaatcctcctgattgtattgttttaaactttaagaatttatcaaaatgccggtacttaggacctaaatttatctatgtctgtcatacgctaaaatgatattggtctttgaatttggtatacatttattctgttcactatcacaaaatcatctatatttatagaggaatagaagtttatatatatataataccatatttttaatttcacaaataaaaaattcaaagttttgtacaaaattatatggattttgtgcctgaaaataatagagcttgagctgtctgaactattttacattttatggtgtctcatagccaatcccacagtgtaaaaattc

SEQ ID NO: 14847 - DNA, 868 bp, Homo sapiens
tcccctttctctccccagttatttttttttccaaacaccaacttgaaccagatccccaattaaaacaacagtattttttatgtagccataatttttttttttttttgccgaaatctgaataaactacatatatttagcatcaggaacacactctatactaagacagcagctttagatcttgttagggacacctatctcaaccttggagtgggcattgtctttctgtcattttatttaactcctttttcaagcactggaaaagtggctacacggttttgtttttttcttttaaatcattccattagccatatatagcaaactcactttgacattttggaaataacattgtgctgaggtgctccattatgcagttactatcattcagttttactatcttcatttatagttttgtgagtccaccaattagcatctcgaaggtttacctttatctgtctttaatccatctttttaatcatgaatggaaatcggaagtagtatgcttctgaaactctttccagggaaacatctcttcttgatttgagaaatgcaaatttatttaacattcttatccctttcttgactaaatttaaatacttcttggtatttgggagctggattcttgtcaactgctgtataaaatatactcacaaaaccattgcagaaaagcaagaaatatttatgtagaagttcttatgaaaacttattgaatttaattttgaaaactgaagctaagagagataataaatatctagagataactattaacagtattctttcaaacataaaataataagataattgggagctgagcataaaacattatttggaaaaattaactttgcttttcttcattgcattttgtgaattc

SEQ ID NO: 14848 - DNA, 516 bp, Homo sapiens
tcctttgaaacatcattaattgaagtgattttaaatagatttccttttgtaaatcaatggttcttttgtgcttttgtattgtgaatattcaatgggaccaatatgaacacagcttatgattgtatacaaatcccttgccagcacatgaaaacaaactggaatttgtatatataagcattgtgtatgtattcatgcacaataattattgaattacctgtatatttgtggaatgctaatttaaaacattaaattataaaccttgtgtatttatcaaatgggtgaaaagattaaacttttacgcattacaatactgctgaatgtgtagctcgaggtgtcctgcacttttcttataaggctactgaagttacatgttttgcctaatatattctactggtgatgaagacagataatatcacttgtagagacctatttttgtataatggtagaagttttgaattttatggggtattttgtcaagtactgaaataaaaatgacttcaccattttcaccacact

SEQ ID NO: 14849 - DNA, 2866 bp, Homo sapiens
ttcacaaattaaaactgggtttccaggcctggtgtggtggctcacgcctgtagccccagctattgcaccactgctctccaagctgggcaatggagtcagattctctttcttaaaaaaccacaaaaaaactggatttccagttctctaatattcttagtaccacaagatatgtcataggtatctttaaatgaaattcttagctggaaaagtgactaaaaagtttttctcctgctacctagtaataaacaaatcattgtttattactggtcacttagaaaattaaaagggatagggccaggcacagtggcttatgcctgtaattgcagcacttttagaggccgaggcaggcggatcacctgaggtcgggaagtggatcgcctgaggtcaggagttcgagaccagcctggccaacatggcgaaaccccgtcgctactaaaaatacaaaaattagccaggtgtggtggcatgtgcctgtaatcccagctatttgggaggctgaggcaggagaatcgcctaaacccaggaggtggaggttgtagtgagccaagattgcaccgctgtgctccagcctgggcaacagagtgagactcttgtctcggaaaaaaaaaaaaaaaaaaaaggctgggcacagtggctcacgcctttaatcccagcactttgggaggctgaggcagatggatcgcctgaggttgggagttcgagaccagcctggccagcatggtgaaaccctgtctctactaaaaatacaaaaattagccaggtgtggtggcgcacacctgtagtcccagctactcgggaggctgaggcaggagaattggttgaacccaggaggcggaggttgcagtgagcagagatcgtgccactgcactccagcctgggtggacagagcaagactccgtctcaaagaaacaaacaaaaaattaaaagggatagaatataatgaaatatattttgaacttaaattatattctatatgtgtatcttcctaggcaaaagctgtaatttccagagagaccattaggaacaggtagtatctatttttctccattatttatttctagaaactcataaaatggattgtatttttctataagaacaaaatattaattaaggtatagatgactgaccaagggcttaatcaaataaaatgactaacagcatctatcataaagccacacaagccttatgttctcatctcaaaaatgctgtgacagctttttggctgctttaaccataagaaaaatgattggtggatgattttattagcccaggcttttaaaaactttcatctaggccacgtgcggtggctcatgcctgtaatcccggcactttgggaggcctgagtggatggatcacttgaggtcaggagttcaggaccagcctggccaacatgatgaaaccctgtctctactaaatatacaaaaattagttgggtgttatggtgcatgcctgtaatcccagctactcgggaggctgaggcaggagaattgcttgaactcgggaggtggagattgcagtaagccgagatcgtgccactgcactccagcctgggtgatagagcaagactgtctcaaaaaagaaaaaaaagaaaaaattttaatttaatccttctgtagaaacaggcattcagaaccattccattgatcttaataaagctgctctttactgtttctagtcaaaaatgagacttcgatcaaaccataagattttatactgcagatagtcagcttcaccaaagccgcagaggaaacatgtcgagatcaggcttcctgcttgatagtctcttgactaccattaaaacgaatattgggaggtcatgaaagtcattggtaggccattagcattgatatctttaaaacatctaccctaaaccatctgctatggacccataataagaggcctgttgtatatgaaattgtctagaattcaggtgcaggtctttgccggttaagtaagggagcaacacgtaaaatgggagaggagtggggtgtactcacttgcctcctcttttgtcctgatttaaccagcatttttcaaccctgggaaaatttgcagaatctaagttgattgtaatgattttgagctgcagcagctttaactcttaccctttttccacatagttatggtgtttgagttggaaagaaacaactataggtagctacacgtacataattatctctttattcacaaagggtatagtaaaattgattgtaaataactttctaagtgccaatattcaaaacttttggattaaaatgtatttttcaccgtgcatttactttggatgtatttatttcatttaaacaatttaaatggggctctttaaccaaaaatggtatttaaaaccaaaacagtatcgtacttagaatttggagtagaggccgggcacagtggctcacgcctgtaatcccagcactttggaaggctgaggcaggcggatcacctgaggtcaggagttcgagaccagcctggtcaacatgaaaccccgtctctactaaaaatacaaaaattagctgggcgtggtggcgtgcgcctataatcccagctagtctactcgggaggctgaggcaggagaatcgctggaactcaggaggcagagactgcagtgagccgagatcgcgccactgcactccagtctgggtgacggcatgactccatctccaaaaaaaaaaaaaaaagattttggagtagattcatcattaataagtaacagattttaggaaaatcaaaaaatggctaataaaatgaacacaatgtaaaacatttattaaaatgtagacttttaaaaatctataaattgatcatctgtttataaattggcagatggttgtgtaccatcttttaaaataaagattgaatttcaccc

SEQ ID NO: 14850 - DNA, 571 bp, Homo sapiens
agtgccagcagcaacttagtattttctaaaaagaacatttattatttatttttagcctgtcattttaattcttcaagagattttactgctggtattttttaatgcactcctctttgtaatttcattcaagccatttgtctaaagtcatttctttgttttttgggagatggagtcttgctctgttgcccaggctggaatgcagtggcgtgatctcggctcactgcaacctccacctcccgggttcaagcgattctcctgcctcagcctcctgagtatctgggattacaggcgtgcaccaccatgcctggctaagttttgtgttttttttagtagagatgggttttcaccatattggtcaggctggtctcgaactcctgaccttgtgatacacctgcctcagcctcccaaagggatgagccaccgcgcctggcccatttcttctttttttgacccatacttaatgttgcagaaactattcttgtcataacattatctctcatgtacagtaattatatgtaaattaattgaagcaaatatggaaactttacaatagaaataaagataggcagcc

SEQ ID NO: 14851 - DNA, 589 bp, Homo sapiens
tgaacacagctctctttcctcaatggcattgatcctcactcaacatatatgacctgaaagccagtttttttatgcacttctgacaactatctgctaagaaaactttgtgcatgtttttttgactggaaagtggaaaatattgaaatgtgtgtggtgttctcatgacttttatatgctgtggtctcttcaacttttggtctcatttgttgtaatctgaaatgatgttgccgccttgtcataacaatggttatgtgactacagttatacattttacagaagaatgtaccataagtatataattagaagaacagtggcttaatatatgtatgggaagtttatggaaaatgaagttggcacttttctaccctctgagcttggttcttaataagcataatgtgagggtgaatatgtagtatctcctaattatgagcactgcatgagaattaaaaaacacatgtaagtaaaatagttgaaaaatcagtatgttctctgtttttaaaatgtcaaagtttatgtcagggttaatttagttataacaaagtgatcataatggtgaaatttaataaatatactctagtatgatcagcct

SEQ ID NO: 14852 - DNA, 76 bp, Homo sapiens
attttaaatttatatttcctttatcttggtacatacctatttgaaaatgctactaaaataaaaataaatctttgcc

SEQ ID NO: 14853 - DNA, 255 bp, Homo sapiens
tacaaacaaaaagaaaaaaaattaaacaaattcttggaaatatctcaaatgttaataacaatatgaatttttctcatgcatactattactactaagcatgtacgtgaatttttaaatttatagatgtaaacttttaataaaaattggggtgtggtaacccatcattctatgtttttcttaacatagctggcacagggtttaacacataattgccaataaatattgcttaaagttctttaaaaagaactatgtttt

SEQ ID NO: 14854 - DNA, 296 bp, Homo sapiens
ataacttgggagaaactgcatcctaagtggaagaactagtttgttttagttttcccagataaaaccaacatgctttttaaggaaggaagaatgaaattaaaaggagactttcttaagcaccatatagatagggttatgtataaaagcatatgtgctactcatctttgctcactatgcagtcttttttaagagagcagagagtatcagatgtacaattatggaaataagaacattacttgagcatgacacttctttcagtatattgcttgatgcttcaaataaagttttgtcttggg

SEQ ID NO: 14855 - DNA, 839 bp, Homo sapiens
atgaactcaatctaaattaaaaaagaaagaaatttgaaaaaactttctctttgccatttcttcttcttcttttttaactgaaagctgaatccttccatttcttctgcacatctacttgcttaaattgtgggcaaaagagaaaaagaaggattgatcagagcattgtgcaatacagtttcattaactccttcccccgctcccccaaaaatttgaatttttttttcaacactcttacacctgttatggaaaatgtcaacctttgtaagaaaaccaaaataaaaattgaaaaataaaaaccataaacatttgcaccacttgtggcttttgaatatcttccacagagggaagtttaaaacccaaacttccaaaggtttaaactacctcaaaacactttcccatgagtgtgatccacattgttaggtgctgacctagacagagatgaactgaggtccttgttttgttttgttcataatacaaaggtgctaattaatagtatttcagatacttgaagaatgttgatggtgctagaagaatttgagaagaaatactcctgtattgagttgtatcgtgtggtgtattttttaaaaaatttgatttagcattcatattttccatcttattcccaattaaaagtatgcagattatttgcccaaatcttcttcagattcagcatttgttctttgccagtctcattttcatcttcttccatggttccacagaagctttgtttcttgggcaagcagaaaaattaaattgtacctattttgtatatgtgagatgtttaaataaattgtgaaaaaaatgaaataaagcatgtttggttttccaaaagaacatat

SEQ ID NO: 14856 - DNA, 1209 bp, Homo sapiens
gttccaaaaattctaaaaaacctaaactcttcaggctacctttgtgtgtctctagaagagaaaagcatctatctggagatataaatgtgtatgtaaatataaacgtttgtggcaagaggacagttctgtgacatctgttgaacatatgtggttgtatatattggaaatgtacatatccaatatgaaatactaaaacaaacaaacaaacaaaaaaccagaatgcattgtataggattgcatgtgaagtcttttctactgaatctatatttccatttgtaagtgattttaagttaacatatgaaggcagggaaatgattacctttccagtaaaaagtatagataatttaattaacttagtgacaccaccaagtgttttgatataactaaatttgtggtaataagactgtctgcacctgtattcattgtggaacttcctctttcattggaaactttcttactcaagaatgacggcagtattgttttcttatatgtgcaatgaagtggaatgataaacagtatgcctttaatttatatgtgttcttgttctgatgttgtttcctgaaatgatttttcttcctaactgtggttttcgggtatgcaagcctaaatctttgtacactttgtctcacagaatagttctgaggctccatgacagggttttgtcattgttgatgttattgttgcttcgttttataaaaaagccaaaattttttttccaatccaaacgttcacctgtttcctttcctcaagctataccagtgtaataccagttaccctgtggatccatttaatatgttatccccactaattaattttcgtatattatttccaatatttggaaagctctttatagccatttggtatttcctattacccacctcctattttaaatatttatcagtctaaacttgtgcagtgtagtaaacatgcaagttgttacgattgagctgtattaccataagtagaattttaagtaaactggtgaatttgggcaataaatgtttttgctttttgtttgatttttttttacaagctaactgttagaggtatacatttatttatctgttgtacagatttgattatgattttaatgtttgaaagattgcacttgtttgcttttactatatgtggggtaaaatatattttctgttcacagtatatgaaaatatggagtaatttaaacagtaaataaacattctgtggatgctt

SEQ ID NO: 14857 - DNA, 425 bp, Homo sapiens
ctcaagcttgcttgaggcttgagtcctgggctaactacctctgatcctctttgaccttccattacatacctaatcctagctgtctcctcatctcatcctagtctaggtttgcttgaaattgggtgtgagagctagaatgagaaaaagagtagcaaataatttgttttgccttgtgtgaacaccagtgcactggtggcttcctgagggactgaggtaagtctgccagaaaggtgaatagtgttagacaggcatacatttgccatcttttaaacagaatgactgatctaaagatgactcagcctgctttgaaattagcttgtagccatgaaagggccacccgattttccagtttaatgaaagctaacgtttattaagtactaaaattatatttattatgtataataaataagcacactgttataagc

SEQ ID NO: 14858 - DNA, 817 bp, Homo sapiens
tggaaatgagccacccccactgcagcccccacctttgtgtcctagagctcagcgtctgcagtcaagtctcttgtattcggtgtccattcagtatcagtattgctgtgatattttgggtgccatattgtgccagctttgctccaagtattctaaatgtgtcccatcatgctttccactgacccaaaattcaccacagcatttctatctttatatttctgtctcaaaaatgaagagaagggggttatgggttaagttgctgccttttaactactttgtagctgtatttaatagctggaaacctctggttaaatttgtgcttacatgcactcctggcatagtcctattaaatccatatgaagccagatatgattgggtgcagatgtggtgttcctcatattatggtacagggccaaagacttgagacgtggtgttttacatggtgactcacattatgaatggatttactagaagaacattgctgctccttatttattgtagtgtgctgcatggaacgtatttatttgaaagcattaaaataaatgatcctagagcatgtgcataatgagaggactgtattctctctgctgctgttgaggttatattaagttccacatagcaattacagtatgccagttccactgaagacatgaaatctttagaggtttcttgcagtgaacgaaatgaattttaatgcctattatttctgggtactttaacaatatttcaaatatcattgaccactaatacttctcactgaagctaacacagtctgacaaaagtctatggttcctaaatatgacatcagtgttgccaataa

SEQ ID NO: 14859 - DNA, 992 bp, Homo sapiens
gttgcccaagggaacaccctagggaaacgtctgaacaaggaaaagaggatccgggacctgcttgtatctgcgaaaaggagccaaaggagcaggcttaggagagctcataagtgtggcaagaagccgactaggctcattctctctccctctctctctctctccctctcctttctttttacttcttcctttcctccattccttctttctttccttttcctttctacctttcttttctttttgcctttcaccttttttctcatttaccttctctcttgagcaacgtcagtaattgatcttgcatctcagagagagagaaagagcatgtgtgagagagaaactggtttctatgccagcactcctgaaaccccttactgtaaggatattttctcttaccccttgggatccaggctctgagtctcttctctttgggagtatccatcaaaatgactttttttaaaaacagattttcccccaaccagaagaatctgcacaaacttggcagcgtttttacttgtttaatgagtttaagacattacatggtgaaagagaagcattttggactcctgcatttttatttaccattcccagactgacgagaaaaagaaaattcctcacataacagcccttctctaaagaaaaaggaaaaagtggctgtaagattagaacattgctacaaagggaatgctgcatgttttatcaaaatgcaatgaccaggaatgatggttgattaaaaaaaaacaaaacaaaaaccactctttccccaccccacccccccaaaccctgaactggaatcaggaaagacggaggaaacaatcaaaatcaccattctattgctttgacacctttactaggtgaattggtggcattcacaaagctaatagggacgtttatatcaagaaacatttctgtatatattgttgaattttagttgtacatatactttgtatgtttttgtcttctttcatatatggagtaaaagccacaaaacgctg

SEQ ID NO: 14860 - DNA, 546 bp, Homo sapiens
tctatacaacaaagcttaataagacatgcaaaaatttagaacccctactttaactgtcattggtttttgaaatatatttaagctttgaaaacacctgttattaatgaaatactcttttattttggatattatgattgcagtatatggatcaagatcactagtgacaattgaaaaaaactattggaataatagcacttgtatgaaattcagttttggaactaaacagcaaatttctagaattttgctgaaaatgttttaaaatgctattctcatccagccatattagtcttctggcttttctttagcttcatcaaataagcatgttgtgataatgatagatgtacaattccaacaaggttattattttttaaatacattgtcattctgaacattttatcacttctagtttaataatacatacatgatttttcttctgaatgtctcttctccctgcatcactgttcattcacaatgaaaggttaggaagaagctttaaaattcactattttactatcaatcatttgtataataaactatacaaagtat

SEQ ID NO: 14861 - DNA, 550 bp, Homo sapiens
taaactacctaacattatttattcagcttcatttgtgtcaatgggcaatgacaggtaaattaagacatgcactatgaggaataattatttatttaataacaattgtttggggttgaaaattcaaaaagtgtttatttttcatattgtgccaatatgtattgtaaacatgtgttttaattccaatatgatgactcccttaaaatagaaataagtggttatttctcaacaaagcacagtgttaaatgaaattgtaaaacctgtcaatgatacagtccctaaagaaaaaaaatcattgctttgaagcagttgtgtcagctactgcggaaaaggaaggaaactcctgacagtcttgtgcttttcctatttgttttcatggtgaaaatgtactgagattttggtattacactgtatttgtatctctgaagcatgtttcatgttttgtgactatatagagatgtttttaaaagtttcaatgtgattctaatgtcttcatttcattgtatgatgtgttgtgatagctaacattttaaataaaagaaaaaatatcttg

SEQ ID NO: 14862 - DNA, 797 bp, Homo sapiens
gtggctgccaacgcgcacgctcgggtccgaggctgctcccctggagcggcgcccctgcgccctcagcccgagcagcgacatccactcgccatttgctgacatgagattgggaggaagaatccagaggtgaagagggagacggctcttagctgcgttcaaggcggggccctcgggagcccaggtgcagagcgaggccgtgtccaggagccggcgtccctcagtgccccgtgcacccgcggccgcggcctcccaggcagtgctcatgcgctggccgtcgggggaggcaggggcacagcctccatgtgcgcgcgcgtgtggagctgtgtgcaccgcatgtgtgctttccacaggggcgtctctgcgtccacgcctgcacatcccggcgcacgtgtgggcaccacagaggacacgtgaggggaatggtcaccagtgagccatatttattatttctagagaaatcacgaactgctttctgtaattgcactgtggataaatgttccgagagtctccattgttgtacaggatcttcagttattcgaggggaatgaggcaggtcaagccgatgctagccactagtttgattttttttctgttttatagtttgcgctgcatggtacttgtgaagcttaaatattttgagtgttctactgtgtctaggattgttgggattgtacatatggtactctttcataaatgataaatgattctgaatgttagtgttttatgttcatataggaaatattttcattgagtccaaaataccactgttttgttgatggacttgaatgcatttttgt

SEQ ID NO: 14863 - DNA, 80 bp, Homo sapiens
cgcccagtcctgggtgggggtggcggtggccgcagctgcctggcctgctcctcccagccccagtccctccaagccacgag

SEQ ID NO: 14864 - DNA, 284 bp, Homo sapiens
agggaacaccaggcccggctttcctacacccagctctctttttctaatgtaaatgttgtgtacaataattttatttgattaagcttcaggactgttttgtaaagcgaggtgggaccgatgtggcacacgccagctgcggtttcccggagcgtggagaggcagtgctgctgctcccgcccgaggctcatgacaactcaataaagcactgcttttattttttgcagtcttcaatttgagaaaggtgagaaataatgttttcaataaatgagattcataccattgtt

SEQ ID NO: 14865 - DNA, 1237 bp, Homo sapiens
ccgccttctcctctgtccaggaggccgggatcaggctgttgccatggaagttcagggccatagactgccccacttaaactcttgtcagtctgggctcagggttcccagagctcattccccaggaatctctaagaccagggctggggcagtgtctgtcactggcttgtttgttccctaccaatattctgttgctgtttgaagtagtgccagggtcccctgggaagatgcccccaagacacctgccccaagtgggtggatatctgccttcctgctgcaagtggaggcaggtccagcagcccctcttcagagcccctgtaaatgctatcgcagcctgagtcctgccgccttccagttccttggtgtcccgtgcaccccttctgtctgtcccctttcatggctgtgcagccgtcccgctggagtggccatgtcccttgtgcattgagtgcatccccgctggtgactaagctcgcagcaagcggctaccccccgatctgcaaaagggcctctccctttgtgttctatacattgtgaatcttcccgtctgaagaacgcccagcctgcccagacaaagccccgccttccccaaagcagaggggctgtctgtgtctccagaaaggggacatcgggggggaggggggctcagaaaggagaagggctgtgatctccggtcccttcccccatcatccttccttagactgatgctttgactgaatcatcactagctatggcattaaaaggcctctcttctcatctggtgccaaaggttccgttgcagctttttacaaccatccggtgtggtttggaggatttgttttttttttttcccaacagaaaagaacagccattagaagaaggctcccattttctgatgttccgccccactgtgaagagtgtgctcgttttaaattcatgttgattcttgtaagcactggactgtcttcatcaagtatttccctacagaactcctcaagaaaacagagatcatttggctagagattgtctgagtgactccaagctactcactgtattggacgggagtagtaatttattttaaagataaagtgactaagtggggaaatttataaagctaaatattatatattttatttttcatacatgtttgaagtgcaaatctgtggatattccatttgtaggaccaagtcgacatgcccatcctgacattgtatgctacgagaactcttctgatgatggaatttcgattaaagtgcactgaaag

SEQ ID NO: 14866 - DNA, 861 bp, Homo sapiens
ctgtggccgccacggccacccggaatgtgaagggcgctccgggctctgagcccgcagcttttacgacttctccctgcctcgttccttatattcacagaagccccatagtttcactgggttgcggttattttcctggtagtttgcgtgtaagaaagggagaatatagttttagaggaagctgaactatgacgatgctgggcgaagcggttggaaatggcagagctgaaacttattccaagctttcaaaataatcttttaagaagccaggattctccggtctggaatttctgagtgagtcctttttttatggtgtcctccctctgtgaatgtacaggcggaactgtacgaacagctcccttccatccatttttaactctttcggaaataacacctcacagcagcttcgtgcttttgtacagacctttgtaacaagtgtacagaaaactcattttgtttgagaaacaggagttgatgaacccatcatgctggtttttctctgagcacaaagttttaggctgtacacagccagccttgggaatctcgttgagcgttcggcgtggatccacggggccaggccaccctgcgggagcgccacacgcatccacttcggattcagtgggtgaagacagaactctgagagtctgcaggcggctcctgtgctttttatttctggctcttcggatgtcttctagacatttactatcactgcacctgaagaaaaaatcacttttaccttcctaatttaaaaagacaaaacagaaatgtacgttccttcgctagctttagtctttctgttcccatttttataaatctgagcattgataatgttctatctaaatttgtacagtgtgattttttttt

SEQ ID NO: 14867 - DNA, 337 bp, Homo sapiens
agctgagtgagcctccgccatccagcatgacaaactgtggccgaccgcagctgtgccgtggcacgatggcgaggaagccagccccaaggaaacactgaaaacacatatcacgccaatgccgtgtggttttgtttgaatataaaattggtgaaagtgttggtttttttaaggcagtaatttttttgtttgtttttttgcgatttcattccattcttgaccaaagcttctctttaagtagtttattatggaaaattgtcacactaacttaaaagacagggtgagggagatatgtaaattgtccactagaaaattaaataaaagaactgaatgtggtttt

SEQ ID NO: 14868 - DNA, 290 bp, Homo sapiens
cctgtgaggaatatgttgccttcatcctagctgctggggaagcggggagaggggtcagggaggctaatggttgctttgctgaatgtttctggggtaccaatacgagttcccataggggctgctccctcaaaaagggaggggacagatggggagcttttcttacctattcaaggaatacgtgcctttttcttaaatgctttcatttattgaaaaaaaaaaaaaatgcccccaaagcactatgctggtcatgaactgcttcaaaatgtggaggtaataaaatgcaactgtgt

SEQ ID NO: 14869 - DNA, 174 bp, Homo sapiens
ggctggcgcgctccaccctggactctggacttcgcaggttcctgcctgtcacgccacccccttcctgggagcagcgagcagtgccccaggcccgagttggagcacggtctctatggggaaggcttcgctgtctatcagctgtgatttgtaaaaataaaatctttaaatctctcg

SEQ ID NO: 14870 - DNA, 873 bp, Homo sapiens
cagcagctggagccagctccgagcagcccgggggccccgctgttgggagtgtgcatttaactgtttcatgcgcttgttggcgcgactgtggctcgagctggcccgcagacacgtgggtttcatcactctgaggggccacgtctgttagtttcctatcattttgccttagtattttttgaaaaagggacatgtgtcctgtgggtccctgcagtcgacatcatgtttggctgggcatcgatgcctcctttctgggactcccggcacaactcccctcatccagggagggaggcagctgctggggaggggcttggctaggtagttctgtgtggcggtggtcattcccctcattaaacaccagttcttggtgacgccaggggctggtaggtcattcaaagctgtggccagctcacgcctgcttcctccctccctgccctgctgaatcctaaagctgtgcctatatctgtgatttgaatgagggagccctttggggcaaattcaggtgcccccattgcctcaggctggccctggtcccaggtggcagcggttgaggaggggtacagggctctcaagcctgaggttttcttctctgggcttaattttctcttggggtacgtgcctgacagtgtttaaggtgtccgttgaactggagttgcagacttttaaatagatgaccccttcagatcatctgtgcctacctcctgcccatcaggcgtctacactgtcactcagacacctgtggcatgtggaggagactgccctgtcctgagcctggaaaatgtgaaactgtctcctgcaacctgctgggcatgtgggcctggctgtgttcaattgcaagaacaatttttatgaaatggattaaagcttgttttttaa

SEQ ID NO: 14871 - DNA, 123 bp, Homo sapiens
acgtctctggcacattcatcttggttgcaattgtactttaggctatatttctaagagcgaaatgaccacagccaaaggtatgaacattgttcaggctttcaataaagactgccagatatttac

SEQ ID NO: 14872 - DNA, 108 bp, Homo sapiens
tgttaattggaaagcagtcattggagaactagaacttataaacctctacttcaagtgtgtatcacgtaattgtttccatgaaaagcaataaatgtaacaaagggtttt

SEQ ID NO: 14873 - DNA, 1573 bp, Homo sapiens
aatagctcttaattttagagaaaccttcctggagggaaaccatactcctataatgagcaaagtaacaacttcaagcatttttccagcgttaccatcaaactcacaaataggttgaaatcctttagttataactcagcctttaggaacaccggagaacccacaataatagaaatcttttcgtgttccccattgagaaatgctttagttagcatcttcatgcttggaaatctagacaagaagagaatccatggatggacatggtcgaggaattcggaaagcctgcagttgacattcagtcttcacttgaaactcaaaactgacactaggaacagcttcatgagttcagtagaagtaagctttatttgtagcttctgccttgtttgacggcgtatctattcagggaagcgcacagtaaaagaattccttagcatgatgtctgttttggtacctcagcaatgaaccttttctagaaattattattccaaccactagaataccctagtcactattcccactttgagcattaacccctttgaaaagaaatggacttaaagtatctctgttttggcaaaattcaggttcaggggctggatggtatgtgtttctgctgccttattcaatccaccacttctctgtgaaacactctaccttgtttttggtttgattctactgatgtcagggtttagccggtagaaggagtagttcagtttgtcaattcaggagaaactgtactggtcagtcacatcttacggcgaagggagagggaccttaggggagcagagaagacaggcaaagttgtggactgtttgatcttgtattacccacaggaatgagggcagctaaacccatagaaggagttggaccaaggcgaattacgagtcctggtcccagcagtatgtgtgctgacttctgggtgccccagaaatagacctctcctgtagagtggtgatatacagaatgagtttcagtttgcattgcagctgggattgaaagtaatcagtcgtgagcaggcaggcaggaggtcctgttagccctgccttccaggaaggttggggtgggagttttgagtgggaaagaggatgacatgtgtgagagagttctgagcctgtttgctagggagagtgagtgagtgctcttgggcactgctcaggccgtttctgctgacttgcctggcttacaataaatgcccaataaatatttgttgaccatatgtgttgtacactgtggtgccctgtccagtcccctctaccaagctgagacccccatccccagctgctctgagtttgggctgcaagtgctcacagctcttgttctccagaaactggagaattgccctcaggagatgagagccatctcacctcacccaggagtcacttcctctctacaccccaacacctggttcatttgattaaagcggagaaaactccagggtgctatgactgctctggcacccttggatcaggccaagctagactttttctgagccttcatccgtgctaagctctctcccttctctatcctgtttcattccctccctcaaaggcgtttcccaaataaatcacactgtcaatca

SEQ ID NO: 14874 - DNA, 2867 bp, Homo sapiens
atgtaatgaagatgggaagatatttatcaaattcaggcttcattcagcatctgagagttcacaccagggagaaatcatgtatgtactgcatgtggtaaagccttcagtcatagctcagccattgctcagcatcagataattcacaccagagagaaaccctctgaatgtgacgaatgaagaaaaggtattagtgttaaactcttaatcgactcctgcaaatctataccagtgagaaatcttacaaatgtattgaatgtggcaaatttttcatgctattagtattttcataccttagtcacatttggagaattcacatgggaataaaattccattgctgcaatgaatgtgaaaaagccatcagtcaaagaaactaccttgtttagtatcaaattcacgccatgcaaaaagattataaatgtaataagcatgtatgtgtgtgaggagattcagtcataacccaacgctcattcaacatcaaagaatttatacctaagagaacttatttgggtgtagtaaatggcagatctttcaataggagtttaactagtctttgtcatatcagaatatccatagtagacaagaatttgatgtaacgcaaatggaaaaactcgacaccacatttcaggctttacccaacatcgaaataatggagagaaaattgttgattatttgtttatgaaattgttaatacatagtcccaatctttttcattgcacaaaaatctagggttgacttggtaaatgcagtgacattttctcatggagttcctttatttaatatgtattctaagtaggtacgtttatttttacttttttattataattttgatattaaaaagaacagagatggggtcttgctttgttgcccaggctggtcttgaactcctggcctcaagcgatcctcccacctgtcctcccaaagtgctggggttacaggcgtgtgtcactgtgctgggcctattttatttatagaactcatttaagctgtttttattttaatatgccctataaacatttttatattttttgaaattggttcttagtgttcacaacttccataagatactgctaatgcaccagtattaaaacacatcgacgtaagtagctcatttagctttttctgctgttcttggcccaagttctttccaaaaccaactcttaggcctgctctttactagggatcttatgtcgtattgctttacagccacaacacttggattcctgttgattaacttctccattctcttaagcacctttagaagatttagaagtttcctagttttaagtgtttcaccagcaagtattccatacctacttgatgttgctggtctggtgtcttatttcctaaagtgaagcatctttttttaaaaaagaatttgattgacaatatatccagtccaatataagtatgaaggattctctctcctgagattgtagcaggcagccaaacattttcaaatgatgcccaaggttttagctgtcttgtgtgcatccacagtctgcgaagaagacatgataaggacatcagggagccaacaagactcctaatagcctcactacattcatccagtgcctattctgcatgcctaagcttagagttcttttatatacctctacggccagcaaaatgctcaggtctgctcttggtagggtaaacataaagaagatacacaggccgggcatggtggctcacacctgtaatcccagcactttgggaggctgaggcggatggatcacgaggtcaggcagtcgagaccatcctggccaacatggtgaaaccccgtctctactaaaaatacaaaagttagccgggtgtggtggcacgcgcctgtaatcccagctactcaggaggctgaggcaggagaactgcttgaacctgggaggcggaggttgcagtgagccgagattgcaccactgcactccagcctgggcgacagagcaggactctctctcaaaaaaacacaaaaaaacaaaaacaaaaaaccatacacacacacacacacacacaaatcagcatcataagggaatgtagccttccaacagagatgatgctgttcgtatgttaatctcagagacagtatttcaagagagtggcaggtctgttcctggtaaaattttaaccattaggattgcagataaatgtttgaattctgctcctctctcatcaatccaggacagtatttgaagtgtgagggctttgtgtatagttgtttatccattaccacatttttgtattttaatagtctacaggctatataaaagaacatggctttttgactgataaaagtgattacagatgttggctcaagttcagggccaccatcatatacctaacaagagttcatgattctttaggtaatgtcaaaacattttgtatttttccatcttaagctttataacattttgtgagtaagacaaatgttatttaaaattcttgttgtcagtccagcaattgaggctttcatagttcagtgttataatattcagtagggaccctcaacaaatatataaaaatatgttgctcactctataatcctcctatggctaacctctaggatagttctgccactatattttacttctttgccatcagcaagagtaggatttcatcaaggcaaggtaggaatctaaatgaaattgatatataaatgaattgatctaaatgtaaaagcaaatgaaaaatgcatgtgttttttcctgtcaaacatgtatacccttatgtatagagaccagtagtcacgtatggtgactgaaacaggattatgtaatccctaaaaagcagaatatgtaaaaatcacatgtatgcgtttggtttaggaatgtgcttttgtacttccacttgaataaaggtgtgtttggtattctgag

SEQ ID NO: 14875 - DNA, 644 bp, Homo sapiens
gatattaaaattgactgatggaatagaagctccccaggatgccaccactgtgtaaaatcgcagctcctcaaattacctctgtttaatttcaaatgttagggtccaaggaagccctctgttgcaaccagatatgttttgaacccagttcattcagaaaccatggttggtggtcatcatctacttgtattgtgaaaaaccagaaattccaaattcagctcttcagttatggtcttttcatattattttagaatgtgaaacttatgctgtgtgcccctccttttatgtggcgaacacaacctgccccgtatggtgcctaactctcctgtgaaccctgggcttccctcatgtttaacattctggtttcctccttccttgaagtccctgtggccctcttcaaggtcctaccttcctaccctttattctttgtggttctgtacagattgatgcaattatattgcctttcctgattaagtgttccttactctgtccttgatggaggggagaagggagggcaaagaagttaaatttatttcagggcatcaaattgaatatctacttaataactttgtaaactgtaaagtgacatacatataattgtaaagtactgttaattttatctaataattacagagtttccaacagtt

SEQ ID NO: 14876 - DNA, 2387 bp, Homo sapiens
gcatagcaggtggcaggcagcaccatcattcatctttctcactgcagggccttgcggggtgcaaggtgatggctgcaggaaagcactggtcccatcgccttcccacccattcgccaacgcgggaaaggcaaggcctggcttacttagagcttccagagagcatagctgcttccatctcttacccaagtggtgctaaacaatttttcttccaatgtttgagggaagcagtctcctgcggttcagttcaggctgagattttctccttcagtggactgtctgtgtccccctgccgaacaaagctgggagtaaaggcaaaaccttgacacgtgttggtagctgggacctcatcttcctgagggctctgtcttgcctgcagggtcatagctcagactcttcccccaccccctctcttttccattgaacaaacatttattgaacatcctctgagcacctggccgtgggaatgccgtggtgaatgagagactagacgtgatgcctctgggggttgtgcgttggggatgcatgcgacagcccatgacccgaggcattctcagggtatctgtgctgtgtgcccgtgagaacatcttcccatgaccactcctgccctcctgccccgtgctggatcttccctccccagctgggatctgctcccaggcaactgtgtgaattttacattatttggagcctcatctgtgtcaggctataacattctatcctcatctgtaaaacttccccgtccattattccttgcactataacaactgtcaacacaccaactattaggaagttagtattttgctattgatcactgaataaacatcagagtattttaaaaaacagttctctagaaagaactgttataattaaaatgagtctgaaagatgaactctagtattaatgccctatatttgatggcactttatagttcataaaattaatttcaccccattctcattggacccatttcccaagtatttattgaggccctgtaacaaacatgtcaggaactcttctgggtgcttgagacacatccatgaataaaatagggggagaagctgttgacctcgtagagcttatgtctcgtggatgtacctgatcttcagaacccgtggatattcctgcaaatcctctgggcctgtattcattgctttgtcagcatcttgccctgaaatgcatttgtcacctacctcttgttactaaatggtctctgccctccagacccttgtcatccaaggcactaggggtcctggacacccactggggatgatgagctggtagcgacctgttttgcatgagtgccaagtcaggaaaaataaagatatttgtaggcattaaaaaaaaatacatttctttaaaaatgagaagatgcaatatttgtaaactgttgaagcttccttattgtgccatcacttaagggtttcatttctgtttaaagttctggaagctgcataactagcgtggactgactgctgtgtcattgtgctgtgcctttgaaccctggctgagtgagtgagtttgtcctttgttgatagtgtcctataattgcaaaatgtggtttgtcttctgatgcctcttaataccagattcttttactgagatttttttttttcattttccattgtaaataaggtaaatggtaatgactaacacaaagctgtattactcagcccactttgaaacgtggttttatcacctgttcttgttaggcagcatggtgtctaattttggcttagcaaatgacgctccttggtcttcctggctcattagctgtgcccacgaggctgcactgactgggtcgtaaatgtatctgagatgtccacacggggctgctgctgctcctctgtaatactgaggtccacatgcaaaatcagctttttttcccccgtaattatcagagcagctaggcagggctgacagccaggcagactcagtgggaggcttctggcctgagtgtggccttccccagagggtggttttccaaaggcaggtggggactggggaggcctcggggggctgcttgtcattacctgaatcacagatgctcttttgtcatacacagccagcattcctctgggtttcagcaagttggcatatcttaagcttcagaaggagctgggccttgctgactttcctatctggcctcttccctatctcctgtggggccaagagcttaggacagtgtctcagaaaagcctctaagtagggggtttttcccatgggattgtggtagtctgatttttcatatctattcaaatgttaagaaatattttgttttctgtatttttctattctttagaaatttttttataatagataatttcaaacctatataaataaatccttatgtatttatcatttgactttattataaactcataatcaatctt

SEQ ID NO: 14877 - DNA, 635 bp, Homo sapiens
aattagacaatctaccaattcttcaaccagaaaaacctattgttctaaaagtgcacttaagagatgggattacaagtggaccctgactttccctaaggacttccactttgttcaagaaagctgtatcccagaacactagacacttcaaattgttttgtgaataaaactcagaaatgaagatgagcttaattaacctagtatactgggtgaataattagaaattctctacattcattgagctctcattgtctgggtagagtattacacgttgcatactacaaagcaggtgacaaatcaatgccaaataagtacagtcatcttctctagttctcataagactatctccccgccacctatagttagtaccctcaagtcctcctgagctgtgatcagagaataaacatttctcaacaattttaccaacaatttttaatgaaaaggaaaattatacttgtgattctcgtagtgacatttatattacatgttccatttgtgatattctataataagtattatattgagaaagtcaacaagcacctctttacaaaactgttatctgatgtcttcctgcatattaaggatgaatctacagaattagatcaataaggatcaacaaataaatatttttggtcatt

SEQ ID NO: 14878 - DNA, 3583 bp, Homo sapiens
aggaagaatttgccatcaagccatttcccccttttgtttctaaaattatttcagagatgtgtgctcctggagggaaaaagaaatacagcctcaacagattaaaaaacaaaagtcacacttaaggatccttctagtcacatcagcagtgttctgcctttatgtagtagttgggcatataatccttccacacagcccctgcagggaaaggctaatcttacggataatccacgtgagatttccacacaagagaaaagcacacgcatagtgaaatgtcagtcttttcagtaatgaggatacctttaaggcactcttggactctcggcaaccacaacataatagttgaaagatcaagattggctccacgaaagtgatacggaggttaggatgctacttgctgcaaacaagccctactttggccaacatcctgcttatttctcaaaaaagagggacagtgaaaacaaaaacgacattgggacatgctgctcaaggtagttatatatacgataagttgtatatatgatcactggtagcctaccaaagctgtagaaatctaggactgtgctaatcagtatcaaaccaaagatttctatctcttcccgaaagagagggtatgtgcaccagtctacagttccaaaggactgcaacaaatgtagatggttctgtcctcatccctgagatcagttctactgaaatggcaacaacaactccaaatacatctctcccttcttgaaatccctaaagcactatcgcactcctaaatgcatttctccacaagttagcacttgattgtatactgtcttttaatccttcattgtttcatgtatgaagtttttaatcaccccctaacccccaaaaaagattcggttgtcaagggatatatttctatccctgccagcacagtgctggacatagtgagtactgaacacctaagaggcactcattcagactgacttctacaggacttctacgtgtgtgataaaagcctgtgaatcgtgagtccctgaaatatggtagcctggcccagcttctaaagaggaccttcgtagccacaaggcatgctaaacctctagggtctgatgctgtttttgttccaaatataaacgaaaggcactagtcagccgcctgcatagactttctaaacagtgagtaaataccatggaatgtcagaaatgactttatcatcgtcatcttgaagaaaaatatgaacactgatgaaggtcattttttttttttgacatctttctgtggcaaagctcttagaattctttgcagttagctgctgaacagtatgatgatttggggattttctgaatcatttgtacttagatactggagttcagaagatgtgatttttgttgcttttcagaaaaaggaacgtggtagggagtgttttttcccacgcttttccagtaactttgcaaaagcattaattgttcactggcaattactaaatgtattttgttgctctgagaaactcagcagtgtactgagatgtggctggctgtgccatcgtcatagtgcacagtgacttttctgtttcttatcactaaagactgaggtgaggttatgaaactttcattggtcccatcgttgtgcgcagggtgcaactggctacctagaagctgatggcaggagactgtttcacacacaggagattgtgagctgtgtaagtagtcatcgccactcaagtaggacaagggtcctacccaaggctaggaccgccctgcggaaacagaaacatagactgagaacaaacctcaagactatcagtgtgacctccccataacaagagaaccccatatatagtttgagactttcccttgagaaacttatactaaaactattactcatcagtcattcactgatcagcagctaaagtccatgagaccaaatggttttatatggaaccaacgaagtgggagctaaaactgcacagtggtcattctttggcctctccttggctttatgacttaaaccaactacaacttccctatagcttctaagcagtttcatcagcattacttgggaaaacgtgttgcaagtcaaccagtcactaggatatttctacccatgcaacggaagaaaaacccattactccagaagagtatatctaagtaactaaaatggaggcagaaaatgttttaaggattttcttcaaagaataagccacagcaatggttttgtagaaaactcctgtgcttttgagcaaggacttttgccctctagaaagcaactgaggccaggtgcggtggctcacgcctgtaatcccagcactttgggaggccgaggtgagcggatcacctgaggtcaggagttttgagaccagcctggccaacatggtaaaatcccgtctctactaaaattataaaaattagccgggcatgatggtgggcacctgtaatcccagctacttgggaggctgaggcaggagaatcacttgaacccaggaggcagaggttgcagtgagccaagattgcacactgcactccagcctgggtgactagcaaaactccatctcaaaaaaaaaaaaaagaaagaaagaaactgaaaagtgaggtgtggaactccaggcaacgacccaagcacttattttttaagagggaaaggactttggtcatgtttacattggcctttggtttttttttttctttcagccacaactatatgctgatataactcagccatcacttttgagttttgtttttaaatgaaggttaaatgtgacctgtgccctcacatttaattccgtttcatggagacatcttcctgactttgttggatagctgccactagggttgcttcgatcttcagccacatgctgtccttgaagcagctatttgaagatgtgttttctgaggaaaacaggctacaactgtttattaaaaccacttgcagtgcattcgtttatcagatgctcagtgcaaagtgtaattgggtcatggtcaaaaacgcttgcaacatctaattggcgttcaagatagtcattcaaaagttcttggcccgctgaagtctgttaacagttgaaacattctacagttaaccattagcatgctagttgtcctaatggaaatttttgaagagtttttcaatatataccctacccttgccaggaagagaagtaaaatcctcaggttgtggggtatttgtttctactccagcctggcaggcaaggctaaaacctgagattatcgatctatgagacatcttgatatgtaaagcacttaatattaaaggcataaaagtgaaactgctaaatatgtatagagaggttgacgtgtgatacgtgggacagttcacatagacatcagagaatttattccagaaaggagcctcctgaatgtgatgaatacggcaaagcctttaatcacatctcagcccttagcatcggaaagcttatactgtaaataaacttgatgaatattatatgtgaggaaaactttcatgtatagcactcattgcttcagacagaaaatgaattccgtcggtatgttccaatcgtgatgaatttgagaaacattgcaagagggagctcaatcttggccgggcgccgtggctcacgcctgtaatcgcagcactttgggag

SEQ ID NO: 14879 - DNA, 421 bp, Homo sapiens
ctttcaagcgctcctgttgttgtcgttgttttaaactttagaatctgaaaaccagaaagaagtcttgtcattgcagcagcatcgattccggtgatagagtttgtatcactcaacatcaggggatgcctgaggagtgcgagctccacagcaacatggcaggcaggaggtcctcagaaggtgtcaggaggttccacactcgccagttcactggagcagagtcccttcgccacacttagggtcccagtaagccatgccagcattaccttttgcgtagttaaacagacgtgtatccagtctagttaaggaagaaacattaagattgtttaatttttaacatatattcaagaattttaatttgtaaagaattgagccacattgaacacaattgaatgagattcagaataaacttataacatcttgt

SEQ ID NO: 14880 - DNA, 408 bp, Homo sapiens
tgagggtacttgaagggctgatggacaggggtcaggcaactatcccaaaggggagggcactacacttccttgagagaaaccgctgtcattaataaaaggggagcagcccctgagcacccctgctggtggctctgtcctctgttaggcaccacactggttggtcaacttggatgttcatcgaggctcattctggccttgctcagaagcccttctgatgctcttcagtgagggaggcactaccatttgaagtgaccccatgtcagtcacatggactggtctttagcaaagtccaaggctgcctgcttccacctaagtggtctctgttctacactttaatgtcaccctctacatcatcttacctagcccacccaaccttataaacatgataattgactactttcctgagct

SEQ ID NO: 14881 - DNA, 298 bp, Homo sapiens
ggctccccaaacgaggacacgacggccaaggtggcagtttgtcccacgggaggacagtcgtttcttttccagcctcctggccttcggactctgaatctgggcaggaagagtcctcagtcccaagaccaggagggggcaatgggcccagcctttctgtggtatctgatgcaggaaggactgcagtggatcagaacttacaaaccaaacttttattctgagaaactggctgtacaatatctaaaaagaaagtgacatgaaggaagcaatctacaacttccttccgcttagcgagcatgca

SEQ ID NO: 14882 - DNA, 615 bp, Homo sapiens
cccttgcctttgagcccccaggaggggaagggatcatggagagccctctaaagcctgcactctccctgctccacagctttcagggtgtgtttatgagtgactccacccaagcttgtagctgttctctcccatctaacctcaggcaagatcctggtgaaacagcatgacatggcttctggggtggagggtgggggtggaggtcctgctcctagagatgaactctatccagccccttaattggcaggtgtatgtgctgacagtactgaaagctttcctctttaactgatcccacccccacccaaaagtcagcagtggcactggagctgtgggctttggggaagtcacttagctccttaaggtctgtttttagacccttccaaggaagaggccagaacggacattctctgcgatctatatacattgcctgtatccaggaggctacacaccagcaaaccgtgaaggagaatgggacactgggtcatggcctggagttgctgataatttaggtgggatagatacttggtctacttaagctcaatgtaacccagagcccaccatatagttttataggtgctcaattttctatatcgctattaaacttttttctttttttct

SEQ ID NO: 14883 - DNA, 300 bp, Homo sapiens
tcagcctcgagagggactgcactcttgtcagggaagccctaacagcgaagagctgctggagacagagtcagagcagtcaagggtgggagcttccagcccttccaggaggccagttttctagtgaagacagagtgcacctgacactgccatcacatcgtcagtatcactgcctgtctctgccaccaaactaagatcaaaggaggggctcagctccctgtgcattctccctgggcctcagtaaaatgggagaaggttcgtgggaggggcctccaaaataaaaatggaaactgcattgaaaat

SEQ ID NO: 14884 - DNA, 246 bp, Homo sapiens
gcctgccggagggcgagggtcggagaagcggattgggtcctgggcctctgtgatgaggcaggcacacctgtcggtcttggcttgctgctagaactagggccttctgctcgcccacctcccacccctacctggacgggcccaggcttggggactctgagctgtgttaaggagaacaagggcaaggagacctccctttgtgctccctcactccctaataaacatgagtctgatgttctccagcccagg

SEQ ID NO: 14885 - DNA, 372 bp, Homo sapiens
caggactctgggcccctccccagctccactccctacctcaagaatgtgaccatttggaaaaggcaaagagaaaaggagcaaaatgaagcattcccccaggcttcagccctgggctctgaggggaaagagttgggcattgtttttctaacctaacctttccctctggggtagagaagccgagagaccctgtcctccctaatgcactgtggcccagtccccttgcctttttcctgttctgtttggagtggagaagggcagcacctctgtgtttaatggaaatagcccatagtctcctggatttttggaacatctttctcagcctattttgtgtcctaatgattcgctcaataaacatgtttgaatccacacgtt

SEQ ID NO: 14886 - DNA, 237 bp, Homo sapiens
gagagaccatgaggccactgggctttccccctcccaggcctcctgggtgtcacccccttactttaattcttgggcctccaataagtgtcccataggtgtctggccaggcccacctgctgcggatgtggtctctgtgtgtgcgtgtgtgggcacaggtgtgagtgtgtgagtgacagttaccccatttcagtcatttcctgctgcaactaagtcagcaacacagtttctctgatgtcg

SEQ ID NO: 14887 - DNA, 476 bp, Homo sapiens
cagggcgccaagcagtgacttctgaccaacagagtgtggggagaagggatgtgtattagccccggaggacgtgatgtgagacccgcttgtgagtcctccacactcgttccccattggcaagatacatggagagcaccctgaggacctttaaaaggcaaagccgcaaggcagaaggaggctgggtccctgaatcaccgactggaggagagttacctacaagagccttcatccaggagcatccacactgcaatgatataggaatgaggtctgaactccactgaattaaaccactggcatttgggggctgtttattatagcagtgcaaagagttcctttatcctccccaaggatggaaaaatacaatttattttgcttaccatacaccccttttctcctcgtccacattttccaatctgtatggtggctgtcttctatggcagaaggttttggggaataaatagcgtgaaatgctgctg

SEQ ID NO: 14888 - DNA, 3228 bp, Homo sapiens
cactgtgtttttggggggcctcttccctgccttctggggcccctctgctccctagagctctggtgaccacttgcctgtgggcatttctatgggccttggggatggtggaggtgctaatgctttgcttggggcctacaggtgaaaggtggctgccctcagattccacaaagcctctctcccctccctcgtcccacccccacccaggcaggaagcccaggaggagtgcgggcagggcctgacctggaggagtgatggttgagggggagggatttttttcaaatgatcagtcccctgtggaacagctcttccctgggcctagctcgccagcgctgtgctcctcatggacgggagcgcagtggggaaggtaggggaaagatgaggcacagtgttgatggggcagtgaccagacagtcctgagacccagaaggcccaggtggcccaagtgctcttggtggcccagcttggccagcacacactttcctcctgcagcaccccctgctgaaggggtcccccattgttttgcttccccagcgcccaggatgagcggtttaccatcgagcttacccgggcccggctcctgtcaagcactttagttagctgttggtgtcatgtttggataccagtgttttatatttatacatagagaggattttctaatatagcctattatatataaatagatctatctatatgcacatacatacatatatacacacacccagccgatctcccgctcccagactgctctcgtatgtggggaatgggatgaatccccatctgtgcctcgaccatcaaagccggagctccagggctggagggggggcagccatgtgtcctgacccccaccatccccagagcctgggttttccagggaaaggctttgtgcaattgcctggtctttttttttttttttttttctccatgtgcctccctgtccccaaatctctgcaccaaagctcattgcaggcaatgttggaaaagaactgcatttgaacgaaagagaaaacggcgcctgtggttttgcttcaggccactttgaggggttgcaggtcagtcaacatgactgatccttgacctggctctgctgggctggactgcctgggccagtgataatgctgccattggccagagacagggcagagcccgtccctgtctgaacaagagtcccgcattagcaatgagaagaagcgtggcgggagaggagccaccactgccggggactggagtttgttggatgtgaggggaatgcccactggggccagggtgggcaaaggaggttggtgccaatgtggtgctggaagtagacccctcctgggtctggaacattctctgccccaggctctttccacctggggatgttgtgacaacatccagctgtggtgtctgggctatttgtgtggtgacaagacagacctggtcagggggtgggtggcaaacacctcacctggctgggcagaggccaccttgctgtttggcccaaggccaggtgaggcccctccctttccaccattgccctggccccgtggccattcattcttggggtttgtctgagtcttccacagagagcagcaaagagatatgggagttgggtgatcagtgtatttactttgcagatttttctggaaataacctctagctgctgctatttgcaaggctgggattggcctccctgtcttttccaacaatcaggaccccatcctgtctgttcctgttcttctcccagcctctgccctccttctgtctcctgggtggtctcccgcttcgctcctggcctttgcatgttccatctcttctctttctcccctcttcgccaccctagattatctctgtgtccctctacctaattctcttaccagttctttcctttctgcttagagccggagggagggaagctggaatctgttatggtgtattagggggaggagcctttctgttatttccccccagcttccatcacccttcccttaatgccaggagcgccgaggtttggaactgaggctaaaccgaagggctttctcctgcttctgtcaccctgtgctgtctcccggcatctcctcactatctgggtccaggcccgggtcctccctgcagactccctcccctccagcccacaaggactccagcctgctggctggtgagagctggatgagcagtaagaagttaacgccaggtcagcctcgggccccagggttccctgggcacaggctgacactaggagctgctctccttggccggggacagctccagcagctcaggctccagccctccagtgagccgcctctcctggagagtagcaaagaatggagaaaggcctggcttgagaggaaatggagaaaacattgcctggtagctgcagattcaaacccaccacacacaccacggggctagagtgactcacctgggctcacaccaacttctggccaatgcagggaccatgctctgcagacagcagtcctctagcatggccccagcattcagccagtcggtcacctgtgggccatccccatgtgtgaggaagcaggagtcagccaccaagtgtctccacatcggagcttgcgggtcagacctgtgggccaggggatgggagcagggctgagggtaggggctgaatgtgtggctctgtccctgtgttgccttccacagaggagcaaggcctcaggctgaggaaggaggggcacgctggaacagcctagtctcctccccgtggattcccccaaacccataacattcttccataggggctgagaacgcagtgccccgtccctgacagggatgaaaagtgaacccctcaggtcaggagaggcagagttgaggttctgccacttcctgtccctggggagccactcaagttaccagggctaccggctgaaataaatcttttccgggtagggtcaagggcagtgtgttgccaaggcaactgatgtaggccagttgcgtgactccaggtttgtcctggtactcagtgggtccaatcacctggcattgatcacctggcattgatcagcacccaccccacccctgaggcttgcccagcccccaggccctcagatccctgctcttcctgcctttcctgcccatgtgtcacccagcacccaaggttcagtgacacagggtggtttggagctggtcactgtcatagcagctgtgatttcacaaggaagggtgctgcagggggacctggttgatggggagtgggaaggggaaggaataaagagatcttcctcaggt

SEQ ID NO: 14889 - DNA, 1144 bp, Homo sapiens
agctccagggaccgtggaggcctgaggtcatcggcctgagagaaggtacatctgcatcctccggggtaaaggcagaatattggggtctatttcggaaatccaaggaacccaattgcttgatctggcttcaagcctcggcaacgtggcgagatatcccctctccacaaaaatacaaaaattagccaggcgatgtgggaggcatctctactcccaactactcaagaggctgaggcaggaggatcgctggagcctgggaggtcggggctgcagggagccctgatcctgccactgcactccagccggggcgacagagtgagaccctgcctcaaaaataatcataaatactgagttcggggaggttctttatgattgatgcacttgagttaccgatttgggtcgagggttcagtgaagctttggtttacatcttgtgcagctaaccatgttgagcacagagcatgagacttcgtcatgaggaggtaggattatggattaggcttctggactcgtggtttgtgatgttgtcacattagaaacagatctagcacagttacaagtttagatctgaagtgacacaaaagaccctagctgtgatgaagtccaaagccacattctctgagggtgccctactccctgggaagacccacccaaagtcctcgctatgaagcagatcactggggctgaccttgggtgtattaagttttggagtcagggtcaccaaagcgtgagtttcacagttgaacacgatggttcagaagcagggtatagaatgaaaggcaggagataaaatcgcacttctcaattgctctgaactctagctagacttgacatgggacgtgaataaccttcctgtctagagagctgtctccttgaggtgtgacattgtctctctcacttccagaacaccggacccaggggagatgtggattttcagcaggaactttattccagtgctaatggcagacatcaggaaggaggagaggagccatttgtgcagatcatctagaagaacctggaccattcttgacagagctgaatacagtgatcacgttgtcctccaaggagcaggggtggggtggggtacttctaggagtccttggagaaaagtaagaaaccaggagtgtttccagttccaccctttcctg

SEQ ID NO: 14890 - DNA, 315 bp, Homo sapiens
gatgacggcatcgtctatgcttcccttgccctctccagctccacctcacccagagcacctcccagccaccgtcccctcaagagcccccagaacgagaccctgtactctgtcttaaaggcctaaccaatggacagccctctcaagactgaatggtgaggccaggtacagtggcgcacacctgtaatcccagctactctgaagcctgaggcagaatcaagtgagcccaggagttcagggccagctttgataatggagcgagatgccatctctagttaaaaatatatattaacaataaagtaacaaatttaaaaagat

SEQ ID NO: 14891 - DNA, 563 bp, Homo sapiens
gtggccccctaaacagaaagtgtgaagaggctgccctcgctgctcataaggacctgggggaagaggaaagtgtcccaaggtctttcctttctgactccaaaaatagtttcctttcttggatctgcaaagaaagcttttcttccgtcgctgcctcagcctcctccctatgcctctggcacctgcgcagcaaggctggctgtgctggagtcaccatcatcttcctctcccccagcctcccaggctggatggcatggactgtttgctgacctctgttctcttagggcatgggaggtgggaggatatcaaattctctagccctttcctcctattctcccaaggagagagattcccatttctcctcggccattgtacctagctcttgtccctagctgcatttcagtggaccatggatagagggactgagggttagacggggaagactggcagggaggcacgcaggtactgtgaaaatccttccctttgccctcccccagtgggagagggggttgggttttcaatgtgagaacagcacaataaacttgatgtctagggcagtggccccc

SEQ ID NO: 14892 - DNA, 896 bp, Homo sapiens
ggcgggcgggggggtaccggggcgcctggactggggagggggcgggcacgcctggctctcccgggagcctcgccttgagagacattgaaagactacgtgggagagtgccagggagaacccctgccctccaacctaccccccgggatggggagagtctgccaggcccattgggcttaggatgccaacagcgctgctgagaaacggaggaggaggagggtttgcttgaggttggggcgagagtcgctctggctgttcttcccgctgggcgttgtacacccctcctcctgaaccaagccagaggtcagcatggggaagggaggaaggaagggatgggaggaagaggggggtgggtgagctgaaagagagggactagagtgccagatggaggagctcttttctagagagccgggagttggggagggggtatttattttgttatttatttcagtctggagggcgattctgggcctttctgacctactcctgagctaggagtggagaatcagggccaagtttgcactctccccaatgccaatgcctaaaggccccgccgtccatgccaccccacagccaaggaggggtctgcatggggagtggaccgagagaagaaggggcccagggaagcagagggcccaagaccattcacagtatttacaatttgccagaatttggtagtcagtgtggcctgctctgaatcaggcatcttatttagttctggggtgagggtctagtgccagggatgggcaggatgatgggggaggaggagggaaattttagcgggtggagggggtgggcagggtatttatttaaattaaaaaacaaaacagaagagatgtcaggaacttttttttaattcctttcttttcagaataatatattaaaagactcatgatcct

SEQ ID NO: 14893 - DNA, 218 bp, Homo sapiens
tccccctcatgctagcctagtccctggaggagggagtccggccccaggccagggactaaggagcaatgaccattgtgcacatgcgtgtgggaaggggttgctagggggtggggacggctaaccagggtaagaatgttcagggggctgcccaggaggggcccccaacctgactatcatggacaagagatttgatggatagaataaaaggctgcagcgag

SEQ ID NO: 14894 - DNA, 85 bp, Homo sapiens
atttggccgaatcttcatgcaaggaaataacagatacgggcagctaggaacaggggacaaaatggaccgaggggaacccacacag

SEQ ID NO: 14895 - DNA, 67 bp, Homo sapiens
gacgcaggccagccccggcccctagccctcaggccttctttcttatccaaataaatgtttcttaatg

SEQ ID NO: 14896 - DNA, 192 bp, Homo sapiens
gctccgtgctcaacccccagcccaccccaccctccctgggcagggtcttgaggcagccactgtgatgctcataccttaccttgcctcctaccctcttctctttcctgcctactccccactcctccctgacaaaaaacacccagggatttgtactcattttccaagttgaataaaatacatttttaaaatgat

SEQ ID NO: 14897 - DNA, 367 bp, Homo sapiens
tggccccacccccactgggcccaggccaggaggggccctgcccatgcccacactacaggccagggctgcggggctggcgcaatcccagcccccttccccgggccacggggccttgggtccctgccctcccacccaggtttggttcctcccggggcccccactgtggagataagaaggggatggaatgggggaagaggaggagcaggaggccctcatccttctgctgccctggggttggggcctcacccctctggagggccggaggcaggaggtggaaaccccaggggctggcttttttaaaactggttttattttaatttttattatattttcagtttttccataaaggagccaattccaactctgt

SEQ ID NO: 14898 - DNA, 247 bp, Homo sapiens
ttgaaaagacactcctccacttatcccctccgtgatatggctcttcgcatgctgagtactggacctcggaccagagccatgtaagaaaaggcctgttccctggaagcccaaaggactctgcattgagggtgggggtaattgtctcttggtgggcccagttagtgggccttcctgagtgtgtgtatgcggtctgtaactattgccatataaataaaaaatcctgttgcactagtgtcctgccatccca

SEQ ID NO: 14899 - DNA, 565 bp, Homo sapiens
ccaggtgtgtccacctgggcatatccaccacctccctcaccaacattgcttgtgccacaccctcccccgccactcctgaaccccgtcgaggggctctcagctcagcgccagcctgtcccatggacactccagtgccagcaatgacatctcaggggccagaggaactgtccagagagcaactctgagatctaaggatgtcacagggccaacttgagggcccagagcaggaagcattcagagagcagctttaaactcagggacagagccatgctgggaagacgcctgagctcactcggcaccctgcaaaatttgatgccaggacacgctttggaggcgatttacctgttttcgcacctaccatcagggacaggatgacctggataacttaggtggcaagctgtgacttctccaggtctcacgggcatgggcactcccttggtggcaagagcccccttgacaccggggtggtgggaaccatgaagacaggatgggggctggcctctggctctcatggggtccaagttttgtgtattcttcaacctcattgacaagaactgaaaccacc

SEQ ID NO: 14900 - DNA, 64 bp, Homo sapiens
gttgctcagttttgagctgtcttcagacaagaagattaaataaatttatatatttatttatttg

SEQ ID NO: 14901 - DNA, 406 bp, Homo sapiens
tgcccctgcctccagggctaggtagagagggcccaggcaggcggcctatcctgatccttggaggaggaggaagaggaggccactgtggcccgtggccctgcccttgggacgtggagcccaggggaggtttgaaggggatcctgggcttgggcatcacgcccacctcctttggcagagggaccccagcacactaactctgggtggctgtccccaccgtgcaggggagggagtccgcagcctcccttcactggtgccttgatgctaggggccaggcctcctctgtgactctgggctacctcagtttccccattttggccagactcaccggcccactggggtggtgatgttttcgttctgttttatttttctaactctgctgaccatgaataaaagaccaaaacactac

SEQ ID NO: 14902 - DNA, 145 bp, Homo sapiens
gtcttcctagaagtacctgctgggttctcagttccagttcccatcctttgattgatcactctccctgacatccacctgtatgactttgtcaccaaatgctgtcttctctttctccaatcaagaaataataatccctcgagtttac

SEQ ID NO: 14903 - DNA, 115 bp, Homo sapiens
gccgtcccccgttcctcagtcctgtatcatccatacttgtactaccttgtcctatgaagctctgagaattttttgtacgatcagccttactgctaataaaagcacttccacaggg

SEQ ID NO: 14904 - DNA, 1026 bp, Homo sapiens
aggggctaggactagggtgagagggagtggggagggagagggcaggaaggaggcagagctgtccgtgggaggtggaggccgaggacattttcctgaagggcaggggttggcaacttttcaacatggagtgccaaactgctaacccgtcttctagtgtgtgagaatagggaccaaggtggtggcgtgaccttaactctcagaagcagaggaggcaggtgggtggagggggatgctgggagttcacctgcctcttgctttttgtgggtggctgctgccaccaccgccgctgctatatagtttaggtttctgaggtttgtgagcctgtcctgctttgcattcttcaaaaccattcctgatagagtagccgagggagagtcttggggccaagaagggcccagggtgggtcaggcgtgtgcactgtggaacagagctgagaccccggccccccttggactggcacagggtcctacagagtcagaggaggcctgagatttcgaatgggcagtgaatggcctcttctgccagccacaggcaggatgctccttgatcacggcatcccccggcggtagtacagggtgagcttgcaggagggtctgcaagtgcagacagcagctggggccaaagaggtgttaggttcaaaggctgcgaagagaataggctactggaaaaccaaacccaacagaattcacgtccaaaaatccacattctccatcgcttctcagccttttggctaagattaagtattaaaaaaaaaccaggctctgccaggcgcagtggctcatgcctataatcccggcactttgggagtctgtggcaggaggattgcttgaggccaggagtttgagaccagcctgggcaacatagcgagaccccatctctacaaaagattaaaaattagctgcgtgtagtagcatatgcctttcaacgtagctactcaggaggctgaggtgggaggatcccttgagccgaggagtttgagtctgcagtgagctatgatcgcaccactgcattccagaccccatctcg

SEQ ID NO: 14905 - DNA, 1583 bp, Homo sapiens
ccctggggaaagacgccttcatctgggacaaaactggagatgcatcgggaaagaagaaactccgaagaaaagaattttagtgttaatgactctttctgaaggaagagaagacatttgccttttgttaaaagatggtaaaccagatctgtctccaagaccttggcctctccttggaggacctttaggtcaaactccctagtctccacctgagaccctgggagagaagtttgaagcacaactcccttaaggtctccaaaccagacggtgacgcctgcgggaccatctggggcacctgcttccacccgtctctctgcccactcgggtctgcagacctggttcccactgaggccctttgcaggatggaactacggggcttacaggagcttttgtgtgcctggtagaaactatttctgttccagtcacattgccatcactcttgtactgcctgccaccgcggaggaggctggtgacaggccaaaggccagtggaagaaacaccctttcatctcagagtccactgtggcactggccacccctccccagtacaggggtgctgcaggtggcagagtgaatgtcccccatcatgtggcccaactctcctggcctggccatctccctccccagaaacagtgtgcatgggttattttggagtgtaggtgacttgtttactcattgaagcagatttctgcttccttttatttttataggaatagaggaagaaatgtcagatgcgtgcccagctcttcaccccccaatctcttggtggggaggggtgtacctaaatatttatcatatccttgcccttgagtgcttgttagagagaaagagaactactaaggaaaataatattatttaaactcgctcctagtgtttctttgtggtctgtgtcaccgtatctcaggaagtccagccacttgactggcacacacccctccggacatccagcgtgacggagcccacactgccaccttgtggccgcctgagaccctcgcgccccccgcgcccctctttttccccttgatggaaattgaccatacaatttcatcctccttcaggggatcaaaaggacggagtggggggacagagactcagatgaggacagagtggtttccaatgtgttcaatagatttaggagcagaaatgcaaggggctgcatgacctaccaggacagaactttccccaattacagggtgactcacagccgcattggtgactcacttcaatgtgtcatttccggctgctgtgtgtgagcagtggacacgtgaggggggggtgggtgagagagacaggcagctcggattcaactaccttagataatatttctgaaaacctaccagccagagggtagggcacaaagatggatgtaatgcactttgggaggccaaggcgggaggattgcttgagcccaggagttcaagaccagcctgggcaacataccaagacccccgtctctttaaaaatatatatattttaaatatacttaaatatatatttctaatatctttaaatatatatatatattttaaagaccaatttatgggagaattgcacacagatgtgaaatgaatgtaatctaatagaagc

SEQ ID NO: 14906 - DNA, 710 bp, Homo sapiens
cccctgctgggccggggtgtggcgatggggtcctggcagcgtggcgggaacggctgcttctcctctgcccagggccctgttcttggtgggactcggctgcccctcctctgctgcctcacctttcggagtgagctgtgggctcaggcccttcaaacattccctccctccaccccctacctccactttccccttttcccactgaaggttttagaagctaggaggcaggaaaatgtgacccagatgggggtgctatttggcttttattccctgcctttgcagaactgatgtcaccccagatgtccttccctccctaataactgtaaatatataaatatgtcaggttaaagggaaaaggtgttcagggcacttcttgtcctctctgtcccataacctacctccaccctccccctagccagccaggcagcttctctgcctgggaggggagcctggacccccctctttctccttggctgcagtggggcctttatccagtgccagggaggaacaacatagttaatttttttctaaccttgccactttgagggaaggaagggttgggggaagggcaagctttatgggaccctggtcctggccctggcctttcactccagttctgggtgaggcaggagctgggaggggtggggagggggagggggaagtgtctgcctttatgtcctttcttctgaaataaaagtaaaagcatttctgga

SEQ ID NO: 14907 - DNA, 230 bp, Homo sapiens
gcctgggcattcccagagaggaagggccgctgtgcactgcccggccttcagaaagacagaatttcatcacccaatgcagggggagctcttcctggaccaagggaggagccgctcattcacccaacaaaactgtgtcttatctgccaggaaagaccagcctcactcctgggaactgtctggcaggtaggctgggccccccagtgctgttagaataaaaagcctcgtgccgg

SEQ ID NO: 14908 - DNA, 1494 bp, Homo sapiens
gagcccactgctccaggacaccctatcctggctagagacccagccccagaggcctgagccgccgctgtttcctaaagatgcccccaggggaactgggctccaggcatggatgattgtgaggacatggggggctttggggacagataatgtctccaggggcagggtctggaggggccaacaccctcatcagagccctcctctggcctgtcccctcccctacccccactcccggctggagacggggtctgggtgggctgggtgctgggaatgagaataatcctaatacccatcatttattgagtccctgctgtaactggccctgtccagggaactttcgttacgttgtctcattatttaacccttaggaggtaagcttattatccccacttcacaaggggaccgaggctcagacggtagaaataaccctctcttggccaccagatcacgggtggcaggggcaggatttgaacccaggaccctcagttcctgaagccatgttctctcgaccctgccagcttcccctcttcgagagaaaactcagacagggagggcgcagggccagaacggctccttaaggcaggcagggctgcggggaggctgggccagccagcctgagggggtaggcagggtcctgcagggcctggggcttcccttcctcatcccccttccccactggctgggggagcagcctggactgcagctctcagaggccagggagaccctgaataaatcactgccagccatacggacttgaggaccttgagagagaagcattgggggtgcaagtgtccaccaaaccagataggcatccctggccactgcctcccagtcttgctgagcccacccgctctctctgggtccatcccatccctgagccaggggaggcagcatttcatgggcatgtctatcagaggtgggacttgcagcctctgccccacgagtttgtctctcagtggactctataggtttgctacttttgcatgacacagcaagcccagtgtcccctttgcaagctgcagagagggaaacagagtcccaggcctgctgggaagagatgctcctgcctcccaccttccagagttgggggcctggcaggctccatggcaggcaccaggtccctagcagcccagaacagctctgactggagccctcaaggcctctggggccagggtctccgtgatcagctcagccctggtgttcctctcttgctgggctgggacctgggacacagccacggcagcaaactcagagaattgaaggtgctggcgccaccctggggcactctgtcttcacagcaggagtgactgtctccagtgctcttggtactcctgtttggctgtggcctggtccctctgggccctgggatcttcttctggcccttgaggcaggtctggagaggcagtctctgtcttcatggaggggtggtcagaggcgggcgggaccaccagcctgtagcgttattattatatgtgacaataaaggtgctctccccac

SEQ ID NO: 14909 - DNA, 1022 bp, Homo sapiens
ggggccgcggccctggggcgggcagccaggctgggccgcaagggcctggacggggtcggacggggcaggcgctgcggacaccgtggcctgggcttggcccgcggcctgcaccgaccccgggccggacctgagcccgcagcccagaccccctccacggtccgcggcctgcaccgacccgaggcccagatccaaggccgcggcccagacccactctgcggcccgggccgaccctgcggcctccaccaaccccgcggcccagacccagcccgcggcctggacccctggaccgctttgcgcacttaccgccctgcgggccacagggcaaaatcgccataggccaaggtgcatatagaaaacaaaggagcattaagcccaatctatgtcgtgttttcaaggaagaaaacggaaatgtgtggtcgagcttttttgtaccctgaagtgttttttttattgccctaagtgatttccacaggttctggaataactcttacagctttgccttgtgtcctcctgttccgtgtgggctttaaaagaaaaaaaatcaaacccacatattaaaagggggctttttatctgccatctaatggcttcagagcgataatacactattatcttcttaaaccaggaaaaaataaaagggggggtgggatttttcagaaaaattaaaaaagaaagtttttgtagctgttcagttgccactaagagattgcacagtcaaaacgactctaaacacactagtttggattcctaaatattttcaagaaaagaatcttctcgtttgaaactttgaattaaaataaaacacatttactccacatattttttaacaaaaagaaaacgtcacatcaggaaactctgattttgtggtagctgacatagtgttttcttgtacgtgaatagaatcctgacatgtagtgcacattgatgtatagctttaactgaccctgggttttgcagaccagggtttgtttaatacactccattctaggccaaatcaggacaaaaaaaagaaaaaaaaagaa

SEQ ID NO: 14910 - DNA, 867 bp, Homo sapiens
taccccggggcctcccccgtgacagtgacggctgcgcctccaccccgactgctcagtgcatctaatcacttagactcccctgaagaatcccccatggaaactgcccttatccgctgtccagcagctgccagaggccccaggtcacctcgggtccccttgaaagaatgtctcggtcacatcaggcccgctaggtccagagagcgagcccccaatgcccggccaggctaagccgcagagaccctctcagcccccacctcaggttagggctctgcccgcagcctgacctctagccctggtggcagaggtccctcagctgcgaggctaattgggtgaccaccgattccagctgcggttaatccagcttgggcctgtctgcactgcgatcctcttgggctctcctaggatccccccatgccccgtaagaggtggaagacgcttccttccaggacagcaggctttgagtccagcacccccagcctgcctttgccaccagccccaccctgcagagtatatgaggcttgacagagtctgccccctcccccactgcaccccaagagagagagccccagccagcggaacagtttctattaccccctccctgcccccagacccatgtgatttctgctttcttctttagcaagatattctggtttctagataaggaagagtctctaatgagcccccgagccccagtctcttcagactcatggattggtctgaggggtctgaacgtctcctagccaatcagaactggctgtggaccaccctagcacggccacctctcagggccactggcaggccttcctgagttagatttgtagttgcatatttagctttgcacatttgaaataaaccacggttgcagcc

SEQ ID NO: 14911 - DNA, 80 bp, Homo sapiens
cccgcggcgccgcccgggtgggacacgccaagctcttcagtgaagacacgatgttattaaaagcctgttttagggactgc

SEQ ID NO: 14912 - DNA, 1571 bp, Homo sapiens
caatgtttgccacagcctctgcctggaacctggctcgtgctgtgaccagaagggaaaggcggctgtttggctctttctcccccgcaaggacccgctgacccgctggatggagagcaaaggagacccctcccgagccgctcacagtcctgtatttggcaggtttgggagcctgaggggccatctccctgacactcagaggcactgccttgcagacaccatccgtgctcctggtaaagggggacagagagcctcaccttgccacatatttgaacagtgatgagtttggggctggtttctgggaagggaacgtttatttagtaaagagcagaacacccttgcgttttgttgggacatgtggaccgtgagtcgcaaacactctggagaaggctgagatgccaccattcccacggggactgaagacacattacgtggacctggtcccaggctcagtgaggagatggcctcagctgtggggctggtccatgttgcccactcactccagtgggaagtggggaccacgccatagagggtctgctcccactgcagctcccggtgctctcgtgttctgggaaggcctgggtgtgtgcacaaggaggcccgggccagggacttcaccaggggctgggtcacaagggcacagggtgtgtggaaagcgctgtgggggaagagccggtcaccggagagtgagcaggcggagactccaagctgggctgagccagagcagaaggcgagggattcccagccggacgggggttctctcaccaacagctgtgatttcatcccgaagtggaagggggtctaaacagaacaggctgagagaggcgggactgggtcaagtgggtggagctcctccttgcatgactgcaactgtcggggctttccgccggctcacagcagttggggccagcggggagaagagaggcggaactgctgtgtcctcatgtggcgcagcctcaaactggcatccaggcactgggcccatgcagagaaggcacctgcagagagcagggcagcccggcgcaggggcatgcgcctagaatcccagctactcggaaggccaaggcaggaggaccgcttgagtccagggattcaaggccaacctgggcaatagagcgagaccctgtctcttaaaaaacgatgatgatgaacacagaggacggggcactgtgctgggagccagggggcctgggaggagccgagaccagccttttacctcggggttttgaggccaacagggacgacagagacagtttctagttagagccttggctccatttttggatgatttagccccgagttcctgagtctattttatgccccttacgtactttgatagaactaaggaaatagtggttttgagtgaagggaaaggaaacccagaaacattttacgttgcttttacttctgtagtgtagattgccccggcccctctctgagccctgtagcatctgtgatagcttctgtcccttcatcggttcatgtcacagggattttctttcccaggaagcggacacggagagtcagccctaataaatgagcacatgccctggctgtacattttgaaacctgtt

SEQ ID NO: 14913 - DNA, 1664 bp, Homo sapiens
ggggccgagggccggggctgggagcggccctgtgcccgggagtccgcagaggcggggatttgtcagatgcagacattttgcaaggctgccgggtagttcaagaccaaagttttcctcttgtcttaataccataaggactggatgacttctcctgagatagaaccgtttggttcaatgagggactgtgttgctaagagcgttgggggcaaagccaggctggttccttggcctcggggtttcctgggtcggggacacggtgaagaggctccagcgggacctgcccatcagtcctgggccaggaggggctccaagcagcacccagcggtccgggggagtctcagacccggcatgcgtggctggcagacctgggagagccagggcagggttttgcgttcagagaaggattgccccagagacccgtggtggacttcatgggtgctgagtggcccgtgtgacagtgatgacacgaaggcttcggcgtttgagtgggtgcaggtgcacgccagggcttggtgcttccctgcctggccctggagggagctgggtggcctggcttcaggggaagacaggagccaggacacacgtcagcccagcaggtgtggggggtgctgcagccctcggcagtggggtcaggccctgggggatgtttccaatggtgggcagcctggccaggccggagaagacatgttcacgggcatctatcagatgcccccttgaggaggctgagttatttgagggctgctgcaaagtacgctaggctcaaattctcttttcccagccagagccctggccacacggactcagaggggccaccggggtggggaaaggacccctcccccaccccccgcagccactggcctccagctctcggccacagaatggcctctaaggctgactcagccactcccttgggctgtggcagcaggaggcgggggctctggctcaggccccggagcctgtgcagcttgcccatggccctaggcagcgaggggacagcctgggggacttcctgcctaggcaaggtcattggccgggcctggcctgtggatagtggggccaggggccggcccaggccaaatgagtgccctccttgttatgacaccaagtgactacaagggaggcaagacccctccaggcctctcagccgacactgggtcccaccacacacagtgactgtgccgtgcagtgcaggttctggccttttccttgaaggcatctggtagacccgaagccacgctctcgggccgcacatgcacgccgcagcaccagctgccctgagctgcttgtacaaccaaacacctttcccctcttctccagctgtaacctggagagtcagccatgccttgtcttttgttctcataaatagtcactggggccgggcgcagtgactcacgcctgtaatcccagcactttgggaggcctaggtgggcggatcacttgaggtcaggagttcgagaccagcctggccaacatggtgaaaccctgtctctactaaaaaaatacagaaaattagctgggcgtggtggcgggcgcctgtagccccagctacttgggaggctgaggcgggagaatggcaatggcgtgaacccgggaggcagagcttgcagtgagctgagatggcgccactgcactccagcctgggcgacagagccagactccatctc

SEQ ID NO: 14914 - DNA, 114 bp, Homo sapiens
cctcacaccatcgcaaaggaccagggacacagctaactaacttattcagctttgggccgatgggggtgggggggggtctttcagtgaatatttttattaaactctactgtggac

SEQ ID NO: 14915 - DNA, 253 bp, Homo sapiens
aacaccggacccaggggagatgtggattttcagcaggaactttattccaatgctaatggcagacaccaggcaggaggagaggaaccatttgtgcagatcatctagaagaacctggaccattcttgatggagctgaatacagtgatcacgttgtcctcctaggagcaggggtggggggaggggggtggggtccttctaggagtccttggagaaaagtaagaaaccaggagcgtttccagttccaccctttcctg

SEQ ID NO: 14916 - DNA, 739 bp, Homo sapiens
ccgcttttttagggctcacacatttagaagaattagatttatcaaacaacagtctgcaaaactttgactatggcgtattagaagacttgtattttttgaaactcttgtggctcagagataacccttggagatgtgactacaacattcactacctctactactggttaaagcaccactacaatgtccattttaatggcctggaatgcaaaacgcctgaagaatacaaaggatggtctgtgggaaaatatattagaagttactatgaagaatgccccaaagacaagttaccagcatatcctgagtcatttgaccaagacacagaagatgatgaatgggaaaaaaaacatagagatcacaccgcaaagaagcaaagcgtaataattactatagtaggataaggtagaaattgttctgattgtaattagttttgtattttctatactggtgttagaaaacatatgtttacatttgattaactgtgttgcctatttatgcagggtaatccagctaaaggaagctttctttaattataagtattattgtgactattatagtaatcaagagaatgctatcatcctgcttgcctgtccatttgtggaacagcatctggtgatatgcaattccacactggtaacctgcagcagttgggtcctaatgatggcattagactttcataatgtcctgtataaatgtttttactgcttttagaaaataaagaaaaaaaacttggttcatgttt

SEQ ID NO: 14917 - DNA, 1205 bp, Homo sapiens
ttggtcatatttttccaaagagtaatgcagtctggatataaacgtattttctgtcttccttataaggggattctcccagctgctaaatttaaacagtaaatatcacattttgtcattaacacagctataacttgccgtggttctcagatttattttggactattttgatgccaagtgaatataagagcttgtactgaaaccatttatttctttctattttgctatttgcaaatgcttgttatcttccctacatgaagtggcagtaacctttttcacatttaagctacccttctaccttttgaagtgatttgcagttactcatctgagacagcatcagtatttgactaaatcattgtttcacaactgaatagtcttgttcttttagtagcaacgaaatcctaagctcttgaggccattcacctgccaacctgaccatactgctttcaaaagtcttttctcatcagtagaatctattttggtcacttctagtcaatgaaaaatgtaaacttttaggagagaatgtttcttaggactcacccactccattcaatgttatatataaaatagtgtgatcaatcacaatgtccatctttagacagttggttaaataaattatctggtctttgaaaagaccgtgctgggcgcggtggctcttgcctgtaatcccagcactttgggaggctgaggcgggcagatcacctgagatcgggagtttgagaccaagcctgaccaatatggagaaaccctgtctctactaagaacacaaaattagctgggcatggtggtgcatgcctgtaatcccagctacttgggaggccgaggcaggagaattgcttgaacccgggaggcagaggttgcagtgagctgagatagcgccattgcactccagcctgggcaacaagagcaaaactctgtctcaaaaaaaaaaaaaaatgatggagctccgaatgtgcttaagtggaaagatatctatgaaatatggtggttttttaaaacacaaaaattatagaatatgggatcccgtgtgtgtgtgtgtgtgtttgaatgaaaaatgcttatgtattgacagaacacttctagaatgatacccaaactcctggagtgggagtggggaatgccttctacgtacacactgttctactgtttgaattttttaatatgagcccaaattgtataatctttttttaataaaggggagaaaaatc

SEQ ID NO: 14918 - DNA, 2414 bp, Homo sapiens
aatgctcctaatcaagattgtttgaacacatgtatttataaaacagagctagagaaaaataaaaatgaacatgtatatacatttggaaatttgaattaaatactgtatcatactttcaaaggataaaaagactacccctctgaaggttgttttgtattaatggtcagtctttgttctctgagaaattatgttggaagcagcatactttcaaattattaccatgagtataattttaagaatgaaaatgtttacagtattttcagttttattataaaaatgcacacacaacaaagattgtcatttcttggctctacttgcattcagcacttgttcttgagcagctttctttgcttttaccatctcgacaagttcctaggaagggagaaaggtgtgatttaagaagttgcgatttaaaaacagacattttaatctagtgtttggtgtaaagaattcaagcaactaagatagatagtactaaatatactgatttcattatctgccagggcctagaaagtttctaaggttgctcatttcttcctcataatattgaccccataactactggttttgaaataagcactatattattaaccacttaatagacataaaatatgagctatatcacccaagctacaatttaaaatacaacaatctataaacgcttaagtctgcaaccttgtatcgtttcatgcagtccttctttgtcctgccaggcaccgcttctgctattttttcccatctttcaggtgtatttactgggtatgttttcaaagcttgttccaaaagcttctgttcttctgttgtccaaggggtgaagtctgtatatggacctgattaagaaaaatttttatttgaaaactgtctttgaacatgttctcagacaagtcttgtggtccacaagtattcgctaagtgcccatttcaatctgggatgtgtcattttgaaaataaacttgtagagatgagagatacatatagccctctgagtgttaataagagaaaaaatttcagatagctcacatcccagaaaataaaatctcaaaggcttttaaaacacaatagtaaagatctaccttgtactgtttatctcttaaaaatcaatgtaatacactcaccagactggtaaaaagccatatttaaatttatagtactgttggactcttggactcaaaaacacaaccacaattcattaagagttctgataaatctacttccttacagaataggtaaaagagcttcctcacagttaaacttttgctggatagaaaccctggaaatcattcttgttttacactgaaggaaacaaacctagcaaaattaagccaagtgcccaaggtaccagtgctggagaggcaagctgagattagattgtgttgtagtgtggtgttctcttcgtcacatctgctaaaatcttgggagccgatgctgaacacttccaataactgctattgtggttcttcaactaaaccttgtatatttcagaaaacatctaagatgtgtgtcagaaacaaatatgtttcttaaggatgttaagtattacacagtccacttgtgtaggtaaaagtagaatgttaagtggtagaaagctgatttggttaagttaatggacttctggcaatttagttatttcagactatgcagtgacaacacagactaatactaccagtagcctgactactactagaaactgcggcctgtgagatctgttaaaagttaagcctagaaaccaaagttccttcccaattaaagaaggaaaaacaaaacaaaacaaaacaaaaccaccacctattcaaaacaaagcagagaatttgtataatatttgatggtacctaaggtgcctaagaagcttttttgaaggtagcttttaagttctaggaagtcttttgttgaatttccttgtattggtttaaagccctaaataccatagattttatttcctctcttggaaaaaagatggaagtgacatggcagtatttcctgctgttctccagttacttcacaataccaaaataaattaaacgtactgttgcaaaactcctatgagaaatcactattcaaaaaatggtgccagcttgctgtttaatggtacaactgaagaggaaggagccttcccatttccataaaagaggcaaaggagtcatacccacatagcactactgccagtcactcttgccttcacagggtcacctctcctcacagaaagcagactggacaaatatcagggcccacctccctccaacatggaaacaagtccccctaagaaagagctgagactagtgtgctaatacctgttgtattttgtggagataaaggtgcaggagaataaactcctttataaagaagtgtctttcaggtgttctgaaaccctgccttgttacttacctttattaaaagaaccgaaataatgcctaactc

SEQ ID NO: 14919 - DNA, 154 bp, Homo sapiens
accctgaaggctttcaagtgaaaactttaaattggaatcctaaccttatatagacttgttaataaccaattcataaacaaataaatggcttcaaaattgtatgcttttttccatatctcttcttgtaatataataaaaggtgatttctaatgtt

SEQ ID NO: 14920 - DNA, 2339 bp, Homo sapiens
gcacaaaacaaatcgaataacagctaaacaaatcgaataacagctaaacgaatcgaataacagcttttgtacatcaacatcaagaaggaatacgcctgagagagatcagagtatatagatgaatatgaacaagaatggaacattcacttgtcaacgcactttctaaatctagatcagcagagatgggagtgattttctggaaagagatgtgatcatggattaaacaccagctcattggaaactcattggatgagatcagaaaacgttcatgaaaaatcatattcaggaaataaggaagaggaatataaatgctctagagttaacatgtaaaatatatacgtactgaggtttgtaaactgtcctttttaaatcaaactgaaaacaaaaagctttaacctttcaacagaatttttaaaaaggcagttagttctaaattattcctatctcaatagccaagaggctgatcaagcgtcatttattgaggaagcatcttagaaaatgcctctgaatgttttcataggagccgtgacctttggttcttcatctctaccattcatttacttcactgtgtaattagttacaaccactcagttattaagagacgtaacgcttcaaactttttaccaagtctgtgttctgtttaatctgtccatacaagttattactgagaaagtgtttatgccatatactattactccatcaagctgtatattacaggaagtacatctttacatcataggttcccaagcaacatagatttccctatctttcaggaaacagcatcaaggaactctgaaaaatatagaaaaagttcattttcaccttggaagctcacgtgtaatattataggctactatcaaataaacactttttttctaattctccctagtatatgcataggaatttaatatactttataaataagtatctaaaatgtctcctacttttttcctatttctttgccatacatgttatcagaaatccatgtcttctatttcccttactgatgggcactcatttttatttttttaaaaatcattccattaaacatatttctaaataatagtaagtggtactaacaaaataaataataatttaatagccttagaaataaatgactgtatacttatacaggttgaaaaaaactcggtaggaataagttacctttttgtttactaatgttggtttcaaaaatactcagattcattttagttggctgacatctggaagtagttaacaactaaccagtggacttcaacaatcatttgctcccaggcttcccccatcatcaccctcaccacatatcctgctaatatccaacaacaaacaaatatttaatattgaaatagcccattgcctgagaatgaacacaagctaaaatacatgcaagggtacttaatggaagccaaaccatgttctatacctaaggagaaaacatggacatgtagaatgcttttattcatgtattcaaaatcagaacaaatcagtgtatatcactagaacatcagatggaggataacacaagaagtgatacagatcagggttcacttctcttaccctctctctgttaggaccacattcctattttagccaaatgtttctggtacgggccatcttttcaccataaatggcattatgtttcaaatggctaaaagcatattatgggtatgctcaaaggagtaaaacccaattcacagagatgtggcttttctaaagaaccaaattaagggaatacttagtatctacaactaaagtattagtcattctgaggattatttgttgctttaagtattagctccctactacatccataacaccctacttactaaatttaattacacacaacttttcaagaattcgtattttatttgaagggaggtacctgtctactttatctacaataaaaacaaagggtattggctttctctaatccatgcaaactacaaattccatcgggagtcctacatcactaacagtggtatgaacaaaactaagaaagtacttcctatccacatgtgaatgttttaaaaaagtttttgccataaaacctaagtgtaatttagcataccacagtgctctgaagatgggtcattgacgatgtaccatttgtatataggtaatacacatgtaaatcactaattgttaattaaatataagaagtaggtttttatctttttaaaaaaaaaacaaaaaaggtgactccctttctcattctgttctgttgtattgcgtccaaaagttgtgtgtaatttttttaaggtccaagaaatgtaaagaaatttgttggaatacctgaatttctgtaaaaaaataaaaataaaaataagattttgttactt

SEQ ID NO: 14921 - DNA, 751 bp, Homo sapiens
aatggactccaaaaacatttttttaaatgttctgtaagataaactgtatatttcatatgtacctgttaaggtactttttaaagcttgtacatgaacctttgtataaaaaacaccagtgctctttcgttgtatttttctcatttttgctttttaaaattcctttaaaaaatgtgctgttaagccagtattaggtatctttattttgtaagtgaacattccagctgtttttttctggcagatctgatgctgatttgatgctgtatgatcttttttttttttttagttaaattcatttagtgaatgttctattattttatacatacacattaagtactcagctaagtaatggcactatgaggattttttttttctttcctgtcagcagcagttctgtgaatgcatcttaggtataaaaatgcaatacagatttttatattttggtgtggacatggctcattttgttttaccagttatttgcaagcaaaatgtaatttaatgtatagatgatttctaatgtctcctgacaaactgtaaatactgcatttcttttgcgtatataattgcttacagcttttctcatttgatatatagcattgtacatatgacaagtcttttgcaaaactgtgtgatctttgtgaaagtagtacagtatatgacctttaatttcttttttattttaaatatactgtcacactgaagcactggttgggcattttaattcatgttaataaatcacaattatgtcagtttt

SEQ ID NO: 14922 - DNA, 366 bp, Homo sapiens
tgtctttcagaaaaaggtttctttggtttttgtttctaagaaagaggaagccaattggatttcaagttatatgatgaaattctgaattaatgaaactggaaaactttatagaattacttattatcttggatttatggtgttattaaaatgctgaccatatttccttcatcctcttgttcctaaggaaacaaaaacagaaaacgaaacaatgaaaactcaattctatttacaagtataaatgctgagtatgtctgttgaagacgagcagagatattaaattataaccaactttcaatttcctgtgctaattaagggaaattctgttgtggataatcaaacatagccaataaatttttttaaaactcc

SEQ ID NO: 14923 - DNA, 1075 bp, Homo sapiens
acggggtctaaggaggggcctgtcaatcactgagatgctgcctcaccctaaattctatggggatggtgtgggcatggtgtaggggggaaaatgtgggctgaggggattcagacatccagggtcaaacatgggatgtttgacaaatttttaaacaaatagaaaggggtttgatcacatagttgcgtgttctgaaatgatacaggaacattttctatcagatttcagaactacctgtgcttctgataagcaagactgttaactttggggtgtggaattgttgtgtttcttctttgcattgactgctaggaagctctattctgttcaccatagaaagtttgtaggaattcctgacataaatagtgaagactatccttacatctggtttccaccttattttcctgccctcgttttaacatcacccagatttcttcagttataaatatgccatacacctttgtaagtcacctcaaatcttcttcaaaagaagcagaacagtgaaaaaaacagatgagtaagttaagagttggtcatctggaaagaagaaaactcagtaggcaccttcttttgttttttcttgtggtgtccggatcagcatcctgcatgtgagattcatccacgttgtcctgtctagcagtagttcagttctcttcatggttatgtctggtttcattctatgattatatcacaatttatctattctacacttgggtggcagctgcttcagattttttacttttaaaaaatatacttaaaagtgaactacaggcagggcatgatggctcatgcctgtaatgccagcactttgccaaggtgggcagatcacctaaggtcaggagttcaagatcagcctggcctagatggcaaaaccctgtctctactaaaaaatacaaaaattagcttggtgtggtggtgggcacatgtaatcccagctacttgggaggctgaggtagggagaactgcttaaacctgagaggtggaggttacagtgagttgagattgtgccactgcactctagcctgggtgacaaagcaagactccatctcagaaaaaaaaaataaaagtgaattacaacact

SEQ ID NO: 14924 - DNA, 1753 bp, Homo sapiens
tactttaggctagaatcaaaaacaagttagtgttctatggtttaaattagcatagcaatcatcgaacttggatttcaaatgcaatagacattgtgaaagctggcatttcagaagtatagctcttttcctacctgaactcttccctggagaaaagatgttggcattgctgattgtttggttaagcaatgtccagtgctaggattatttgcaggtttggttttttctcatttgtctgtggcattggagaatattctcggtttaaacagactaatgacttccttattgtccctgatattttgactatcttactattgagtgcttctggaaattctttggaataattgatgacatctattttcatctgggtttagtctcaattttggttatctttgtgttcctcaagctctttaaagaaaaagatgtaatcgttgtaacctttgtctcattccttaaatgatgcttccaaacatctccttagtgtctgcaggtgttagtggtgtgctaaaagcaaggaaagcgagttagtcttttcagtgtcttttgcaattcaattcttttgtcatgtataactgagacacacaaacacagcaggagaaatctaaaccgttgtgccttgaccttcctctgctggtcttgttccagggttatgaatatgaaaaaatagagatgagactttttgtgtcaactctgtccacaagagtgagttatctagtatgattagtatagctttctccagcatggcagcaggaagtaactacagggcctcttttatgcctgacatttcttcccttcctttttccctgcctccctttttcatcaattgcgatgctcccacaactctttacagacttgtgaaatcttcaagaacacctttactctataactcaaaaattagttgaaaaataattacttctcaaggattattagaatcttaggtacttatttgtaaagatgtttagtgacttttttttcaagtatcttattaaaggaggcattctagaaaatatgaattagtttccaaatgccttaattttaaactttggcctgaacagttttttctttttcttaatggaagaagatatttaatatcttaaaaatattccaagttaggaagaacactacttgccttatccatttcccatttaaaggacttttaaactttgacacatccttcagatttcctgaaaataattgaaatatcttactttaaaaatattttcatctctgaaatatctcgttatttattggaggtattgtttaaccttagagagaccattaaattatttataaaatattttgtaattacctgtagctaatacattacatagaaaaaaactatgttaacagtgtctctgtttaagtataatcagatataaatatatacttaattttttaattttaaaaatagatacctgtttgactttgaggtagtccagaccttttctttttttttttttttttaatgtgtgcaaaagcccaaaggttcctaagcctggctgcaaagaagaatcaacagggacactttttaaaaacactcttatcagcctgggcaacacagtgagactccatctcttaaaaaaaaaattagctgggtatagtggtatgtgcctgtagtcccaggtactcaggaggctgaggcaggaggattgcctgagcccaggaggtggaaactgcagagagtcatgatcatgtccttacactccagcctggataacagagcgagaccctgtctcaaaaaaataaaataaaaaat

SEQ ID NO: 14925 - DNA, 2228 bp, Homo sapiens
agcaaaagtatggagcaagacctgtagtgacaaaattacacagtagtggttagtccactgagaatgtgtttgtgtagatgccaagcattttctgtgatttcaggttttttcctttttttacatttacaacgtatcaataaacagtagtgatttaatagtcaataggctttaacatcactttctaaagagtagttcataaaaaaatcaacatactgataaaatgactttgtactccacaaaattatgactgaaaggtttattaaaatgattgtaatatatagaaagtatctgtgtttaagaagataattaaaggatgttatcataggctatatgtgttttacttattcagactgataatcatattagtgactatccccatgtaagagggcacttggcaattaaacatgctacacagcatggcatcacttttttttataactcattaaacacagtaaaattttaatcatttttgttttaaagttttctagcttgataagttatgtgctggccttggcctattggtgaaatggtataaaatatcatatgcagttttaaaactttttatatttttgcaataaagtacattttgactttgttggcataatgtcagtaacatacatattccagtggttttatggacaggcaatttagtcattatgataataaggaaaacagtgttttagatgagagatcattaatgcatttttccctcatcaagcatatatctgcttttttttattttgcaattctctgtattctatgtctttaaaaatttgatcttgacatttaatgtcacaaagttttgtttttttaaaaagtgatttaaacttaagatccgacattttttgtattctttaagattttacacctaaaaaatctctcctatcccaaaaataatgtgggatccttatcagcatgcccacagtttatttctttgttcttcactaggcctgcataatacagtcctatgtagacatctgttcccttgggtttccgttctttcttaggatggttgccaacccacaatctcattgatcagcagccaatatgggtttgtttggtttttttaattcttaaaaacatcctctagaggaatagaaacaaatttttatgagcataaccctatataaagacaaaatgaatttctgaccttaccatatataccattaggccttgccattgctttaatgtagactcatagttgaaattagtgcagaaagaactcagatgtactagattttcattgttcattgatatgctcagtatgctgccacataagatgaatttaattatattcaaccaaagcaatatactcttacatgatttctaggccccatgacccagtgtctagagacattaattctaaccagttgtttgcttttaaatgagtgatttcattttgggaaacaggtttcaaatgaatatatatacatgggtaaaattactctgtgctagtgtagtcttactagagaatgtttatggtcccacttgtatatgaaaatgtggttagaatgttaattggataatgtatatataagaagttaaagtatgtaaagtataacttcagccacatttttagaacactgtttaacatttttgcaaaaccttcttgtaggaaaagagagctctctacatgaagatgacttgttttatatttcagattttattttaaaagccatgtctgttaaacaagaaaaaacacaaaagaactccagattcctggttcatcattctgtattcttactcactttttcaagttatctattttgttgcataaactaattgttaactattcatggaacagcaaacgcctgtttaataaagaactttgaccaaggctataaatgccacgtacattattttcagtattgttggttatatttaaattttccttacaataaagcacacttttataataaaatacatgaattattgtttttcatacttttttgcttgtttctttaaagttttctgacgtgcataatgcataattcattgaaaagcatgatagcaatgtggcatgtggaagcgaacccccagggcataacatagtaagaaagtatggttctgtatggcaataggtttttaaaattattagctattcatcatgtgtgggagaaataattgtggtgtgttgcagatttatttggccatttagaataaccaaatcaatctggctaactaggaatttatgtgtaaaattatctgattaaaacagctcaagtttg

SEQ ID NO: 14926 - DNA, 1097 bp, Homo sapiens
accaggatgcttatgttcttaagtctatatttgcatatacattgactcttgatggaaagacttaagaagatcaaggtctcaccatttgtcctcaattcgtgtgaccataagatactgatagcattgagtcttgaaatgatttaataatatgagtgaggatttgctttctccattagagcattaagctaaaactatcaacattttaaaccaaattgccttatttttcttccaaacttcatatatgtctatcaggtaataataggcttgaaaattgatatcctgtggtgctaaagtacagtagaaagagaggagaagtgtatacatgttttattttaaattgtacgaaaggggaatttaaaaaatatgtaactgctgtttatacattggctccttactgcttattaatctgtattgtacacatgatgaaatgaagcagaagctgggagtcggcctttcctctagtaaccaccacatggctcagcatctgtgccaaacataggcgctcctagtctggtcagtgccaagaggctaccagaacatggggcaggtggctggtgttggtgtcccagcctaagagccacctgctgcagttaccatggcatgctgagttgatgcaccaggtggcagcagccatccgttattatttccaatggagacctagcccaggccaaggtaaagttagttaatagcattgggatatagtcactgtaatggtgctattaacaaacagtcaacaccattgtattttttaacttcgtgttctgtatctcctcagccatgtatcttaaatatattttgtcatcataatctttatggtgggggcagactttgcacttactgcagtgcaacacttgcactttaattttcctccaactgtctaaaattagagcaaatacattggcaatacagctgcttttgctctgagctacaatcatggcttttcatgttacttaccaagtggtgtttctggttaggaatcacagctgtaaaattgatttcagttcatcacacttcttcatgatgttgcccctaaattttgcacactatattcttgtatattatttcaaataaatggaaaaaaaagttgcttatctctg

SEQ ID NO: 14927 - DNA, 316 bp, Homo sapiens
agaaaagtctcagtttcaccaaatccacattcaaatgagttttaaatttaaattgtaaaaactgatattactgccaaatataagaaaaatattttaagtattggttatgttgtaaattttcaatgtgaatgtcaattagataggtcatatatattcaatttcttcattacttaatgtatttgttgcatggcagtttgttaaagtactatcatgtgtatattttgtcaatattatgtccaacagaaaatattcatgtaagtcatattttttaaggaataaatacatagccttaaaacagtgtataactttaaaatgt

SEQ ID NO: 14928 - DNA, 961 bp, Homo sapiens
ctagacttcccaaataattttaatatatacttttagacccacagtgaaaccacagaaggtcatattttgtaccttaaaccagtagctctcaaattttagtataaaaacaattcctgggagcgttttttaaaaatcagttgtagacaccaccctcagagattctgattaggtagatctggagtagacccagaaatacacagtttaaagaaaactcccagtggttcaaacatcctgatcatcctaggcaaacattgacaaatactgctctgaatcctgttctatagatattggggggatgggtagagtgggaattttttcctaatcatgtttttaacattttaaaataaaatttaatactaagaaattatggcttatagtatctataaattaacaagaagtatgcaggtgcaaaaaagtggtggaacaaataccaacatccatccaaaatgaaaaagaacaggaaattctgaatagaattgcactcagaacttatattaaaaattccatttggttaatgacattaaatttggtacatttcaaaacttctaggtcctccaaagattgaaagcttaataatctcctacctaaaaagataaaattaattgcaatctaccatatcttaagtataggaaatttggtgtccaacctggagatgattatatatttgaaatatttcctagagaatagtaaccaggttttgtttttaactttaaaacctaattacttttgtgcctctcagccgttgattgtaactttaaagtcccatggttttggagtgttattaatagattttgttatcggtgggcatgcactgcaagaattaagtatctcagactgaaataaaaccgttcataattaaagtattattttgttttgccaacatgaaaactgttataaggaaacaattatgtaaaactgtttaattcacgtttgggaatattgaatgaatccattttaacat

SEQ ID NO: 14929 - DNA, 2114 bp, Homo sapiens
actttataaaagacacttgcaatatactgtgtcaaaatgataattttgttatgttagcctctagaaaatttaagttcagaaaaatgcactatgaccggttcgtaatttttttaatgccacacataggttgtattgtaatggcattatcaaaatatttgatgatgtttcagatatattgcaaagtctgtattccagctcttaagaaaaatataagcatgttaaataccatatttacatattgataatgtcattggtatatggtggctgtttaccaataaaaggaaaaaattcattaaccggttgcttccaaaattagaagttttaagttgcatgaaaccattaatagccttgaaagctttgataagttttcagtaataataacctatttaatcagatgatgatgtgtttgaaaatagtgttcaatatcagcaaatttgtacacagggaatgtaaataaggataactgatcagagttatccactgtatttataaggaagagtcggaaaaaacaatgaccttagttttttttaagcctgatgatactatggtttactctaataagatagctatattgataattatatttttgttactgtgcccttgcacattttggtctttttgttaatatttttattaataacacataattagtaaccactctactgtttcaagttaatctagtaatagagcttacatatatttgtataactgctataccactgaactgaatttattttacaacagtgtagaattcttgaaaagttaacgtagaaaatatccaaaaagcagtatttctagaaagtgtccaaaaagcagtatttctttcccttggttgtgagagtaactaattatataaatattacctcaaaaatacatacactggtatcacacagtctttctacaatgtttctgtattctgaaagctaaatattaagtactatttttccattcaaatattcatttagaatttcctttagaagatggcagtgattataatattaatatgatttcatttgttccagtgtttagacatgaaatcatcttccttgtctcatgaaaacctaaatataaaaaaaaggaaaatactggagtttttatttctcttgtctttgttacatcctctgtttattataattttagcaccaacttcacacctagctaatttttttcatcataaagtggatgaaatgagcaagtacctaaaaattttatttcagataaaagtcaggagttactgctaaaaaacagacatgtaggagacattcaacaggagtatgaaatgagagttagaccatatgggctgacaacaccataaataacaagaaaagggagtgctgaaataggagagaacagagcaaatgttagctcaaagtatagacttagaaatatcaaagtaagagctatctggataaatatatagatattgagtgcttggaatcctagcctactatgtgaaaattaagtctaatgtcagaataacttacagaaaaatagaaaatgcacagctttaaaatgggcagagttaaaatctattcccagctttatcacttatttagccatgctagcctaggcctctatttccttgtctccaaaatgagaataataaaatttaggtcaggattactatataaactaagataatacagtgattctcaaagttgttcagactgtatagtaaggagaaagtctggttgcactttgaagagcttgaagatttgaaagattcccaaaaaagcattttaaagtttacatttaagggaccttggacctcaaccctctcaagtttacaagtctgaaactttagacatcaaaagtttgagcagtttttccaaggcaacattgatagttagattcagggccaggctgtaagtctagaatttagatatcctgatcccccagataccgctcttctggttatacacagaccagctataatttgctaaacataaaatattgcagtgtattagccggctgtggctccagagtctgtgccctttaccaccgtgcccaactgtttcacatgctgtgtttggtagtttttcctagtactctccttaataatggtggtgtttagcaaattgtattacataaataaatatttatttcatggattg

SEQ ID NO: 14930 - DNA, 1854 bp, Homo sapiens
gccagcctccaactcctcccccagcatacagtgacttccagctacgcagcagcagcagctcctgcctccacagtgaggcctggcagatggcagtcccccagcgccaatcccaccaggggatccaagggaatcccttgtctgagcccagcagaagcatcacaagacccccaagcatcgctgatcctgagccctctgacctaccaggtgaccgagtagccaccaaagccctggggatgcagcccagtggctctgtagccagcctgggagagctggacccaggggccttcctggacaaggaggcagaatgtaaggaggagctgctgaaagatgacagttctgaacatggcagcgcaccgcccaacagcaaagagaagatgctcaggagacattgccacttcactggtgacgcgggcattgaagtgcgtatgtcagggccaccatgatcatagccttaaagagttcaacatgctcatcgctgatgcactggatgggcccctggacttctgcgacagctgccatgtgcagcctcctggtgatgaggaggaaggcctcttccagccctccaaggagcaggcttgacagcctgggcacctgcacctgccacagctacctgcatgcctgctgctaaacatcatcaatgagcagtactctcccaactcccagagcagcagctcccgcagctagatcaggctctgccagcacccaagaacttggcaaagcaaccagggtaggggagaaccacgagagaagcattaaatgactttcagagaaagtggtacagccacttgattcctttttttttttttctttctcctctcctgcattttcctccatctccaggtacagtttggggtgtggatgcctctcgccctacaaaggcacaatgttgtggagggctgagaagttggttctgtttctcgttcctcataccccatccctatcccctttattctccctttaaagtcctatctcacctacctgtttgggtcagagagatgtgttttaaaggcccccaaggaaggaggctgggactgtgccctgagatgattcttggtgacgaagtggatttgtgctctgagtttagtttaagagaacgtcactgtgtctcagtcccggagaggcaacccatcttagacctgggtgaagaaggaagcctgcagaggcctaggctttgtcgcctgtggctcccagtgtctgcagagccagcattgagctaatcctgtgggaggatgagagctgatcggcagttgtatgataggttggtagggggcttgtgatctgtgaaattccaggtgatggatgcatccagtgtgcatcactaagaggccctttcccagtggcctctggctggctgcaggctggttccagtgtgaaagattatactgccttttcttttttttattttccttttgaaaacagacaacaaaagacaactgaaaataacttccccagtgagcaggcaagaattctcttctgaaaaatgacgtttgtagttctttcccaagttggccttcaaagagcctggctgcagttgagccagaaggagatgtcttgtgtgaaggctaaagtggaggctgtctctgaaatctccgtgagcaggtggccctaagccatggtggtggatagatgtgcagctttctgcatctctgccccttggtctgtgcccacaggtggccggcgtcagcctccatcccgagcacatgctccgcgggtctttatgtctcactgttcttcacacataggaggaaagagataggagactgaggaagggatggaccctgagaaagggcccctccagcctggctctcacacagtattttgtctttgattctgaataaatttttttttgtggtt

SEQ ID NO: 14931 - DNA, 1364 bp, Homo sapiens
atttcaaggggtgtggaaaacagttactctttaacaccactccgtcttccccattagccatttggataagtcaaagatagccttagccatctcctatcttagttacttttctccttcaactgtattttgccattgtcgttgccattgcctctgcctaactgcaagccatcatcatctctcacatggactatgacgacctcctcatctccctgtatcttctctaatgcttctctcatatacatgctctcagcagccacctggtttaaaacaaaaacaaaaaaaacactaatcatgtcattccctgcttgtcttcccgttctttccaactgtcattccctgcttgtcttccaattctttccaactgcagttaagatcaaaccaccaagacctcaccaggctcccatctacttttcagcctcaactcagtccacctgctctgccaatcacacctgtttctttttgttgttctttccctaggatatagatcctggcatacctgcattctgattcttcttggaacaagccaaattctttcccctgtcagtacgtttgcatgtgtagtacatgttgcatcccaggcctgtctgccttcttaccctattttattttcatcatagcacttactaccatctgaaatgatctcatttatggtttgtctcctcagtgattaacacagttcctgcacacagtaaatcagtagttctcaacaggaagtgaagaggtcatcctgaggggaacatttagcaatacctagagacatttctggttgtcataaccaggggaatgctcctagtggatagaagtcagggaggctgttaaacccattccacaatgcacaggactggaacaaagaatgatctctcactcagaatgtcagtgttgccaaggtggagacatcctgcagtagatgcttgtggcagagggtactggttgtaccccagtatccattctttcattcacctgtgttaatacatgctccagttttgtatttttttttataaacagctgtcaagcataaagataacattttccatctccttgtatgtaagtggaaataggactgtcatgtggggccagtttcttttttttcttcctctgtcctgctgcttgaaacatatgctgctatcttagatcatgaggtcgaggccatgcaaagtggagcaacaaggagctgtgtccctgacgccataagcaccacacctgtcctgaattgctgtgaatgacaccagctaactacaatgcattgtctcaacatcctagacataataaaaagccataaatatgtttgtcctatgcagcacaaaacctttgtatctttgccttttatgttgggatcttaattaaaaattacatcctctactgtc

SEQ ID NO: 14932 - DNA, 2359 bp, Homo sapiens
aagtgggttcgggaggtctctatgagcaaggaatacaagacaaaacttcctcaatgcattgactatttcttcagactcaaaacactcattcttttttctattaagccattgaaagagaagcactaagactgcttctaggctttatttataaaataaacaccttatccctaacatgggcaaaatggctagaattattcagacgatttggcagcgtccagggtaagctggtgttataatacgctgctgatctacatcacagatttgctaataatgttcacgtgggccctggcatatctctgttcagttagagtgagtgctgacccaacagcctctgtggtcaagcgagtcacgaatgattaatcataaagaaaaatcagtttttgactgacctggatatccatgagctgcactgatcaccatgtaaggtcacatttagtaaatgctgaaataaaatgattaatgcatttatcaataaaagcctttgaaaatactttggataataaattggagttttaaaaatgcaaatttgcttagtatctaataatgaagtgttattacatatagccggaattgaggatctctttgatcctggaaatggtttacctaaaagctacagaaccaggccaatatattttgaaatattgatgcagacaaatgaaataataaagagattttcatggtttataaaaatcttttttgatatgataataatcatgatcacaactgagatcaaaaaaatatatgacagattattttgtttaaaaatgcagttttaattatcttagtctatagaaatgatcattgcatggaggcatgtataggtatgatctgtgtaaaatctgacataaaaacagtgctattctgagtgaaaatttttttgatgtgcttacataaccatggtgattaaaatgagtttatattttttctcaaaaattttagcagtgtgtaaagtaagtaatctttaactgaactctgaccacttaaaaaaaaatctaaaaattgaactacctatagtagtctgtgtttaaagtgaatttttaaagacaaagcattctaaatgaactcaatataaaaacattcatttggaatgtacatactgaaaaatacaggtttttttgaccaaaagtttttatatcttttctttttatttatttttttcctaagtgccaacaattttctagatattatatacaacacaggctttgatcttggggacttttcccatatatttcacactggagtgaatgaagttgtacttcatttctagagaaaagttatacccaggtccccaattgagaatgtcttgcttgattgaaaacgacatcatcccttggtatactccagggattggtttcaggacccctgcatttaccaaaatttgtgcacactcaagtcctgcagtcacccctgcctaaagatagaatggcttctctgtttttcttctgaaatacaaccagaaacaatgtgtctatttctgaaagaataggattaatgatcatacaaatgggttaatcctgaattctggttgtaaatctggttacagcataactaggattataatgctgcctcattttcacagcactacttgcttatattgacaacaaatcatctcgctaaagagtgaatgtaggccaggcgcggtggctcatgcctgtaatcccagcactttgggaggccgaggcgggtggatcacgaggtcaggagatcgagaccatcctggctaacatggtaaaaccccgtctctactaaaaatagaaaaaaagaaattagcctagcgtggtggctggcgggcgcctgtagtcccagctatttgggaggctaaggcaggagaatggcgtgaacccgggaggcggagcttgcagtgagccgaggtcgtgccactgcactccagcctgggcgacagagcaagactccgtctcaaaaaaaaaaaaaaaaaaaaaaaaagagtgaatgtaatagtcttgcagaaaatgaatgaatacctttgttcaataaaggaaatatgcactgctcacttttttgaaggaaatgccaaagttacgttttacaacaaggctagagtttgtaaattctgggttcatttgtgatgacataagtcagcaaactgcgggaatactgtctcttctatgtattttgtgaatagtaagcataattttagttttgtattatcaatgaaaatttcacttgaaattaaagctgccttttgttatatttttaacctataggataagattccagtattgtatatgagttttaacaaattaaaaaatcaaatcatgtacatttgaaaatatttgcacacatttaaaaataaatgtaaagttgtcttttaaactactcggatgtgtcctttctgaac

SEQ ID NO: 14933 - DNA, 401 bp, Homo sapiens
taatagtattttgaatggaagatatgagggggaaaaaaacttatgtgtagtcaatcttttaagctttgactgttttgggaaggaagagtacctcttatcgaggtagtataaaacacatagggtcttgtttcttaaaatggttttaaatcttgaccttaagattgatttcaagtaccatactgtagtacagataagtggctcagttgagcacagctatattttaacatctctttgttcccctagtttagtaaattgacccagaggtgaccatttgtaaaaaatttgaaaaaatttttcattgttttacttcaaaagtattgttttgttaaacccaacgtttagtttttcttgtgatacattttgttaacctgtgtaaaaggattaaatttcaatatggttgt

SEQ ID NO: 14934 - DNA, 1938 bp, Homo sapiens
attagaagattatatatatttttttctgaaatttcctgggagcttttgtagaagtcacattcctgaacaggatattctcacagctccaagaatttctaggactgaattatgaaacttttggaaggtatttaataggtttggacaaaatggaatactcttatatctatattttacataaatttagtattttgtttcagtgcactaatgtgtaagacaaaaagctacttattgtagcatcctggaatatctccgtcaactcatattttcatgctgttcatgaaagattcaatgcccctgaatttaaatagcttttttctctgatacagaaaagttgaattttacatggctggagctagaatttgatatgtgaacagttgtgtttgaagcacagtgatcaagttatttttaatttggttttcacattggaaacaagtcagtcattcagatatgattcaaatgtctataaaccgaactgatgtaagtaaacggtctctcacttgttttatttaacctctaaattctttcattttaggggtagcatttgtgttgaagaggttttaaagcttccattgttgtctgcaactctgaagggtaattatatagttacccaaattaagagagtctatttacggaactcaaatacgtgggcattcaaatgtattacagtggggaatgaagatactgaaataaacgtcttaaatattcatttactggttatcatgagtacgtgttgagatggtcatagttttttttatgactacttctagtgtatattctaatttcttttctaggcctgaatgtatctttattttcatgttataggacaatattaaggcattttaaaggtcatcatcctttcatctattttagatacacctactaaatgtttaatatatacttttggagaagtacaacataagggagtctttaatctgtgttttccttggctgggttaatgactgtttatttaaagagtgttgtaaaattggatgtgtggtgtttaaaatggccatgtcctgaggaaacttaagtaacaaagtactaaatgctaagtaggcttttgcatattgtaactaaatttaagaataattcagattaagtagttctgaaatttggtatagatagcatagattgtctcatgctcatgagtgacataatgaccctggattctgttacatacttctaaagaaaattgattgttgtcttaggaggcagttaacttggctgaacaccaactccacactctgtcttgtttgtaggtggcagcagctgaaatctcttctcagttgttttagctttagctatgctgctggaagtctttcccatgcaagtgtgtagttcaggggtcaaccagagtttgggcagaaggaagtctgccccttctgtgcctcctgttttttgggggtttcccctttatgttccagctgttgtggttgccccatattctgccttctgatccttaaccaataaaacttggcttttgtttccccctcaagtgagaacccgttaaaaatgagacattgagccagtgctgttcactttttaagtgccaacttccctctactttccacttgtttatagttgtttccagtgcctttagttttttctaaaatatatttgttcagagtttgcagttgctatcagcaggagggttggtctgatatctgtgtgctactttgccattattggaagtgaactctgcatctttttaaaaatttgaaatcccggtatcatgtgaagtgctgtttatgtaaatctcaacatatcccttactcagggaaaaaaaagtttttagttagggaatagtgaaatataatttaatatggaattctagctgtagagttaaatccatctttaagtgtttacattcagtatgagaatgcaaatttatctgtatggggaataaagtcctaggaataaaacaagttttaagtgttc

SEQ ID NO: 14935 - DNA, 1495 bp, Homo sapiens
ttcttattctattctcactaaatccaactggttgactcttcctcattatctttgatgctaaacaattttctgtgaactattttgacaagtgcatgatttcactttaaacaatttgatatagctattaaatatatttaagggttttttttttttgacaaattcaacattcaacgagtagacaaaatgctaattatttccctgattaggaaagtttctttaaaaaacacgtaattttgcctagtgctttttctctacctgcccttgggctcactaatatcaccagtattattaccaagaaaatattgagtttacctgattaaactttaaaagttaattgtagatttaaattgtgtgaacctaatgatttttgcagtgaaacctttactaattcaaagttgcatgttctatgacatctgtgacttgcgttgcagagtgtacatgaaactgtataattgagtcattcagtaaaggagaacagtatcttggttaattgctactgaaaggttgagaaaggaatggtttgatatttaccacagcgctgtgcctttctacagtagaactggggtaaaggaaatggttttattgcccatagtcatttaggctggaaaaaagttgaaaacttaacgaaatattgccaagagattgttatgtgtttggttccagcctaaaaatgattttgtagtgttgaaatcatagctacttacatagctttttcatatttctttcttagttgttggcactcttaggtcttagtatggatttatgtgtttgtgtgtgtgtagtttatcctctctctcatctttatctagagattgactgatacctcattctgtttgtaaaaccagccagtaatttctgtgcaaccttactatgtgcaatatttttaaatcctgagaaatgtgtgcttttgttttcggatagacttatttctttagttctgcacttttccacattatactccatatgagtattaatcctatggatacatattaaaacaagtgtctcatacaacattgtatgtgagagaaatataaatatttacaacctgatattcgttgttgttttattgttaaaagtttattatgcaactctggaggtatagagggcatataagctatgggacatatgctgatcacaggctatattcatgaagttacttttgaccaacctgaaaactgataggattttgtttgtcatttggtaatttctactgcattcttaccatccttctctcacaaattttgatagcttgaagatctttttaattataattttgttgtatttgtttcctaggagcaagtgttcctgctgccagttctttcctctttaggcgtggttgagaaaaagcagaaactttacataaagctgtatttcttaatcatctttaatttgaaacttaagaaaatgaatttattctgttatatttatgtaacttatttcctggaagttatatctactagttttgtttgataataataaaattagctataccttg

SEQ ID NO: 14936 - DNA, 554 bp, Homo sapiens
aaaccaccaaggaaacctactccaaaaatgaacaaaaaaaaaaaaagcgaaagactgcagttgtgctaaaaacaaaacaaaacaaacaaacaaacaaaaaagtaaaaaaagattactttcgagagagaagtttaagcttcaccaatgctgctcctgaccaatggaaatatgtacaacttcagcattttaagtaactggcttcaaggggtactgtggcaaccaaataaaataactccattttctaaaactttcatgtaacttttatgtctggactacagttcaagtggacaaaaacatttctgtattttttttaagtaaataagagtagttgaactgagcaatacctcctcctgtgttgtattacacatattagccacgagtttttgcagtgaccagataaacttgaattgacacgtggtgtaataaaatggacaaattctgtagagtagacacagtgagtatgtggacctcttttataaggaaaaatacattttggattaaaatcaattgcttctgtcttgttttgtttctaaataaagaataatttctgggaa

SEQ ID NO: 14937 - DNA, 1205 bp, Homo sapiens
gagtacttgaaaacctagaagaaactaccacagaagcaatttttcatgtttttctcctatgagacagatatgaaagaacaatttaaatttgaacatcaacaaaagattggtccttggtgaaataaacttttcaaaaatgaatgttcttttcaaaaaataaagtagaaaaatgcacttactaagaacatgaaaaaaaatgaagtaggaaaataagatgaagactttgtattttggctgtaaagttttattgtgtgatcatcttaaattatctcacttcattaaactcataattatatatagaagtatatgtcaattacaaagaaatgaaatgttcaaattatttataaacctgatttttcaatcagtagtttcagtctcctccccaaggaccttcttcatccaacaagttgcaaaatttgaatatcccttctgtactatattgggtgagctgtaaatgtaatgactaaaagaaaagccacagaagaaagaagaaatggtcaaagacgtggataatatgcaaattggccattatattagaacaatcaagagctgactgtgttattaccactttctgcctagggtggccaaattccctagaaatagacatcaagccagttaacttcacttttccctgcaatttgtatgtcactaacatttaaatgccattttttaaaaacataaccacaataccattatgacacctaaaaaacattaacattaacttaatatcatctgttttcagtttttcccacttgtctcaaaatgtatgtttacaatattatcagtttcattactgatgaatattatatgcctcctgataagatgtactgaggaggacagaatatcacttttgtagatttataccaaaaatgcataatttggatataatgaagaaacagtcaaatccaagtttgaggctgggcacagtagctcatatctgtaatcccagcactttgggaggccaaggcagaggatcacatgaggtcaggagttcaagatcagcctggccaacgtggcaaaaccccatctctacgaaaaatacacagattagccaggcatggtggaatgcacctatagtcccagctacttgggaggctgaagcacaagaatcgcttgaatccaggaggcaaaagttgcagtgagccgagatcacaccactgcagttcagcctgggcaacagaccaagactctgtctcaaaaaaagg

SEQ ID NO: 14938 - DNA, 670 bp, Homo sapiens
attttcagaacttgaagactattttctaatttctatttttttttctatttcaatgtatttaaactctagacacagtttttatcctggattaacttagataacttttgtagcagtggttatattgcttataatttaatgtacaatactattgaaactggtgagttctgattattaaatattctctgtaaatcagtaaacatgtataaagtatttgtaatgtttggtcataatttatttatgaagacagcaaaagactgatttcatgatggggaaaacaattagccaaagtttaatttcttacactgtggttgtcaagaatactgatttactataatgatatatacatgcaagatatttaacttaatatcttagacaagagttctgggtacaattttgggatctagttcccctggaaaagctgctgtatttttaatttttaatggaatgtagcttttaaaatcctgtcactggcatcaacaaaaggaattataccatgagaccttatagctgtacttaaaagccattcagttcagctattgggagttcatgatgaattagcatatgccagaaaggttgctaaccttaacatctgagagcagtaacactgattttatctgctgtatgagactttgtgcattttactttgaaataaagatttttttccacactg

SEQ ID NO: 14939 - DNA, 938 bp, Homo sapiens
aggaatgattttctgaaagcacctgctaacaccttgagctttttactttcctgggagtgtacagggttaggaactgagaaagtgcacttcctcaggcaacagatgatctggtcaggcaacccacccctggggcccactttctgcagcaagatgggagcaattccaaggcaagtgggtatgggaatagcaactaaaaaggggtgaacttgtctcagcccccttttatggtagggcacttcaactttaatggggtgggcggctagcagggaggagaatcaacaaagcaagagaacttgactatgtacgtccaacttcttacagaaggagctttgctaccagaacaagttcactgtgtcaatgaagttcatgacacctcatgcacctttacagatatctgggaaagcctgagaaattcattgagttttatgtattgaagggaaccaggtgattactcttttcaataagagggattctgctcaggtgattagactttgactctatttccccagggacagtgatgggtgggccccagagctagttgctgtctggtgtttgctggtgaaaacatgagcagtagttatgtggggctgagagtcaaaagggaaagcctaattaattcaactaatgtttattaagctcctactctgtgcaaatcactctactcaagaggagctcacataagagtgcaggataaagaaaggagatggacagttatatgtaattatataaactttgtgtattttgtttctcatgaaaaaacccctttggcaccctgctgattgatttggaagaaatctgatagatttgtggcctttcctaaattgcactaggaaattatgtagttagaatatttggaacctgcattagttccagcaatgaaagtaagacacacagcatatgacataagacacagtgtgaaataaatgagtttaaaaagc

SEQ ID NO: 14940 - DNA, 1111 bp, Homo sapiens
gaactgacttgtgaaacctcagcgtgaagggacatatcactgaccttcataaccactccacaaccatgaatatttgacaaatttttactgtgactatttattaagcatggataaaggagacagccctaaaggaacttactaagccagccctttgggattcagtaccaacaggcaaattgcttgttttcttcttcttcttcttctttttttttttttttttagaaaaaaagacaaaaactgattttcttgaaaaaaaaaaatgaactgttctttctataatggctttgcccatttaaaaaatgtggctcttaagggttcatgaaatgactgaatatgaggatacatgtcctgtagaaagcaaatgcgcctcatatactgccaaaaatagtgttagtttcattaatgtgaattttccagcattcagtagttgtaatgttagaaacaattgctggtcaagttcaacttgttgctattgtttttaatttgcacaggagtagtatcagaaattagtgtcactgcttgtatctagctgaattttaaacaacagaacattagttttttatgttggtgccaccaactgtaaatgacataagttagttattacaaaacacagtaattagactgttgcaaccatctaaaaccttaggcttccagtctgtgctgttagtgttaagatgtaaagtgcaatcctaagctaacattatctgtgcaagcaccatagaaacatttgcatatctgcatagatcttacaactgtactctttacctccttgtgataaagctttgtctacctgcaaacacagtcaaaggctacagctgcaaaccaaagccaactctaaccatggccaagagctcaaggacagaagcagccacatgctttggtcagccttctgtaacttcaattagtacaaaggaaccttttccatgaactacctgctgttttctgatgacctctgggatcttttcatttagccctaaacaaagaaacaaatatgacaaaaaccacaactaaaaaatgttaattcagtcacagagtaatcttctgaggccaaaagtccatctaaatgcaatgaagatttgctttcattaaagacagaggtgaggacaaaatc

SEQ ID NO: 14941 - DNA, 3274 bp, Homo sapiens
atatttatcttttgtttgtgttaaaactggagagtgtttaaaaatttccttttggggggaagaaaagcacattgtaagattctcatgaaacaacatggaatttgcactgttaactcattattgtaagtaatctctgaaagcctttttactttaaccaaatctacatggtttaatatgtgaaattttaactactttaactagttttataaatttcttaatatgttacaataacttagggacattttgacaccccccttcccaaatgttaaatgccttctcctttttaccgatatttctgtttcttttaaccgttctcaggagcactttgctccaaatatattatttttcagtgtgtatttaaacgaggcagtttattttgatatgtatctattcatgattgaaaggaagcagtcttggccaggcacggtggcttacacctgtaaccctggcattttgggaggccaaggtgggcagattgcctgagctcaggagttcgagaccagccagggcaacatggtgaaaccccatctctactaaaatacaaaaagttagctgggcttggcggtgtgcgcctgtagtcccagctactcaggaggctgaggcaggagaattgcttgaacccgagaggcggaagttgcagtgagccgagattgtgccactgaactccaacctgcactccagcctgggcaacagagcgagactccatctctaaataaataaataaataaataaataaataaataaataaataaacaaaccagtctttattttaaaagaaactttaggaaacaaacccacataatagttgggaaccagtgttgatctctctcccttaccttctccacttgttcaacagactctgaatgccgactgtgtggactctcttcctcagactgtggggacagatacaattccactcctgtccacaggaacatgagatttagcagactaaggagatctgtaaagaatgaaccataccacaaggcatactgaagtgaggattataagagaaataaactcaaaatgctgttggaatatgcagagaattgctaccagaatattcagtaaggtttcagggagaatgtggcatttgaggactctcttagaatgagtgattcacctgctatttaaatgaattatttagatttttgacaaagatttaggtggacaccctaaactgtgtgtgcctttaaccagttaaaagaacagtgccttcagcatacttttttattagttgtaggaatacagctttttgaaaaagctataaagtttaaattaactaaaaatatgcattttcttacacataatttaaatgttatcatacttttttgatgaaaacataatgccttagtaaaatagctctatttaataaagaagattgagtactctgacacatttcatttaaattaggaaatttttaatattaaaatcccagtgttctgagttattgaaaggctttcttttattttgagagctttaggtctttttgggatgagaacattttagttgtttagtttgtttcttaagcagtgctattttttgtaaacacagataaatggaaaccattcttttcaatgcagaagaaatctagatatcccctactgtgaccaaatttctgtattacgattttatgttaaattaaactaatatggcaggttataatgatccttaagtgtaaagaaatcagtcaattacaagagtaattgtatagttattgagacctatagtgtgtggcttagatgaaagggagagtaaattttcataccatgctctctcctactcagtttgatctctctaaaattgtagtttggtttgatttaatataattcttagtagaaattttgaaagtatgctttgggattaataattatttttaatttttctggctgaatatcaaattgatagtaacaacagaagcataattttaggaaggctttcgcaaacctagccttttaagagaggtttttaacctgaagcatgagaatatatcacctgtggtttttcctttgagatgaaacgtagtttctagttatatcattacttaaagggcttaaaaagaaaaaacttagcaaacttttgaatctttcttttattgctatttacacatacatacacacatacaaaacctttaaattttgggatctgaatataattctggtaaacagctgtcttcatttttctcctctaaagaacttaattcatttgttacataaaatataaggaaatctttatactattttacagtaaccacaatctaaatatttacatatacccaaaattaacttatgctcatatattaggatgtgagaatatcatctgtttatggacacatgaaacctcctaatgacctggaattgttagaatatttgactttttatatgcaaagtttttcaaccaagtggtttgtctaatatttaaacatgtactggcacaatttgtgatgaaaatattagcacatttgcaataatgtttctccataacagagaatgttaatggataccagaattttatttttgtatttatgttcatagtacttttcctcttgtctactccagacagttattccataaagcatttgtataattaaaaggaaaacagaaaaaggaaaagtaggcaaatgtgaaaatagtttcaatatatcttatgatttcttaatgtaaaatgttttgttgaagtatatggctatcatgactaagtgctagaatttatagttacaggcggtgtccttttaaatgtggaaaggcttttaaaatattttaaaactggacctgtattatcctgaatacactattttgaaaatttttaaaaatgacttctttattttgctttaccgtatgtttatatctaattgacatattgactaatgtttgaaagaattcaaccataagttaaaatctgaaggttatctttatcatgtttcatccctgtctgaagatttcctagtcttcttatgtaaatcacatgactcatgtccgtaaatgaactatgaaagatatcgatcagtttatgatcattgacatgtgatttcaaaacacagtgttcttttaaaaatctataatatgtcaaaatacaagttttttttttttacatcgttttagtaagttaatttcatttatttactttggagctatatttccacttagaaaaactaaggtaattttacaatatatgctgagattaaaaaccaaggtaaaaatgatcaaacatatatgaaattgagtcttagatttaatgaatttcactcgaaaataaatgatcagaagaattttcatct

SEQ ID NO: 14942 - DNA, 1299 bp, Homo sapiens
gaggagggcacccagaagtatcgagccatagctatccaaagtggtctgcatttctactgtaaaatgcaatttgaaaaaaataaaacgcaaaaaaagaaactgtaaaggaaaccaagagattttgtttaatttttttggccattttttcttcatcaattttttttcggtctcaacttttaaacttggtttaagcatttgatttgtaaaacagtaaataattgtatctttccatagcttttcaaatgtgaaatcatttttggaagcttggatctcattaaacttcatgtctctattccatttgtgccacacacttaaaagttagtgtactgaatggaaagatgagcattcctagttctacacttcttttttccccctcatgtgtaaaatgaaaagaaaactaaatttgccctaataccaaggcgctacgtttattgcctcgtcttattcactgacctttgtaatgatacacagtgaattctttttgacaaagagaaatgcagtgtagtatgcagagctgctgttttaatgcctatgcatttactctttcctgatttaggcagaggtggcattttctttattgcatttctctatttttttaatgtaccctaccttcagtattctctttgtaagttggtgacttgcatctgtggccttgaatattttattatcacatgtggcataacagtatccacactttttagttctttatttttttttttttattttgagcaattctcctgcctcagcctcccaaatagctgggattacaggtgcatgccaccacacccagctaatttttgtatttttagtagagacaggttttcaccatgttagccaggctggtctcaaactcctgacctcagatgatccgcctgccttggcctcccaaagtgctgggattacaggtgtgggagccaccatgcctgacccacacactttttacttgtatagatgatttttggcttggacataaaagccaagccacccatttgcttttaatccaaagaacatgtatagtttttgtacccagagactatgatttatattgattgcacttgcctgccatgatttagataagattttttttgcatggtttttattctttcctaatggatcctgttttataatacttccaagcctgtccatggatatatcaaatgtcttcacttgtatattttcatggctaggtatttctaatgtttattcttccctgtgtacttctacacatagctatgcactatgaaaattaaatggaatgaatgatatgtatattactcaaaataaagtttctttcacttt

SEQ ID NO: 14943 - DNA, 2419 bp, Homo sapiens
atacttggaccccaggtctggagattgggatactgtaatacttctttgttattataacataaaagcaccactgttctgttcatttcctagctgttctaattaagaaaactattaagatgagcaaccacatttagaaatgtttattgacaggtcttttcaaataatgcttttctaattaatagccaaagatttcatatctaactttgtaaccagaattatacagtaagttgacaccacttagatttaaaggcagacagttttgctttagtacaatagtatacattttataatgatgaacttataatgattaagggacatttctataaaaatactacaatagttttatgcacaacttcccattaaaaatgagatttcttatttgtttgtctgtttttactctgggagtaatactttttaaattacctttacatatatagtcactggcatactgagaatatacaatgatcctggaaattgcagtaacaaaagcacacaacgattatagtaactataagatacaataaaacaaataaatatgaaagtagattcatgaaaatgtattcctttaaaatattgttttcctacaggcctatttaacaagatgtttcattttactgtatattttgtagttaatataaatgttgctctaatcagattgcttaaaagcatttttattatatttatgttgttgaactaatatatgaaataagtaaatgtagctcccacaaggtaaacttcattggtaagattgcactgttctgattatgtaagcatttgtacatcttctttggaaataaaagataaaagagcgatacacaaagctttcttttctaacttttccaagcaaaatctaaaatgttttatgacatttttctggctgtgatcttaaaataattcatatctaaatagtattttgtctaggagatgctttctctctagtagttagaaattaaatctgtgtcagcattcctattaatgtctcactttactttcaagtaatattggtgctatttaacattttacagtaaatgttacttctgatactttagtacaatttcaactacagtgattcatgtagagagacaggggagttgtcaacttgggctactgaactacatgcataaactaaaaactaacagctacaaacttttaagatttctctaatattggtatgtaacacaggataaagttattcttgtcattttgaactgtagagtcctatttcagtgtgatgaatcactgttgctttgaaaaatctcattatttctgggccgggcatggtggctcacccctgtaatcccagcactttgggaggccaaggcgggtggatcatgaggtcaggagatcaagaccatcctggccaacatggtgataccccgtctctactaaaaatacaaaaaaattagttgggcatggtggcatgcacctgtagtcccagctacctgggaggctgaggcaggagaattgcttgaacctgggaggcagaggttgcagtgagccaaaatcatgccactgcactcccgcctggcaacagagcaagagtctgtctcaaaaaaaaaaagaaaaaaagaaaaaaagaaaaaagaaaaatctcattatttcaaaatgatagacatataccaaaaacaagtctataatgtgagtagttactaaaatttacacatcttaaaagtgtgtaaatgcttaaatttcagaattaccatcagaacctcaattgacattcctttgaatacgctaataagtgacaaataagattaataagatttttcaaaatcgccaggactggtgaatataaatgatgattgaactggaataatattggggaccaaatcaaatgaatgattaaattatgaagctcatatccttttgaaggtagttgcaaagagacatttcaaaactgccctaggccattgcagcatccttagatgggacgcataatcattaccttaaagcatcaccactcattttgaccatatagattttattatgttagtttaaaaggtcaatcagcctcatgactttatagttatgtcttgtatttaaaaacattttttatacatttggttatgttgataaaccaaaaacatttgattaataaaatatctatttgaataaattatgagctatcctttcaaacagctattggcaagttttaaacccaaaatatatacacatagttctgtaataaaactgtttgacttctcaagtaacatgacttccttatttctgaacagtactggttactttcaaaatgaatttttattgagattttccattaactatttttttcaaagactcaaattttgtaccaagtaaatccaggctttatgtacaaacatgttgtttgttttatttggggctgggggaggtatatgatgagcagacttctcggaattcataataaattttctaaaagcct

SEQ ID NO: 14944 - DNA, 1889 bp, Homo sapiens
atgacatttcaaggatagaagtatacctgattttttttccttttaattttcctggtgccaatttcaagttccaagttgctaatacagcaacaatttatgaattgaattatcttggttgaaaataaaaagatcactttctcagttttcataagtattatgtctcttctgagctatttcatctatttttggcagtctgaatttttaaaacccatttaaatttttttccttacctttttatttgcatgtggatcaaccatcgctttattggctgagatatgaacatattgttgaaaggtaatttgagagaaatatgaagaactgaggaggaaaaaaaaaaaaaagaaaagaaccaacaacctcaactgcctactccaaaatgttggtcattttatgttaagggaagaattccagggtatggccatggagtgtacaagtatgtgggcagattttcagcaaactcttttcccactgtttaaggagttagtggattactgccattcacttcataatccagtaggatccagtgatccttacaagttagaaaacataatcttctgccttctcatgatccaactaatgccttactcttcttgaaattttaacctatgatattttctgtgcctgaatatttgttatgtagataacaagacctcagtgccttcctgtttttcacattttccttttcaaatagggtctaactcagcaactcgctttaggtcagcagcctccctgaagaccaaaattagaatatccatgacctagttttccatgcgtgtttctgactctgagctacagagtctggtgaagctcacttctgggcttcatctggcaacatctttatccgtagtgggtatggttgacactagcccaatgaaatgaattaaagtggaccaatagggctgagctctctgtgggctggcagtcctggaagccagctttccctgcctctcatcaactgaatgaggtcagcatgtctattcagcttcgtttattttcaagaataatcacgctttcctgaatccaaactaatccatcaccggggtggtttagtggctcaacattgtgttcccatttcagctgatcagtgggcctccaaggaggggctgtaaaatggaggccattgtgtgagcctatcagagttgctgcaaacctgacccctgctcagtaaagcacttgcaaccgtctgttatgctgtgacacatggcccctccccctgccaggagctttggacctaatccaagcatccctttgcccagaaagaagatgggggaggaggcagtaataaaaagattgaagtattttgctggaataagttcaaattcttctgaactcaaactgaggaatttcacctgtaaacctgagtcgtacagaaagctgcctggtatatccaaaagctttttattcctcctgctcatattgtgattctgcctttggggacttttcttaaaccttcagttatgatttttttttcatacacttattggaactctgcttgatttttgcctcttccagtcttcctgacactttaattaccaacctgttacctactttgactttttgcatttaaaacagacactggcatggatatagttttacttttaaactgtgtacataactgaaaatgtgctatactgcatactttttaaatgtaaagatatttttatctttatatgaagaaaatcacttaggaaatggctttgtgattcaatctgtaaactgtgtattccaagacatgtctgttctacatagatgcttagtccctcatgcaaatcaattactggtccaaaagattgctgaaattttatatgcttactgatatattttacaattttttatcatgcatgtcctgtaaaggttacaagcctgcacaataaaaatgtttaacggtt

SEQ ID NO: 14945 - DNA, 2261 bp, Homo sapiens
tgctagtactatgtcaaagcaacagtccacactttgtccaatggttttttcactgcctgacctttaaaaggccatcgatattctttgctcttgccaaaattgcactattataggacttgtattgttatttaaattactggattctaaggaatttcttatctgacagagcatcagaaccagaggcttggtcccacaggccacggaccaatggcctgcagccgtgacaacactcctgtcatattggagtccaaaacttgaattctgggttgaattttttaaaaatcaggtaccacttgatttcatatgggaaattgaagcaggaaatattgagggcttcttgatcacagaaaactcagaagagatagtaatgctcaggacaggagcggcagccccagaacaggccactcatttagaattctagtgtttcaaaacacttttgtgtgttgtatggtcaataacatttttcattactgatggtgtcattcacccattaggtaaacattcccttttaaatgtttgtttgttttttgagacaggatctcactctgttgccagggctgtagtgcagtggtgtgatcatagctcactgcaacctccacctcccaggctcaagcctcccgaatagctgggactacaggcgcacaccaccatccccggctaatttttgtattttttgtagagacggggttttgccatgttgccaaggctggtttcaaactcctggactcaagaaatccacccacctcagcctcccaaagtgctaggattacaggcatgagccactgcgcccagcccttataaatttttgtatagacattcctttggttggaagaatatttataggcaatacagtcaaagtttcaaaatagcatcacacaaaacatgtttataaatgaacaggatgtaatgtacatagatgacattaagaaaatttgtatgaaataatttagtcatcatgaaatatttagttgtcatataaaaacccactgtttgagaatgatgctactctgatctaatgaatgtgaacatgtagatgttttgtgtgtatttttttaaatgaaaactcaaaataagacaagtaatttgttgataaatatttttaaagataactcagcatgtttgtaaagcaggatacattttactaaaaggttcattggttccaatcacagctcataggtagagcaaagaaagggtggatggattgaaaagattagcctctgtctcggtggcaggttcccacctcgcaagcaattggaaacaaaacttttggggagttttattttgcattagggtgtgttttatgttaagcaaaacatactttagaaacaaatgaaaaaggcaattgaaaatcccagctatttcacctagatggaatagccaccctgagcagaactttgtgatgcttcattctgtggaattttgtgcttgctactgtatagtgcatgtggtgtaggttactctaactggttttgtcgacgtaaacatttaaagtgttatattttttataaaaatgtttatttttaatgatatgagaaaaattttgttaggccacaaaaacactgcactgtgaacattttagaaaaggtatgtcagactgggattaatgacagcatgattttcaatgactgtaaattgcgataaggaaatgtactgattgccaatacaccccaccctcattacatcatcaggacttgaagccaagggttaacccagcaagctacaaagagggtgtgtcacactgaaactcaatagttgagtttggctgttgttgcaggaaaatgattataactaaaagctctctgatagtgcagagacttaccagaagacacaaggaattgtactgaagagctattacaatccaaatattgccgtttcataaatgtaataagtaatactaattcacagagtattgtaaatggtggatgacaaaagaaaatctgctctgtggaaagaaagaactgtctctaccagggtcaagagcatgaacgcatcaatagaaagaactcggggaaacatcccatcaacaggactacacacttgtatatacattcttgagaacactgcaatgtgaaaatcacgtttgctatttataaacttgtccttagattaatgtgtctggacagattgtgggagtaagtgattcttctaagaattagatacttgtcactgcctatacctgcagctgaactgaatggtacttcgtatgttaatagttgttctgataaatcatgcaattaaagtaaagtgatgcaacatcttgt

SEQ ID NO: 14946 - DNA, 1391 bp, Homo sapiens
gatgaacattgcatgaccggatcattttagtgtctttgcgttaaaaaatcattgcaaaagtattctgaactgtcaagctgcccagtcagatgggctgttgccatttaaaatcactgtaattaattagtttgattagagcacaaagcttagctaatcaaccattatttttcattttgtttgttctaagaggattgaaaatcagtttagtttaaatgtctttctgttaggcctttctttcttacaatgaagagatgattcttctagtttatggttaaaagtttttgaagtgtctcaaaaatattttactaactgtaaccctaaaattgatgtcttttggtttatgaaatcagtaatttttgatatttccccagttctttttaatggggtcaataatggacattctagtttaaggtggttgatggatttagccatatatgctgctaaagaaattgtctaccttttcttcctcacctgttccatttatgtaaagttgagattagagggaaagcattttctatatcaattgtgtttaaacctttcaagaaggttatttagctagcttagtgttgaactaaattttttttaaacaaggcaaggtctaatgctgttttgagattctgaaattaatgaaaatacttatttcagaaatgcatttaatgctttttttcttgtgacagttacgcaaatcagcttgaattccatatgtccctgagttatttttatcataaagccacaaatgtattataacaaggcaaattgtaatatatataatcctgaactcatgaccatgtctcggtttattttttttttcttggattgaaaagtactgaaattcaatgtgacattaaaatgcaaattttcctatttatttgagtagaaaatcacttaccagtgagcatatatattttaaaatactttctttggatattgtaattcttaactggttgtaaattagaaaagctgggattacatatggtgtgcggttacagtctaaattttttcatcctcctatgcatcataagcatgtttgtaatattttcaaaaatagttctactgatgctacaggaatttcaagcctgtggtgaatgttagtatttaccatagggagtgaagtggagttatggtttcattcaatagagtattgctgattatacttgagtggaatcctttcctcacgtactcccacagacgtctgggcctggaaattttttttttattttattttattgtttttttttttagaaaaacaccacttttattatgtacaataaaatatttcattagcttgaattgtatagatttttaaaaattcaatgaaagcatgttgtttaatttctttttaaaatcactgttgggctttgaaagcattgagaatataatatgaaattatg

SEQ ID NO: 14947 - DNA, 921 bp, Homo sapiens
actcatcacccctcttcccccaccaccaaaactgctcctcctcctgtattcctgacctccgccatccaccccgttgctcaagccggaaactcggcagcccttccaaactcttccctctctcactccccacatcccatcgtctcggccttcacaatctgtcagttctaacctcctaagcaactaggccttcagtaaatgtgattcacctcttctttccctccttttcccaaagcatccctcttagtctaggtccttgttgtttcttgcctgaactcctgccatagtcttaactggtctccttgcttcctgtcttatcctccaccgtctttcttttatactgacacaagaatggtctttctgaattgcacatgtgagcatgtcacttccctgcttaaatttctccagtggattcccagggacttcaggatcaagtcctagttgttcagcatggcatccaagactctttatgatctggcccttgcttacctctcagccttagctctcccaactcttgcacagtcactgctcttcagccatagtggatcactcaccattcccagatgtaccaggctctcgcacacctctgcacctttgcacgtgctgtttgctgtgcgtggaatgcccttcactgtcaccaccctgctcatccactctactaatgcctcttcattcttttatactcagctttctttaaagttcttctaagctgagttaggtgtctgtcctttatgatcccgcagtattccatgaatacgtatattctcacatttattgtactgtattataattgttgaaaacttgtctgtcccatttagaatgtgagctccttgagagcagaacggtgtcttcattatctctgtatccccaaggctttgcacagtgccttgctcatagtaggttttcaataaatgattattaaat

SEQ ID NO: 14948 - DNA, 162 bp, Homo sapiens
gagaagccctgtcctccactcacctcacccgccgctgccaccatctcctctgtgccaactccttgtggaccgcaagaaagcatgactttgaaaaagggaagccattccgagattttaaaatgttcatggactattccatattaaaagctgtttttgttgtac

SEQ ID NO: 14949 - DNA, 1554 bp, Homo sapiens
agagcagcataaatgttgacatgggacatttgctcatggaattggagctcgtgggacagtcacctcatggaattggagctcgtggaacagttacctctgcctcagaaaacaaggatgaattaagtttttttttaaaaaagaaacatttggtaaggggaattgaggacactgatatgggtcttgataaatggcttcctggcaatagtcaaattgtgtgaaaggtacttcaaatccttgaagatttaccacttgtgttttgcaagccagattttcctgaaaacccttgccatgtgctagtaattggaaaggcagctctaaatgtcaatcagcctagttgatcagcttattgtctagtgaaactcgttaatttgtagtgttggagaagaactgaaatcatacttcttagggttatgattaagtaatgataactggaaacttcagcggtttatataagcttgtattcctttttctctcctctccccatgatgtttagaaacacaactatattgtttgctaagcattccaactatctcatttccaagcaagtattagaataccacaggaaccacaagactgcacatcaaaatatgccccattcaacatctagtgagcagtcaggaaagagaacttccagatcctggaaatcagggttagtattgtccaggtctaccaaaaatctcaatatttcagataatcacaatacatcccttacctgggaaagggctgttataatctttcacaggggacaggatggttcccttgatgaagaagttgatatgccttttcccaactccagaaagtgacaagctcacagacctttgaactagagtttagctggaaaagtatgttagtgcaaattgtcacaggacagcccttctttccacagaagctccaggtagagggtgtgtaagtagataggccatgggcactgtgggtagacacacatgaagtccaagcatttagatgtataggttgatggtggtatgttttcaggctagatgtatgtacttcatgctgtctacactaagagagaatgagagacacactgaagaagcaccaatcatgaattagttttatatgcttctgttttataattttgtgaagcaaaattttttctctaggaaatatttattttaataatgtttcaaacatatataacaatgctgtattttaaaagaatgattatgaattacatttgtataaaataatttttatatttgaaatattgactttttatggcactagtatttctatgaaatattatgttaaaactgggacaggggagaacctagggtgatattaaccaggggccatgaatcaccttttggtctggagggaagccttggggctgatgcagttgttgcccacagctgtatgattcccagccagcacagcctcttagatgcagttctgaagaagatggtaccaccagtctgactgtttccatcaagggtacactgccttctcaactccaaactgactcttaagaagactgcattatatttattactgtaagaaaatatcacttgtcaataaaatccatacatttgtgtg

SEQ ID NO: 14950 - DNA, 822 bp, Homo sapiens
ggaaaaactacatacttggacatctgtaaatctttgtacagaaactgattattctgaggatgatatatggagtttttatgagtgtgtcactggattttgactccttattgattcattgtaatatgtaaattaaaatatttctacattttattgaaaaaaaaacctttttttttgcctaaatataagtttggtagcttggtttcttttttttattaaatagtgtgaaaatataatgggcattttgaaaacttttagaaaaaagtagtactttttgatactttagtatttatggaaactagtggaaaagagaaattagtgtgctatataaatcaggcattcaagtaacagtaatacaggatatatgtgttttctttccctgatgtttaggaaaatcacaggagggtaaatctttgctggagttatctgaatcattggcatttatccgattccactggtggtagtttgctagtgcttctaaaagttgctccctagcactgagaggtgtgggtaggtaaaaatgtgtttgcttgagaaaagcaaaaatgctaacaaggttttgatagattggcccaaaattctaacttgaatattaagaatgactaggaatggtagaattgacagagatgattagtaaagtctcttgatgcccaattggttaggtatgaaagtaatatgaacacattaatgttgaattttacagacagtatatttgaaaaaaattgattccatgtagtcttcaatttttaatttttaagaattggagaatttctaatgttaaagttagtttataaatgtgagtaaataaactctaagtttgtattg

SEQ ID NO: 14951 - DNA, 341 bp, Homo sapiens
atatggaacccatttctacaatttctttgccgcttccttgaattggaaaaatgtactttgaaagaaccgttaagtgaactattataatatttttgctgactacccagttgaagaaaagtttgttaattggatgggattttttttttttcacgttagaagacatgaagaaattttaaaagataaacatctatattgtgaaccatcagctgaaaagataaatttgtgttcaatatataggcagaaaaaaatttgtgtcaaaatgttgaatggaataataatgaggaaactgtgttaggcatgtattaaaacatttaaataaaataaaaatacatttcagctac

SEQ ID NO: 14952 - DNA, 2475 bp, Homo sapiens
gacaattggaataaggtctaagagaattcgagccctggctgtgaaaagaatctcaacatagaagaaagaagaaacaataaatattctgcagattaatgcagcaaagaaagaaggttggtagtgaaacacaaagcttccaatcttaaggatgtgaataaaaccaccaaatggcatttctagacagtttgacctgttatacagagtaatattctgtggccctttgactttgtgaatgagcacaatgaaatgccgcctactgatgcttcttatgatcagaactcttttttaataaaataaataacataaatcgttgaacataatgttccagttgaatgcaaaacaaaaaaaatatggaaaacattttgataaaattttttcctgttaaaaccatgaacattggctatgatgaagattattacatatgaaaaaaaaactcacacaacatatttgtattgactgaaggaaaccatcataatgcatgctagaattctttgaagcagtgatctcagtttccttatgttgtcttcagaataggcatgataaactataattgtagaaaggggtaatttctgtgcacttacaacaagctgagtgttcatgttccatggtgggctgtgcaaataaactccttttagacctgcagtatttctcatggggatgctcattagtaaatctaaagtgttcagatagttcagtattcattatcgtttaactttgcacctagatactgttacaactgcaataatttgttgtacaactgttgtatcaggaatcaggatttttttgttgttgtactttccagatccttatagatacggtaagagccacattcgtagaaaaacttctggtgtggccaggttttaggtaactttttaatccaaaactattgtgccataaatgtttttcagtaatattttttggtccactgtattcctgtgacacagtgcattatctgttcttgtatttctatagcacctctctattgggtttatcatcatcaacaagactactgtttactgtagttcaagtgactttcctacttttgtatttccaaaaaaaattatcttgtaagtagcttgtcatcaatccccttgtcgaaaactagaaaaaaaggagttgacccatataaattatctctaacgtctttgttgtttatggaaaagcccagatactggatatatcactatgtattttatgaacagaattgactgggactaatatcacaggatcaatcatctcagaatcttacttgatgcattatttattttgctttagatcttgaatacattttgagaataactaatgtggattgaaatgtagagatacactggagtgctttatttagcaatatttgatgaaagcatgctttctacgccattcaggaaggcagcacaaatttatctcagaaaggttcctgtgtattgcaaggtacaattttctccaataaatcaggagaacaggagtttgatgatgcaaagttgatctctgtacatttaagtgaaaagtctttataacttttcacccttaaaatatttcagcagacatgtctgcacatgacagtgtaaaaaagtttaatgtcaaatgcaaagtttttattcattccaagccaccactgtaaggaataaagcttagcttctgtacatggaaagagctaataattatccctctgtcagagatgagatttttaaatgcttatgatatttaatcataaaaagggattaatccaaccattttctagtaaagccagaaattcttgcttcccatttctagaatagtttctagaacagtgctatgcacatattagatcttaataaacatttgctgagtgaaagtaagataaactcaactatctcttgggaagaactggcttcattcctagtacatcttttaaaaagttactaattttccagcagtacaaatattaacaattatattaacacctgcctcatgtcagtttatgcttctagagcaatgtctagtgaaacttatctgatggcatttattgaaaaccttctaaaaagtagactaaggaaaccataatcagaattactatgtcttttgattcccaatgagaagttctattttcatgttcttaatattacatacaagaaaatgcagttaggttatttcaattgacaattctgcctcctcttttgatttatcacttacccaaaattattaattttattaggcttttggaaaagaaaaaaaactttttgatgttttaggtgatttaaaaatataccgtgttggtggtgaatgactattgatgactgtgttaagtgcatctgtattgtaagtgaaatgtaattatttctgtgtaccatatggagtaactaaggtcattgtttttgacaattttgtttgaaattcatatatcttatttcaaaggatagcataatatctgcattatgctggaaaaaaatagacctttggagaatacttaaataaaacatgtgcatgcttgaacaggac

SEQ ID NO: 14953 - DNA, 809 bp, Homo sapiens
aagattgaaaacaccaagaagatagatagaatattcactatttctcatattgatgcaattgtggtgctctttttcatttgaaacatcttctcctaaaatatacactttaagaaatagtcatttctgtttttgcattaaagtaaattaaagcagaaaacacatgctcacttttggctaacttcagtgtatagatttcatacttatgttgtctttcctgggtacagatttattactgaacaagtacgtgtaagtaaaatgtcattggtgagcaggacacaagataaaaggtgaacaccacatatggtgtgaattgtaaatgcttataccacaaacttgaaaatgtgtcatgtagagccatggaaaatgtctagttgtttttatgtagtacacacattttaatggtgctaacaacctgggctcttttgttcatagagttattctgaaaaaaatttcataaaagacactgcctaaagataggtagaataggctgtagcttgatttactgtggaataaaaaccaaaaaaaaaaaggtcttaattgtttcagtctttaattatgtctataaacttagaaaaaggcatttacatttgaatctagactaatttgtttagtaacattcttcctcatattcaatgactgtatgtatcagtccttatttagagactgcctgctttttaattcatatagctctttggttctattctttgttttgtttattattttgttgttttattgcttgttagacctttactaaagatattttgtgtatttagaaaaaatataacataaatatatgctttttaaatatg

SEQ ID NO: 14954 - DNA, 804 bp, Homo sapiens
aggtggtccttttgtttgatgaagaaataaacttcagctgaagattttatataggactttaaaaagaagagaagagaaagaagaaacaatgcatttccaggcaaccacttaaaggatttacatagacaatcctataagatcttgaacttgaattttatgggttgtattttaataatgtaagtaaattatttatgcactcctggtgtgctatgaatattattccagttagccttggattatttcagtggccaacatatgcagacatttgtactcctcaaccattttctcaaagtaatgggcattctatgatttagacttcaaggaattccaatgatgaagattttaaggaaagtattttatattcaacaggtatattctgctgcatgtactgtactccagagctgttatgtaacactgtatataaatggttgcaaaaaaaaaaaaaagtcagtgcttctaaaaagaatttaagataatggtttttaaaatgcctttataataagctttgtttctttgtgaaactaattcagcaggctgaaggaaatggttcatgtgataatgtgggctggtatcctctagagtacctgggtacataaacagaaactcctgtaggtaaaaagtaatttgtgccattagtctttctatgtttctgcatccagatagagtgcagttcatgagggagggggcgggggactgaaggggaaagggcgttaaagtgatacatttttataccaaatgtgtttatttttttgtgcaagtaatccttaaaattgcaattgtattaggtgttaaaataaagttttt

SEQ ID NO: 14955 - DNA, 1791 bp, Homo sapiens
gctccctgcaggagagctgaatctggagctggagacgagctagtcacccggacaatggtctaggagccaagcgctgcacatcgcacacatttgggatcgaccacacacacttgtgcacaccagcacatgcatgcacaccagtacacacacagttaaataatgataacacttcttacagctttatgaattcaagatgtgaccttgaacaccagtccatttcacagtgaaagatatacctagagaaacgttacttgaagcataattattaaccagaaccactgtgggccaggtatggcattgtgataataaagagaaatatagacacttaaaattatgtgaaaaaaaggataatgctctttcatgttgtcttaccatatctataggtacatcaatattgaaaaggagaaaaaccaatgacattccactggcaagtagaagttgtcctttcattctttaccaggagaaaatgtgatgtttatgatggcttaggctttgtgaatctaatgcttatgaaaaacatttcttcctatactttttaaattttattactgaaaggaaaagaacaggaatgttccacaagggaatttgaagagattctgtgagagagatatgaaatattttatagttaaaacaccaatatattcaactttacacttcttgtgtttttcataaacattccctcttgtcttatctgtgtacttcgatgggtaactgcagtctgaattaatgaaatatgtaattttaaagtaagtaacaaaatgtagttcctcatgtattactgtactatgtttcattgatgatattacttaaatcttgtgtttgccattacagccctatgtaacttaaaattacaattatattttatgtaaatattttgcaaaggactatgcattctgaaatgcataggtgctttttcccaccaagcatttgcatatgtccacaaatagtattatgttactagtatctatattttgattttcctgagcaactgtatcaaatccaaatttagattagacaaaaaattattattttaattaaactgtggcatacatataatacatacctaattatagtagtgagaactatttcttttatctctttaggttcaaaatggtgaatttctttattatatgaatgctttgttgtgagataacatcacactgttacaatggattttagaggtttgtcttttttgggtggggtgggaagctgagagggttaattcaatacatggctgaaattaccaaatgtataaatacctcattttcactaccatacaagaaaaaaacacctattttgattgatcagttcttttgtatgaatatccacctcctttaaatactctatttttatatatatttttatatgaagataaacatgaatttatatttaactgtcttaaattatatttacataaatgcaaatatcacttgatataaacaatacaaatctgcatcttacagatgataatttttttagaagaatgatacagaattaactttaaaaataaaacttttctaatatacacttaaatgcaaacatcatttttaaattttcagtgatttttttaatgacataaaacgttaccaatgtgtgcagcctctccatcatgttttaacatactgtatactctatagcagtattacagtcagtatttcatataattttctttagacctaactgttaccatctgactgaggttactctggtatttatctcttcgctgctgaaataataatggattttagaaacaattgtaataatatcattaataaatgtcttactagtaat

SEQ ID NO: 14956 - DNA, 1758 bp, Homo sapiens
ccactccatccagccttgggcaagatgcctcagcaatatacaatggcattgcaaccagagaggtgcccatccctgtgcagcgctagtaaagttgactcttgcagtggaatccctagaaccttggacctgagagtttcccttacctgatcgacatattttcctttatctgatcaacccatcaatcatgtggatttcttgggattctaatgttgaaaaggtttatattcaccttttgatgatttggggaatatatattgacatacaaggaagataatctgtttcctaagcaagaaataacaggaaagatcccttatgccaggaggcctgccatactcaggataagatccttgaatatggaacttagttacaggactcaataatggtgggtgaacattagtcatttttaaaagacacctcttatagcaataaggagacattaacatgaatctcatttattctctcagtattttaactgaagaaattatactgtttgtgtgtggatagaagatgttgaaaagttaacataagcattgggtgctgacttaccctttcatgtacttccaaagaaaggtaatcaaaaagaatcttcttaagtgatataatatccctaaaaaaatgatcattacagatgtttagtgacaaagaatcaatatgtaaaaagtataatgaatgatttagattttaagtgccttttcactgggagaatctggaaaaacctccataaggtatatagcaatctttgatctttagattcatacttttatcacagatcagtttcaactgttaaaaacccacctctgagatactggggggaggatcctgaaacatgcgggaaaaggagaggtaaacagtggaggtaaaaatataatttcatacattgtaaagaaaagcaccctttaaatgtgtaaagacagtgttttgtaaagaattttgtttaaaaagtttctattttgtaaatacagtacttaagttatatgatttatattaaaacatttattgacaaagcctaagagctaaggcagtaaaattatctcataaataatattagcttattttttttcatactattaatgctatttttttggacatcgaagagaatttaacttagcagttagttatatggatgtgtatttcttgctaaaatgacagttttatatgttatagattaaaatatgttgcaaaatatcaaaaatttgtgttatttcagcagtaagattaattgaattctcttttcacattagttatgcttaactcataaggttattataataaattatattagtaaaagtcttaactggaaaaaagaatctaaatcagaatagtgatcaatttgtggatttgatatcctggatatttattatattttatgtaatgctgcatttctatttgaatgttaagtggtctttcttgtttttaatattcatgcatgtatattcatcatattttacaaggttcctggtaaaaattacagggctctatttaaggatgtattttaatgtaaatgcttatgttttttatgaattgttaaatatttcagtattatatagaaaaaaatagatttttaaaattcagaatggacaaagagaatattcattttcttattaataagataaagaaatgtttccctgccccacagtcttcattctatttctctttaattttattcactgaggcagagaaacaatttttgaaaaagagcaaacccatggaaaatgtctcagatctaatattaaaatcaagactaagcatttaactgtg

SEQ ID NO: 14957 - DNA, 814 bp, Homo sapiens
cacagaaaggggtgggggaactcacatctgagcattgttttcctcttcctaaaattaggcaggaaaatcagtctagttctgttatctgttgatttcccatcacctgacagtaactttcatgacataggattctgccgccaaatttatatcattaacaatgtgtgcctttttgcaagacttgtaatttacttattatgtttgaactaaaatgattgaattttacagtatttctaagaatggaattgtggtatttttttctgtattgattttaacagaaaatttcaatttatagaggttaggaattccaaactacagaaaatgtttgtttttagtgtcaaatttttagctgtatttgtagcaattatcaggtttgctagaaatataacttttaatacagtagcctgtaaataaaacactcttccatatgatattcaacattttacaactgcagtattcacctaaagtagaaataatctgttacttattgtaaatactgccctagtgtctccatggaccaaatttatatttataattgtagatttttatattttactactgagtcaagttttctagttctgtgtaattgtttagtttaatgacgtagttcattagctggtcttactctaccagttttctgacattgtattgtgttacctaagtcattaactttgtttcagcatgtaattttaacttttgtggaaaatagaaataccttcattttgaaagaagtttttatgagaataacaccttaccaaacattgttcaaatggtttttatccaaggaattgcaaaaataaatataaatattgccatt

SEQ ID NO: 14958 - DNA, 897 bp, Homo sapiens
cttaatattttaaaatgtgatttaaaaaaaatgttgaaatgtgattccctcagataatttcttgtaaccattttacatccttaattgtaaagtgtatttaaattcattgacagttttataggttatcatgtgttcttatgggaacaccatgatttatgtctttaaagacatttgcattttttaaagatagtattttgaacttagatttgtatctttgtttgctacaagtcatcaaactctccctatcaagtggctcctacaatatccacaatcaagtctctatgtttaaaaaacagataaccactttctcaaacccacatctgccagttgctggccagattctcctgtctttcacggtcttgctgtgtaaaagagctcctcctgcctgtaagttcacagactgtgatctggcatctgaccctccactgcttttctcaaggtccctgacaatctctttgttggtaaattcagtgaacattcttcagtccctcttccaatcgattcctacagcatctaacattgttgcctgttccttgcttgaaatgatatctctttccttgtttctcgcaaaacctgttctcttgggtgtcctcccacctccctggacactctgtctctggcttctttctgcctagctcatctctagccaatcttacagttatatatcttaagccctcttctctttgttctttaagttatatatcctaagccctctttgctttgttctctgggatattttatccacatccatggtcttaatcattttgctagagactacaaaatttccatccaaagctcagctctttctctcatgttctcctgacctatgtagacaattggcctcatgaacatttgaacacaaagacacctcaaattcaacatgtccccagatgaact

SEQ ID NO: 14959 - DNA, 320 bp, Homo sapiens
gataattgagtttaaagggaattgtgtggcctctagcctagtcatttaaagaaggatgtaacttataacattttttttctcttatgaattctattgagagatattataagtagacattatgtatgtcacttaacataaacagaaacattattttatttgcctccagtctggctaggaaaccagatctggggtaaagtcaatgtacacttcctccttattggaatatttaagttgcatttaaactaaaactagtataatttagtcttttcatgaatgtacatacataaaattatacataaaaatattaaattattcatttc

SEQ ID NO: 14960 - DNA, 399 bp, Homo sapiens
gaaatgaaaaaaccatgactatcatcaccaacatccttgggtattaagtgcagtcactctcctagatgctgtggggagaaggcaagttacaaagatagaccttccctcaagataatcagattttcatggtattatccttaacctttttgacatcatggaggctttgggaatctgatgaagcctatcaattttcttccagaagatatttatataagattataagaaaaattatgtacacagcttattttattgcattggatcaaaatgccatttataaagaattatgccttttccatcaattttagcatggaaaaataatttcaggcaatatgcttaaaaattgggggaagacaaaagaaatccatatcgtgtaaataaaaataaattttggttttgctc

SEQ ID NO: 14961 - DNA, 75 bp, Homo sapiens
ttgcgcaggttagctgaaatgaacaatatgtccatcttaaagtgtgctttttcgactaattaaatctttgaaaag

SEQ ID NO: 14962 - DNA, 399 bp, Homo sapiens
ccagccaggggcaggcccctgatgcccggaagctcctgcgtgcatccccgggatgaccagactcccggactcctcaggcagtgccctttcctcccacttttcctcccccatagccacaggcctctgctcctgctcctgcctgcatgttctctctgttgttggagcctggagccttgctctctgggcacagaggggtccactctcctgcctgctgggacctatggaaggggcttcctggccaaggccccctcttccagaggaggagcagggatctgggtttccttttttttttctgttttgggtgtactctaggggccaggttgggagggggaaggtgagggcttcgggtggtgctataatgtggcactggatcttgagtaataaatttgctgtggtttg

SEQ ID NO: 14963 - DNA, 167 bp, Homo sapiens
gtcaatgggatgtcacctaccaaaatccaaatcctccaggaaaaactactacactaaatggaccaggaacctcagagtcaagatccaagagaagaacatctgttacaacttttcctacccagtttagcaaaacacctgttttatgcaacaatacatcacaacaggcc

SEQ ID NO: 14964 - DNA, 548 bp, Homo sapiens
ggaggggatcgggtttggcccccagccccgctcacgccagtccctcttcctctgccgggagggtgttttcaactccaaaccccagagaggggttgtagattgggtccagctttgcttcagtgtgtggaaatgtctcgtggggtggcatcggggctgcggggtggggaccccaaggctttctggggcagacccttgtcctctgggatgatgggcactgctatccacagtctctgccagttggttttatttggaggtttgtgggctttttttaaaaaaaaaaagtcctcaaatcaggaagaaacatcaaagactatgtcctagtggagggagtaatcctaacacccaggctggccgccagctggcacctgcctctatcccagactgccctcgtcccagctctctgtccaactgttgattatgtgatttttctgatacgtccattctcaaatgccagtgtgttcacatcttcgctctggccagcccattctgtatttaaagcttttgaggcccaataaaatagtacgtgctgtctgcagcccttattgatc

SEQ ID NO: 14965 - DNA, 2051 bp, Homo sapiens
cttgtaagctcctcacagacaggaaccatgttttgtctttgtactccagtgcctagtatataagagatactcaataaataaatatttgtcaaatcaactaattgattccttgtgacctaattctagagaatgggaagaaggcctgttattttgttgtcctttatggttctttaggaaagctctccaagcttggcatttgtcagggtgggaggaaaactgttgaagtattaagactggacacatggctgctaattcatcagcttatcattgaaaaagtccatagccaaaacctgactgtgcacttactataggaccctgacctgcctgggtctccctgtctctccagccagtatatttaaaggtaatgagataatgatgagtgttttgaaaaatgtttagtgttcaaatagaaaccattcgtgtcccttcactctctgaacatagtctgcaaatctctccctctctggtatgtttctgttttgtggattagactgctaaataagcgaagagttaattttgaagttcaggtcaacaaattcctgtttggagacgggctgttcctgaataccaggttgttatctgtctattacagccccttcacttctgggctcctggccctttgcgaagtacttcagaaagcctagagagaagagagggccctcaaatcccattccagcccctaaatgaaagtggcatcacaaggagaaaagtggaggtagaaatgtaccatgggggacgttgccccattgcctttcttcccctgactactgggcttcctctatcagcttttaacgcctggaagtagctgagtctccagtcactggtggccttccccaagtgagctcagcagcatgtgctaataggtgccaatactgtgctggctccagtgggattcctctctgcaaagctgctggcttagcttgactgtttccctattcctctccttagaactttcatagccagtcaagcatagaattgcatccattcttctgaaataggtactgtgcctaatttttcattggcttggccaagattctgttacctgtaattatgtcatatgggctgactggtgtaggtttggtaggcctcactgctctccagaggctagtgttcctatcccaggatggctgttgggattaggagtggaatgaggaatagtttaggaccacaagagatttggcctccttggaacatgtaggaaggcctcaaggatgtaattctagcccagggaagaaaatccttttcagcagacgcttcccttcccttcccctagggaatgtgtccctactatagtaaactcttccttaagagagttttatgttttctctgtcagatcaatttgtttttcttaatgttgttcctatcaaaaaaaaaaaaaaggaagaaatacagtcctcagacctgacagtttcatttttccccccaagtagaagcaatagaaaccttagcagttccaagactcctggcactcacttttcctctccatctttaggtctaacccagctcagcccagagtaaagacataaaagcctcacatgtgatttcctcttgcattttttctgctagaagggtccacagtacttactttatgcctcatctcaattgaagctggatgatgaggatagtgggcagtgattgcaattggggaatgcatgtactggatcacataaggtcatgaaagtccttgaaacagagccttgccaagcagaacccttgccactcatggtattcgatacagtctacccatctgacatgaaatgatattcttaatgagccattcctatggaagatagctattgccaggcacattcagtctcctggtctccctctcatagctatgtagggcctatgacctagaataaatggaaaaatgttatcaggaggaagagactgctggactcccctgagaggtagggtttgtgctaggagagctgggtgccatttatttcattttgatatatcaggtgctcctagtaacaattcctagtttctcttacctctgtaatcatcctgaatagtcactgcttcttgagctttggtgagtgttctct

SEQ ID NO: 14966 - DNA, 2865 bp, Homo sapiens
ggccttgaaggtcactcttcctgcaaggactacgttaagggaaggaactctggcttccaggtatctccaggattgaagagcattgcatggacaccccttatccaggactctgtcaatttccctgactcctctaagccactcttccaaaggcataagaccctaagcctccttttgcttgaaaccaaagatatatacacaggatcctattctcaccaggaagggggtccacccagcaaagagtgggctgcatctgggattcccaccaaggtcttcagccatcaacaagagttgtcttgtcccctcttgacccatctccccctcactgaatgcctcaatgtgaccaggggtgatttcagagagggcagaggggtaggcagagcctttggatgaccagaacaaggttccctctgagaattccaaggagttccatgaagaccacatccacacacgcaggaactcccagcaacacaagctggaagcacatgtttatttattctgcattttattctggatggatttgaagcaaagcaccagcttctccaggctctttggggtcagccagggccaggggtctccctggagtgcagtttccaatcccatagatgggtctggctgagctgaacccattttgagtgactcgagggttgggttcatctgagcaagagctggcaaaggtggctctccagttagttctctcgtaactggtttcatttctactgtgactgatgttacatcacagtgtttgcaatggtgttgccctgagtggatctccaaggaccaggttattttaaaaagatttgttttgtcaagtgtcatatgtaggtgtctgcacccaggggtggggaatgtttgggcagaagggagaaggatctagaatgtgttttctgaataacatttgtgtggtgggttctttggaaggagtgagatcattttcttatcttctgcaattgcttaggatgtttttcatgaaaatagctctttcaggggggttgtgaggcctggccaggcaccccctggagagaagtttctggccctggctgaccccaaagagcctggagaagctgatgctttgcttcaaatccatccagaataaaacgcaaagggctgaaagccatttgttggggcagtggtaagctctggctttctccgactgctagggagtggtctttcctatcatggagtgacggtcccacactggtgactgcgatcttcagagcaggggtccttggtgtgaccctctgaatggtccagggttgatcacactctgggtttattacatggcagtgttcctatttggggcttgcatgccaaattgtagttcttgtctgattggctcacccaagcaaggccaaaattaccaaaaatcttggggggtttttactccagtggtgaagaaaactcctttagcaggtggtcctgagacctgacaagcactgctaggcgagtgccaggactccccaggccaggccaccaggatggcccttcccactggaggtcacattcaggaagatgaaagaggaggtttggggtctgccaccatcctgctgctgtgtttttgctatcacacagtgggtggtggatctgtccaaggaaacttgaatcaaagcagttaactttaagactgagcacctgcttcatgctcagccctgactggtgctataggctggagaagctcacccaataaacattaagattgaggcctgccctcagggatcttgcattcccagtggtcaaaccgcactcacccatgtgccaaggtggggtatttaccacagcagctgaacagccaaatgcatggtgcagttgacagcaggtgggaaatggtatgagctgaggggggccgtgcccaggggcccacagggaaccctgcttgcactttgtaacatgtttacttttcagggcatcttagcttctattatagccacatccctttgaaacaagataactgagaatttaaaaataagaaaatacataagaccataacagccaacaggtggcaggaccaggactatagcccaggtcctctgatacccagagcattacgtgagccaggtaatgagggactggaaccagggagaccgagcgctttctggaaaagaggagtttcgaggtagagtttgaaggaggtgagggatgtgaattgcctgcagagagaagcctgttttgttggaaggtttggtgtgtggagatgcagaggtaaaagtgtgagcagtgagttacagcgagaggcagagaaagaagagacaggagggcaagggccatgctgaagggaccttgaagggtaaagaagtttgatattaaaggagttaagagtagcaagttctagagaagaggctggtgctgtggccagggtgagagctgctctggaaaatgtgacccagatcctcacaaccacctaatcaggctgaggtgtcttaagccttttgctcacaaaacctggcacaatggctaattcccagagtgtgaaacttcctaagtataaatggttgtctgtttttgtaacttaaaaaaaaaaaaaaaagtttggccgggtgcggtggctcacgcctgtaatcccagcactttgggaggccaaggtggggggatcacaaggtcactagatggcgagcatcctggccaacatggtgaaaccccgtctctactaaaaacacaaaagttagctgagcgtggtggcgggcgcctgtagtcccagccactcgggaggctgagacaggagaatcgcttaaacctgggaggcggagagtacagtgagccaagatcgcgccactgcactccggcctgatgacagagcgagattccgtcttaaaaaaaaaaaaaaaaaagtttgtttttaaaaaaatctaaataaaataactttgccccctg

SEQ ID NO: 14967 - DNA, 958 bp, Homo sapiens
taagacctccttccatactggccatattttggaacactgacctagacatgtccagatgggagtcccattcctagcagacaagctgagcaccgttgtaaccagagaactattactaggccttgaagaacctgtctaactggatgctcattgcctgggcaaggcctgtttaggccggttgcggtggctcatgcctgtaatcctagcactttgggaggctgaggtgggtggatcacctgaggtcaggagttcgagaccagcctcgccaacatggcgaaaccccatctctactaaaaatacaaaagttagctgggtgtggtggcagaggcctgtaatcccagctccttgggaggctgaggcgggagaattgcttgaacccggggacggaggttgcagtgagccgagatcgcactgctgtacccagcctgggccacagtgcaagactccatctcaaaaaaaaaagaaaagaaaaagcctgtttaatgcacaggtgtgagtggattgcttatggctatgagataggttgatctcgcccttaccccggggtctggtgtatgctgtgctttcctcagcagtatggctctgacatctcttagatgtcccaacttcagctgttgggagatggtgatattttcaaccctacttcctaaacatctgtctggggttcctttagtcttgaatgtcttatgctcaattatttggtgttgagcctctcttccacaagagctcctccatgtttggatagcagttgaagaggttgtgtgggtgggctgttgggagtgaggatggagtgttcagtgcccatttctcattttacattttaaagtcgttcctccaacatagtgtgtattggtctgaagggggtggtgggatgccaaagcctgctcaagttatggacattgtggccaccatgtggcttaaatgattttttctaactaataaagtggaatatatatttcta

SEQ ID NO: 14968 - DNA, 1007 bp, Homo sapiens
gaggcacctgctgccaacacgatgcaagcccgttgtgtttccgagcttttttaaaaaaaaatttgtagcaccgggcatggtgcatgcctgtaatcccagccactcaggaggctgaggcagggaggatccattgagcccaggagtccagcctgggcaaaatagcgagagaccctgaatctgaaagtaatgataaaataaaaagaatataaatgaggtctcgttgatgctggacaattcaagaattcagacttgaaccttaaacctaggaaaagttactttgtatcaggattctaacaattatgcttcatatttgtgaagtcctttaaaacataattttctcaagttctttctttgagacctcaatctgtcttagcattttgtaactaataactgaaattttattcaaaggaattgtaaaccttaaaccaccatttatttccatgtgaaaaagtgttatatatgacaagtgttttttgattgtaattgcgttaaatcttttgagagtgtaaatgccgggctaggcaattgcagttaatacatacaggggttagtgaagggcttattaagttgtaggggaagcaagctgggaagaatcagatcagatattttcctgacaagaaaaaaatgaccctgtagacagcatcaaaatgtggtgttcttgttaagtaattgatcgtggtctttgctttaatcttagttccgccaggcacggtggctcacacctgtaatcccagcactttgggaggccgaggcgggcagatcacctgaggtcaggagttcgagaccagcgtggccaacatggtgaaaccccgtctctactaaagataaaaaaattagctgggtgtgttggtgggtgcctgtaatccagctactcgggaggctgaggcaggagaatcacttgaacccaggaggcagaggttgcagtgagctgagattgcgccactgtactccagcctgggcaacaaagcaagactctgtctcaaaaaaataaaaataaaaaaaatctt

SEQ ID NO: 14969 - DNA, 162 bp, Homo sapiens
cacctaggcaaaacatgctcttccttgcatacgtgtacttgctaccacctcttataatgctccttttccactgtgagccaagtgaccttgggagaggtaagatggtgtttccaacaaggtgcttctctacttccaccaataaacttccaagtgagtccctaa

SEQ ID NO: 14970 - DNA, 630 bp, Homo sapiens
gccacccttccgcactggggagaatctatgcaagcctcgtcaacaccactttgcagcattcagctgctgagggattatcgggatggagagtaggagaaaactgcaaccaaggaagaatagagtcatctcacggtgacagcagagcctttccagctgtacataaccacgtcctcgccactgcacctcggcatatgccacctccatgccactgccagagctggcctagcaagatgtgctctcagaatggccgggcccaagagatgaaggaaaggagtgaaagggaagtaggaccagagaagtggaaggaagcaaaatggaggtgatgagaaaggtggtgggagaaagtcagcagatgagagacacaaagagaagtggtaataggaaacggaagagacttggtagacgagataaggaggacaagagaagggacacacccctgagagatgctcaccaagcttctatttatctaatttaaaacttgaaagtaaagccataaacaaaaaaaagaaatgttttcttccctgctcagaccattctggacaaatgtgaactgccagacaccttccatttccctttctatctgtttttcttgctagttcctgtcttctgattaaagcttcattccttctt

SEQ ID NO: 14971 - DNA, 2306 bp, Homo sapiens
gctacggaggaaccctcatttcctcaaaagtaatttatttttacagcttctggtttcacatgaaattgtttgcgctactgagactgttactacaaactttttaagacatgaaaaggcgtaatgaaaaccatcccgtccccattcctcctcctctctgagggactggagggaagccgtgcttctgaggaacaactctaattagtacacttgtgtttgtagatttacactttgtattatgtattaacatggcgtgtttatttttgtatttttctctggttgggagtatgatatgaaggatcaagatcctcaactcacacatgtagacaaacattagctctttactctttctcaaccccttttatgattttaataattctcacttaactaattttgtaagcctgagatcaataagaaatgttcaggagagaggaaagaaaaaaaatatatgctccacaatttatatttagagagagaacacttagtcttgcctgtcaaaaagtccaacatttcataggtagtaggggccacatattacattcagttgctataggtccagcaactgaacctgccattacctgggcaaggaaagatccctttgctctaggaaagcttggcccaaattgattttcttctttttccccctgtaggactgactgttggctaattttgtcaagcacagctgtggtgggaagagttagggccagtgtcttgaaaatcaatcaagtagtgaatgtgatctctttgcagagctatagatagaaacagctggaaaactaaaggaaaaatacaagtgttttcggggcatacattttttttctgggtgtgcatctgttgaaatgctcaagacttaattatttgccttttgaaatcactgtaaatgcccccatccggttcctcttcttcccaggtgtgccaaggaattaatcttggtttcactacaattaaaattcactcctttccaatcatgtcattgaaagtgcctttaacgaaagaaatggtcactgaatgggaattctcttaagaaaccctgagattaaaaaaagactatttggataacttataggaaagcctagaacctcccagtagagtggggatttttttcttcttccctttctcttttggacaatagttaaattagcagtattagttatgagtttggttgcagtgttcttatcttgtgggctgatttccaaaaaccacatgctgctgaatttaccagggatcctcatacctcacaatgcaaaccacttactaccaggcctttttctgtgtccactggagagcttgagctcacactcaaagatcagaggacctacagagagggctctttggtttgaggaccatggcttacctttcctgcctttgacccatcacaccccatttcctcctctttccctctccccgctgccaaaaaaaaaaaaaaaggaaacgtttatcatgaatcaacagggtttcagtccttatcaaagagagatgtggaaagagctaaagaaaccaccctttgttcccaactccactttacccatattttatgcaacacaaacactgtccttttgggtccctttcttacagatggacctcttgagaagaattatcgtattccacgtttttagccctcaggttaccaagataaatatatgtatatataacctttattattgctatatctttgtggataatacattcaggtggtgctgggtgatttattataatctgaacctaggtatatcctttggtcttccacagtcatgttgaggtgggctccctggtatggtaaaaagccaggtataatgtaacttcaccccagcctttgtactaagctcttgatagtggatatactcttttaagtttagccccaatatagggtaatggaaatttcctgccctctgggttccccatttttactattaagaagaccagtgataatttaataatgccaccaactctggcttagttaagtgagagtgtgaactgtgtggcaagagagcctcacacctcactaggtgcagagagcccaggccttatgttaaaatcatgcacttgaaaagcaaaccttaatctgcaaagacagcagcaagcattatacggtcatcttgaatgatccctttgaaattttttttttgtttgtttgtttaaatcaagcctgaggctggtgaacagtagctacacacccatattgtgtgttctgtgaatgctagctctcttgaatttggatattggttattttttatagagtgtaaaccaagttttatattctgcaatgcgaacaggtacctatctgtttctaaataaaactgtttacattc

SEQ ID NO: 14972 - DNA, 331 bp, Homo sapiens
aacatgtttgggttgtggaagcctatggtattcttggctattgcagctgtggctctgtatgtgttacccaacatgcgacagcaggagtcagagttctgcctcatggagtgatggcagaccttggccagcgcgagggcagatccccagtggccaccaccctcagctttgggcaggacacactgtgccagaaccctccccatatgttccatgtgtccccatctcctcagcctcagtcacccaggctgaaaaggcttgtggggagcggctgacttccatctcctgccttgtgtaagaacctgagttccttgtaattaaatatcaactgaattac

SEQ ID NO: 14973 - DNA, 759 bp, Homo sapiens
atcccaaaagtgcctccccagcctcagcccccacctccagccacacacacattacacacacacacacacacacacaaatgtgccacacccagacacgcacagaatcagacactacaaacacctgccttgggggtgaagtgaaggcccagcctccccaccccaccgcgccccaggggttggaggaccttgtctgtgtcaggacagtgtccctccctgggaatgtgacatgagggccgactggggccaggctcaggggcagaggctgggacacaaggggctggcgagggctgcgaggccagggaagccctgagtttctggcggggctgagcagtgggggagcattgtgttgtgggtgtctgtgtgtgaggtcaccctcaaactgcaccgccggccagataccctcctgaccccgaggacttggtctggtctctctggtggctacaaccccagagttttaaggacttggaaaggaaagcacaatcagagaagaaaacagcccccgaaccagcaggagtggcctggcacatggaccggcctgagcgatgtgcactccacccaagccaggctcccagggggcctgatttctctctcactgtctctttttttaaaatggttgcacggctctgccccatggggggccttttttacacactgcgaggcccagctttctaggggacttttgcacatgtcatgcagctcagctgggagctgcttaggtggaaaactccaaataaagtgcggctgtcgcagagggttggc

SEQ ID NO: 14974 - DNA, 270 bp, Homo sapiens
gggactcctcatagccctcagcccttccctcgtttccaggcctctccccaggcttgccatcagccttctttactttttgagcctctgatttccaattccctgctccttcccactccattaagaggctaggtgaggcgcttctaggttgctggggctctgctggttaaggaacaggaagcctgaccatctccctccactacctcttccctgtgctgttacacagtgtcattgttgatgttaaattaaagtcatattcttgcttctctccag

SEQ ID NO: 14975 - DNA, 1214 bp, Homo sapiens
caaggctgcagacggtgactggccctggcttcctgggtggcggtgcggactgatgtggagatgtgacagccccgatgagcacctggctggctgcagggtcctacctctgggtttcctggaagtggatttgggccaagaaggagagggagaaaggcccgagcccctgccttcccgggcctttctctcctgggctgtctctggtctggtcagcctggctctcgggaaattcagccatgagcagggaaagaactctcccaaccctggggcctagctgtataggaggaattgcctaagggtggcccactcttgtgattgccccatttcctctggcaacaaaagccagagtgttgtgggccaagtccccccacagggcctctgcagggcatggccctgatttccctggtttgagactcacttcctcatctccctgtcctctgagataatatgagtgagcacttaggtatcatatcagatgctcaaggctggcagctacccccttcttgagagtccaagaacctggagcagaaataatttttatgtatttttggattaatgaatgttaaaaacagactcagctgtttctttccttttactactaccagttgctcccatgctgctccaccaggccctgtttcggatgccaactggcccactccccaagcacttgcccccagcttgcgaccattggcactgggagggcctggcttctgggctgatgggtcagttgggccttcataaacactcacctggctggctttgccttccaggaggaagctggctgaagcaagggtgtggaattttaaatgtgtgcacagtctggaaaactgtcagaatcagttttcccataaaagggtgggctagcattgcagctgcatttgggaccattcaaatctgtcactctcttgtgtatattcctgtgctattaaatatatcagggcagtgcatgtaaatcatcctgatatatttaatatatttattatattgtcccccgaggtggggacagtgagtgagttctcttagtccccccagagctggttgttaaagagcctggcacctacccgctctcacttcatctgtgtcatctctgcacactccagcccactttctgccttcagccattgagtggaagctgccccaggcccttaccaggtgcagatgcccaatcttgatgcccagccatcagaactgtgagccaaataaacctttttctgtat

SEQ ID NO: 14976 - DNA, 956 bp, Homo sapiens
gaatccatcctgcacctcctcaccatggaaactggcaagcctcataaacgaacagcagtgggtgctgaaagcagcaccaaatggagatttggattccagccccccagtgacagcccagtgggaagaagcaaactccagatgggcagaaggcagggtgcacaggtggctccagtctcaggaggatgcgcctcctctcccccatcccagccctcagcattgtgccagagtgatacccttaagtgtttgggtttatgttttcagttttgtttgggaaacagcagttgcacagagagttgggggtactgctgctgccttttcaccgaggcactgccaccaccagctctagcagggatgctcctgagcttggcggacatacttagatcctaacgtgccagtgagacctggctgtggagagtagcactggcagccctgcctggactccacttggcatgataccagctccagaagggaagggagtggagcaggcagtgaggagagagcctgggggtcggctggggacagccgtatgtgctaggtaggagtggagggagatatgtttaccaaatgcctgtcctgccatcctcccaggtagtcagagtgagctacatcctgccccgccttcatttccatggaaacatggcagctaggacacggggtacaacagcagccaaattcttccccacctcccttacttcgaaaaaaagtttggaaccctggtccctatactctgcagtcagaagtgggactgagccatacatgcccttgaattcctccctgtctggccctccctctccagcaagcagggttttctttaacttggcagtgtgcagaggagaagtggtaacacccccaccccattcccctgcatcggagctcagtattcctacagggtaagaggtaggaatcttgctgggacgaggggagccagaagtggcaataaaagcgtgttgacctgg

SEQ ID NO: 14977 - DNA, 1091 bp, Homo sapiens
gcctgcagagcaggacctgggacaggaaagagaggaaccaataccttcaaggctcttcttcctcaccgagcatgcttccctaggatcccgtcttccagagaacctgtgggctgactgccctccgaagagagttctggatgtctggctcaaagcagcaggactgtgggaaagagcctaacatctccatggggaggcctcaccccagggacagggccctggagctcagggtccttgtttctgccctgccagctgcagcctggttggcagcatctgctccatcggggcagggggtatgcagagcttgtggtggggcaggaacggtggaggcagaggtgacagttcccagagtgggctttggtggccagggaggcagcctagcctatgtctggcagatgagggctggctgccgttttctgggctgatgggtgccctttcctggcagtctcagtccaaaagtgttgactgtgtcattagtcctttgtctaagtagggccagggcaccgtattcctctcccaggtgtttgtggggctggaaggacctgctcccacaggggccatgtcctctcttaataggtggcactaccccaaacccatcttttgttctcctatatcctccttcttctgttccatttcagttcagtttcagcggtgccaacctctttgcgtttcctttttgttgatgaggacccagagctgctgcacacactcacctctaaccccctcccctcgctgctgggccccatctccacaggagagactggttcagctctagggcctcagtctggagtgggataggagcagtgagtgacaaagcctctgaaagatgcatcatctcttcctcacacccatttagtgggggatgggtcctctagacttgaggggctaccctgggaagctgccgtagcttcagccaggcaagaaagcttccttcaacctgcatagccggtgggtgaggagattcccaccttccatagcctccaaacatgttcccaaggccccactttcaagaatcagacagcaggaagccatagatgctggctgggttccaggttatggggagaagaaatacagtcaataaaaggtttttgtat

SEQ ID NO: 14978 - DNA, 3165 bp, Homo sapiens
gttcctgtaactcaaaccagaatttttaaggaatagaactccaagccttttctccactactatacaagaaagaattcagcaagctgcttctccaatcaaagctgcctgccgtgctcaccctgtgtgttaggttatttatttattaaaatcaagaatcctgtgcctgtagtgttggcccagagtgtggttactgccctgagggccatgaaagccacagaggatgggctgaggaaggaaagaaatggggttactgctcccagtgcatcatttgcatcattccccattgactgaatcctcagcagtggccgtttttcctcttgtccaggctcacgagttagtccagggattccatactccctattccctggagttttctggaataaattttcagcacctgcttttctcagcttggcccttccccgggtgaggccgtttggaattaacatggccagtgtttcacacaagattgggttcccaatcttgaccatcactatcactgccttctttatataaaggctaataaggaaggagtgttatttatggctttgccaagctacatcaagaactcagctgtgctgtgcctaccaggggtctcctttcttacccaggactcctttcttctccttgaatatttatgtccattttaacacttcctggttgcaagagggatgtgcctccattatttcctccacagttttggtatttgtcagacatttgttctgctgtctttctaatccagccaacgtctgctcaggaagtggggccagctccactgggacccatagttttacttccttgtcatttgattggatagtttccaaggaagcccctccagattggcactatctcagaaaaggagagcttgttgtgaaacactgcttcctgaaacttcctgctattgcctaaagctacgtctgaaactgagtagggaaaggcatacttttccagggacttagggggataggctttggaaatgggacaggtctttcagactcacagcttgataccctaacaaagcagagtatatttatttgtttcccaggaaggccattgcagtttgactggctgagggatacagagatgaaattgtaaactgtatccagattatcaaagctaatttgactagtttgaacctcgtcagacattcattcctttggccattgccatggatgaaaccgagatctgcagtctgatctgtggacttctctgctggcatatcttttatgatttaacctcttccatttgatgattctgtatttcagagtcagtttcttgagtaactccagtgctacaaaaagaattagtaatgtggtgtgggcagcgtgacattttatgtcccacccaaaaattggattccttttggagactgatctgttggtctcaggcatttcattaggaccagattggttctaagagttagtctggactggccctaggaaacttgaattaaataagcctcttccccttaccgatcctttttaacactctcaggtttgtttgtttcccacttttttcctatgctggtctgcctcaaagtctcaagaccaaggtgactcaagataacaccagaccacgcatgatcaccaaaaccttcccatcctgattctcttcttctacctctaccctctccaacttctcctggtcttcacatatactctcaaagctagtctgaaagtgaccttactttcggaagtagggaagtggaactttggtaaatgactgtttgcctcatttaatagtatacaggctcagcccatagactacagttcttcagaggccatatgtctcagcaagtactggttatattctttttttgtaaggaagatcataaatgctaaaaattccactaagccattcagttcttccttttgcctacctagtcctgatttttgtattaattggttccctttagcaagggattcagatctttgtaccttatcttatatccagagcagattccatttggcagatagatggtctctagcctattgtattcttagaccaaaaatcataacctgctgtttctcagcaaagccttgctctctggagcttactatgtgctggtacttaaagagtacattctgccttgctgtagtgaagagacccactccaaataaaaaaggggccacacggggcttctaagttaggttgccagtgttgctgcccatgatgagttatttgcctctgagtttcagatgacctctctgtagggacactgtgttatcaaccattaagaagaaagaaccacaagcctcccaagtatttgggttctatcttagggttgaaatctggtcattattccctctacccttggaatcagagcaatgtgtcttctttcctccaacctcttaccttagatgcatcctggttatctggaagcatgggaaagaaggctacttatctctttgtatgtggctccagtctgtgaggatacataacattttctctacaatgaatctgtgctaatattttgccttctttctttcttttcttttcacccttagagacagggtttcactatgttgcccaggctggtctcaaactcctgggctcaagcaatcctcctgcctcagcttcctgagtagctggaaccacaggtgtgtgctaccgtgcctggcacttttttgccttcttaatggagatattcagttttctttttttcatttaaacaaagaaaaaaaatgtatctactctaccttccctctgctctcctccctccctatcctacttgcccatatgagcacggctccccatggccacatactcctgcaaagcttttatgctgcttcgcttttctctaaacagatctgatattgctgctcctgtggttttctcaaaattaactttgccgtggtttttaaaaaggaatcaaaatgcattgttgcattaagctttttcaataaaggaaaattacggaaggaaaataggcaacaccagcaaattatatgtggacaggttctaaactctatatatacatatatatatatatatctatatatctatatacgtaatcatctagttctgtcatcttactgaaaggaataacacttctaaagatcaccatttctgagaagttcttggaaatctttatgtctaagtgattgtattagatcagcaataatgactatgtaatctcaaaaaacaaataaaatattcttaacatgg

SEQ ID NO: 14979 - DNA, 2567 bp, Homo sapiens
ctaagttcttgtcaacaagcatcaatagatagaggtcagctccaataaactgtgctctgcctaccctgtccatacaggcgctgttaccagttcagggctcttctgggggctcttgggcctaaagatggtgcaagggtgggatcctgaatcacaataaaatgatcaacttgccctggggtcagttgggtgcccagttggccttggaaatcttttggtggatcaattctagacaagctctttggtaggaccttttcctgctttagtcttggctacaaccaggctagactttgctggctctaaaagaggaaatttgttatggcatttgacccatggcattcatcacagatagtgggaggtacaagtcataaaatagggagaaagttttcttcttgctcacactggattcctaggacttatcagagatttggaaaaaccaactttgaaattaagtttgcattttaaatttcaaatttggaagcctctttctgaaatcattagctctaagattattttagagcacctgcaccttctttgtgaaggatgatgatttactattccctcaatactgcatgttatcgaaaagtgtgttgtgtaaagtgtttttttcctcattctgtaagagatctatattcaatgtgaaaattatttccttgtgtactctgtatagggcatggaatgctctgccatttttaaagagccacaaccaatatgaaataattaggtcctctctaaggatgtttcatgtttttcttaaatgactccagtcttcaaatggctgagcatactgcagaaaattatccttttcatctaattcattttttaaatgacaagttaactacaggaggctttatttattcagatggtatgtccacttgtggtcgtgatcaatatatttttctaattgaaaagtaaaagcatcacagcttaccatttttctttttctgcagtgttgattaatgatttttttcccgtttattgctagcagtttcaaagtgtcatgtggagatttagcaatactgtctctacttaaaagtattgcacatttcattgaaaatgtgagagttgatataccagcctctttatatttctcttttacagcagaatcacatacttctcaagataaacaaggtttttaaaaaagtttctgatttagttaggatcatatgcttttttttttttttttttttttttttttttttttgagacagagtttcgctcttgttgcccaagctggagtgcaatggcacgatctcggctcactgcaacctccgcctcccgggttcaagcgattctcctgcctcagcctcccaaggagctgggattacaggcacgcaccaccatgcctggctaattttttgtatttttagtagaaacagggtttcaccatgttagccaggctgacctcaaactcctgacctcaggtgatccgcccgcctccacctcccagggtgctgggattacaggtgtgagccaccatgcccagcctcttcaagcttttttactatacatgttgcccctctcccccaacttaggcactactgaattttttatgatggcaccaggtcactttatgctgggtgatatagtcaaaatttgcttatttactctgcccctcgtcaaccacagtatcatttcaaggacatgaataaaatacttgacagtatccaaaggagctataccaaaatctaacaagtaaattttggattttgcctctttgtgctttaaagtaccaggatttctgtctctatggataggtcttggagaatgttaagtaatggatgaaactttttaaaataatttgtaaattttacctaagtaggacagtagtccttactgcaatcaaaataatttactgagcacaactcctgtaaattaatctacagtcaggctagtatgattttaatatgatttgagtaaaaagataattttcaaggaaagagtaatcatccatcaatttattataaagccagatagtattcaatttatgtcaagaacaaagaaattgcccttttaaaagcatgtacgtgaatgctttttgaggcacagaagtatgctaagctttaacattttgtatttatttacaacccttttctaagggaaggttacttctcagtgcagatggagaaactgaagcactaaggataaatgattagtttccaatcacatcatttttttccacagacttgctgggactagctttcaggtattgacagccagccccatatattaaggtaaccaggttgaatcttccaatttgagaacccatgtatgggttgcagtgagccgagatcatgccactgcactccatcctgggcaacaagaacgaaactccgtctcaaaaacaaagaaggatataataaagttaatatataaaccatgtatgtggttaggaataaattcaaattcaccagtctccaatggtgattacttttactacatagaaaaacattttagtgacttacagaggatttttatttgtgaatatttcagtaaagtttgtgttgattgttgataacactgttcatctactgaagcactttaataaaaataaaatgagctggaattag

SEQ ID NO: 14980 - DNA, 1899 bp, Homo sapiens
catacagccatattatggcatcgttttctagtctacttcaaaattttttacacgtttgcagaggtgcaatcaaatggaattaagtctctcgactttggaaggaaagttttgttaacctttttttttttaaaaggaagaaagcggattttggaattgcattttttaaagcaccactcttgattttctgggattggtgaagaaactgcattgtcaatttcactgtcccaaaaaagccaaattgtggcaggacttctttctgcggaaatgtgtgtgtatacttatgtgtgtgtatgtgtgagtgtgaatatatgtatatgtgtacatatggacatacacatttacatatatataaagtatatatatacatatatatatatatatatgtatgaaacccgcatggaattatctgtatgaaatcaaggtgcgctgtggaaacaataattcacccagtttagtgggtggtagggtacgtggccagacacagtcacccagtttttgttcataccagggtcatgcgttgagctactgacaaactcaggcggaggtgaccatgcccttcaccaaagctgcctcccagtggccacacagaactctccctgctggactcacctgaggaaagaggctccagcatggggtgggtcagagatgtgcttgcaaggtccagggactgcgtggtctgccagctgagatgctcctcgggctggcccaggtgctgaccttgccacaggcagatgaatgtcttgaaagctcccgggcctcagcctcccatctcctctccttcccaggaatccttgatctcatgactattaaaatgttgctctggttttaaggtcagtcctgaattgctcgtatatatgaactgaaggtaaccgaagtattaggggtttgaggagtgcgtgcgtgtaagtgtgcttgtgtgtgtgcgtgcatggtgggggagaggatgggaagggggcgggggcagtggaagggaaaggaaggaaagaaaaatcgtcctagaccaggatacacccgtgggagcaattttctctactgtctgtagcttcacagaggaggcgctggaatgaacaagaagagacatctggtctgtggccacagcaccctgaacgcccctgatcttgtgtgatcttggaagctaagcttggttgggcccggtcagtacgcggaagggaagaagggacacctggccatagaaaacagctgagggtgtttgctgtgttcctggatcaggccctgcttcagaagggactcctggaggcccatgttccttgatgcaacctcgtggcccaggccgggagcagcttgcctcctcagaggtgttgactatctgggtgttcttggtaaccgttaactctgtctttctcagctgcaagccctgagtctccagtagctgaattcacctgacttttcaacaggccaaatctctgaaccttgagtacagggacagctcctcctccctcctcccagctctccccatgtgtgtgatggtgtatttaatgtgtttttttaatgcgacattaaaagattctccacgtcttgctcaacctttgagagaagtttcagattcttgtatttgcttgttttatataaaactatctaatgttctttatatgttcttttctgtacgtaatggggggaggggagggaaatttacatataaatagtcctagttctacaatttgttatttttttaattattattttttatcgtcattgtgaagttgtccagggactttaaagtccatgttcctttgtggtgaaataacctccaaatagtttgagaagttgccaagacgaagaaaaaagcaaaaccccagtagcagagcatggattctgtgttgtttcccattctgtctttgactgcctcattcaataaatagttaaaaatgtggcaacagg

SEQ ID NO: 14981 - DNA, 3007 bp, Homo sapiens
ggatttctggactgttcattgatactggaaatgttaatttaaagagactcctttatttatgggcagtgtagaatgtgctacaaagaggattggttaccctgatcaaggccttatttagaaaatacatcagatgcctttctgtaaattggtttttcagtttatggacatctcactttcccacgtgcttccttctttgcttctgttcctcctgacccattacatgcacatgtactcacatactccctcttccttctcgatggagttaagggaaagcctgaaagtaccttaataatgttattaatcaagacagattcctttttaaaggaattctgaatagttccatgtcatacaatattctagaaattaaaacatcatcaacataaagaaaaatgaaattaaaaaatttttacatctagcaacagcaacaaccacaaatttaggggaagctgagaaggctaaccttgggaatcttgcaggttatacttaaacctagatgtttaacttagtgttttcaagatgtgtctaactgagtagtagctgggtctgatggcagcagtgcttgccatcttgttgcacagataactcaaacctaccctttggctttgaaggaaggttaagcagcccagcaactcttggttagtgatttctttctcatcctcatggtgccagcagtggttagagttggtttgtcaaaagacttacgtgtgtgtcgtggtcgtgctctttgttgttgctcttagaaattatggcaccaagaatgtttcaaacggaaaaacttgtggtggccaaagttcttcattctggcagttttgaaactctcttatgcttattaatggttttaaatatctctttgacttcttcatggggaattgtagaccctaagtatgtggtgtaaatgccatgtaacatgaacacaagctcccgagggaggccagagaagagccaggcagagaaaacctgcatcctctgggcttgttaacttggcttccactcgggctgtggtctttggctatcatcttggccatttccttttgagaacttgtttcttttctaatctctgggccaggtacctgccattttctcaggcagttggtccttgatttttcccttagcttgttgccttcttttccgtctgctttaatgtgcatggtgctgtgaataattgtctagtaattggatacaaggtcttgggggtaaagccacaggtcatccttcctgaagaaccaagtatcatttaaaaactagcatgaggaaggaatgaaactgagtagcattcattttgtgtgtgtgaaattttagttctggtttgtttgatttgttttttttttaattctaaaaagaatgacataaattttcactcgctttgccatctggctgctaggggagctgagcaagaggctcaccatgcgcatgtgtaagccgcaggtgtactcaaggtgctgaaggcgtgcaaggggcagcgctggtcctcccggggccaactcacagcaggagactcgcatgggagagttggaacacatctttcctttaagtgcctcttttttcacctagcttttaaagttattctttgtccttcatctcagaagggatctctttagcttatgtgtggatttaaaatgacctttgagctacggttaaaaagctaccatctggtgttcagttctgggaaagagaaaaccgtagcctccagacatgctcctgatttctaggccttatcataccatcccctctgtgatgggttgagttcatggagcctgtattctgggaagtcttataataaccacgcacctgtgaacgtgggtcctttctggggagtgaggaatgtgggagagaggcagaaaaaggagcagctcctctaggggcccatcctcccacatcttgccattaccagtctgtgtagcacttaacctcctgccaccactgccaggcttgctcctccgttctctcccagagcaagtcagtctgagcagctccattagtccaaaacagagctttgctgcatgacttcagcctggcctctggatatttggtggaaatatattctaaattgaacaagccaggctgtccagggtggcaagaggatttttgacctggatttatacagggaccaaagactgaatgctcagcctctgtgcttagactttcatggtccttaggatagaagtgagtctctagccctgctacaccagagagctgaagagagatgtggtctggttccatccatacttgctggcatcctttgttaagccttctgagggcagtcttctttgaggtagaccttggaggcctgacatcgaagacctgtgtgttttattttcataaaagtatatatccttggtctaaagtgtcttcttttaatataacactagtaaaaatgacatggtatgaccagcactgagtgctatagaaccacacatgtgtacatgttctggatgccaaatgagactgtgtgtaaatgactaagtgtagataactagaaattagataggggtcatcaggcgtttcggtatacctataaccagcactcggaattcctgacactgtttacttgatttaggaaagtttatgcctgctgcttctctgcctctttgaggtactcccagccgtcttactacagtcctgtaaatttaagtgcaatatatagaaacatatggatatatacagattatatatagggtgtaactataaagcaggtagactacttttttgcatcttggggaagtgagctcattactttaggttcaaattatgccaagaattttagatgtgatcagctggcttaagccaactcatgtcatgataaagctggattttcaagtccatgttttcttactccaactcttagagactcattgttccttaggtttgttagagttgagattttttttctccctgtcatctttgtactctctcatgtttgcatgtcttacattttgttgccggagaacaaggaagtccatctgtaaggagtttcctaaacggagaattaaaacctagtatttaacac

SEQ ID NO: 14982 - DNA, 1187 bp, Homo sapiens
attttatcacgttcttccttcacttgaagccaaatgaaagagatgaataaaacatgaaaaatcaccagagctataggtgaggagacttttacaacaaagtctctctaccaacaaacaaaaacatacttggaacccaagaggtaaaatctcacacaattcttcgttcaaaaaaaaaaaggccatcacgtgtttatggcaccattggaacaccaaagatctatatctgctatgatttttttatttgaaatagcacaagacagatattttgtgccttgagtgtatatattttgtgccttgagtgtatgtattttgtttatgtctgtaatatgaataagaaagctctttgaaaatgtattatttatgttgagaaaccacttaaatgtattcagatgttttgcttatctgactgactgaatgaactaggtgaagttggttggaatagaattgccccatcctctctaggtttgaccctacaagaactgtattgccacacatgtcagctaggggctggtgtggaagaggagctcaagaggctggaataagatctgattcctggagtagggaggagaggcagcatgacccagaaggcagttggcagtgggctacccacggttgtcatccacaaagtgcatggcaaatgttaaaggaaaaattattctgacacttgttaaaatggccaggaggacttcattcaagactctattgcaatagagagtagaaattgagctccactctgaatacaacaaggacaagtggggatttatagccaggagcaggaggaggacatcacaggatgggaaattaccaaagagagacatcaaacataggagtattcctgataaagtgacctaacaggattcatgctaaaggcaggccaaggacttacacatcaaaagtggagaatgaggccaggcgtggtggctcatgcctgtaatcccggcactttgggaggccaaggcaggcggatcacctgaggtcaggaatttgagaccagcctggccaatgtggtgaaaccccacctctactaaaaatacaaaaattagccaggtgtggtggcacatgcctggagtcccagctactcgggaggctgaggcacaagaaaagcttgaacccaggaggtggaggttgcagtgagctgagattgtgccactgcactccagcctgggcaatagagtgagactctgttt

SEQ ID NO: 14983 - DNA, 48 bp, Homo sapiens
ggccctggggaagaaacaagagccattaaaatctctttggtttgaagc

SEQ ID NO: 14984 - DNA, 1497 bp, Homo sapiens
gcgatggctctgctctgtctacatttatttgtacccacacgtgcacgcactgaggccattgttaaaggagctctttcctacctgtgtgagtcagagccctctgggtttgtggagcacacaggcctgcccctctccagccagctccctggagtcgtgtgtcctggcagtgtccctgcaagaactggttctgccagcctgctcaattttggtcctgctgtttttgatgagccttttgtctgtttctccttccaccctgctggctgggcggctgcactcagcatcaccccttcctgggtggcatgtctctctctacctcatttttagaaccaaagaacatctgagatgattctctaccctcatccacatctagccaagccagtgaccttgctctggtggcactgtgggagacaccacttgtctttaggtgggtctcaaagatgatgtagaatttcctttaatttctcgcagtcttcctggaaaatattttcctttgagcagcaaatcttgtagggatatcagtgaaggtctctccctccctcctctcctgtttttttttttttgagacagagttttgctcttgttgcccaggctggagtgtgatggctcgatcttggctcaccacaacctctgcctcctgggttcaagcaattctcctgcctcagcctcttgagtagcttggtttataggcgcatgccaccatgcctggctaattttgtgtttttagtagagacagggtttctccatgttggtcaggctggtctcaaactcccaacctcaggtgatctgccctccttggcctcccagagtgctgggattacaggtgtgagccactgtgccgggcccgtcccctccttttttaggcctgaatacaaagtagaagatcactttccttcactgtgctgagaatttctagatactacagttcttactcctctcttccctttgttattcagtgtgaccaggatggcgggaggggatctgtgtcactgtaggtactgtgcccaggaaggctgggtgaagtgaccatctaaattgcaggatggtgaaattatccccatctgtcctaatgggcttacctcctctttgccttttgaactcacttcaaagatctaggcctcatcttacaggtcctaaatcactcatctggcctggataatctcactgccctggcacattcccatttgtgctgtggtgtatcctgtgtttccttgtcctggtttgtgtgtgtgtgtgtgtgtgtgtgtgtgtgtgtgtgtgtgtttgtgtgtgtgtgtctgtctattttgtatcctggaccacaagttcctaagtagagcaagaattcatcaaccagctgcctcttgtttcatttcacctcagcacgtaccatctgtccttttgttgttgttttgtttttgtttttttgcttttaccaaacatgtctgtaaatcttaacctcctgcctaggatttgtacagcatctggtgtgtgcttataagccaataaatattcaatgtg

SEQ ID NO: 14985 - DNA, 133 bp, Homo sapiens
cagcacgactgagggcaggaggctccatccttctccccaaggtctgtggctcctcccgaaacccaagttatgcatccccatccccatgccctcatcccgacctcttagaaaataaatacaagtttgaacaggc

SEQ ID NO: 14986 - DNA, 96 bp, Homo sapiens
gctgaccctttgacacccttcttgtcctcctctctggccccatccaggcaaccaaataaagtttgagtgtaccaggaacagaatcctggggcttgc

SEQ ID NO: 14987 - DNA, 1232 bp, Homo sapiens
gctggaaagagtagcttccctgtattacctcccctactcccttatgtgttgtgtattccacttaggaagaaatgcccaaaagaggtcctggccatcaaacataattctctcacaaagtccactttactcaaattggtgaacagtgtataggaagaagccagcaggagctctgactaaggttgacataatagtccacctcccattactttgatatctgatcaaatgtatagacttggctttgttttttgtgctattaggaaattctgatgagcattactattcactgatgcagaaagacgttcttttgcataaaagacttttttttaacactttggacttctctgaaatatttagaagtgctaatttctggcccacccccaacaggaattctatagtaaggaggaggagaaggggggctccttccctctcctcgaatgacgttatgggcacatgccttttaaaagttctttaagcaacacagagctgagtcctctttgtcatacctttggatttagtgtttcatcagctgtttttagttataaacattttgttaaaatagatattggtttaaatgatacagtattttaggtatgatttaagactatgatttacctatacattatatatattttataaagatactaaaccagcatacccttactctgccagagtagtgaagctaattaaacacatttggtttctgaataaattgaactaaatccaaactatttcctaaaatcacaggacattaaggaccaatagcatctgtgccagagatgtactgttattagctgggaagaccaattctaacagcaaataacagtctgagactcctcatacctcagtggttagaagcatgtctctcttgagctacagtagaggggaagggattgttgtgtagtcaagtcaccatgctgaatgtacactgattcctttatgatgactgcttaactccccactgcctgtcccagagaggctttccaatgtagctcagtaattcctgttactttacagacaggaaagttccagaaactttaagaacaaactctgaaagacctatgagcaaatggtgctgaatactttttttttaaagccacatttcattgtcttagtcaaagcaggattattaagtgattatttaaaattcgtttttttaaattagcaacttcaagtataacaactttgaaactggaataagtgtttattttctattaataaaaatgaattgtgac

SEQ ID NO: 14988 - DNA, 8903 bp, Homo sapiens
ctgaagagtcactggacacagaaatggaaaacaggagtcgattttccgtcttttggattgcagctccactgactgacagtaaagctgcagtgattgaggactgcaccagagttctgaagggatcttaaccatcacaagtttttaccctcttccttcatgcctgacctcaaccccgctctcctcatcctattcctaaattaggctaataaagtgaaattggtatactttccagttaaatatatatatatatatattttttcttactttatcttttaagaattaatgagtataaaagaaaaattaggcagtttacccttttcagatttttatttcttttttttttaattgggggaaataagcactattaacagattcagcactacaagtattttgaatgttgttgctgttggtcatttggcctgccttttcccttcctatttcactttgcctcccatcacacaactgcgtgtaaatggtgtcacttgttcacctctttacttcattcttaacaagtgtatagttctctaggacagttgatgtatgttaaggtgatatctgtgtctgtattgacttgtcttgtgttacattaaacagtaggcagaactgaggtctcaagtttgcactcttggccatagaactaaaaatgaaacctgagattgacccaagcacctatctgagattggtatataatatttctataatgatatattttatagtagatattacaatagcatctgactttgagtcacagaaaccttaaactgaggagacaatagttcagaacctttttaagagccattctaaaagtgaccagcaggagggatctagtagtgaataatatcttaatagcaattttaggagaaaatgactctttcgtccagaagagctctgcagaaccagggctcccgtttatcttgtgctatctctgtagtattttcatttgagagaggaggctgagtttccagagctttgctttcatttatttttatacacattgtctctctatatctgcttgtggatattgttattttgaagagaaatggtttgtggttgtccagtggtatacaactgacaggcatttcattaagcacatagaccagactttgtgaatggttcagatattttttcattaaaaaacaaggtatggcagatggacttttccatgggtcaaattttttgtgtgagagatagaggtacatgtcttctgatgatgtgctgtggaatgcaatgtgggaaacctacatctggctagtgcttacatttgctcaaaaagcatgttgtatgaagctgactgccaccatgctaaagcagattcatattaagaagtgtcggtcgatccagtggctcttaagagtgaatagctttatggaatcaagtatgtccctgagtagcaagattaggcctcaccaaagaagaaattaacctgcactttcaaaaagtaccatgtataggaatgaaacattgaggtcccactttattctgtctttagtacatggttttacttattttggggatggatagaaatatatttttgctagttctaggcttgaatcatgggctccttggctttcctagcatcccaaagcagtcaacagtgatttcttaagcaatttgatctgtacctttacttgtgaaaggtatgctatataattcagcaagtaccaacttgtgtagctgcagaataaccaagtggctatccagtcaagtaaatacagtttgcttacatacttcaacagtttcataaaacgattcccctgagtgacacaagaacataaaatgttaatatcactaatatagcctgttaaatcttttgtggagacaggtgcaaatcagaagattgacaaggaagaacttgagcttgctaaataagacttcctaaatttaaaagctctagttttgcttagtgtgaattctggcactttaaaaagattaagcaagtgaaattctgctgccctccaccatttatttttacagtgctttgtaatttttttcatcagttccttaaatgttatttggaggaaactaagttcttgacctcagtaattttatttttgtttttccctaaatgtttccctactagtctttttggaaaacatgtttgttttaatttcatcttccctcactttatttaggtagaatttttcccccttcatttctgaaattttttgctcaccgccatgtttaaatggggttgaatcatagcgagccatttgctcttgccaaagtgagatagatgtactgaggagataattgaaaagtcagactctgtactgtggggctttaatcggagcactgctggaaatgattgcagagaatgtagtgcttcatatatccatgaccaagattgacatgttgctcacaacatgtcacaatttagtgaggagctacatgtatttccaagaattccagcatagattataatttaaataatcgaatttggtatttaggtacattgtttatatagccaagtgtatatgctttactacctaacaattattctagcctaggtgaatccctaattgaaacacctggctaacactttagacacataaattaagtgggatacagttttctcatttgtattatctccagcttcaacctcatttatcctttttcctagtataatacattgttttcaaccagaaattaaagtagatatccaacattattttcagtgcttgtacttcatgagaaataatctgattttcaagacacctcttaagtgcatttgcattttattttggtaatggcagagacctcatgtggccagtttgattgattgaagaatgtatcactcttattcaagcaaaggaattcagacttaaatgcctacctctgtgctgaagctgacagacagtattaactcttatcaaggccatcttttagacctgattttcatttatatgaaaacagacctgtccatgtctaataagtaaaaactgatagaatacattaaaaagtcactggtttatcatagaaaagtttgatgggtttagagctcagtgatttaagcttgtaaaactgcattcttgggcaaaatatttatattgtatataaatggttggcagcttattccagttgatctcttcacatctgccttaaaagtgctatgtagagatacattaacagagttataataaaacagtgttttaaaatctagcctataaacaaaaactagtttgaggcacccaagcatttagtgagagattgagaatgatgcttaatggatcaaaaaagcaattaggagtatgttcctgattttattctctaaattatactcaatttcatggtaattacatgaagaagttacctgcaattattcttaacactacatggaattcactgggtaattgtgggtcatttatttcctgaaagtcacgtgaaatccttagctggttgaatgttgcacagtatttgagaattacggtttgaagtgatttctgtgggagggaatcattgcaatgtatattctaaataaagtcatctaactattaaaaaaaaaacacccttcctaacccttcttttcttaaaattccacattcatccacaatctcatccctttgtagaaattcttgcctgaattctcaccaagttttgaattcctaaggtagccccgatctaggatgtgaaggctgcccagaaaaagtttatggctggaggagtatcatacagtgtctacatatgatagtacttacagattaggtctttggatgctttaacacaaaagatttttgttatccttattagtcaaataacgctattcttttgtggttctagaccctggcttctatctccctgtgatttgttttaatgctgaaatgacttggctatccaaagcttctagtctagaggtctgttggttgaaggcagacatttccaagtttgttgaaataatacgaagctgactagcttacgtgaatgatgttgccctcatttgttttgggtgaggactcattactgcagtatattgatctcttcaccaaatgctttttctttttctgaataaatgctgtattagaggttctatttatatatgatttttaaaactttggtttccttctatccaccaaatactgtgaattgtttttccatttatttttcttagctaatgtaactttattcttcacttttttttagccctagacttcctagattttctgtggcattctgtaggacattgtattgcttggaaaaaaaaagatcaaaatcattctggggcaaatgctctattatccttatttatgacaagagaataatgaaattcataagaaattaataacattcagatattgctataaatgtacttgagtcattttcatttggggatagtaataatggctgtggcagctttaatggagaaacctgtgttggcctctttttctggcattaggatctcttgtcatagaactattggtaaagtacaggtttgatagcagagttcctgaattcagcatatcatcagaatttccatttaccttttgtcttttctttttattgtattttttaacctttttgtttctattcctacctcccatgagtaacattgatttctgctgaagttagaatttgtgttaagaattgactttaaacttctgaaatagttgaatattagaagtggcttcagttgccatgaaatgattgcttttctttttctttttttttccttaaataaaaataatgcagccttatatatgtctcttcccctcaagaatgtgaatttaggctgggcatagtgactcacgcctgtaatcccagacctttgggaggctgacacgggaagattgcttgagcccaggaatttcagaccagcctgggcaacacaggaagactccatctctacttaaaatatttttgttttttagccaggtgtggtggtatgtgcctgtagtcccagctacttgggaggctgaggtgggaggatcacttgaacccaggagtttggggtgcagtgagctatgattgcgacactgcactccagcctgggcaacagagcaagaccctgtctcaaaaaaaaaaaaaaaaaaagaatgtgaatttagctccaattccaaatgactaactcttaggccagtcatagccaatgaaatcatctgacggtagcttctgtagcccttaacctaaggagtcattagaggttatagtaaattagtttctctagtggtgcagagagaaatgccatcggggaaattatcactgtctttttggctaaagttttatattgtgaactggatcccacttaacagcttaaaaacacaaaaatgaaagggtagtcctagtttatcttcttaattagaatcattatttggaaataagatttgcaatgtgctgtctatccccaaacactgctgagcttgctggaaaacagaatttaacatgaatgttgtctgaaagctgtaggatcaatggcaaaaaaggggaaatgtttggtagggaattggaccagttctaaggtatcacttttaattataaaataatgtcttcctttttatctgcttttcagacagcctcagtgaactattaaacatttgtgtgcaaagtcctattttgcttatctaaggcattttgacttggaagtattaaacttcaggaacgagctagagaagacaatgagggtatgttagagaaggaaaaataggagctttttgcttatggattttagaggtccacaaatcgaaaggaaaaataaatttcttcatttctaaccctaaaataattttgttaatgagatgctgggaagaagactaccaaaaggcctcaaagctcatgcttctagaatattcagtaattctgaatagtctttgggaagtagcatttcttgggaagtagcatttcccttcttccaaataactgtttgagatcttaaaacagaaaatccagtgttaatgggctctagatcttaaactaggtgagcagcttcttacatacaaccagttccttgttaaggatccagcaggaaaaccagccataaaacatttcaacatgcagtttgggggctcccttgcttattcactgagtttaagctcttgctgcaacatagctctgtaccatctgggatgctagcagtcacagcagttagctcagatatctgagctgtctgccacacaaagcctgaggagatcatcattcttcagtttcattcattacttaatgaatgccaaattaattggcaggaagaagaaacactgtgtgatatactgaacaagcctgtgtgcatgaataaggagccactcaaaaagccaattttgagctttatttctccgttgttaacaaatctcaagaaagcctttgttacagtttagctcatgtcatttggttggttttattttctagccctttaacataggaggaaaattgtcatttcatgtataacttgtaacacagaattgaactgatactagtttccttgccttaaattaattatatgtcatcccaagggtctctgttaattctgctttgccaagcaataatgagatctgggtttggcattagaagtatttcataattttggttttttatttaggtttcctccacatctgtaaagtgattgattaaattagaggaggcgtgtagaataaatcccaatcccattgcaactggcagagctttataaatctttataaattcagttacaacaaaggagaggatcctacaccattagagccatgccatcaggtgtttgcaagtgacagctgtagtgtgttgcctcaaataataccaagttataaataataccaagtaattatcaactcactcccaaatttaataagatatcaaagtccaaaaggttacttaggagtagtcttccgtgggggaagataaatttattaaagagtcatgtactgatctttttcttgggattttttttcctttcccagaaaaaaaaattattttggtgactgatcaattgtaaacaattttcttccttacttacaaatcatccgttcagaaaaataaaagtggacttcctttcctaagcattacaattagcctgggcaagaggtgttatgattgtcttattctttaagccggcttactttttggatttgtgtgaaatgtcttttgaaaagaaagtagatagtatagtattaattaactactttgtatagtcttctgcataatttagagttgaaaataatgtaacattttcctgtgaacagattcctttatgcgtacatactttataaatatacatacatacacatacacatacatttttaaaatgctctttttaaagagattcttatcttgctcccactccaaaagctatgtacagttgagttattagcctcagaggaagagtacaggaaagcgaagatgaggacctccttttcttgtgttggtcttgggaacaaacagtattccgtctttcaaatatggcatatttctaaacagtttgggaaagatgttagaattttttaaaagtcagctcttttataaattggaagtactcagtagtcagaaattaagatcccctctgatagagatagattctcaaaaccaaaattggactgaaaattagattgagaagaaagatacaacttcctccatagccaataaaatctgtctttccaagtctgcttattaatgctgtgaatcgctccttctgtttgtgaaaacatctcctggactggaaatgtggtgctgtaaccagctgagccgaaagttggagaatgttaaatatcttatatgggacttacgataaaatgtattgatgttagtgattgtcaaaataggtttatcatttaaaaaactaggaaattactaagtataaagaagaaaaaccagtattaattaagtgatgagacctgttcattttgttttccctgacttatttccattaccaaacatagtaaaggccagaaaagattaaaaaaaaaattaacacagccattccattgttttttaccacatggagaaaggaccaggctggaagcatatgtccccccacccttatttatattcctttgagcattgccgttttctagacagacaatccgaaaataattgtgttgataggtctgtttaagcctgaactctgggtgtaaaatgttatccagaagctatagggagctgccttgctcaggtcattggaaatttcaaccctaagactcattggaatttctaagtccgttatgcaccattatgggcatatggagcatattcataccatgaggaggagtctttgtttatgatggactttttaatatggccataattaaactcacactcaaaaaggatgagctattgtcaaaagccaaaagaaaaacagacaaaatgaacatgaagcaaggagtccataaaacaagagttctttaccacgtttaagcaaatgtctctcaaaaaaaattgtatttctgtgcacattagctgagattcacacattttgcacctcagtagtatttcagatgagactcaatgtgtggagaaaaccgctaacttgtttggttctactcttaccccctcttctgtggcaatgtggggtcagggccgtatcctaaagtatccacatggtcttaaatggaaatcatgggactctggaaagctggcatgagctggttggagcttttaaacagaagtgctttatgggtatcagatctcttctgacatcaattgtttcaaatcattgttgggctctgtcgtgttctgcaatcttccccattcccctcatgatctctggcttatcttttatccaatctgtatggactttttaggattttttttttcttatagtacaaataattttcagatcccagctttggtaaatgtgttaattctactttgtgaataaataaatgagtgatctgctaaaaatggcaattgtagaattatgttgtatgtaatgtacatatggagaaagaatgtattttgttcattttcttaataaaatgttatatatggatgct

SEQ ID NO: 14989 - DNA, 1230 bp, Homo sapiens
cagggcgtactgcggttggtgacgggggtcccctcagtcacactcacttttttccttggtatgttattgagtatattctgagcttagttttctctacagtgatactttagtggagaggaggtgtaaggattctttctctctggttttggcttttcatataaatgctaaaggaaggcgacagtacagagtgttttggttgaacaactactttaatgcagtcaaatctaacgggactagggtgggatagggaggaaggtggtatcaaattgttggactctgaaaaacaagtggatggattactaatatttgatttattactcaatatatatataattccagccttggaaagtaggaaagtaggctgctacctaacttttagtcccttccaaaaccatttagtagggttctattacataaacagtagggtttttcctctcctgaccttatccgtttacagttcaatgaaataagtgtatgtgcattgctgtctgtctctattgccaaaatcaaataaatggcttctcagctgctgtttacaacaaacttccctaaccaaaacagaacctctaatttagggctaggaatagaagtcttttgatcccagtccctgggacagttttgtatgctgtatcttgtacacaggttgtaggttggtttattgccattttgttttatttctgctgtataaaaaccaagagccagacaattagacaactatggaggaatgaaaggcaattcaaacatctgcttgattcccgccccgccacccctaatttctgagagaataatggttagagaacattgcatctcacttgaaacatcctttgggggtaaatgattcttaggtgctcacttggtctgagctcagctgaatgcagggaagatgggacagagtgacatttctcctctgtgcggcctccagctgagcctgtctctgaattgttccctcccccgcaatgtgggcacttaccatgttcctggcacactggacctcaccatgtcccccggtcaccagtcctcttgctgcccatggttcataggtcatagaaggcagcaatgcactgactgggccacatcttgaaaactcgtggaaagggaaaggggaggagatgggactttgaccacacacagtgatgcctcacaccctgaaggtgggggattttgtacctgtttgtacaactttggtcttgatgggaaaaatggagaattaaaaagtgttttgagaagctt

SEQ ID NO: 14990 - DNA, 146 bp, Homo sapiens
cggcgaagaaatccaccagaaagacaatcaaagtaacattaaaaagctcaaattttacaaaagttaagttcctgccaacattttcaatttatcatacaattagaaatgtgactcagtctaacaacacccaagaggataaaaggatt

SEQ ID NO: 14991 - DNA, 206 bp, Homo sapiens
actagcacttgatgtctgatcctaacatggaaaacctgctctgctgatgtcgaattccttgccttacctggccatgggtccagctgtttctcactcaacccattacccacggaagaatgttctacctgccttaattctatcagccagtttctcttgtgattctttggctggtgtcttttagttttttaattaaaaaattgtttctt

SEQ ID NO: 14992 - DNA, 317 bp, Homo sapiens
ggttgaatctcctggtgagattatacaggagattctctttcttcgctgaagtgtgactacctccactcatgtcccattttagccaagcttatttaagatcacagtgaacttagtcctgttatagacgagaatcgaggtgctgttttagacatttatttctgtatgttcaactaggatcagaatatcacagaaaagcatggcttgaataaggaaatgacaattttttccacttatctgatcagaacaaatgtttattaagcatcagaaactctgccaacactgaggatgtaaagatcaataaaaaaaataataatcat

SEQ ID NO: 14993 - DNA, 782 bp, Homo sapiens
tctttctcaactgttggctaagaagaaatgcaaaagaagtggcataggagtgtgttatgggtgctgaactctctctctttttccccgattttccagagctaggctgtggagtagagtttgtataggtaactaggtaacttattgtggcccagataaggctttaggatgcctcagtgcttatgtcatagccttatgagttagctttcttgctagccccctagtcggtcaccaaactagtaactagtggggcttaatgaaggtcataagtttctgagatgggagagcaacaagtagagatgaagttaaaggtatttatcattcaagaaatcattattgagtcaccattgacaggcactattctaatcagtagttcactttaatatttaataagattttctgggataacagtaagggatattagataatataccgtatgtatttattactagtcttttcctctaggaaaagggatactttgataattaaggccagaggcccattagttgagaaagtcacagatatatttctccaagaaagccaacaaccaccaccacaatgacagaaatgacaacaaggccctttaacttgtcttctagtttagagacatccttcatttgacatttagtagaattcctctttggccacaagaataagcagcaaataaacaactatggctgttgaggttctcattttggtttgttttaattttttgaactttgggtacctgtaattagtttaaaaataaagttcctgataataaagtgactgaaaatggcatcccc

SEQ ID NO: 14994 - DNA, 2374 bp, Homo sapiens
gacagttccagaaagaacccaagctcaagacgcaggacgagctcagttgtagagggctaattcgctctgttttgtatttatgttgatttactaaattgggttcattatcttttatttttcaatatcccagtaaacccatgtatattatcactatatttaataatcacagtctagagatgttcatggtaaaagtactgcctttgcacaggagcctgtttctaaagaaacccatgctgtgaaatagagacttttctactgatcatcataactctgtatctgagcagtgataccaaccacatctgaagtcaacagaagatccaagtttaaaattgcctgcggaatgtgtgcagtatctagaaaaatgaaccgtagtttttgtttttttaaatacagaagtcatgttgtttctgcactttataataaagcatggaagaaattatcttagtaggcaattgtaacactttttgaaagtaacccatttcagatttgaaatactgcaataatggttgtctttaaaaaaaaaaaagaaatgtactgttaaggtattactttttttcatgctgatgattcatatctaaattacattattatgttagctgacagtggtactgattttttaggttggttgttttgtggatttctttagtagtgatagtagcctgaaccacattttagataactcaattatgtatgtatgtgcatacacatatacaaacacactaatggtagaatgcttttttatgtgctagactattatatttagtagtatgtcattgtaactagccaatatcacagcttttgaaaaattaaaaaatcacactatattaatattttatatttgccaacagaaacatggcagataggtatcaatatgttttcaatgcctgatgacctataagaagaaagtattgaaaagaagagagattagaactgttagaaggagttgaaattttctaaaagacatagtatttagtttataattaaatgcattcttgaagtccagtgtgaattttattaatgctatcatctcgaccaagctcaaagcctacttattagaaacaatgaagttcacaataggtcataaggtctcttccttttctaaaattgaaagacaagaaatttagtgccaatattgtacagacagaaattccatgtatgagtctcaacaaagactacctttggctaaatgtctagaagcagagaagtaaagtgagcaaaatccagtgttgaggagtcatgacagtactttgatctttatatactctgaagcatttcttcaaacttttctacttttatttgtcattgatacctgtagtaagttgacaatgtggtgaaatttcaaaattatatgtaacttctactagttttactttctcccccaagtcttttttaactcatgatttttacacacacaatccagaacttattatatagcctctaagtctttattcttcacagtagataatgaaagagtcctccagtgtcttggcaaaatgttctagtatagctggatacatacagtggagttctataaactcatacctcagtggacttaaccaaaattgtgttagtctcaattcctaccacactgagggagcctcccaaataactattttcttatctgcagtattcctccagaagagctaaccagggcagggctggcatgagaagtgacatctgcgttacaaagtctatcttcctcataagtctgtaaagagcaattgaatcttctagctttagcaaacctaagccaaaggaaggaaagccatgaagaatgcagaagtcaaaccctcatgacaaagtaggcacaagtctacaataagctaaatcagaatttacaaatacaagtgtcccaggtagcattgactcccgtcattggagtgaaatggatcaaagtttgaattaaggcctatggtaaggtaacattgctttgttgtacttttgaacaagagctcctcctgatcactattacatatttttctagaaaatctaaagttcagaagagaatgtatcactgctgacttttattccaatatttggatggagtaagttttagggtagaattttgttcagtttggatttaatcttttgaaaagtaaattccttgtttactggtttgactataattctctgttatctttacgaggtaaaactgcaagctgactagcatgttctgtgaatctgccattcctaaaaattttataaacacttgatacttttcactgataatggatcgctccaataaacatatattgtgaaaatgcatccacaataaatggaattccttcctgcaaaatgtctttttctcacttatttttatgtacaatattgatagtgagaggtatgtctattataataaagattatggcacagt

SEQ ID NO: 14995 - DNA, 899 bp, Homo sapiens
aggcttacgtgattgcaagggttcagttccaaccatggtcagaggtggcacatctgctcagccatctcattttacagctaacgctgatctccagctccagcgatggaacccactacagaggaggtggggcccctgtgtcaaagaggccgaggggcagcaagggcagccagggcacctgtgacttcttagtacaagattgtctgtccttcaggacttccaaggctcccaaagactccctaaaccatgcagctcattgtcacaccaattcctgctttaattaatggatctgagcaaatcttcctctagcttcaggagggtggggagggagtgattgctgtcatggggccagacttccaggctgatttgccaaatgccaaaatgaaacctagcaaagaacttacggcaacaaacgaggacattaaaagagcgagcacctcagtgtctctggggacatggttaaggagcttccactcagcccaccatagtgagtgggccgccataagccatcactggaactccaaccccagaggtccaggagtgatctctgagtgactcaacaaagacaggacacatggggtacaaagacaaggcttgactgcttcaaagcttccctggacctgaagccagacagggcagaggcgtccgctgacaaatcactcccatgatgagaccctggaggactccaaatcctcgctgtgaacaggactggacggctgcacacaaacaaacgctgccaccctccacttcccaacccagaacttggaaagacattagcacaacttacgcattggggaattgtgtgtattttctagcacttgtgtattggaaaacctgtatggcagtgatttattcatatattcctgtccaaagccacactgaaaacagaggcagagacatgt

SEQ ID NO: 14996 - DNA, 193 bp, Homo sapiens
gagcccgtgcttatgctcttctatgagagagatgaattggggagaattgtctccattttatagattagtttctttctaaattatgaccaaaaatattttgctatttctttctttgtatatggacatcttttctgtaaacttcttcccctagttccatcctcactagtaaaaaataaatactttttaaaaaaac

SEQ ID NO: 14997 - DNA, 758 bp, Homo sapiens
aatatctttgaaaaagatagaaggtgggcaaggggagcttgagaagaataaaagggataaacgagctcctagttttaaaatctctgccattgcactttatagtctgattacaaaacgtgcaattcaggagcccagcagtgacacacttatcacgcctaggctccagtttgcaaaaattgcaccttataaactgtcagtattaggagcaatgagacaatgaaagaaacatgttgggatcgtggatttaagaaactatacactgtttctcataatctcttgaagaagggcttctgattctacaattttatcagtctctgcacaagaggaataaccttgttccttttttgttacttttgttgttgttgttctcatgtgtccttaagagaaggaaatgccacagttacaaggtaaacatggagacttaaacataaagaaataggcactatacaatggggacataaaaaaagaaaatcaaagaaggatgcagaaattgtctccggagtgttaagcatattttattcttttgttacggtcctatttagaggattggaatgtaataaatgcttattttttgcctttctttttcccaccatgaagagaaagcaaacaaacagaaaccccaactaggtcacaccatttttcttcttgttatgccactattttgtacatccctgttctatattgtttatagggaaaacctacaggactttcactaaagctagccagagacagccatgaaaatggacgtttcacccctc

SEQ ID NO: 14998 - DNA, 1642 bp, Homo sapiens
ctgcagggagttcctgaacagatttttcactcccacgagtgccaagacggtgcaatgggtagtcccctagatgtgaaaatgaagagagagggttttaccatcctgagaagaaataatgatggaaacatgtttaatgtttgtgcagtgtaaatgactttgactcagtcacattgaagtaaaaatattaaaatctgttgaaataactcttaggaaattatcaactaattttttcagatcagtatcttctagattccagacagaaaaaaattacacttcagaaaagacatcaaaggcaacatatgacaacaagtaatttatgaatctgggtagtagcgttggtaatctgagttctttaagggttaacaggacaacgaagtgcatgtggcagtgtgctggcagtggccttgaggctttggaccattggttacaaaacagacacagccaagataagatccacacacacattattaacaaggaagtgatttgctgcaccttgagttgagagggctacatgtagaaaagtcttaaaatagagctaaacaccacagtggtcaacaaagccatcataatgttggtgtttgtttccctccaatgtatgtatgtttagtttttatccaacctgaggaatgaaaacttaactggatctctcttgcatccttaaagggcctgagtctcaacatggctgctgatccatacttacacatcttactgtcaatcttgcctacattgattatagaaccactattacgtgaaaaggcttgaaacaaccaacatatacaaataaaaccctgccttgtaaaatagtaaaagagaagccatatattggcttttcttcttaacttgggagatatattgaaacaaggtgctttataagattattgtacttaagactttaatagtgttacttggatagcttatatgaattttgagaattttatatgaattttgagaaagcaagttcaaaagaactctggtaattttcctgtatgtacaatttaaagagtgaataagattattagaattcagcaatagagatatatctattttcaattcaactacagaaatatattttattggccgggtgcggtggctcatgcctataatcccagcactttgggaggccaaggtgggcagatcaggaggtcaggagatcgagaccatcttggctaacaaggtgaaaccccgtctctactaaaaatacaaaaaattagccaggcgcggtggcgggggcctgtaatcccagctactcaggaggctgaggcagaagaatggcatgaacccgggaggaggagcttgcagtgagccgagatagcgccactgcagtccggcctgggtgaaagagcgagactccgtctcaaaaacaaaaaaaaaagaaaagaaatatattttattcattcacattaggtcactgtcatactgtcataggatgagagagttcttcaaaaattatgttttcccaagatcagttgcttatagataatgttcaatgacctcaagacatatatttttgagaaattatcattttaaaaaatttggtctatactgattgttttcactgattccaatattattacttataacactgacctctggaaaatattttgttcacaagaaataataaagtataatgatttgttgcatc

SEQ ID NO: 14999 - DNA, 634 bp, Homo sapiens
tatgcagcaccactagcttgtgctggtttttagatttttttgttttcaaaaaaacatttgtcagtaatttaacatcactacaaaaagaagagtttgtgactattctcatctctgttttggacgtttactagactttgatttccttaatagcccatttctgttaacctcttatcactaagaaagaaaggaaagaaggagatgaatagaagaaagaaaatggaaagaaggaaaaaaggaggatagaaaaaggatggaagaaagaagcattgaaaacaaagacattcttcccacttcttggatttttaaaccacagtctggagtgatagctactgtagaaaggaaatagactttgtatgaactctttaagttgaaaagtaaaaaatatatgtggtttggatgtgtgctttaattcagctttagaaattaataccactacccgtgaattatatggcctgacaatatgaattaggtgtactgtactgaagaacagtactccacaaacatgggtggtaacaagagttccatcccaggaggccaaacggtgcaacagaagggtaggttagatgctattaagaaggcacttaatagtacatcatgtaagatggcaactgtattaaagaaaaatccggaaaac

SEQ ID NO: 15000 - DNA, 368 bp, Homo sapiens
aatagcgccagcgtcctaggaaccagcttctactttgacataaaactggaaatcattttcactccagtttaatctgtgatacagggctctgttttattgacattttccttccttgctctttaagcctcaaggtcagagactgacttgctgagacttagtctcctggctgaacagagtgccatagtctgtgaccctgtatgatcctagtagcaataagattttggacttatctggtgcctttcttccaaaaatgctcagagtacttttatgcaatttactgactttaaggaaaacagtataacttttttttgttagcattttatggcattgtctcctggctgcaataacaaacatctttgatgttcaag

SEQ ID NO: 15001 - DNA, 1112 bp, Homo sapiens
ctagctgtgtacatttcttcagtccttaagcttcctacggagttacgtactattgtttagttcacagctgttcagggtgacagtgagcagatccagacaccagatccagctaggctagatgtacagtatctaacttgatctgaactgaacctgttttccttgatgatgcctaaaactacatccatagtttctggtgaacctgtaatacagttctgaaagtacagttttatataataagatgctgatctctttattctttcaagtaagagtgctagtgaacaaattgtgttacttgccttgggattttttgaacgtttgtaaaatgctgtcttcctagtccaaacagctgcagctttgggcatttttctttttaattattcttcctctgactttgtatcccttaatacctacactctccaattgtaagagaaagggggcagggaagcaatatagcttccattctaaggctgtattcccgttatgaattactagctgattacagttcagagcattgatcctggaatgtgtgctggagaaatttaaaatactggggttttttgtttaatggtgcctatttagagttggaagttgaacagctgttgcattacatacttttgcttttttattgaaattttgaaatcaaacgtcttgatttttctgttctgttgaattgctatgttcaggatgttctagggggtgggggcagggactcttttcgtaataagcacttgttttattttgtgtgtgtggagtataaaggctacacccttattgtaaaaaaataataataataaaatgaaagaaacaatcaccaccaccattattaaactgtaacttgtctagtaaattgtcactagaactatttgctgtgggcatttcctctattctgttacgtcattaacagtgccttactgtgcaaggcaccaaaggacataaatacgtacttgcaaagattccagatgagctgttcatgtgggccccttgctgactatattccagccacttcagggttgtttgtaatgaccgttatagagaagggctcgacctgcagaagaaactggggtgtttttattctcattcaacaaacccaaataaaaacagtatatgtaacc

SEQ ID NO: 15002 - DNA, 615 bp, Homo sapiens
acatggagaatatccttggatgctgcattcataggagaattgaataatttctatcaatatgtatttatcattaaattttttttaagtttaaggtttttctctgtaattttgtttactagttcttaggggaattaactggacatttcatctttactctcagtgaatttactgaactttttgcactagactgatgttgtttttctacttaaaaaaatttttttatattttattttaaaagtagtacaagccttagccaggcacggtggctcacgcctgtaatcccagcactttgggaggccaaggcaggcggatcacctgaggttgggagttcgcgaccagcctgaccaacatggaaaaaccccgtctctactaaaaatacaaaattagccaggcgtggtggcacatgcctgtaatcccagctactcaggaggctgggacaggagaatcgcttgaacccgggaggtggaggttgcgatgagctgagatcgcgccatggcactcactccagcctgggcaacaagagcaaaactctgtctcaaaaaaaaaaaaaaaattagtataagccttttgtttaaggaattcaaatgttataaacataaaataaaagaaaccctc

SEQ ID NO: 15003 - DNA, 162 bp, Homo sapiens
aatccaaatctgccctaggtccaaaaaatggtgtctatatcaagatcgtatcccgctgacacagaaggctgccgggtggggggagggcacccccaaattcaaagaaaaccctaagtgtggatgttcagaattttggaaaaatgtcactgaagtgattgaaag

SEQ ID NO: 15004 - DNA, 305 bp, Homo sapiens
tggggcagtggcctctgtgggcccttgtcaagagctggaggccactcccaagagcctctcctatggcagctgggacgttttaaaattgggacaccaatttcaaatgtaaccctccagtggtggaaggcacaccatggcttcctctgcttggtttgagggtctgttcaaaagctttgggccaattagggagtaaaaggagggaaggggcctatccattccattgtggaagctgggccaggtgccagggacactctccttcagggaaaatgttatgtggaggaggacgaataaatttattttgtttt

SEQ ID NO: 15005 - DNA, 82 bp, Homo sapiens
gagccaggtgagaatttcaaggattatcgacttcatattgcacattaaagttacaaattaaagtggcttggtcaagaatgag

SEQ ID NO: 15006 - DNA, 1485 bp, Homo sapiens
gcagcagaagacaagcactctgagaccacactttaggccaccggtgggaccaaaagggaacaggtgcctcagccatcccaacagtgtcgtcagagggtccccagggcattttcatggcaagtacccctctgcccccactccagcagtgcttcccaaagtgtgctctgtcacctgctttgcaatcggcttccattagcgcatgttttattttggtgtgacggttggccctcctaaacacggactttcctcaggctggttcaagacggaaaaggactttcttctgttttcttccaaagtgcaaccacagtggagagcccacggtgggcttagcctgcctaggcccttccatttctcttctttgaccgtgctaggaattccaggaaagtgcattcctgccctggtgaccttttcctatgtctaggctcctccacaggtgctgctattttgtgagctccggctcctgtttagcttttatttcagttctaacctcagtccagaaacatatgtgaggttgtttccctcttcagccacggctacaataccggaaaatgctagtttttatttatttttttaagtagtgcttcctaaatggtttgcatgagagccacctggggtacatgttgaaaacttatttggggtctaccccaaacctaataacccaaatttggggatggggcccaggaatatgcatttttaaaaagtcatctgcccttcccaggtgattctgtaagttgtccctcaactgtacttggagaaatcgtgttttaaagcagtagtccacaaagtattctgctcatgtgcccccaaaagtattttgaaaaatcatgtataccctcacccatctaagttgatatctaaaattttatctaagttggtatctaaaatttttcatgggaagttaaatagttgacaaagtatgtatttgctggtgtcgtgtaaatattggtattttaaaataaaaactgttacatcactattttaaacatatccagtacaatttaaatatcacaacaatttgacacccttcattcatttataaaaataaatgagctagttctttagtagttaaacatttcaaattggcttttctccttctgtatttccataccacttttcagccaagaatcctatcataatgtaatctattatgcccgacatcttttaatcattcaccccattacttcttgtcaacaaaaaatataaatggaaattttttttttagctcttgctttaagtgtttgtttgttatctcagtccagaaccaatattatcgtaattaattattggtatataatgaaaacggtattaattcttggatgattaaaagtttttttattagaatgttctttatcctaattagttcatttatccaagaatacatgaatgtgatttacagctgagatggggttcaacctcagctgtattccttgtttctgtatagatgtaagcacataaattcgatggaatagaattacgttaacaatg

SEQ ID NO: 15007 - DNA, 103 bp, Homo sapiens
aaaggatgattcttctttggccatcatttggtacagtctcatttccaagtcatgtataatctttatggcttccaaggacaagaattaaaatactcttttacgt

SEQ ID NO: 15008 - DNA, 88 bp, Homo sapiens
agtaacagagggcatggggtggagcccttgagccttttggcctggctcaagactacaggactcttcctgaccttcctatgttaccagt

SEQ ID NO: 15009 - DNA, 105 bp, Homo sapiens
tctgggaagaaaagtgtggtcaggacactcttgggacgctcttttgatagctctctataagggagctgctttccatgtcttttaagattttccttcttttacacc

SEQ ID NO: 15010 - DNA, 855 bp, Homo sapiens
atttttacagcaagattctaactaactatgaatgactttgaaactacttatacttcatactcataaaaattattgtgtgttgctaatttgttcatacccactattggtgaaatatttctgttaattttgttatatgttttttgtgtgaaccctaaaggttaaaccttagccctgtgggataggcagttagggaggtgtggaaaatctatgcattaccttaatgtctctgtgtggttagtatggtagtgactgttcatcatatgacatttactgaagatgaactgggtccatgatgaagtgtgtgtatgtccacgtttgtaatcatagaatggaccccattcttttgttaaatacacaagagaaagctttctgtgacagttccaggtcttgaagctaatcagcatctcaagaaagtatccagaaagaacatctgctagttggttataggcggtgggaggaataatatacctaattggttataggtggggggagcatgataagcaaagaaaaggcaaacacaaggaaagatcagatgaaacagaagatgatagtaaaagtgatcctaagtaagaacataatgtaaaattgtcagcagcctcatggggaggaaaaaggaagagtcaactcacttgaagaagagggtcttgagaaatccttagcataaagggctactggtgagattgagatctgagcaggcaaagctcaaaagagagtttggaggttaaaaataatttatttttgcagtagtgtgctttgaaatgtgtaaatcttatttctaatgtatacaaccacatttcacataaaaatatgcaatttatatgccagataaaaataaaacaagtgaatttgcaagtg

SEQ ID NO: 15011 - DNA, 50 bp, Homo sapiens
agcccccagtatctcttcagtctctataccaataaagtgaccctgttctc

SEQ ID NO: 15012 - DNA, 52 bp, Homo sapiens
agcccctggtccctctgcagtctctataccaataaagtgaccctgctctcac

SEQ ID NO: 15013 - DNA, 188 bp, Homo sapiens
gaatgacgatacccgtgactcagccctggacactggtccgagaagggacatgtgggacgtgagccgggctccaacagcctctgtgagagatgccccacaccaaacccaaccctcccgatggctgcattccctggtcctccgcctctccaccagccccctcctcattaaagggaaagaagggaatttgc

SEQ ID NO: 15014 - DNA, 278 bp, Homo sapiens
ccctccctccctcctgggctccaggtcacaactcccaaaggagatgcaggcatggctctctgcctctgatcaccatcactgtatctcaaggttcagcagcagagataccagttgccatcagtgctaactgactgcctctccaggttcggagtttcatctcccagggccagagacagcagacccacatccttctctcccacacctctcctggttttgttcaggacagcagattagaggcaggaggcaatgacaataaaataacgataaaatcctgagaa

SEQ ID NO: 15015 - DNA, 99 bp, Homo sapiens
tggaagccctgtctgtttgccacacccaggtgatttcctctaaagaaacttggctggaatttctgctgtggtctataaaataaacttcttaacatgctt

SEQ ID NO: 15016 - DNA, 272 bp, Homo sapiens
gattgcccggaggaagcaaactcttcgtataaaaaaagcaggccatctgcttaacccttggctccaccataaggcactgggactcggatttctctatctgatagaggtattttctgtggccctgggagctgtctgtctttcccctacccccaaggatgccaggaagacgtccaccattagccatgtggcaacctttacttctatgcctcacaagtgcctttcagagagccccaattctgctttcccacaaaataaacctaatgccatcaggc

SEQ ID NO: 15017 - DNA, 1218 bp, Homo sapiens
atgactctcccaagatttctcttctctccacaccagacctcgttcatttgactaacattttccagcgcctactatgtgtcagaaacaagtgtttctgcctggacatcataaatggggacttggaccctgaggagagtcaggccacggtaagcccttcccagctgagatatgggtggcataatttgagtcttctggcaacatttggtgacctaccccatatccaatatttccagcgttagattgaggatgaggtagggaggtgatccagagaaggcggagaaggaagaagtaacctctgagtggcggctattgcttctgttccaggtgctgttcgagctgttagaacccttaggcttgacagctttgtgagttattattgaaaaatgaggattccaagagtcagaggagtttgataatgtgcacgagggcacactgctagtaaataacattaaaataactggaatgaactcctgatcccaaagcctattgtgttttcaacacaaggtaataggaagccaagcaacttgcatgtctcccaatccctgtctagggacagctgctggtgcaggatggaagacttcctataaacagaatgggcgaccaattgtgtctacagagggggtgggctgagcatgggcacgcatgtccccagcctcctggacgagcaaagtcagtcaaagcgctggtgatccctgctccgcgtgcgtagcagtgtctgtgcctctcctgcccaggggctagagagcagtctccagtgcagggtccccatcctatctgaaaacagtggagtcagtgaccccaggtggagggacttccagttttaacaatgggttggtatgaaggccagaaggagtgaaacatgtgaactttctggcgaggagactccctcttgaatcatccatatgtagccccggggtcacttgcgaagagtctctaacagcttctgcctcactcctaagctctgaccgctaggctttcaccccagccgccggtcctgattcctgagatcccaatattgagcaccaggtttcctggaattgtgtgctgcggctgtgatgtaggtttcggtcgctggaagctgctaaaccatagctgacgccccctcctaagccagccttccttccccgcgcgggcatctgtccagggccttgtcgcgctctcagtctccttcgcagcctggccccaaccgttcaacttcaataaagcaaaactccagcc

SEQ ID NO: 15018 - DNA, 2752 bp, Homo sapiens
gtgaacgcacttatcaaggatcgggaaggttatgctcctggcacagaattccaccggtgcaaggagatgtctgaatactgcagcactctgtgccgccacctctacctgttcccaggacaccctcccacatgatgtcacctccccatcatccacgccaagtggaagccactggaccacaggaggtgtgatagagcctttgatcttcaggatgcacggtttctgttctgccccctcagggatgtgggaatctcccagacttgtttcctgtgcccatcatctctgcctttgagtgtgggactccaggccagctccttttctgtgaagccctttgcctgtagagccagccttggttggacctattgccaggaatgtttcagctgcagttgaagagcctgacaagtgaagttgtaaacacagtgtggttatggggagagggcatataaattccccatatttgtgttcagttccagcttttgtagatggcactttagtgattgcttttattacattagttaagatgtctgagagaccatctcctatcttttatttcattcatatcctccgccctttttgtcctagagtgagagtttggaaggtgtccaaatttaatgtagacattatcttttggctctgaagaagcaaacatgactagagacgcaccttgctgcagtgtccagaagcggcctgtgcgttcccttcagtactgcagcgccacccagtggaaggacactcttggctcgtttgggctcaaggcaccgcagcctgtcagccaacattgccttgcatttgtaccttattgatctttgcccatggaagtctcaaagatctttcgttggttgtttctctgagctttgttactgaaatgagcctcgtggggagcatcagagaaggccaggaagaatggtgtgtttccctagactctgtaaccacctctctgtctttttccttcctgagaaacgtccatctctctcccttactattcccactttcattcaatcaacctgcacttcatatctagatttctagaaaagcttcctagcttatctccctgcttcatatctctcccttctttaccttcatttcatcctgttggctgctgccaccaaatctgtctagaatcctgctttacaggatcatgtaaatgctcaaagatgtaatgtagttctttgttcctgctttctctttcagtattaaactctcctttgatattatgtggcttttatttcagtgccatacatgttattgttttcaacctagaaacctttatccctgcttatctgaaacttcccaacttccctgttctttaagactttttttttttttttttttttttttgagacagagtctcgctctgtcgcccaggctggagggcagtggcacgatctcagctcactgcaagctccaactcccgggttcacgccattctcctgcctcagccttccaagtagctgggactacaggtgcccgccaccgtgcccggctaatttttttgtatttttagtagagacagggtttcaccatgttagccgggatggtcttgatctcctgacctcatgatccacccacctcagcctcccaaagtgttgggattacaggcgtgagccactgcgcccgggcaagacctttttttaaaaaaaaaaaaaaaaaaacttccattctttcttcctccagtctgttctcacataacagagtagttttggtttttaattttttttggttgtttgctgttttttgttttttaaggtgagttctcactatgtttctcagactggtctcgaactcctggcctcaagccatcttcccgcctcagcctctcaaatagctgggcttacaggcatgagccaccacacctggccaggatttggttgtttaaatataaatctgatcacccccctgcttagaacccttctgctttctattacccctcatttaaaatgtaaactcttcaccttggtttatgagaactggttcttgccttccccttgaacctcattaaatggtgatttcttgctaagctccagcccgagtggtctcctctcagcttctaattttgtgctctttcctgcccttttcctgggccttctcagctctccacccccaccactcttgactcaggtggtgtccttcttcctcaagtcttgacaattcccgggcccttcagtccctgagcagtctacttctgtgtctgtcaccacatcttgtcttttcccctcattgcatttattgcagtttatatatatgctacttttacttgttcatttctgtctcccctaccaggctgtaaatgagggcagaaaccttgtttgttttattcaccatcatgtaccaagtgcttggcacatagtgggccttcattaaatgtttgttgaataaaagagggaagaaggcaagccaaccttagctacaatcctaccttttgataaaatgttccttttgacaatatacacggattattatttgtactttgtttttccatgtgttttgcttttatccactggcatttttagctccttgaagacatatcatgtgtgagataacttccttcacatctcccatggtccctagcaaaatgctaggcctgtagtagtcaaggtgctcaataaatatttgtttgggtggtttgtgagccttgctgccaagtcctgcctttgggtcgacatagtatggaagtatttgagagagagaacctttccactcccactgccaggattttgtattgccatcgggtgccaaataaatgctcatatttatt

SEQ ID NO: 15019 - DNA, 39 bp, Homo sapiens
ccccctcccacgacctcctcataaagaccgtggagaggc

SEQ ID NO: 15020 - DNA, 427 bp, Homo sapiens
gtgaggacaggccctcttcagaccgcagtccatgccccattgtggaccacccacactgagaccacctgcccccacctcagttattgttttgatgtctagcccctcccatttccaacccctccctagcatcccaggtgccctgacccaggacccaacatggtctagggatgcaggatccccgccctggggtctggtcctcgcccatcctgcagggattgcccaccgtcttccagacaccccacctgaggggggcaccaggtttagtgctgctgctttcactgctgcacccgcgccctcggccggccccccgagcagcctttgtactctgcttgcggagggctgggagaccctccaggacattcccaccctcccccatgctgccaagttgtagctatagctacaaataaaaaaaaaccttgttttccag

SEQ ID NO: 15021 - DNA, 351 bp, Homo sapiens
ccagacccctcagtcatgtagcgacctggatcccagtagccctccacctccttcgccactccaccagcctggacctccacctcccctggaaatgagagggactgggccgcagggtggtgcttcttgggttatacccctctaaggcagagagaatggcacctgtctcactcaccttctgattttgcaatgtaagaggaaatgaaaaatattatgaaaaaaatagaaatatagcatattattcaagggcagaaactctgttagacattcctgcagctgaatcacagctcttgccctcattggttttgttcttggtctcctaataagtgttccataaatggtcattgctttgtt

SEQ ID NO: 15022 - DNA, 91 bp, Homo sapiens
ctcatgagtatgacttagagaaaacagctttgcctcagtgttctccacccagctgagatctgacaggtgtaaactacattgccctggcaac

SEQ ID NO: 15023 - DNA, 575 bp, Homo sapiens
gtcttctctgagaggagtttcgtgagctgaagaacaagctgctcatggcaagggctggccccagaaccctgcaagagaggccttctgtggatggagaactaggccttctcaaagctcaaggacaaaatccagctaacccagtccctcggcccaggcctcctttcgtgctttgtgcttggtgggggggatttcgagggactttgcactggactctgggaacctttcatcattaaaaaaagggggaccattggggcctgagccaaggaactttccttctactgccttatagtgcttaaacattctccgcctccagggtgcagattcagagctggccagagtttcagtgatagccgtatgttaaacagaatctcacctcagtctcctggagggagatgtttaagaggggttaacacatcagatgggagggtcagcccggtgacctctaaggtatcttctaacctagaaattcaccataattatggtgcaaggtcagtgtgtctctgagatctatgtctgttggtggcaatgtgagggtgatactctctcactctaataaacttggcacttctccgagt

SEQ ID NO: 15024 - DNA, 5378 bp, Homo sapiens
ggggtggctacttggctatgggatagggaggagggaattactagggaggagagaaagggacaaaagcaccctgcttcatactcttgagcacatccttaaaatatcagcacaagttgggggaggcaggcaatggaatataatggaatattcttgagactgatcacaaaaaaaaaaacctttttaatatttctttatagctgagttttcccttctgtatcaaaacaaaataatacaaaaaatgcttttagagtttaagcaatggttgaaatttgtaggtactatctgtcttattttgtgtgtgtttagaggtgttctaaagacccgtggtaacagggcaagttttctacgtttttaagagcccttagaacgtgggtattttttttcttgagaaaagctaatgcacctacagatggcccccaacattctcttccttttgcttctagtcaaccttaatgggctgttacagaaactagttcgtgtttatatactatttcctttgatgtcctataagtcggaaaagaaaggggcaaagagaacctattatttgccagtttttaagcagagctcaatctatgccagctctctggcatctggggttcctgactgataccagcagttgaaggaagagagtgcatggcacctggtgtgtaacgacacaatcagcacaactggagagaggcattaaagaaccagggaaggtagtttgatttttcattgaattctacaagctaatattgttccacgtatgtagtcttagaccaatagctgtaactatcagctgcaataccatggtgaccagctgttacaaaagattttttcctgttttatctgaaacatactggatttatatatgtataagcgcctcaatggggaattagagccagatgttatgatttgtttgctctttttcttttatagtttagttatagcaaaaatatggataatttctagtgaatgcataaattaggttgcgtttcttattttgctttaaatctctggtagtttttccacccctgtgacacaatcctaatagacagtgtcctgtaaatggacacaacacaataaagtcaagttattattgctgttactctggatgatatggaaaacactgccatattttaaatcaactactccacgtgtttttccatccaatcacactgctgtgattcagggatctttcttctaagacggacacatttgaacctcaggttcatcacaaacctggtacctgttgcttcccagaggatggagaagtgtagttaatcacacctcttagtttaatctgaaatcttgacccagttatttaacaaataaatacctcattgattatatttaaaagtaatacacttcctgtaaacaaatggggacaatgcatccaaaaaatctttttaaacagattacacaaaaattatttccagaaaggctaccatttatcatcattatatttcaagcctcttatacttaataagcactttctaaaaagtcttgagatcccaccattctgaggaattcaatatgatcactttttccttctttgcctgggagaggttaagaggaggtttcgaaggtatagatgctattgttctgatggcccggctgaataaaatggaaattctagtttgttagaattatgcattctttttcaagattctcagtgtgcctaacttattggagcacatcagtttcttgggtaatggaaaacattacctagagttgccagtggcacattacaccagtacagagcacattccaaaggagacattggaccagttaattcccatacaagtcaaggtaacagaacaaaagggaatcctgatgcccttttaccattgctggttgagctcaggcactgtcatggacacccttaattttaaaaggttttaatcattcttctataaaatacatttaaaatggaaaaatacttaatatcactaaatatcagaacaatgtaacatttacaaatgacatattgaaagcaaaggctgttttatttagccaagatgattaccattaggagttactttatgtattgttgaaagcaaattttaaacatgatgttttagaagtgtttctgatttttaaacctggtttacaggtattacttctgcacttaccaaataatgccagatggaaatttattatttcttgcaattcccatgatagctctgttctttatgcattgtctcaacactttcccttttttcccaaaatgagtagagaattaaagccacccaaaacagcttctgctactaaaatgttctcatcctttctcctccctctccttttcctgccacaaaaggtgaaaaatgagatccaatcctctcaccaaaatttcaaacctaggacactggaatgactgcagggatcagtggttctcccatatcaccatcaattaagacatataggacactgtcttccttcaagagggttacaatgtggccatcagacaggaaaccaaacggtggataaagtattaagtaactaagtgccaaataaatgctggaaatcttgacctctccttgggattatgggtgtaacaaaaatccctacatctgtttatgaaggccatattcagtacattttaaatggtaaataatctgtttatgtgaagaaaaagaattaagtctttcttccaactctctccttggatagcctagcacagtgcagcctccataaccatgacattcccgcccaagctctcagtgcctaatcctgctttgtcattcacatctcacaaaatcttgacatcttacattccaatacattatcaagcaagcacaagtatgctggtagtagcctctttaaataatatgtatagacaacaacaacgacaaaaaatagactgttttaaagtttcagggaaagttggtggctgatttaaagttgtgcaggaaacatcttctgtgtatgaagcaaatgtcgatgttttgaaaaaagctaggagatgactttgaatgaatgcaaggttagtgagatcctaagctctcaaaatagcatattccctagagctcaagaaagctggtccaggaggttgaaaaagctattttgttgttaaattattttctggcccttcttaatatttaaaaatgtatttccccttgtggctttcaaccacctgctcaaaaaaagagacttgttacatgaaagttttcattaaagagctgaaaacaagaatttagagagccattcctagaaaatgtcctactgccctgcatttgacaaacaagcatcctttactaacaagagcaggaattcagaggcacaagaaaaagcattggcatgagccaaagagtctgtcttaatgttacttttgaaaatctgctgagcggccaccatatgcaggctgagagctgggcacaggcgaagccattggaagcacttcaggaacaagcacacagctgtgggacttgaacatgcaagtgttcaggttgtgtcaagaagcttttctttccttctatgatggaatctgttcttttctatcctacttttttctctcttcctctcctcaccacattataccctgctcttacgcagtaaacgttttaatggcccgtttatgtctcatgcctccaaacaacactgaatttgaaaccccccattttttcttttcaccaccctgttgagcaattttcccaaaaaaagggcagcaattattaaattgaattcaagtaagccagccaaagataggtcctaaattgctagtcccagtagaaccacctgatcctaaaccagtgcgaaacaaacagtaacaatgtccccagctgacttcagctaagaaccaatggctcctacccccgccccgcttttttttgttgttttttgttttgttttgagacggagtcttgctctgtcccccaggctggagtgcactggcgcaatctcgggctcactgcaacctcctcctcctcccacattgaggcgattctcctgcctcagcctcccaagtagctgggattacaggcacccgccatcacacccagctaatttttttttttttttgtattattagtagaagccaggtttcaccatgttggccagggtggtctcgaactcctgacctcaagtgatccgtccacctcggccttgcaaattgctgggattacaggtgtgagccaccgtgccgagccagccccattttttaaatgatgttttggttaagagtggaccatgagaattagctgacagcatcccctttctctctccctgccttggtgggaccctccctgtgtgaccttggtcaagtcctcgaacttttgtcccgtatttaagatggagctgttttacctacttcataagacagttgcgaggtgccattgattcttgactgcaaaataccttgaaacccttatataaagactgaagtcaacggagcctagtgaaagacttactttgtggcttgtggttgaaagtcacatcaaaagacaaatgtggccacgttcaggaattggagacttactggcatggctctacagctgctcagttattaatcatgcagactaacctgtcaacactgggagatgcaacatagcaaaaggacagagaaattagaattttttgtgcagaaagccctaaattcccacctgaatgtaacttacagctcccttacctactctcacacatgccctcaaacatgctagattggcttatacataggccaacacaaaatacaaacgtgacgtgttcatgtagcctagtggctatatgcctattctccatgtaccctgcatggtagtgctgcaaactttaaagtacatttctttcacagcagtattttttttcataagtggcatataaatgtcattcaatgaaatggggaaatcacgttgagaagttggtctgtcatctcccattgagcaaagactggcaggagataataaaaataaatatgggcacacatgtattaatatacagcacgcatttacaagtttattttccagataaaattgtgctataagaacagctctaccaagacagtctgcaccatttccaagtctcagttaatttacagcaactgctgctttcggagatggctgtgaaaatatggaagttcctctcaagtaggccaagaaacagttctagattttactaagttttattttgtcaggttttttaaattttttcagtgagcgtggtgactgcagaggttagtgctgtgaaaagctgggctaaatattctttctgtaaagtcaaacaggattccatcccctgtgaaataacacaaaatttcactctctaaaagcaacagcatgtaaactagaatgaaagaaggaaattatgtacgtatgcctaatattctttgtgaatgtctttcatttaactaaaattatattagaaaccagattgataaataaaaaattcaaagtagttttaattatcct

SEQ ID NO: 15025 - DNA, 458 bp, Homo sapiens
gaattttgcagaatctaagagtcacatctctaaatttgtgtagattgtgaaatctcttcttgcaagaaaaaagagaaatagctgaagttctggaaataacagttgatgaaaacttggtaatctgaagtctgaactttgaacaccagcagacaggctgagaattctctttgatcatgagcccaagttccacgtgtacctgcaggaatctgtgtggcatttgtgcactggtgtggggcccaggagaggaccacggagtgacaagccaccaggttctaaagggagacgaagatccccagaggacctggatagagatgtttccctgaccattgtctgctgtgtgctcccgatgatgagactctagagtttacaactgaaacacactgtcatttatgatattatttgtaatatctggtatgtctaagtaaaacatgcattcagtaaaactcgcgatgaaactt

SEQ ID NO: 15026 - DNA, 527 bp, Homo sapiens
cccttctggaagggtctgactgtgtgacccgcagcaaatagttcatgttggaaagaatgaaaacaactcaagttcatagcagccagcctgccgccattggacctcccttttaaaaactgagaccaagactcccatcagctggtctcggatttacatcggaactgctcaggattgatacatttcaagtctgtaaatacggacaccaacgccatttaccctaatttaagaacagcggggactgaccctccgtgccgagggctgcatgctaccgcactaagtcaatacatgggctccccgattcgcagctgtcgtcttggcagcacttgtcacgttggcagcactttgagagcaagtctgagtggacccacatgtaacctgctatgaaaaccatttgtatagtgtgtttcattttttaatgtgtgaaaataaagaaaattaaaggatttctgtacaagtcgcattgggttttgttttaagttttactaatttctatatgtaaataaaagatataatgattgtgcaaattt

SEQ ID NO: 15027 - DNA, 3223 bp, Homo sapiens
atccaaatctctgtggcttcatgcttgtatatgctcacagcagggcacaaaatccaagagaaggtctgtgagccccatccaacacccacagtaattattatctggcacatcaatgaatttggggtcctatacacttgactagagacatgcttgtgttttggaatttcacacccttacaagaataccacattttgaaacccagaaagacctggaaaggagcccagcatgtccatcttttcaaagatacaacaaaagcagaagttacaagaatattgcggagaggttggaaagcaggatttaacctctagttctcttgttctcagagaacagcaggttgatagtagattatgtctctaggtagagacagatacatgagaagagcctccaaaactggaagcccatcataaggcatgagaatgtttaactataaagccttttattagttctttgatagctaagatggttgttggagaaagtgcttaagccactgtttatgttgctgcctcctctctcaaaaccagccaagatctgttcacacacctctgtggctgtctttccctgaaacatggtaactcaagactgcctgcctaggtttcttagattaattattcacataaattttgtttaatattggttgaacaagaaatctgactttaaaagattattaaggagaatattccttaactatactggcttgatttgaaacaggctcttattgccatttaaactgccagaaatctttgccaaggtcctggttaaaaaaattggaaacggttttcttagccccagctttaaaagctagagatctcagagaaatagctggcttaacaatgacagaacagcttaaaatttgtgcctacaccatgttctgagagtcgttcacatcaaattcttatcttttccaagccagtaagttggcttctccattcctggtgtctgatattcttgacaatcatcagcaacaaagatcacagcactttccagaagcatggagcttcagaaagtgccagtgaactcttggtcctcagtagtgagatgataacagtgttataatgcagcttccttgagccatcagagagagtgtatgttcaccctatctggctgtatcccattggcagtggacagattgaggaaattcctagatcactgagagctaagcaccatgcatagacaacagtttgttcttgcctgtgttgcttttagggactttgactaccacatgttcttttcttggggtgatttaatcacctgggagcatctgagtctgctcctaagtggctttgcaactgggcctaagttctgtttcctttatggatctcaaattttcatctgcacaatgaggctgttgaaaggaaaaaaagtgagcctctaggaattattcaaaaaaagtctgtgatacattccttttcctgccaaagttctgtctctgtctttggcttctgtccaggcaaagctaaataagacagcaaagtcaaagcagataaattcttgttgaaacttgactaaaatttatttgatttgttgttttactcccacttggaatcctgaggtagaagacagaatgcagaagtcttacatcttgggcaggaaactggtttattcctatactcttgtttcctctgcttcttcctgaggtctagaacaaggtctggaaatgtttagacaggatattttcttgatgaagtgataaggaaaggacccatttttttgctcatcacctagcccatccttcactctctctagttatgcataacaacactagaagaaggtgttagcccagctaactttgcttctgggaaggctatgtctgaacatgttgctctgtaggataatcacacttagaaaacatctgctccatgacattcacaataccagggaccatgggagacacaagaaatgtgtgtctgctgtcataacttacagtgaaaaagcccaataatacagaacaagacatgatgggcaataccctagcatattgggattaagagctttctagccagaatctggacctataccatgggaaaatttaggggtgctgggaatcccaaagccaaggttctggcttcattggcaacccactaggaacttgaatgtgagattcagctctagtttgcaccttgatttccccagtgaaaagggagaagagccaaagtattgtctaggtgctgagttcccttttctgagtggatttcaagcatttgccagggtatgctggaggagggactcctaaagtaggtgagatgtgggactaggtaacactttaaatacttttttactcaaagatttgccaagaacacagcttattagtgaaagagacctgtggattgaaatggctgcagatagatcccgcagtcccttctgaaaggaactgtgtagccagcagggacctaaactttggcaaaaagtgaacacaattcaaatacgaatgaaggaagagccctcagatggaacgaaaggcgatgtgcaaggccatcccagagagacggaagcaggtgcgatactaagcctcagcccaagaataaaagagagttcaactgttactcttttctttcatcaatcccctatcagttagaactgcaggccagttccaaagagtgtttgcttaagattcaaaagtgggtaagtaaaatggatcagtgggaaggataaggtgtccaacagaaagtgtggaggagaaactcttggcctatcaagtgctcctgagagaaaccatgcaatttaacacttcagttaaagaaatacatgagaactgcttgtcatgaccagacaagataggaaaggggaaaccccagaaacgtgctcttcatctgtcagccttttggaccaagaagctgtcactatcacacataagcaccattcccttagagtggatccaggtgttgactataaccagatttactctttgcttactaggttttccattgtcaccattggatgaacctctggtttagccacagttgtgaaaataaatggaagttggttgattgtctagaaagtgcaagaagatggccctgctccttttctgctgaacatttagtattggaaactcctacttcccttttcattaataatgtgtgcaagtttcctattagcggggaaggtgtggggctctgctgggcttctcttgagcatatctgagaagtgatgttcatgtctatctcaaccaggaccagaccctgtgacttactcggtaataacagtccacacaagcctcgttgatatt

SEQ ID NO: 15028 - DNA, 1600 bp, Homo sapiens
ggctgggctgggggagggcagggccggacggagtggatcgggggcggcctgagcaccaaccaccttgccgggtgtcctcagccaccgtctggaaatcggcaacaggcattgcactccggttgggggtccccagggtggggcagggatcccccagatctgtctggtctgaatggacgcccagctcatctagggtggacccagctgctggggaagagccagggggaccgcgaggagccgagcgtcctcgggcaccgccctcacacctcctcgagtgccctgggaccactgggccacagatggtcatcaggggaagccaccagggagtcccgaagcccttctgagatcaggaaatcaggtcccaaggttaggagacgccctgaaaaaaagcgaaggccgagggatgtgctaagggtaacaccttcatgatgacaacactgcctcgcgtttcaatagcgctttatacttttttaagtgttttctatccgttatccatttcacccttggcctatccctctcagataggtggggtaggattttcctggtgaccgagtaaagtgagaggcaggtgagacggttcacccaatcacacgggaaggggcgcgcgctgcccaaccgcgctctccgcctacctccgctgctcgggaagctgctggcctggccctcctggtctctcttcctttcctggtctctcttcctttccttgctctcacccacggataaaaccagaagcgacaggaggccagctcctggggttcctgggagccgggaacagattggctacggaacgccccaggttgtacattcagagggctctttctccatgggagctcctggtgccgcctcggccccagcctgtccccagcccctcaatctggtgcagcagcatcttgtcactgcacaacagtggcctggtcccccacaggcagttagggccccaggtcagacctcaccatgatgatttgttccagttctcccagggcagaggggcgagggagaggcttttgctgtgagagtagccgtcacgtgtctcttcccagcagcgccgggcaagtgggtgctagagtctgagcctcaggctctcctgccctgggcctcccaattggtgctatctgttactgcccgtgctcacggacatggatacagaccctgctgtgctccacaccctgcaggcgcctcgggaagcgcccaaaggattccccttcacgttggtgcacctgctccatagctccgggcgctgcgtcccgaggggccacagtctccatttcagcgtcttgcatggcctggcaccgggtggggtggtatgccccaggacccttgtttgtgtcaaaaatgactttccctgcccttgccgtgggtccggcgttcctcccagccgggatcacagtgggcagccggcacccggcaccactttggcgagcgtcctgcttccgccctcgccctcatctacgctgctccgctttcctcagacccctttttgccgtgcaaagggaattcttgacattaaataaaaggtatccagattgcagactgcatgttcacagagctgggggttctccagcttgcctacagtaaagcctcaatgaactggaatccaattcaa

SEQ ID NO: 15029 - DNA, 1175 bp, Homo sapiens
gggtgcagcccctcgcccgtctgggggatggaggggggtggcattggttcccccgaagagacactgcagtcagggactgagttcttcctgagggcagttgtttgtgattgccttcccttgtcccagtaccaagccaagcccaaaggctgtcctgaaaaccctgtggaagaagagtccaggccaggtcttcatcctgctgccaagtttgctgtttcttggcaccttcaggtctctggttttctcattcatgccaatgcttgtgggctggggttggcgttctgaccccacagggactggtggctggttccagggctcgtcccggcatttcatgtcttcccacggggttgagtcgggccataggggtgagcagctgcctggaagagttctgggaagtataaccctccattttttcttgttttataatctctttgtttaataataagtagaagaaataatttaaatgaactgcttagccctgctctgaagaaccttttttggaattagattttagttgattttttaaagaatacagcccaacacttgttttttacattttaagagttgtagaagttgttcctaacttggggactggacctaccctctaggagggagttgttaatggggctcttttagcccactgatgcttacttaggccggagagcaggggacacggtgctaggttccctcgtgcagtgcctggtgctctcaaattgtctcaaaaggaccaagaggaaaagagtcggaggggtagaccctgcagccctgttgagaagaaagattccagtgaagttgctgatggtatggctgtggtctgggacttgcggtgtctcggcatacccctctcctcttcccacctcctcctggctatgttctgcagcctcccagagtagaaaactactttgttacttaaggttgttcaccttgtaccagtggttatttgagtttgttcctattacaccaatccttacttgaggtggttcggattacagtttccaaatgcattctgggattgcctattccagagagggtacagaaaaagcacacagatggcttgtctcaggagtgttgaatgtgtgccccgctgctgtctggggggatgggagtgggctctggggtcatatgtgaacatccccttggatgatttgcggttgcttagaataaaacttgctactagc

SEQ ID NO: 15030 - DNA, 2648 bp, Homo sapiens
cctggcaggagcccacagaggacccctggcggggtctctcccctgtgcctgacgcaggttcttccttttcctgggatggagagaggtttgttgtttttacccattcaaatgggaagctagctgcccttctggtgacattgtgtgtgaccgggtgctttctgtttcctgtttgcactcttcgctgccttttctgcattcctgacttctaaaagatgccttaaggcttaagggatgccatatttttgataaggcctctggtaggtaccacagccaagaggaccagagatcatggcccttccagtatgggggcgatagagacatcggggacctgggatttttgttttgtgcagagatctcctgcctgctgtcaccatgagaaacagtggagtggagtggatggatggcctgacttgaagaaagggccctggaaagttttctactttgctattttgaaatttttttcccttcttatagagactttgaaatacttttgtaaatgtgtgtagttgttaatggaactttgccttttgcaaagtcggaaagagtcggcttttccatgtgaggctcgcagagctgaaaggggagctacgtccaccagcctgtgggtcttttggttttttttttgttgttgttgttgtttttttaagatggagtttcactcttgttgcccaggctggagtgcaatggtacaatctccgctcactgcaacctccgcctctcgggttcaggtgattctcctgcctcagcctcctgagtagctgggattacaggcgcccaccaccactcccggctaatttttgtatttttagtagagacagggtttcatcatgttgtccagactggtctcgaactcctgatgttaggtgacccgcacacctcggcctcctgaagtgctgggattacaggcgtgagccaccactcttggcccagcctgtgggttttgatggggatgtcttggctgctgtcttggaggcacagtgtctccccatgtgtgtgtttcttggcccagagtgactcccagtattcctagtccttccccacaggatagtcacatccattatttacttttgttgtcagctgggaggggaaactgaagcctggacacgtctccccaagggctcagtgttcatgggtgtgtaagatccattgactggaccccagaaagcaccctgaggggcagtgcagagagagcccaggaagcccctccactagaggaggcccttggtctggctgaggaccacgtccaccctgggcctccaggcctgcttttcacattaaaggcggggcagtctcctctcaaaggagttctcccttgagcactttgggctctggggcagagttgggctaggagatctgggtgaatcctttagtcacagctagtctcatgttcctcttctgtcaaaggggtcatggccccagtgtgtcctacctcagagttgtcagggtcaaagtaacaggcactgggacaaatatgaagcctagctttgtgcttcctttcaaattcagggcctcctttctactccattccagcctttttttcctgtcagaatccctcaggaaggacctttatcttctggagtgagtggcagttccactgggttcagtgaaagagtcgcccatggggctctgttccccaggagtcctttgtattttggtgaacaaattcttaccaaagcatgagattcggactgtagaagttcagactgcctcagttcagactgcctcatggggcagtctggaggtcagctggcttctggtgtctctcatcacaccactgcggacgctgtctgtagagcagccttggtgtgggtgactctgaagctggagtgatgggaccccagctatccttgttttttaccgccttgtctggcactgtgaccacgcttcagggctgcttctgggggtcttggtccctggatgtgccatttccttgcccttctgaccctcacacttcttccaaagtcttgagcagagttgggggccaatggtagcattgctgtcatctctgggaggagagtgagtatacaagtcagtgacagttcagccaggctcccttgggtttgggaagaggcactgcccttctgtgctgtggatcctgcttgtctgctctggagtccccccacccttgccaggagcttcacaaaccagagacgggctgtcagcaagagctcagacaggatgtggtgcaagtgcaggtgcacgagtttaaccctcagctgcaggagctagtctcaggtgttctggggatgcctcaggctaagaattttgccgactttctgggcttggttggctaatgccaaatgcccctgcttaaatatcacaaggtgctgattctccttttttctttttttcataccaatgtgctcaaactttgagctaggtcttgtgagtttgcctagcactcagacctgtttaagtaacgttctttacattgaaacaagtcaaccgaagctttgtggtgcaggagctgagggtgccccagactcagtgggagccctggttgggccccaaactctcccagcagggtcctcggtttcctcatttgtgaaataaatgagtgggccacgacgttaataagcccaagagaactgtgaaggtggtagtcccttgccctaattggtgctcaataaagttgttggcataaacga

SEQ ID NO: 15031 - DNA, 526 bp, Homo sapiens
tggcattcctcttctccacatctgctcgttcttgccgagggtgcagtggtggcgtggaagccctgtcaccccaccccaggccaccctctcccagaggacgccatctcccttactgttgctgggagcctcgccctttgtcccaactgggtagagcccccaggtgctgtttgctcaggaggctgctgtgggggtgccttcctcagcctctggccctcttggctcagattcaatcaaatgttgcttccctctcctgtctttcccactggagccgcccaagcttgtaggtgggtggtgtgcataggccacgtgtgccccacatatgcagggggtgccccacacagctagagcggccaggagagcgcctcctaaccaccagccgttcctgatctcaggagccttgaagggctgggctcttgccttcctggagtaaatattggcacagatttcatttgagagaactcagccccctggtctaagctggacttacctctgtggattctgaaattaaagaagtgagttgctaagg

SEQ ID NO: 15032 - DNA, 1364 bp, Homo sapiens
gtgcccagctctcggaatgactgtggctccactgtccctgacaaccccttcgtccggaccctcccccacacaactatgtctggtcaccagctccctcctgctggcacccagagacccggacccgcagggcctgcctggttcctggaagtcttcccagtcttcccagccagcccgggccctggggagccctgggcacagcagcggccgaggggatgtcctgctccaatacccgcactgctctggagtttgccctctttcccaaggagatgctgctggggagctggtatgggtggggtctttccctttacagacggggcagatgccaggactcagcccatcctgaggaggacacgtgtcctcatggagagggtgctccggcccaggcgggggagtcagtgcccagtcagcagctctgccaccatcctgctgggaactgggggggcctctattgggttataggcaaggccttttctctggcatggaattgttaattttctgacacgtctagatgtgaaatttctgaaaatgttgaagcagagaaacattcacacacaaaaagcaacatagtcatgtgggtccagatggcctcagtcctagatgttggcaccctttgctgtgtctcctcagagtatcctgttccgcctcctgccacctggacctccctcagtggatgtcttccctcccccgaccccagcctgtcagtccgagcacagtgcaggtttggctctgacttgggcttttggctgcagtgggggtggatttcagagcctctcatggcagcatctaagtgaccagagctgggatgagagaggggaaggggcaatgtgagtggcgctatgggacgggccagccctgctcctgagccagccccgccctctgccccctggccctgggctctgtgctagggatggtgaagaatgggggcgtgccagcctggcaggagtgggaagcaacacgcaggggtcccggacctctccagccttgccctcacgcttacccgagctcccagtgtggttagcacagagctcacccaccttgcctggctcccagctggggcctgtcctcactggtgctccaggggaagaaacgacagcctcacttctgtatggactgctgatgtggcctgccatcctgttcagcgggcattgtctttggagcagcaggagaataggatgcctctcactcacatgccagttcctggctggccagctgctcagggctcaggctggggcctcccattgacatcctccccctacactccctctctgagcctccgtcgcccctcctgttgggtaagggtgttgagtgtgacttgtgctgaaaacctggttcatatataataaataatggtgatgaaaagatta

SEQ ID NO: 15033 - DNA, 508 bp, Homo sapiens
acgtggcctatggcccaggacagcctggcaggtggcctcgctgcccccagttcccctctctgcccccacactcgtcttagttgcttcacactggtcactggccctgcacactgggctattgctttatccctatcctgagagcagcccctccccaccatccctccacatgctgcaaggacagactgaagggctgtgagcaggtgtaagggctcccacatccgtgagcctgtgtccgcagctgctgccactctgggctgctccagcctgcaacttagtggaaggaattacttcctcctgaggctacaggcgagaaaggtagggatgggccagcctcccgtctcagctgttgggagacagtaggcaggctgagtggcccagagcactcctggaagtgggactcccctgccttgcaaatgtgcctctccagactgctcctgcacttaccccctccccgcagcaccttctctgcccgttcttgtccacacatctattaaatgcttctgttttc

SEQ ID NO: 15034 - DNA, 1604 bp, Homo sapiens
aagcatctttgcctccctgaacagccccacccttgtagagcaaaactcttctctcaaggtggaagccattgagcatctcctcttcttgaaggccaacctggagcagttccccaactacaccccgcctcccctcatctgctctagtggtgacctggccaaggggatacagaccctgcagtccgctcagggtgggatggcagacatggcaggtgccggtgctcaccctgcccgtgaactcctagagagcccctgcctgtaataggtcaaagcagagagctgggtgttgcatcctgggcgccacatgctcatggccagaatcttaaacctatttggtaggaaagggtcagtttctcacttgacagattgccatatttttttttctgggagatgtcattttccatctcccgattacttcctttacgtctagcagtatgtgccgagaagaggcttactctcttcgtaggtgactgtgaattttgtactacgtggctttgtacatgtgatgctctgttaaaacataagtgggtatgaaggtccttgcatacaccttgtctgtgtggataagtggacacatgcccttaagaggcttgctttctcaaaaagtggccaaggatgtggagtgggcatgtgctggcaggtgggatatgtcctcagcctttgggggcctggataagctattgcagcactttctgaggctttcactgtagggagaaggaaaccccaagggtagaatagccatttccagagggaagtacacacatacccccacacaccagtctttttgggggtttcagagtggccggagaaaccgactgaagggactgaccagctagctaggagagctgagacgccagtcctcaaatggcgttcttaccaatagtctatttccagactactggaaacgttggggtttcttcctccagtgacagcagcctcagtagctttcctgggctccaggcggctggctgcacaccctgcctgccatcacccttgcccctgcttgtcctggaccacttttaaaggggaagtcccttatttggaagagagaaaggatgtgtgtagcacacactcatcatggattgctcagagttcctttagggcagagctgagggcctgggatccaggaaccagtgggattggatgggagaagaaggaagggggtggcccgtcacccccgcaagacttgcatccaggtagcctaaggactcctggtcactgggtagggtggctgctgagatgcaggtcggaagaggcaggggaaggctccaggcctaacttggagcatgtcactggccatgggggtgaggggacagactctgctctcactggctggcagccccaggagcctgttcccttgcctctcctggatgggttgtcagccctgtgtttcactgtgaccaattcattataacatttggatattactgaaaatgtaaggaagcaggaaaaattaactactttcattcagagatagcctctatcaatagtttgacatttttccctcttttacattgagatcataccctaggtactgtttagtatgcaatattttcattttcgcagtataataattgcacctgttaaataaagttttgtaaacattt

SEQ ID NO: 15035 - DNA, 1099 bp, Homo sapiens
gacggtgggcggggccgtgttggctgagagagggctggggtccttcgtggtgggagtcgcagtgggctgggggtgcctgcctagtgctggagtaggggacaatgggaatcctagaggggatggaagacgcggggagtgagctgggtgggccctgctagcgagagaggtcaaccccggtggccagggaacccacttccaagcgcagggacgccggcctccagctggtgtgtgctaaggctccgtcctgactgccctgtgccctggaaaagcagcaatagcatccgccccttagagccctctggctagaggagccaccagtggaaaggaagaccctccatcctctggtattaacgccttaatgcccctgtcttttactgtaagttacttaagatcatttttggaagcaggcgtggtagagtcctgtaaatgaatgctctgggctagatacagcttggagaacctgctggccttgttagacagcacttgggcctttgccagcagcaagaggtgaagcgaagccactcttacctctcccttcccctcccacctgccccctgcgtaggcacccagacttggagagacccgtctgctgttaatacttccatcctcttccttcccaaagagcagatcccaaggcatttactccttggtctgtctcgctttatctgtcgcccctcccagcgctgagagcctcccctggctgtcagcagcactgtgtccaggctcttgtctgaacaccgcagcccctccttcgctccttccagagctcagcatgtcacggcaaggactgccgcattggtgatggagggccagctgaggggaagttgctggtgagtttccttttctccatttctagcatatggacacctggcctctgcttgagcacttaggtgacaggaacttccgcacctcctgaggccctggatgattctaattgttagaaattctaattgttagaaatccttccttataatgaatgaattctgctttcctataatttctacctattgggccttgttctgttctctggaactaaacagaacaaccatttacccctccttttcaaactagagaataaagatttggttttagaactggt

SEQ ID NO: 15036 - DNA, 536 bp, Homo sapiens
tggactggacctcagcggacccgtggtggtgcgggggatgtttgcggggtgtgtgtggggagtgggggtggccaggattgctggctcttagaaccccttagagcgggaccggtggattccttaaggctctgaagggctgagaacagttctagaagcgtcccaaagggtgctgggaaaggtcccagcgtgggttgagggaggagggaagatccgagttcctcaccgcgggccgggatgtgaccaccctcttcagaggttggaccccaggcttcaagcaccgagtgaggggtctgttggggacgctgggagagtctctggtgtgaagtggcttaggtctggactggtcagctgtggcaccagccggtcctgcccacgcttcaggatggccgggggctgcccctgtgggagagttgccaagactcggcgataccaaggatggaagccagaggctgtggcgagggagagccaagcatattcccagcaccagggccactgctggcacgtcgtagacatccaataaatatttttggaaggag

SEQ ID NO: 15037 - DNA, 1614 bp, Homo sapiens
gtagccgaagtgcctggggtctcttcaattagagacaccctcaggttggggggaggggcggggcatggtacaacctgtgggaagggaagcgggttcatggctttgagggcctgagaggcaaatgcatcccgccttgtgatgtatcagctatttgtagataaataaattgcaggtgggggcgaatagtagggtattataaaggagaaagaagatacaaggtggggaaatctggaaaaagatttcagacattaggctgataataagtggtagaatcaagtcacaagaatcacctcacttgtgtaggtaggttggaatcaggatagacactgtgatcaaggctgaggccacctgggatgagaatatagatagtcgtacaacaacccaggggatccagatacatgagaccagggcagcgttcagcacactcctgggcatggcggaagcaggaagcagactccagagggcctccctgttgtccagggccgttggctccctgagctctcctgtctcctttgggatgcgacttagggctagagtgttcttttcttcacacgttagccattccttacggctcttcacgttccacgcctagatgtgaagtgggacatagtcttccattgctggctgtccctgaggaaacagacatgagtcttggaggttctgaatgattttattgctaattatcacagtgacatagactagaacagaaattagaagcatagtaagattgccaaaatcagagaatcttgcaaagttctgtaattctaagtgttgttctagatttcctctagagaaggttattagaatctccattgcgtttctctttctccttctctttcccttgaggttaggaaacaggttaaaactcagagaactccaataataatggtttaaaaacatcaggggcttcctgtatctcctgtcaggaagccgaggaataagcaggctggggctggtgggcgtcaacatcccagttttgttctatctttctgtcccacctgcactgggatgtggcttctacactcgaatttgcttcttggtttcaagacagtggtgttctttccatagctgagcagattattttgagaggtgggtgatatgtgagagagaaatctggaaccttcttctgggtagatacaggataagatagatacagggtaaaatgttgagcactttgtacatgctttgagagcataatctttgtcatctgtttttttcccctagacaatatcaggttaccgtcaacattaatccatttaaaaggacatggactgttgccattaatacttttggattccatataacccttaacacaataacttctagaaaatgtgtgtgccgtagacacaaagaagggaacaatagacaccagggtatacttgagggtggagggtggcaggagggtgaagattgaaaagctgcctattgcgtgttatgctggtttcctgggtgacaaaattacctgtacaccacacccctgtgacacacaacttactcatgtaacaaacctgtgcatgtaccccttgaacctgaaataaaaattggaaagtaaaaaaaagtgtgtaaatatatttagttgaatcaaataataaagatgaatcattatgaattcac

SEQ ID NO: 15038 - DNA, 195 bp, Homo sapiens
tttactgtgatttgttaatggatgaattgtattttgcaaagatagttagagaaatacctccttccccttagctttattaaggtatcattgataaataaaaataaaatatgtttaatgtatataatgtgatttttaaatatatatatatatatacacacattgtgaaataatgaaataaaggtaattaacacatct

SEQ ID NO: 15039 - DNA, 892 bp, Homo sapiens
acttaatgaaaatctgtttgtattttctgcatattctctggcaaccttgccccatacttacttatttagcatagtcgagtgctctagtttctgtctctcaggcactcgtaactaaggaccaccattggccattggtagatgtttgattgacttaacaagagagggacaaattttcaatttgtgaaactccaaagcagaaagtattggtgcttgctaccttgtgaattcttccttagacatgcagagaaaatgtatgcaagagaccaaaaagatggctccaagctatgtcatgttacctgtaataaaatcttttcttctagattctttctatgttggcagataatctccccttgtagcttccactcacttattcttgcattcagagtcacaatgatcatcttacccatgtggtttttgagaaagaaagatcaattctttgtttgcagtaggtaatcttagagatggagatgattgtagaattattcctagatgagtgtcaatttatttaattccattgtcatataaggagtcaaattgtttcttatcatttgttcattgaagaacagagacctgtctggaaaatcgatctctacaaattcaattaaataatgatccccaaatgctgaaaaagtgaaatacagcaattcaacagataatagagcaatgtttagtatattcagctgtatctgtagaaactctttgacgaacctcaatttaaccaatttgatgaatacccagttctcttcttttctagagaaagatagttgcaacctcacctccctcactcaacactttgaatacttattgtttggcaggtcatccacacacttctgcccccactgcattgaattttttgcttatgttgtttataataaaacttttcaattatctc

SEQ ID NO: 15040 - DNA, 338 bp, Homo sapiens
ttacagatcccagttattatttactcactatcatttagtgggtgaatcacagtaatttccctgtaaaatgtggtacctgaagtcatatttgagattctatgaaatgtttaaatctgaacatcactccaattattaatgaaccaaatcatacgataagttactgtttgcattgaaatataatatcaaagccttttgaaatctgtaaacataaaattcctctcattttcaaatatctaaagccagttttatgttcctaaaatctcattttcttctttctagtactactatttctactgaatataatgaaaatggcaataaaataatattacataaactgt

SEQ ID NO: 15041 - DNA, 238 bp, Homo sapiens
cagcgcaggtcctaaaactgaaggcaacttggttaagggaggctgaattcttggagctgaagggaaaacttcattccaacggaaggaatcctgtagtttcaggcatagttttaatgacacagaaaactttgctgcatcacctttgcaactttgccaaagctcagagttcactttttaagtttttaactcattttaaatgatgtgtatgcagagttttaaaataaattcgtctaacaat

SEQ ID NO: 15042 - DNA, 585 bp, Homo sapiens
atctctggaccctggagcacttctaatgtatcaccccatggagtcattgttctaataatcaccaattcagactcagatcctcgtggtctatggagcatgctgcttgctgtctgtgcagctcccatttccccttcttcctgatagacttggagctgtgtgcctccactccaaggctgcctgcctgctgtaaacactattccactctgtctgccaacaactgcttcaggaatgggcctgagatcccatgcaggtccctgagaagtgagtaaaagtccgcagaggtggggatggaagatctctccttagatagaacctgtcttcctccctggcattgtggggtctgggcgtgacactgggactctcagcagctttgtgctgccaacctgagattgaaggcagtgcctcagagcagcacagagagttggggccccctgagccctgagccaccagccctgcagcctgccctatctccgcatttccagttgtattagccaatagatttcctacttatttaagctatttgagctccgggtctcttctacctgcattctaaaacattcaaagtaataaaaatttctccacatt

SEQ ID NO: 15043 - DNA, 252 bp, Homo sapiens
ccatgcctctcctgattattagtgcctggtgcttctgcaccgggcgtccctgcatctgactgctggaagaagaaccagactgaggaaaagaggctcttcaacagccccagttatcctggccccatgaccgtggccacagccctgctccagcagcacttgcccattccttacaccccttccccatcctgctccgcttcatgtcccctcctgagtagtcatgtgataataaactctcatgttattgttcccagg

SEQ ID NO: 15044 - DNA, 82 bp, Homo sapiens
ccagcccccagttcctcccccagttcctcccaggaagcccaggagcctcactggggcagacaataaaccctcagagcctcgc

SEQ ID NO: 15045 - DNA, 418 bp, Homo sapiens
gagccgcctggctttcccttccagttccgggagagcggctgcccgactcaggtccgcccgaccaggatcagccccgctcctcccctcttgaggtggtgccttctcacatctgtccagaggctgcaaggattcagcattattcctccaggaaggagcaaaacgcctcttttccctctctaggcctgttgcctcgggcctgggtccgccttaatctggaaggcccctcccagcagcggtaccccagggcctactgccacccgcttcctgtttcttagtcgaatgttagattcctcttgcctctctcaggagtatcttacctgtaaagtctaatctctaaatcaagtatttattattgaagatttaccataagggactgtgccagatgttaggagaactactaaagtgcctaccccagctc

SEQ ID NO: 15046 - DNA, 2433 bp, Homo sapiens
gaagggccccctgaggtgtggtcgctgccaagcatcagtgttagggctggggctcagcctgggggagcctactggggactgagcccccaggagggccagcatgtggagagtcgctgcggctgctcctgctcacaataaagccggggccgagcagctggcaggggaggccaatccctccctcccctccccagtcctgccggctgcctccctcccaccagagtctgccagagtcattgggctgcaatgggcagagacagagttccacgagacacctccactctattctccctttgcccagacccctccagacctctcaagagacgttctggccagtctccctgccccacccagcagcttcaaattggccaggcctacagtagctccagggaatttttaaaaatcagggtctggaagtgggcctgggaattcaaacctaggctcttcccacacccttgctaggacctcacttccctagactggcgactgactccctctcctgtgtccccactccctccatgggagaaggagcctatcccctggctcaccccgggacccacagtccccatcttccaaacaacctccctcctttctccctgcacagtgaacacagtcctgatttctagatttcacctcccctccccacccacaagggacacaggcctaacagggcccaacacttgggtcagggtaggagggacggggccacaatggccagttcccacgagaagcgccagcctgcctggctgtcttccaccggccctgccctgtgtgcctggcgtctttcacccactgagattgtgaaccagcctccatctacaccaagaacacccagcactgaaggagatgggaggggctgatgcccacctggagctctctgcttcctgcccacagtgctgacgagtacagagctaaatggagcagctactgcagaatccagtacagaatcggtccaggagggtgcggctgtggacaggccagcatccccagcaggttctgggaggcgcaccttgaaaggggaaggcagacatcctgagtgatgggcgcctgtggccctgagactgtggatgagggggctaggctccagctggcttctgaggggcctggaaaggcacacaagtaggtccttggctgaactggtgccccagcaggacctcgtgtccctgcactgctgcagatgcatcagccctccccatgttggtgccgctgtcacttcctactgggatccttcccctatccagccacatccaggctgtgggactacacggtgccctgttcccctgggcaggagaagaggtggtacctgcaatgcaccttcacagccaggcaagcattctggatttaccctgtgtaaagaagggtggtaccctctttcaggggtgtgatacagtgcattgatggagcagctggtgctgctgggaggccagcctggaagaggcagcagtggctcaagtttgcgtgcaggagccagagtgggacccacgggctcttgtgggtgtggtttagaactagatggtgctttggggacaagccatccaaaaaccccaggcccacatccaccctgatttgatatcccacttcctgacagatcagaggctgtgtctttaagcagtggaggtccaggagcagagcctggggctggttcacagctaaacccctccttagggcagcccagagtagggcctcagctggcaagtccacaagccctgctggggccctgcttgttggcctgacccctccctcaccaggcagccagccaaggtggttcctgcttcacccactcagtcatcagcctcaggctgcccaaaatgcctctgacaccagatttatatcttctgggcggcttctttaaatccagcccttcacccgccccctagagaagcagtgaaaccccttggctagtccagctggaagagctagaccgcaggagccgcgccgtcttcctaacctcgcctcggccttcgctccacagtggagagtgggagcctagctgtgcttgatgctgaatgcctgttttgagagtgtgagtgggatcatctacagtaaatacttgcaaagcatggcactgtggctctggggagctggtacgcctgtgctgtaaccatggtactcagtccttccaaagtgtttattaatcaagcacctgtcatgtgccattgagcccacgatggggaatgaggacagtccctgcccccatgaagcttgtgtcctgttgggaggacagacaggtggcccagcagttgcagcatggtgtgtgcacacgtttggctggtggaaccatgtttctaccactcatggtcaaaaaaagcccaccaaagtcctgggagttcacatctgtgtgatgatacggcaacattgtttgtaatggaaagactggacacccccagtgcccatcagtgggggagtcattaaataaactatggtatgtgcacataa

SEQ ID NO: 15047 - DNA, 101 bp, Homo sapiens
acctgctgtctgtgtcctcggagccccgccctgacatcctggacatgcctagcctgcacgtagcttttccgtcttcaccccaaataaagtcctaatgcatc

SEQ ID NO: 15048 - DNA, 160 bp, Homo sapiens
ccgccaccgagggacagccgagggaccgatggacgaggggacaggctggtgggatggggttccccctcccatgcccctccctcctttttatttaagtgaataatttaaagtcttctcctcccccactgcccctgcagtaaagtgctttggcccccaccta

SEQ ID NO: 15049 - DNA, 493 bp, Homo sapiens
ggcccaggaagagggcagaggggccagaaggactccatggcccaaagaccctcctccctgcaggcactgtgggaacagacacagagatggagaagcagggacatgctgagaggacgaagccaaggaaattagggaggagagtcaaagggatcaaggagagttggggatttgagctgcagcagagagggatgagggatttagccctctgccctaaggtgccattgaaaagggacaggacccttcggaggtgcctgtgaggagaggggagcaggacctctccctcctccagatccctgcctcctagtgccagcccctcacacgccttcatcctgaaacaggaagaggacggcaccaagttgggggtgctggatgaaagagacgaggggtgatctgtgagtcccatgtaaactttgtacattggaatatttatgtttgtgtacatatttgatgtgtgtgtgtatgatgagccaataaaccagactgtgtgcgtggc

SEQ ID NO: 15050 - DNA, 138 bp, Homo sapiens
cccgcctgggggccctaacctcattacctttcctttgtctgcctcagccccaggaagggcaaggcaagatggtggacagatagagaattgttgctgtattttttaaatatgaaaatgttattaaacatgtcttctgcc

SEQ ID NO: 15051 - DNA, 1219 bp, Homo sapiens
ataatgaacagaaatagcgctaattttctgcttataaatgctatcattatgaaaaggctaatgcagctctttctgttcttactttttatctgaattacaagtcctctttgggtgtaggagggggtgggcaggggacaagtccaggaggggtcccagggccttcatgcgtggtctcggggaagaagcttcctctggcctggcgcaggccgttccatctgcctcccaggtctgcgtccctaaccccttccccagcttggtgttttaccccgaaacaggaaggaacaggggtcctgtagaacaggggtcctggggaaggtgtccagggcagggtcctgggaagggtgtcccgaccgcttcctctccagctgtggctccatctgcccagcttgcctgcctcctgcacccactgccctgaccttcctgcttcccacgctgccatctctgccagggtgccacatgggttcctgtgccaccctttccccgcccctcaaatcgtcctttaagtcttccttccaagtgctgtggggcataacgatgaggcgctggccttgggggccacaccaggtcgcagcaaatggcttcagcctgggacgccagtgttttatgctcttagttcagtaaaatacgcccccgaaattcaagattgagtgtcaggctttatatatattcagcattcctcattacagaaatcttctattgaatgggaaaggtttaaatgctaaccaaagcaatttatttttaattaatatttttagactctgtgctgtcatactgaactcactgctagctaagagacctatcagagatttagatatattttctccaggttttttgtgggttttctttgttgttgttgttgttctagccatgtgacagaggctctttctaaaagtatgtagttcgctgtgtgtcggctccagcagtaaccgtcctcactgcgccacgcactcctctgtagatgtgtgcccagtgggagttccttccagccccaggaccacagcagcagccaggtgccgagtggattgagtgccaggtgcatccaagactttccctcccttccagaaggcactgactgaagacaggatggatcatgcggagccggctgaaatgctccaactttttcaaagtgtgggtggtccagtttggactgatgggaatcttcttgtcattctttttaaacggatgataccgatggaaataaaaggtgggaaatatattc

SEQ ID NO: 15052 - DNA, 125 bp, Homo sapiens
aaggaaaacaaatcactttcattaataaagggttaaaagtctcctagtcattcaacatagtgtcacaagagtgtaagtttggaacatcgtggaattacgtgaaatgcaattaaaaaaatatgacc

SEQ ID NO: 15053 - DNA, 665 bp, Homo sapiens
ggtggatgctgtggtgggaacgttgcttcatcaggcgttgcctccggtgtggagtttggggctttaggaaagcctgggttgggtggagcagaaccatcttggagaagatgacagttccctgtcctcccggagatgcctgggtgtgttagcagaggtgacacgtgtctgacagagacgggagctctgagtgtccacgggtgaagaagtgagtgtccacgggtgaagaagtgagtatgtttcacctggacattaaggtgatgtttgagctgctgttaaggaatttcttgcttatagaggcaaaccacagtatcattttaactctagaattgggcttgtacagaaggataaaacccaggaaaatggatatttctattcagatttatttatgcctctttttaatcccctttaatgatgcagtggtttttatctgatcaggaacttgtcatgatttcctttcttagacttcataggagatagtgctttaaaaaaaaaaaaaacttctattatttgtttagtatgttgtaagtagatcattttaaaaaactgaatctatattatgtttaacttcagaaggcatcatttataagacagtatggcagttaattataaaattattttgatgaattatgatacaatctacataataaagaatccttttgattatt

SEQ ID NO: 15054 - DNA, 117 bp, Homo sapiens
tgataccctcaataaaacagggattgccaagaagggaacaatcaccccaaaaatgaatgtttgcctttattccatgtttggtacttgattcagtttctttaaataaaaacatgaagg

SEQ ID NO: 15055 - DNA, 825 bp, Homo sapiens
tgtctgcctgaacgcgtcgttcgatggtgtcacgttggggaacaagtgtccttcagaacccagagaaggccgccgttctgtaaatagcgacgtcggtgttgctgcccagcagcgtgcttgcattgccggtgcatgaggcgcggcgcgggcccttcagtaaaagccatttatccgtgtgccgaccgctgtctgccagcctcctccttctcccgccctcctcaccctcgctctccctcctcctcctcctccgagctgctagctgacaaatacaattctgaaggaatccaaatgtgactttgaaaattgttagagaaaacaacattagaaaatggcgcaaaatcgttaggtcccaggagagaatgtgggggcgcaaacccttttcctcccagcctatttttgtaaataaaatgtttaaacttgaaatacaaatcgatgtttatatttcctatcattttgtattttatggtatttggtacaactggctgatactaagcacgaatagatattgatgttatggagtgctgtaatccaaagtttttaattgtgaggcatgttctgatatgtttataggcaaacaaataaaacagcaaacttttttgccacatgtttgctagaaaatgattatactttattggagtgacatgaagtttgaacactaaacagtaatgtatgagaattactacagatacatgtatcttttagttttttttgtttgaactttctggagctgttttatagaagatgatggtttgttgtcggtgagtgttggatgaaatacttccttgcaccattgtaataaaagctgttagaatatttgtaaatatc

SEQ ID NO: 15056 - DNA, 1804 bp, Homo sapiens
gctcaggtcgctctaagcacaaacgtggctctttctacaaccagatgcaaccgagggatttccctgccctccctcttccctcggaggggcggggcggggcggggccgggtgttccatagcatgtgtgtctcggatgcggaaggcagttttgcttgggaaacaagctccttccccggggtcatcactcacggcctccatggcaccagggacaacgctgtccccgcagcagcgcctcctcccggcgcccgagagaccggcacgccacggcccctcccccaaggaacagagcaaaggatggtggccgcaggccccacgcgagcccacaggacaccggcccctagattccagccaccaagcggaagcatgagacccgcccacactagcctctgtgttcccgttagggacatcacaccctgtctcacgtcgcagtgccatggacgcagcagttacagcaccattgttttagcagtgcgtgttcatatatgggcttgctacttcctgtaatgaggacgttcaacatggtgaggggctacaagaaaacgcttttctgtacagagtcttactgtagctacgctaatggttaacctgatagaattaactcgtatttttctatggttttaacctgatgctccactgtctccgtcatggggttgttttgctgtttggggttgggccttgtttccctttcctttctccagtccacgtgtagactttgcgcttgatgaagaagcagatcggaagtaactgctccctcctcaaggttgtcttcagacgtcttggggacgttcctaaacactgagggggaagacagccaatagcacccattaaaagaaatacctaaataaaacctctctcccactcagctatgctagggcttggctgtaggtgtgcactgtctatttacatccgtccttacaaccatccttgtcctccttggtaccgtatcaagctctttcccatgacatttggtttaaaaaaaaaaaaaaaaaaaaaaaaaaaacagaaaaaagacaaagcgtcaactccacccacaggcccgctgtgtgtgctcgggccacgggagtcctgagggttctgtgggcctgcgcgcatccctctcccatcgtgggggtggctccgtgaccttcctgccacgagcaggaggttgatgatgtgctacgttagccttgtaagatacacccccaccaaatgtgcagccggtgttcccagtgtatatttcattctcttgtatataaaggaagcaatgtgtgtcaggcctctgtgcagtcaacccagcctcctcccgccagtgctaaccccgtgttgagcctgcatgctgacactgtggccgatctggactctagaagtgctagtttgaaatatatccattactgtcatttccttttgagcttgtggacaagctgaatgtcaggactgacttcgccagctcccagccctgcgggggtgtccttggcatcccatcagcagaggagatgcgtccctgttgcattttggcgtttggggctttgggtttatccacatgagctctgaacgtccgttatagttagggtgattggaaggtctccatcactgggtgttttaaaggtgattcaccaccatttgtgaaaggaccaacgtgctgataaacaggaccgatccgagtgctacatgactgtgcgtttgctatttcaatgggcctgaacgactacaaagccagctaggtctggaaggggaagccagctctggccacgacatctggtcggagggaagtggggatgtggcatggtagcgtctgttcatccatggaataaaacattattttacc

SEQ ID NO: 15057 - DNA, 1262 bp, Homo sapiens
gggagaggaccaggattgaaaaaagtttcttcccataattcagtggaattcccagttcatccatttcccatccccacccaacagccatgtggacgggatgaatcctcaccattctccagggtcatcttcagaactgcactggcctcttttccacctcctcagtaggaatatgactcctcatagagttacggtgacatgatgtatctaacttatctactatccctttctctgtgctgacagtcatggtctttgcccgcaaagtgtcctttcctccccaaattcactctggcatggtgatcgacattgtcttaaagaagtcaaggcaaataagaaggaggaggtaaaacaatatgggcaggttgagattgaatagaaaagaatgaacaagtcatgatgtagacctctgagggtaggagaccatagttccaggctttctggcacagtccccatttcaaatattctctgtggtcctagtacatatatcctaatactgatggggtatgacccaagagttgaccacaaaacactgtctccaaatatattaaagtatatagtcctatccatgagagcagggaatcttagctttaaggttttgtttgtggcaaccacacacgaacatacacacacacacacacacaactatgaaagaggcaggtgttctagctagctagtttactccaaaatgcaatccgttgacatgaaacaggcactgagggtaactacttcctttcattttgaagcaacagtttataaacaggaaagtctactggtttcatagaatctgtcagatttgtttatttgctactggtttcacgcgcgtggactatattccagtgtttctagtcaaagacctttatcctcaaatcatgagattagagtaaaacaactgctgtaaggttgagcatttcatgaccaatgactatgaaggcacattcaccaaacacaggcactttaagggcatccttgattaatttgctaattgctattttttgttggtatgtgaattcctgctaggaggccgaggctagtaggcaatgaaaaagacagaacaatggtaaaatgcagccccagtcctctacaaattgacagtataatttatgaggtgaggcagttaagtgatgatgcagcatttggatgatcatgtaaaaccagtgtcattacacaaaacttaaaaaaaaatcctaggcaataaaactgcctgtggtctgctatgtctctgactcttcaaatgcatgaattaaagaatgatataataatctctg

SEQ ID NO: 15058 - DNA, 1993 bp, Homo sapiens
ggtgttcctgaaaagccccatagtgattgagtcttcaaaaccaccgattctgagagcaaggaagattttggaagaaaatctgactgtggattatgacaaagattatcttttttcttaagtaatctatttagatcgggctgactgtacaaatgactcctggaaaaaactcttcacctagtctagaatagggaggtggagaatgatgacttaccctgaagtcttcccttgactgcccgcactggcgcctgtctgtgccctggagcattctgcccaggctacgtgggttcaggcaggtggcagcttcccaagtattcgatttcattcatgtgattaaaacaagttgccatatttcaaagccttgaactaagactcaattaccaacccgcagttttgtgtcagtgcccaaaggaggtaggttgatggtgcttaacaaacatgaagtatggtgtaataggaataatatttatccaaaagatttttaaaaatagggctgtgtttaaaaaaaaaaaacaaaacaagaaaagcagcagtgattatagagaggtcacactctaagtggggtcgcggcgtggccacgcttcacggtcacgctcgtccgtcctgcagtggcgtgtttacatggtcacacgtgtgtgtatcaccagtgggtcaactgcttgtcattcctcccgtggcagtttgtgtagacaatcttactgagcaaaaggcaatgaaaagtcttggttcccacactgcgatatattggaattttcacctcagtttatgaagtttatttcgaaatccatagtcatctaagaatgaatacctgtctgccatgtatttcaatcttagtgagccaaaattgtttgtttgttactacagaatagagatgactgttttttgccacagccctatggaatttgcaatctgtgattgccttgtaaaaaggagagtgcatatggcactgcattaaacgtgtggtgtttctagtcaatgatattggtgagcacaatgtattcatttaatggcatagaccataccagacctaatttgcaagtattgggtcttaaacttcaagtgcaatgtatatgaaaaccaatctgagccttgtatctcttaaatatttattttttttaacgtgtgagatgttcgagagaaggttctccattcatttcagtgctgcctggaggaaactcggcaatgatttctttcagttgtgaagttcctttcgtgttacaccctccactgaaccctcaaccttcgaaatactccagttttgtgggtttggtcatttttacttataaatttacctttttgtattttgcaatttacatgtgtttggtttgttttaaattctgtgaaagtggcttgattaaaagactccttttaaatggaagccaccagtcagcagaatggaagcttagaggaacttgcctgtgagcgctggtctttgtgtttggttttgtgatgtaacgatctttgctggggttttttgctttgttttgagggaaatgtcttggagtaaattttaagttcctggagttaatttgttttacaggaattttgttttttaaaaaaataggatcattctgaactttggaatgacccccttatatattttctgaaaatgaaaacagttacatgaaaaaaatttccaatgaagatgtcagcattttatgaaaaaccagaagttattagatgaaagcagcgagtgaatctttaaaacagacttgatcacgcacacacaataagtctttctctccgaaaccggaagtaaatctatatctgttagaaataatgtagccaaaagaatgtaaatttgaggatttttttgccaatagtttatagaaaatatatgaaccaaagtgatttgagtttgtaaaaatgtaaaatagtatgaacaaaatttgcactctaccagatttgaacatctagtgaggttcacattcatactaagttttcaacattgtgttctttttgcattcattttttacttttattaaaggttcaaaac

SEQ ID NO: 15059 - DNA, 2144 bp, Homo sapiens
ggcggggggcatggaggccaggtctcagtccgcgctaaacaatgcaataatttaaaatcataaagggccagtgtataaagattataccagcattaatagtgaaaatattgtgtattagctaaggttctgaaatattctatgtatatatcatttacaggtggtataaaatccaaaatatctgactataaaatatttttttgagttttttgtgtttatgagattatgctaattttatgggtttttttcttttttgcgaagggggctgcttagggtttcacctttttttaatcccctaagctccattatatgacattggacacttttttattattccaaaagaagaaaaaattaaaacaacttgctgaagtccaaagattttttattgctgcatttcacacaactgtgaaccgaataaatagctcctatttggtctatgacttctgccactttgtttgtgttggcttggtgaggacagcaggaggggcccacacctcaagcctggaccagccacctcaaggccttggggagcttaggggacctggtgggagagaggggacttccagggtccttgggccagttctgggatttggccctgggaagcagcccagcgtaccccaggcctgctctgggaagtcggctccatgctcaccagcagccgcccaggcccgcagcctcacccggctccctctcctcaccctcctgcacctaactccctcctccttctcctttttcctcctcttcctccttcctccttcctcctgctcctcctttcttcttctttttcttctcctcctcctccttccttcctcctcctccttctctttcctcctcctcctcaccaagggcccaaccgtgtgcatacatcgtctgcgtctgtggtctgtgtcgctgtccccagtcccaccgcagtcctgccgcaggcctaaccctcctgccctgggcactgcctccatgcagaagcgcttcgaggttctggggctaaaggcctggggtgtgtggcctaaagcccaagagcggtggggcgaccctccttttggcttggccccaggaatttcctgtgactccaccagccatcatgggtgccagccagggtcccagaaatgaggccatggctcactgtttctgggcgggcagaaggctctgtagagggagatggcatcatctatcttcctttcctttttcttttcttccctatttttttctttttttcctttatttttttcttttcttggagtggctgcttctgctatagagaacattcttccaagataaatatgtgtgtttacacatatgtctgcatgcatgtgaacacacacacacacacacacacaccaggcgtgtttgagtccacagttctgaaacatgtggctaccttgtctttcaaaagaactcagaatcctccaggatctagaagaaggaagaaagtgtgtaaataatcatttcttatcatcactttttgtcttttcttgttttttaaaatatacattttatttttgaaggtgtggtacagtgtaaattaaatatattcaatatatttcccaccaagtacctatatatgtatataaacaaacacattatctatatataacgccacactgtcttctgtttagtgtatggggaaagaccaatccaactgtccatctgtggctgggacagcccagggggtgtgcccacggctgacccaggggtgtgcacacggctgagctgggagtcccgctggtctccctgaggactgagggtgaacttcgctctttgccttaaacctctttatttcattgcagtaatagttttacgttgtacataatagtgtaaacctttttaaaaaggaaagtataaaaacaaaagttgtaatttaaaagtctgaataaccatctgctgcttaggaaactcaatgaaatgacatgcctttttagcaggaagcaaagttggtttctgttttttgttttctttgttgttttagtttataaaacatgtgcattttacagttccagtatcaaatatttataatcttatgagaaatgaatgaatgtttctatttacaactgtgcttatcaaaattgtgaacacccccacccccgcatttttgtgtgttgaaattcttgaaggttacattaaataaaacaaaatctctttattataaaata

SEQ ID NO: 15060 - DNA, 6444 bp, Homo sapiens
gtcctaacaagagagcctgaccttaggctgtacacacactgtggaatttcttcaagggagctgccggccggcgcagaacccccaggagcacaggtctctccgggccgctgtcctgcgtaactgttctccagagcgccagccagccacgggcctgattccagaggagccgaactgacaggacacagcaggctggagttggtgttagattgcttcacattctcttgtcaccaccaagaactccaagtttttcgttttgttttgttttcaaagtgcttacaatgcatgtagacattgttctttgtggtctgactctatgatcgatcacagtgacttagattcaggaaagaacattaacgtcacaagttctaagtagttttcacagcaaagaatatttgataatggttgcacttatcttcagtgcaggttagaagagtcttctcaaccaagcttaactcgagttgtcttctcagccctcaaaaggctcttgtacaaaatgtagattaaaatttgggtgattgttgattgacctttgcataccctggaaagccagggtgtgagtggggtggttgggagtggtgccagttgaacagcagattctgcttcttgtcactgtttcaaaagcgtcaactctgtgttcctagtttcgatgaactccccattcatttttaacacacttcccagataaggcaatgtgctggacaggcacacggcatggccctcggctagagcagggtctgtgatggcctcacctggcagccctctggcctagttcccaccacacatgaggtggtggaatggcctgaaggtggaacagacctgtttttttcctttttaaatgcagtaaggtggcctgtttatcactggctctgtgatacatgacattctttgggaatttggtggccactgcttcagtcacctctgtttttctgaaggctgttccagcagggctgccctgttcatcagcggatgttcactctggcctgccgttccccgtggcatgcggggtgagggtggctttcttccagccccaaatgagacgagtctgtgtcatcattgaaactgcttttcgtaattgcgggtaggttcctgtaggtgagacatattctccataaagctactgtagtagaattcattctgggcaaacactgaaaaaagtgccttacagtatttctgctcatgaaagagtttcactattttggatatattctaaagtggacctgagctatttgagcaaataatgatagggcatactcagacattttagctaccttttatacctacgatttcatgtcacatttactaatagaattaagggaaatagaagcccgttctttcttactgcccctggagggagcatggcgctagggctctcagcctcctagaaggaagggactaaggagacgggcacagacttgcgtcatctcgtttccacagttgacgttttatattactttctcaaattaagttaccaaaacaaactgaagagctgaagcaggtcttccagaccctgcgatcctttctgtagcagtgattctaaagtggcgtttgctgtgtgcttgagagtaacactgcacgctgcaggggctgttgcagcagtcagtcccaggaagccacagcgcttgtaggatctgctaggaccctgcagctgtgctgccgccacctctgctccagagtgtcccagccaaccctcggaagatgggattgccagtcagccctgcctcaccatgcctgcaggaggctgtccagggagcaggtctgtgtgcccatcagcaggttcccatggctgtcactgcccactcatttccacagttagatacggatgtgttgatgtatttcgtctagtttatttggctcagtccacagctgcgttggagtggtgactttggtagcccttgagctctaattaagagagatccaaaccactcagtacccactgggcagtgggaaggcctaccgacttactttatcattgagggcttactgatacaatgaaatgagtttcatgactttttttttttttaaacactttttgaaatagagtgtgctgtgtttaaaaccaaaaatatgcatgttgtctctgaaaagtaggcattgaaacagacttttttgtagtcagtgttaataaaacggatcctgtttgggccttcattgttaaggtggacttcatggccactggaaggtctgttttggtgttacctgagtgtgacacaggccctggggtgtgcgtgtttctctaactgtctacacgtgcacataggcagactttctcatagaatgttcttgaaaggtgattggcaaagtcatgcaggcccgccttaaagcgctgattagaacagtccaacacagtccgacctcactcaatacccacaaccatcgaaaatggattcttagtaccagacaatcccagtaatgaaggtttagtttccttgaaggaaactacagaaaaggaaagaagcagaatgagaaaggaatggtacttaggtgtttggtatgctgctcacgtgaagtcagcccacaccagccaaaccctcgtggaagatctgctgcaaccattatctttgttcttgagttcatcatgcatttaaaatgagatgcaagagcatttagcataccatgtaaatatggaccttttaaaattaaaatactattggaagtgctttcaactcagccacatcttagctattagttctttgtgttgtcttatcaaagtttaatggatacagttccacagttgttgatgtgtttgtgtgtatattcgatttttataaagatggtagtaagtcaatacatttatcctgatctgtgtattatttgttcacaaattcaagaagcttaaaggtcgtaaatatcagtatctcataaggtaaaccaatagctgattatgtggagccaagttacttcttttctttttgcattatcttgttttggttttgtgctgtaatagaagttcacttagctactttagataaccttgcattaccactggtctggccacgtttgttaaatccttatactgatattcttctaaagagtaaatctcatcatttttccagacaaattttgaggggtttctctgttttgtggacaggcagcagcctccgtaggcacccgcaccctgccttgctggaggagatgggatggggcgggaggtggcttcaccataactatttttaatatgggtcattcttagcatgatttgtaaaggtctcaggcaaacagttgttgaagcttgcttctgtggcatttctgaattgtggcagagcttagatcctgcacccaggggtctttttttcaaacagcatcttgctcagttctgtgaacagaaggctttgttactgaaggaggtggaagaggagtttagggtgaaaaggaggaagggatggacagacccaggtgaggagaggcctggggattggggaagctgtcatctcagtgttaataatcaacttgcttctaacacactggcttatcaggggaggtcatccagtccggtcggtggagttgagagcccttgggccagggtgtttggcggcacaggggcatccgctggatggcctggaggagtgggggaggggaacgtcttcactgggtggtgatcagctgggacagttcaggtagggcaggtgagggacccccgaggccctggagccttgtcctgggatgggtttgaagaactcatcactcatcacttgttttcttttggcttttgttgtttttgttttgttctgtttgttttgttttgtatttctttgttattttattgggaaggtaagcggaatgtgctcatagaccatcagacgcttgtcgaaggcaggtcctagtcatgtaattgcacaggacaaggaggtcagcgtgtgtgatggcagcatgctgtgccggcacatcgtggagtcctagaaactctctagtccctgcggctgttcccctcctctgctctctccctggagaggactgccagctcttaagaaacattcctggtgcggtgtctgcagtgccctttgtgggtgacttcaggcttcccgctttcgtggtgctcttcctgggattcgtttttttattaccctccctccctacttgtaggcctcagctatggcttgacgtaatcgcttttagacccaggttggcttcccttcattaagctatgatcctccaccccattttttttttttttaatttggagtgggagggaggggggtgggcgagagaaagctcgaaaggtattattggtttttcaaaaaattagaggtgacgattctaccagggagttgactgataggagtgtgtgcagggcaggaaaggttcggaggcacccgactaccaccactcggaaagccgctagtccagatcgactagggagaggcttagatactttagtgtatttaaagagcatttcagttaactttttcagctatttttaaagtttgtgaatggagtgttattttggacattcttaaatatgaattctccaaaggcatttagccttgacttaatattaaatcctaaggattttatgtaaggtttttttgcaacctatttaattttttttaaatgcctaacttctgaggtgcataagcccgtggtttgtgtactggaactaaagcggaactcactgattcatattggatccccaggtataccttctgctggtagcatatggctggaaaaggccgtttgcctcacacattgtaacctgccttggctagaaaatgcttttaatgtctcaactctctcttttctgtgtcatgttttggtaggaaatctttaagattggcggacggaacaggtattttagtgagacacttctgagtacttgctttttcctttgacttctaaccaactaaaagagaaggaggtcttcatgttgatattttgcttggttttattttactgattttaaaaggtatatagaaaaatgtaggcctttaaaaagaaacagcatgtagttttttattttaatatgttccatagagtggataggcagacaggtactattgtaatgtattctgtatttaataatttaatatactctagaaagtagacctcatgcattcttttagcatgattttcttttaaactgcttttcattttaagggcacccgtggcggaagctggttttgcaaggactgtgtaagctgtatgcgttctagctgtatgcgttctgtagtcttttcttaggtgggtaacattttcaataacgcgcgcacagcacacaggggtgccctgagccgaaggagcaaaaaaagccaccgctcgtttctataatccagctttgcttttcacaggcgtgggatccaggatggtgtcctctgtgaggacttgaactctggggctttaattccactgtttaattttcaggtaccacagcagcaaagcacagagtgtgacctttttcatgtctgagctgattctgtttgctccacgtgcctgcttcttgctactgttcatttagtaatgggatcacctcaccatgccatgctctgggctctccctctctgtccatttctgttttgctttcctggctaaacccatctaccattcttaacactggtagctcctgtcccattccaagactcactctctcagaccttcccatctccctggctttccatgctcctctccctccacctcctggcttcaactgggtgagggccgtattcctgccactctgctccgcctcagccttgagaactccacgtgggctgggtgggaaggtgctgacgattttcacactgtgtttaccactccatcacctctcaacctttgcttcgacaggtcttcactcacgatttattcctccaggtctttgattggagagagtaactttttaattctgttgttttgcagtttggctctgtaggagtgagtggcgattcaaagatgccggcgtcccgcagtgtgcggttcgtgcccttaaccacccgcttctttgtttcccgcccctctgctttcgcaggagctcttgtgcttgagttcagtgttagtggtagcgtggctcactccacttggaggtggcggccgtctgaccgtgtgttactgctttgccgacggggcctcccggccctgatgcgtgtacactctgcgggctgcaccgggtggctctggttgggggcgaagctgtgttgactgggagagcgttggaaattgagacatggagagatgacgggagtgcgtttctctgggtttgatctccatcctgttttctcccagacacaccacacctaccttgggggaatgccgttgcctgttccacccctttgttcacttcgcgttaactgctgtggtaactttttcaggatctgtgtgaagaatggtaatgacgtagttgaaaggaaaatgtactgttgtgtgtttcatttgtgtgatttcgtaccaaaaaaatgtgtttgaactatattgtatgtaatttggaagtcgtgttaataaaaccctgcagtttccactctg

SEQ ID NO: 15061 - DNA, 469 bp, Homo sapiens
attcatagtcaaggaaagttaggtaattctgaggaaaaaagtttaccatcattttggatgaactgcatgagttctgggttaagtactacaatgtaatctgtttcccagggaaataagctattggtagttgtaggaaatcttagtatattttaaaagctgacatcccacctaattttaatctttggtctctaaaaagtaaatttcaaatttatgagtttaatcacttcaaatatgaatagcaaaaaatgagagcttgcttacttctaaaaattgaggttaagatatagctagtgtctgaacgacactccttaaagtaagttccaaatgtaaaacactccttaagttccaaatgttttccgctaatagtctgtcctaaagcctttgccattcctaatactcgttttgtaataattgctgtatttctgtgtaataaaatataaaaataaaatattcagtggtattcaacatc

SEQ ID NO: 15062 - DNA, 3478 bp, Homo sapiens
tcagggaaggaaggagggcaggtggccctttgactgtaaaatgtccttggtaaacccaaaggcttattctgttgcctgcgtgtgaatgtttggtagagctatatcattgtctgttaatgtattatattttgagattttttttgatctaaggttttattgtttgtatttcaagccattttcaaataactatcttgggggtgagaggagaaggagggagggaaaaggggtcaggcacactggacagggttctctaagcagtgaggctggtgtgtatgattgtcttaaaattttttaatagatatggccgagcgtgatggctcacccctgtaatcccagcactttgtgaggccaaggtgggcggatcacttgaggccaggaatttgaaaccagcctgggcaaaaccctgtctctactaaaaatataaaaattagccaggcatgatggcacatgctggtaatagcagctactgaggtggctgaggcacaagaattgcttggaccctggaggtagaggctgcagtgagccaagattgtaccactgtactccagcctgggctggacagtgagacttttgacagtgagactgtcaaaaaaaaaaaaaaaattaatagataaaacaggccactagagggtgcagttataaagaaattgatgaggtttttacctttttaaaatattggttagaagttcaaaaaccatcccttaaaggtgattgtttttttgagacagagtcttgctctgtcacccagagtggagtgcagtgtcctgtaatctcagctcactgcaacctctacctcccgggttcaagcgattctcctgcctcagcctctttagctgggactacaggcgcacgccaccacgcccggctaatttttgtattttagtagagatgggtttcaccatgttggcaaggctggtcttgaactcctgacctcaggtgatacacccatctcggcctcccaaagtgctgggattacaggcttgagccaccacgcccagcttaaatgtgattcttgatactgttttaagtatttaggttgcaattaactttggcaaagtcagtcgacataagccctgtggatatggccttatgtacactgtaatgcagacaggtgcttttcatcattcatgtaacattctcacacagttgaggatattcatctcctcaccaattccagattgtaaatgtaccatcttaaacaactctgaggtcaccaaacagtagttatttgactgttaataggtgctacttgcttgcaaggatttggagatgtaaacatgaagaaaatatagttactgcctgcaaagaattaacatccgtctagtgggagaaacaaacacaccccactcactaagtatggaaaactgattctgggaggaagcagaaatgtccctagataacagcatgtattgcagatacccaaatgtttattgttttctcagcccttcaattttgcttttctctctcaaatgctacagactcaatttaaatcttacctttgattgttgaaaaaagtcactaagatgtgaatacagaatagacattgagaggttatatatgtccaaaactcatctgtccagcagtcaccgtcctcttcagagtggtcacgttgggcagatgggcacaggtgctggtgatgcctctcctgggcaaaacgccccatttgtggcactttcagatactatttatttactttttaagagagagacaggctcactctgtcacccaggccagagtgcagtggcacgatcatagttaccgcagcatcaaattcctggactgaagcggtccttttgcctcagcctcgcggatagctaggaccacaagcagtagagacaagatctccgtatgttatacaggctggcctcaagtgatcctcttaccttggcctcccaaacaccgggattataggcgtgagcccccgtgcctggcctcaaattttattttagctcgaccctatggcagtttgtgtttggaaatcgtgatgtgaagtcatcagtatctgtgcatatccctaaactaatggtttaagctttgaagcatgcgcaagcaacatgaacaactgaatacagaaagtaactgaaagcagcacagagactgtgtcgtccctacagacttctaaccctgcattcagcaacatcattcgacccgaagccagattcaaaccctatgtcttctagcaggttctgaatttagaggacaaataaggtgacaggtactaagagaagagtgaattaagtgaaaatcttccctttgttaaggagctttttaacaagagtgtctttgctgggtggtgattgggatgtaacagatcagttctactggacttgtagcttgatagtgaaataaggagcttgggctaaggtataaatcaacacactgcttccttcctccagaaggtcttactgtgaaggaaaaaatgtcagttgaactaaattgtgcttcacgcctcggtagatttgcattctgatgcaagcccccaacctcacggaccaagaggatccctggctgcctgtgaatggcccacatttgagtggtgctaacttgatgtgagtaggcattaattatgggtgcggctactaagatgggaaaaactatcacgacagtggcaccacctgatttcatgatgtaccatatgcagtaacccatgtttgaggtacagaattgaagctgatttttctgcaaaagatgaatttctataaacaatcccatttttatattttattattaaaacaaaaatacctctctttgctagagagttatatgtatgacttaaattattagctatggtttgcatttagtacatggcagattgcctgtaagtctgttcattttaacaacatacagggctgggcacggtggctcacgcctgtaatcccagcactttgggaggttgcgggtggatcacttgaggtcaggagttcgagaccagcctggccaacatggcaaaaccccgtctctatgaaaaatataaaaattagctgggcatggtggcaggcacctgtaatcccagctactcgggaggctgaggcaggagaatcgcttgaacctgggaggcggatgttgcagtgagcagagatcgtgccattgcactccagcctgggaacaagagtgaaactctcaaaagcagaaacaaaaacccaacatatatgggctgttagatagtaattgtaatttcgtataaatagtaaatgagtacatcttgattaaaagctatgaattcagaattgcttttaaatatatagggggttttttgaaatttattacagtgcaattgaaaatacacttaaaatactgcaggatgcttagtgctcagtgttatgtatgaacttgtggactttacaatgcaggttgagaactgctaatgtatagaatgactaaacagctgtctttcagggtatcatttttaaaggtataaggaacaaactttaatgtattgaaatgcataaataaaatttattttttatattttgtttag

SEQ ID NO: 15063 - DNA, 1613 bp, Homo sapiens
agctgatgctggggtcagacccctacagagaaccagtgcttccttcgtcagcagcgcctccccagacccacgaggatactcacactgcacgcctgaggctctcctaagctccttctttcattctgccattcctccctcccttccttttttaaatgatttttattacggtgtggtcacttatttagatggacattgcttttcaaataacttaaaataacacgttatgtgccatgtggctactttagtaatattgccaagaagagcacagtttttacactagtggcatctcagtgaaattaaccaaagatgaagctttggctttgctggtgagatcagagccctcctgagcaggcagcgccactccagggttcagacagggctgcacaggcggcagagatacagggtctgagggctgagacgccatggggccgctgctgcttatgtggttggattgtttacaagcctcattattaaaactgaaggcattttttttttctgctgcctttcccaaagtggttaggtttggaaaagagatgatgatggtaatattttatttgtgctttttaagccatttccccaaatgggactagcatgcttgttttcagtataccgtggcctgcctcatgatggtttggagatactgtctgtggatgtgaggtggggacttcattcattgtcctatttctatctccactttgtgcctggagagctttcaggggaggtggaggaggagggtctgccaagctactgcaacatctgtcacccactatacccagttacttgggggaggacagacactgtggtgtcattaaagttgtttgaaccaaagtggcggctgcatctttgtcccgatgctagccgtgccggtctcccatcatccgctcgccctcctttcccctgggctgcgcccacttgtcttcctggatatttgggggtgactcgccatgcttggcaccctctgcttcctggtgctgctctgactcgaagacgggacagtccctggtgcacatccagggaagaggagtgtcggtagttcttgcagtaggcactttatcaggacctgacctgttgctgggtgattttagtctctacaaacagaaagcgtttcaaagcgtcagctgtgggagcagagtgaccctttgctgatgctggggggaggggatctaaatcctcatttatctcttctatgtctcgtattttactgtcactggaggctctgtgggctgtcatagttaattgaccataattagcaatatacttttaaagtgggaaagctgaatgacacttttaagacaatgaacattatcaaaacaaaatgtataatttcttaatttgaataataaattaagcgtttaaatgctatttgtagtcttgatatacagaaataaaataattagggttggtcttttttattttaggttgttttatgttgaatgttctatatcttattagttaatttgtatattttattagtattttggaaatagcatatctgagactgaagagaaattgacaattcacttatttgtggtttttttctcagctattctgagcttatttatttatttgtatgttctaatggctaaacatttacattaaatgttttttttccc

SEQ ID NO: 15064 - DNA, 1340 bp, Homo sapiens
accggacttgaggcacgcggtgcacccccagacgctggcgctccaccgtgctcggcatgcggtcgtgcacacgcgctaggtagcagcgtcggtcaggactgtctcgaggccacactcgctcggcaggattatgcgatcacggatcagtcagagcagggtcaggagacggggctgacggcacgggtggcggggacagacgtttgggacttggccgcgactctctgcttctctccagctctcaatctgctgcattttcctctagtgcttccggatcctcttcattcttttcggctactcaaccactccgcatgctgctggaatatttctggctttagaagtacaggagggcgcagatggctaactgagtaacattcatgaaatgaggctttctgtggcggcgtagtgtttggaattagaaggtaattcagtagagtgtaacttagagaatattgcaagtgacacattgaatcctgcccgtcagggcaccttttcctcagagcaatccggccacacgaatagaaggctgtcgtgaatcacatcagatgtaaaatcattccttctgtttactcttttaattttcatcctttgcaggtagtgcaaattcaacttcaaatatggtgtaggttttgctagattccatatttttttcttggatttttgctaattatttttagcaaaaaatttttgctcagtggcactctccctagtgtccatgggttagggccatgctggggaaaacgggccggtatttacacacgcgcaaaacacccagagacggcacaaggaggttgaactcatgtttcagttcgcgaacattgactccttacgaaagtcacttcattctaactagatgcgcccacttccggtcattatttcgtttgcatgatgtattgcttcttcacgttttgtttttattgagcacggagtagaattccagggctgccttgacttcttccctgcatgctccctcccagtgactttccttccctttcacatgaggatctgccgttcatgttgctttctcctttgtcctcttggacttgagggcattgtgaaaagctttgctgtgatttaaaaatgccagcaattttaatctagcagtgttgaagctgggaattttttggcgcaatccatgtagcagtgacccaggcttgggagccagaaacaagtgtgacctgggattttatttaacacaactgttgccaaagagttggctttgtttatttggttttggcggggagaggagtggtatttgatgctttctgtggacaatgtaaccctaaacacatcatgtattttaaatgccacctacataaataaaacataagcatattgaatac

SEQ ID NO: 15065 - DNA, 677 bp, Homo sapiens
ttcaacgcacgcacttaacagaaatgttaaactataacaagcaccatttgaggattaacaggaacatttttttgaagatttcaaacgaactcgactttcagtataattgtacctaaagtatttataaacagctcatcggagcctctatttgtcatagacttttgagttgattgttgggaccacataataggaccattttttttttgtctttaaaattgttgtaaatctctgtatgcactttgcttttttattaaacgtactccaaggtgagtcttgactctttagtgtaggacaagattgtacactaacaccagcatggacctgcttttcattgtgtctgaaatgtgagccacgtagtgtcggcctgctgtgaagttaacattgccaggacgattcttctacagaaataatttcaatttttttcagtatttagtagtgaaagatattaatacattaatggtaatacatttctggtttaatataaattaaggatgttttctagttgtgcatgaatgctggcaacttagtaagttttgacaattgtttaaatatgtaatgttaagcttaggtttaaaaaagtaaagctggtaaactgggtctttgtcatttgctttaaaaaaaaaaaaaaagaaaataaatgcgaatgtgttggtgcattcttcctgagtgggatctgg

SEQ ID NO: 15066 - DNA, 1018 bp, Homo sapiens
cgagtgcggctggaggaccacggacattggactcactgtggctggacggaggggacccgtggatgggggggctctggcgtcctgaggccacctggccccacctgctcctcagggcagcccggcgcggccaggtagggcccgagcttcagcttccaggatgcttctctggaacctcaaggcaggcagcccaggccctgggcctgatctctaaccccgtcatgctgctgctgaccacacccagccaacctgcccctccctgacccggggccccctttcctccagggcccagtctggctcccgagctcagacacagcccccaggagccgcccaccacggctgtgggaacttccaggcctcagcgcagagccctgcttggggccagcacggtgggcagctgccggccgctggggactgggccctgctcgcatgccgccccgccctccccccacctccacgactatttattgagcgcctgttgtgtgtcacggggctatgagggccgtggggtgtttgggtggattatccacacaggtcccggcccctgcccgggctggagttgccacagcctgtgctcctggtcctcacctggaggggccagcaggctgccgtcccaccacacgtggcctctgcgcccagcacggtgctcgccgacagtggtgtctgaacccttggggacgagggcctgggccgcggtgaggccaccagaggcaggagtggccctgggggtcccgggcactgtcgcgcttgctgcaggcggcccagccgtgtatttatttttcacctatctccttcctgtcaaggcaggccgggctccagggctccccttgcgtggggcatgtaggtgggggaggcgtctgcaggtcacctggggggcccagccctctcccagccttgcctggctgagctgtgttccaggggagccctggacaagccctcataggcagggagggggtttccgaggccaggcatccgccgccccgtgtcgcatcctggaataaaatgtggctctggcatggtt

SEQ ID NO: 15067 - DNA, 4528 bp, Homo sapiens
attttgatgagaagacccctgggccgtgttcagtggtctctcaggacggagggcatcatcctgcctcttaggttggctgaggcctgcgtgtggtgtccttagaaatgggcttcgaatagaagctccagccctgtgggggcgtctcctgggtagggagtggcgtcccgttttcccttaggagggtgtttctgcattgaacccctgagtgggacggcgttcccggcaaagctgggagggaggcgagcgtggggcaagacccttgtcttcgaggccggggccctcttgtatggggcggttttatgttgcagtcctctgatactttctgagttcaaagaggtaaatgtataaatttcagtcccttctgaacacagatatcatcagaaaattaccattccctagcaggatgttttcgtgtttgtattcgtatatgccagttcatttcctttgaaaaaaaaaaaaagtggaacacaaagtaggaagtgagaaccttctggctttggatggattgacttcttgattctttctggttttgcctgaacaccaagtagcttcataatcaaagggtcattttctggtttgtatcagaccgtatttataaagttgggtatttaatttcagtaactcctgtattttaacagaaaaagaacctgagtccatttgcagttaggctcgcaccagctgtcttctgtgccagccagctccgcccgagaccccggcacgtgttcgcagcacagcctggcaggggccctgagcggagttctcagcccgtctgtgccaaagttgcctgtgggtcacggaaacccggcccatgtccacccagtgcgtcaggccagccggggcccaaacctgtggatggaacgcaggtgcctgcacatctggggcctcagccagacctgtctccttcccaggcactgtcggaaaggggctggctcctgtctggtcagtggaggatggtggcaggagacggggtggggaggtccaggtcacgtcctctctggcgaccctggcagtggctgtctccaagccctggcaggtggggccaccaatctggccgacctcaggctctgggaaacaggctgccctcgtccctctgcctgtgggtggctgaggcttctcagcccatctccagttctctgcagcaaaggccctctgtttctgtcctgcagtggtggccctttcgtggttaaacatgtccctcccctcctcacagaactgagtacctattgcggctgggcccgcccaaccctgtgtccctgcacccatgggttctaccacctgattcggctgcagctgtcactgtcccgtgtctgctctctgtcaggcctctgagtgctgcagacgtattaacatatcaccgctagttgatggaaagtcttgtttcttattagaatattttgtgtaggcacagggttgccccagcactgtctatagcaaccccagtgtcctcacagtgcacgtgagccgtgacgcagccaccgtggagtcggcgctgacgcggtgtggccacgtgccatgagctcgccaacgcagtgcggctatatggcgtgagcttactgtgaagtggagacaggcagggacacaggaaactacaaacgagaaatccagaaggaggagctggaactgatgggcatagccggccgcgagcccctccgagcacccctgggggtggagttctggctgtcatggcagagggtttcacatgctcaaaaagtaaatgaaccaggatgtgaggggaacacaacagaccatgccgacggagctcccgggcccaggccggggcctcttcccatcgcactctgacccgccgtcgggagtgcccaggcccgggtcgggcctgcctctccgctcgcaccgcactctgacccatcaggagtgtggggaagaccgtcgaccaaaggtgggaaagacaggaaagatactgtactctaagtagtaaatttgttttttgcgtggacgattctgaagctgtattctgagatggaaaaaactagaaatacatcgtggatgatgagagccaggtgtattgagctcctgcttttctaacgtacaaaggtaactggatagagaaacggagtgatcgccctcacctggccagggtgtgctccgagaccccagcaggtgccgaagccgcggatagtcccgaatcctgtccaggcgctgttttttcctgtacgtacctgtgatcaagtctgagatgtgacagcaaaactgacagaacttcgtgcttccctcttcaaaatgtcacagatgggcactgtgttcttaccggagatcttagcaacctcggcatctggctgtttttcttataggtcaggagtttccaccttttcccttaaaggaagcgcttggcagcttctctggtgtgtctgagtcgccagcatcaccactgtcctgttctggggccattcttaagtaaaataaaagcttcttggacccaagcaccacatcaccgcgatggctggtctgatcaccgagatggctgctgagtgcctggcaggcagggtggcgtggatggcccgaaacgctggacggagggagggttgatgtcccagcaggacggctgctcagaacagcacagaatcaaaaactcatgaatggtttatttctggaattttccacttagtatttttggactgtggctgaccatgggtaactgaaaccgtgtgtaagggggactgttgtgaggggctgtgcacaaatgcttcccagctcttgagggcctggacgcagtgacccgtgcactcagggtcttggccctgataccattctgtaaccaaaaggaaccagggccaggccagagaaggtatcagatgagctagagagtgaagaattgctgggatgaggagacttgttgaaataacacggggggatgggaaggagcatacggtggccagcctggggcagtgtgagcgtgaaaataaacaggctgggcgcagcggctcacgcctgcaatcccagcactttaggaggccaaggtgggaggatcacttgaggctaggagttcaagaccagcctgggcaacatgggtgaaaccctgtctctacaaaacaagaaaagtcagccgtgcgtggtgtcacccgcctgtagtcccagatactcaggaagctgaggcaggaggatcacttgagccagaggttaagtctgcagtgagctgtgattgtaccactgctctccagcctgagcaacagagccggaccctgtctcaccaaaggaaaaaaaaaaaaaaaaaagaaagaaaattaattattgtaatgggctgtagccctcagaataaattgatatccagtagtctatacaacataagtaattgcgtaaacatgtcagtggggggagggccaggtctgtcttattaattctaatatagaagaaattttgggaacaggaaactgctgttgcagaaaccacactggtgacaggtgcagattacaaccctcagcgggccgggcgccagtggctcacgcctataatcccaacactttgggaggccgaggcaggcagatcacttgaggccaggagttcaaggccagcctggccaacatggagaaaccctgtctctactaaaaatacaaaaattagctggggctggtggcgtgtgtctgtaatccagctattcgggaggccgaggtgggagaattgcctaaaccaggaggcagaggttgcagtgagcagggattgtgccaccacactccagcctgggcgacagaaccgtctcaaaaaaaaaccctcagttgccatgaagtgagtggtgacgtgtggtgtgaagcaggtgtctgctgtcttgagaaacctccccttgagatgcatagtgacctccgaggagacagtcatgtcacagcagaacggcagaggcccccttaacccagcagccaccgccgggagcgagccgcacaggccgcaccgacctgggggcgtccctgagggcacggtatcacctctggttctcttgcccaactgcatggcctgaatgtaatcccaaggagacaacagacacagacccaaaccgaggagccttctgcgaagtgactggcagcgctggcccagtgttatgtaagatgttatttggggaactgggtatacacactgtcctatttttggaactttttggaagtctgaaattattttgaaatgaggaaaaaaaaatatgctttgtatgaaactatagtggaatagattgagtcgattctcgtttcaaaataacttcaaagagtttccaataggcatgatgccggcatgaatggtttcagcaggtcacaggcagagaagccggaatcccaaaatagcgccattgtgtggacaacctgactccttacaaacgtgcagtggcttcccaacgctgcctttgagtttctgggtctggctgctgaatgtgttgtgcttaagaatccagacaccctgctgttcctgccagagcttctcacgagatatttcgggtagttcatcatctgtcatgtgcagaatgcattttatttctcatagacgcttgtcatgataagctggccacattattaaaaggctcccaaagacaatt

SEQ ID NO: 15068 - DNA, 619 bp, Homo sapiens
tgggttcagcgcggggcggggccgctgcccagtgcagggctgcctcagaccacacagggtgcagctcctccggcggtgggggccgggttcaccagcagggcagcggctgagcaagggctttcagctcctccggtggtgggggccgggatcaccagcaccagagcctcgcaagggccccttccctcctccagaccctccttggccggtgacggctgtgacagtgatggcaggttcagtgccttcagcgcagagcgtggatgctctggaatcacccggacccctggccttggagggaccctccagccccaggaatctgctttggagggaaatgtctatttttctaccgggaatattttagagattggggcatgctggctcctcccgccagctgcaaacctgcaccttccgcctgattcccgatccccctgcgtgggccgcattcctggtcccctgcctgcgtccatcgaggggcctggctgtggcctgttttcctttgaccccacacagcgtcattgcgggtcatggggagcccctggtgggagcttgtggagtcggatcacgtacctgtgcagaaaccgcctctgtggctgcatttgaaataaaacccgacccagcagca

SEQ ID NO: 15069 - DNA, 161 bp, Homo sapiens
gaagagactccgctgcgatggctcggagcacgcagtagcatgcgtggaagcagcttacactctagtgggaagtggagccccattgagcaccatcccacactggctgctgatcttgtttgttgagggagatgggactataataaaattgaatgctgaagttg

SEQ ID NO: 15070 - DNA, 230 bp, Homo sapiens
tagccagtagggccgtgggctcggcccggacctggcatccggacttggactcggggccatgggcttggcccggacccggaacccggacttgtactcggggccgtgggctcggcccggacccggcattcggacttggactcgggaagggcctcctgtccctacaaggggcatgtggacagcagggacctgcgctaccgtctgtggtctcaataaagaaaccgaccacatgg

SEQ ID NO: 15071 - DNA, 278 bp, Homo sapiens
cctgcaggctcgggggcatagccggagccactctgcttggcctgacctgcaggtcccctgccccgccagccacaggctgggtgcacgtcctgcctctccagccccacagggcagcagcatgactgacagacacgctgggacctacgtcgggcttcctgctggggcggccagcaccctctccacgtgcagaccccatgcgtcccggagcctggtgtgtgggcgtcggccaccagcctgggttcctcaccttgtgaaataaaatcttctcccctagacac

SEQ ID NO: 15072 - DNA, 362 bp, Homo sapiens
cctggaggcagccgccccgcgctgctcagcaggacacgtgaacacccagacacccactcagggactcaagtctcacctccctccccggtggagggaggaactttggcactagcccttggagccaggaaaaaagactcgtgtctcaggcagactcttactctggttactaagatcatctgtgcatgacggggagggtggaacaggtcccggaggagtcgtgaatggttctcaccaggacctgaatcgttgcttgtgtttgagaattggaggaatgagtcagcaggcgtggctcatggcccccccgtgtgcaggatcaattgtaggaggaaatttcttttttattaaaagcgaatgtgtatccc

SEQ ID NO: 15073 - DNA, 829 bp, Homo sapiens
ggatttcttgtgccattttcataatggtcattagctccttttaagctagaaacgtagcctgagctcctgaagagttcctgggagatttgagctgattttggagatggagcaggacaagtggggagtctctctctctctttctctctctctctttttaaccaaaaagagatgacaaaactaagttcaggggccatggaaaatgaaaaagtccgctatattgtgatttgggaagagaaagttatcaagagaaagaggtgaggatggaaggatggagaaaaacagactgtgggaaggatcagaaggaatccgccgaggcagggatgggtgtgcccatgtgtgccttgacgggacttcatcttatagactgttaaactgtcacacacaaacaggctttccacccctgctctgagagcaccacgcacagatttccagttcttagtgtggctgtttaaagtagaaaatctgggggctgggtgaggccactcatgcctgtaaacccagggctttagaaggctgaggctgggggattgcttgaagtcaggagttcaagaccaacctgggcaacatagcaacaccccccatgtctacaaaaatgaaaaaccaaaaagcaaaccaaaagaaaaatctgaaatttccatctggggattaacttctgtctttctggtgaacaatatagcaattcacgcattcttcaagcagcaaaagttcccggaacaattagggaagacgtatggtctgaatttatccaggcagtgggtctgctttggtttttgctggaaatttatatcagtgtctgggctcccaagaacataaatgtaattgccaaagc

SEQ ID NO: 15074 - DNA, 53 bp, Homo sapiens
cgcctgaggctgaggtggtgctccctgcggccgcactaaaacctctttccaaa

SEQ ID NO: 15075 - DNA, 189 bp, Homo sapiens
gcagaaccagagtctgccactggggctcaggaccaagggaggcagcaccatgtccttctgtgggacactgccagccccagggctccagcccagcccggtggatcctctggggaagccaggaccaggagagaagcaaggtcaagaaatcccacagtttgatgtattaaagaaatgacttatttctactca

SEQ ID NO: 15076 - DNA, 3072 bp, Homo sapiens
gcgaggaagccccggggtttgtcgtcgttgagcagcccccacggctgtcggtcagactcttgggtgtgtgttgtctgtgtggtccttgagtgggtttctcggatccgtgccctggaatacctggctcaggaatgctgtcagaccagccagccagcgagctctaggcaaaaggacatggaaactgtcacgttagctactgaatcctgggggcgagtgaaactactgaaaatccgagtgatgatgttgtgaatacggaacacctaatcacacagcttgctttgcttttacagaaacgttcctctttttctgacgcagtttaattgaggaccgtgttgtgtgtgtatgtgtgtacacacgctctgtctttaatgacagaaacacaaaaaccagctggccttgcagacggcttttctaactcacaagtcttccctgagacagactaacctgaaagctttgcctaacagtagcttgtagagatccagtgcacgccgatgctgctaaactcagtgcctgagcccggccctgcagccccagccgcagtgtctgaaggccacctcccaaagggagcacgttgccttttcaaactcccgtgccgatttcctaagagcccctagtccaagcctctcagatgaagctgaggagccgtgcctaggatcccttcccagctctgaggacgggctgcagagctctgcaggtgtggattcaccttacgcccctacagcaggctcagcccttcccaccctgccccatgcccagcagcacaacacggagtgagacaggatgcccacggtgactgccgctccgtccgtgcacacacagcggtgctcttctccccttagccacccactgcccaacccaacggcaaagacacagaaaccaggtccccttgcagacggctctcccatcttcctgcaagtcatctgctcacacacagttggcagcacatagcgtttccttctttcagaaacattcctcttctggggcttcagaaagctggcaaggccactagcagagcttttgttaatgccccagctgcttggcgagctaacagctgacctttcgggaagcccacagacgctggaggaatcttgagtttctccaaactgccgctccaccagtgcctttggacagccgtgcctgttcgccgctctccctaagtctgattctcatcgaggcccctcgcttctatgactgtgcttgcagaagagtaaacactctcggatgccgctgtcctgggggagcccgcgggagcctgtgaatgttgatacgagctggccagtcctgggcccagctcacttgtccagctacctgccaggtggctttcactgtgtttaaaatacattgcattccaagctggtcccctctgtgtatcactctactgagaaatcctgcctagtgtgttttgggatgtgtcctagcatttacaagaaaatgaaaagcgtcctcttaattggcacccgaatgttgctgtggctcagtcacatatcccagggccctcgtcccgaggccgtgctgccccgagccccgagcccctctgcagctcacccttggcttgttttccgcaaacccggtaaacgcaagcccttggggcagatgcagaagcagaagagggaggggaaacctgcctctgggtcaccctgttagcacagcgttctcatcgggagacagcatggaactctctctcgcagtgctcgaggctgtgtgtcagtgtttgctgggcttgtggctccttttttggctggataaagaagtcgctgtttttgtactgcttctgtggctcttcacagacctcacggatgtgaccggagatgagtgccgatgaccacgttttaaaggagaaagagagctcctggtggggccctcggggtggtctcaggtcccatttgcagtctgcaacagtgacgcgcagcccggtccggagcgtggtgagctttgtttgccttctgggtcagctttcgctgtgtctcctgtgtgtgttagaatccagagcccagaggaagtgcaagcgggtcctccgccaacggggagagcctcttcgcggcgctgttggcgacagcagcgctgtgattcgcgtagcaggggagttgtttgaaacaccttcctgagtagtccggccttgtcaatgagtgcttgttttcctttaaacagtctgacatatttactcgtcactttcaaaccagaagcatgagaggaaggagatattgtggggtccgtttaactcgatagaaagcgcagggggatggcccccggcgcgggctcttgacccgctcagcgctgaccccaccgccctggccgaggcacttggccttgctgagctggacttcctcctcctcctcctcatgaccggggtgaattagaacgtttttaaagacacccccttccaaattctgtaacacattgtaattggagaagaaggaaactctgcaaggctaaactgtcattcacaacttggctacacatagactctagtcagttttgtctccagaaccttaggcttttgtattttttaattttaatttcactgttaatccttattgtcttttttattaagatgttggaaaagcaggaggtagttgtgcctcaattattgcaaaaatgtaacaataaagttcctcaaaataagatctgttcctcatagctatactgtgtacacataagacgcatatagggttttactgaaatctatttttaactcttatgttcgtagagaaattgtttcaaggattttgagtcataggtctgtaatttatagagatctctagaattcttattgtaattttcctacttctttgataaaagaaaaataagtcagattgttaactccaagattgaaaaaaaaaactcttgaaagaagattattagttgtaactaatttaggggttctgggcacagacatctaacctggtattgtaaggcagaggctcccattggaatggtagtggtccgggtcagttgttcatggtgtaagctttgcacagtgtattaacattgggagggtctggcttgaaaatttggccaccctcagcctctgaatgtttattaaaataaatttagtctttctttgcttaatat

SEQ ID NO: 15077 - DNA, 489 bp, Homo sapiens
ggcgggcgccctgggcagagagactctgtggcgcggggcatcctatgaggcaggcaccctgggcagagagatgcagtgggtgcggggggatcctgtggcccacagagctgccccagcagacgctccgccccacccggtgatggagccccggggggacagtcgtgcctggggaggagcagggtacagcccattcccccagccctggctgacctggcctagcagtttggccctgctggccttagcagggagacaggggagcaaagaacgccaagccggaggcccgaggccagccggcctctcgagagccagagcagcagttgaatgtaatgctggggacaggcatgctgccgccagtagggcggggacccggacagccaggtgactaccagtcctggggacacactcaccataaacacatccccaggcaggacagatcggggaaggggtgtgtaccaggctatgatttctcttgcattaaaatgtattatt

SEQ ID NO: 15078 - DNA, 269 bp, Homo sapiens
gggggctgcgaggacacccccacaggcccggcacccggtcccacctggtgacactgggcttcctcccgccttcgtccctgttttgtaactgaccaagttgggtcccgggtggggagcctcaccctggggacatgcctgttgataacatgcatctcagtgtaggttctatttatatggcagatgacgtgaaattgtgatgtttgttacagagcttttatgtttaaagacttcaatggagaagtacggttcaataaactatttttcccgtt

SEQ ID NO: 15079 - DNA, 2158 bp, Homo sapiens
ttggagtctagaggatattcttgcctcataaagaagaaaggaccaagaaaaccaaaacggaagaggagaaactcaatacaaagacaagtacaactccattagaaaaattcagacagcatcttctctattggcctctcagggaacatcagtatagatctttccggtatccctgttctccctgcaaatccaattcctgttatcaagaattcagtaaaacaggttgaatggttaaaaacaacctcaagggtccatgaacaatatctgccaactgaacctgttgtcttcaaatactaaggaaggagaatgaggggtacgggactagatatgacttgaaatagattgaggctcatttggtaacttcctttactgagccagtcttgatcagaagtccacattagtatgtgacagctagaggtactgttattaatgtatcagcaacagttacattaactatttcaaaggactactgcccttaaaatgaaaaaacctttcagctatgtttgtacccgtgactgacatctggactggatttatgcttgatgcattgttgggaaaatatgcaatacaaactggtatcagaattccttatactgatgaggcactttatattttttattagaaagtagaactaattttagatttttcaaattggtgaattttatttttccctgaagaggtttcttcactattaatcttaaaattggataccattgtgcagcggtgtactgtacttcagagaaagcataaaagtacatctagctcagtccctatgaggtagctgtaaccctttaaaatgaaatgtcaactttaaggtatgtttttgacatcaaccattagtaggtctttggttttgatggcacactatggagaaaggacacactggttttaatctgtagaactgttttagagtaattagcaatcaaacattttctttgagctatcaaagctccatattctcttgtcctcaatcattagtcctaaaacaaaaaagctttttgcctccctctcttctctttgcctgtatgcacacagtatgcttatgtgtcatttcacaagaaaaaaggaataatattctctaaaccatgatgtgaaactgacaatcctgtggccacatggcacaaaacaccaaatattggttatgatgaaacaccacattttagcaaaactttactaaatgtaatgtctatgagatatgtttctgatcttggatgaccatttgatcactgcatatgagaagttttgttcattccacagaatacctccttataggaaagttaatttccaattgcacacataagcaaaaaggcattttcttcaagaattttaaacacttttatttttaaacgatttatcaaaattcatctctaaattttacatgtagaaacataaaaaagtaatttctagcaagcacttgacatcttactggctttctgctcttttagtctacaaaagatcagcaatactttaagttaaaaaaaatctcataattaagcagtagagcatctatgattaggaaatgtgaggggcaacagatgtgaatgaatgaaagttgagtctttcttaatctagacagcaaacttaacaggctttccaattagccttgctttaacccctcccgtccctcctctaactctgcacttttcatgttaaactgcaattacttaaactcttttcctgtcctgcattaattttccaaagttggaatatagtcatgtccttttatgctgtagagacttttctttcaccattactttctgatatctagtacacagtatttctttttctcacatctttgccgtttcaccacaataataaatcgggtgaagtgtgcacaatatctgtattttgaatggctatggcgttaggttgaaatggccaggcacaaatttagtctggtcattttgtttacacattgggaaaaaaattagtttattaaacattacctgtaactgtgtctgttttaccaagctggaaccttgggactttttatttctaatttttattacctgaatgtcagaccattttttcatgtgatgtacctagtgagtggagtttgctttgttttatggtatctgtactcctggtatattcaagcactgttttgaaaacagatgacttatttctccattaaaaatgcaataaaaataaatggcaaaca

SEQ ID NO: 15080 - DNA, 1407 bp, Homo sapiens
ggtgacccagacttgagaggtcgtttgggctttaggagtggagcacgtttctgtgaacgttaacccagagcacagcgccaaggcctgtcttccctttattgggtagagttcttgatggctccaaggtgacttctggtgacagccagatcatccctcgagtccccagcgagaaagaaagcatttagccattcttacagaggagaaattaaccctgtaatgtgtttctattttagatgagtgtttcctaatacaagcaacattaacatcttcagaaaaggaagcaggcatggtcctggaaaattggggaatgacgggccaatctgtgtttcctaaggtcctgaagaatctggcaaagagtcctgtgggttgtttatacctgggtggccagggcctccctctctgttaccaaagtccaggctggcgaattgtctctggttcagggaaaggggacagcccagcttgaagatgagggatggtgaatggctgtgaccatggcagacatcaccaatcaagtgcagcacatgggtgatgtcagaattcttcccagcacagtgttctgggcagccagtaccaatcaatttggcactcatgatgggacctctttgcccttcctgtctggtgtgctctgaaatgggataatggccagagtagctgaaaatctccaaatgggcatttgcatgcctatctcctcatctccccctcccttttgggaaactcctggagtaggcagtttgggggcggtagagggaaactgaggcgcacacccatgcagcccctgatgttctgttccaccgtagttgattctcagtagagttgggaatgaggatgctgttacttggccatttcttcccatctccaaaaatccagagacattacgagagctattcattcataagatggggcaaacagcccccaggcacttgctccctgctccatacttaaggtttgtgatgccaacatttggattctctcttggtgccaatcagtggctgttagaggctactcaggtgtaccccaaacagaaggcacatggatctggggcgactgttccaggtcctcccaacctctgaagtgctcagtagcccaacaacaaggctgctgggggcctgttcttcagcccccgtcagggcggggccagcctctctgtccaatgctgcctggacatttactggggaggtgagtagcaggcccagctccaggatctgaattggaatctcagattctctggataaagaatctgtctcaagtcaggaggtcctcattctgcgactcccaaccagggtggagtgggcacagacaggatgccttatgcttatctctagcacattccagggggttccagggttcctgcacctggaatccagtgtgtccaagccagtattaaattatctcaacacattccacaga

SEQ ID NO: 15081 - DNA, 593 bp, Homo sapiens
gcggactatgacttagttgcgttacaccctttcttgacaaaacctaacttgcgcagaaaacaagatgagattggcatggctttatttgttttttttgttttgttttggttttttttttttttttggcttgactcaggatttaaaaactggaacggtgaaggtgacagcagtcggttggagcgagcatcccccaaagttcacaatgtggccgaggactttgattgcacattgttgtttttttaatagtcattccaaatatgagatgcgttgttacaggaagtcccttgccatcctaaaagccaccccacttctctctaaggagaatggcccagtcctctcccaagtccacacaggggaggtgatagcattgctttcgtgtaaattatgtaatgcaaaatttttttaatcttcgccttaatacttttttattttgttttattttgaatgatgagccttcgtgcccccccttcccccttttttgtcccccaacttgagatgtatgaaggcttttggtctccctgggagtgggtggaggcagccagggcttacctgtacactgacttgagaccagttgaataaaagtgcacacctta

SEQ ID NO: 15082 - DNA, 168 bp, Homo sapiens
acttctagattgggaaacgaagctctgctgggcgtggtggctcacacctgtgagtggctcccagcactttgagaggccgaggagggaggactgcttgaagccagaagttcaagaccagcctgcacatcacgagacccgccctccccccaccaatctctataaaacatt

SEQ ID NO: 15083 - DNA, 2813 bp, Homo sapiens
tggccccgaatccccattgagcagcacaaagcccgtttggggtaggagtgtggatggagaaccctcccccaaggctggtgtctgtaccattgcatcctaagtcagcttgaagggtaggctggttttcttcccacccctttcctagaagggctactgctcctggaagagtggacggatccataataaagacgtcccaaatggtggagttcggagagagctgcgatgtgaactgcccctcccctcgcatcccccaggccaccaacggcagtccttctgccttgtccatggcataggccatagaccaggtccctgctgctcacacctgggcctctcctcggagccgacccctgggtagcaaggcagccgagagcatctccctggaggggcccacggttgggccaagggcagagggggctgcacctgcgggcctgggaagcattgctcagggtggggggctgggaccatggcccgcagaggcactgccacagctgtgagggccaagatgctgtccccccatccaaaacccgtgcgccactgcagtgagtgttgagggcacctctcctcccctcttacacctactcagatgaggcagcagcagacccatctcgcggcgggggttttgttctgttgccgcctaactttctcatcctcggtctctggaaagtcaggctgagaaatcctttcccaggccaggccgctgcggtacactggatggttctgaagctggcccattgaaagagcctcttaaggcagctgggacagaggcctggtggccctgctgggcagcccaactgctgggggagacgtttctgccaccctgggtgatgagcagcttttcccccctggctttctgggggaggagtgggcctccttagggagacaggtgaccctgggtgccacccctgccccgtgtgtgccccgggtgttctcagtggttgctgaaggcaggtagagggtgctgtccagtatcccccatgtgaaggtcacttcccttctcatggagtcagctgagcatcagctcagccctgccatgtccccactcaccctcctcgcctcctgtccggccctgggtttctagcggtgcctgaggcatcactctggcccattgacagatgagaggtctgaagccttcctggccacaggcatcactttctcctcctcctcatgccctgccttgtccttgtcgtgttgccatggggttctgagaggctgggagttcacagacctcagacacagctgagtccgacaaccattggggtggggctgcatcagtctccggagtggcccgccacctcctgaagcagggcctggcccacccaaggtgcctggggcaggcgggcaccgtcattcgctgccattggcttctcagatgtatttcaaggactaaagtgggctctaagatctaagatggcccggcgcggtggctcccgcctgtaatcccagcactttgggaggccgaggcgggcggatgagttgaggtcgggagtttgagtccccgtctctactaaaaatacaaaattagccggacaaggtggcgcatgcctataatcccaggtactcaggaggctgaggcaggagaatcacttgaacctgggaggcagaggttgcagtgagccaagattgtgccactgcactccagcctgagcaacaaaagcaaaactctatctttaaaaaaaaaaaaaaaaaaactaagatacccattctttctgcctttgcccaggatggaggctttgaagacaggtggtcacctggacctggggtaagggtgcgcagggaggccgggcttgggggcagcctgctgctatgtccttgctggcgcccatacctgttggactgcctgaactttgctactagcctgaacgacagtgccttggaaaggcaggctccatgcggcagcaacaggattgtcttcggtaccttaaatatgctccctgtgcttccccagggaggatctctgggagcagagggcggctgtagacatcacagctgaagaggtgacctcaggccctgggagcctcagctccctctgccctgtaccctaggcacgtggctccagcaagagccccaggcaggacaaagggagcaggcagcagctgcagaaacagccctagacaggtgctggcctcaaccctggcaggggagggggagcccagagtgatgtttctcctaaggccaaaccccaggggtgggtcatttgagaggagttccagctgttctggccacactgggctggtggggaaggagcggcggcctctttccttggagggtccctgattcctgaggatcctccccgagccaggcacgggggaccacagggctgccgtgagcacccaccctggttctccaggcccctctgtccagaggcagggcctgaacctcgggctcctgcctggaccagtgacagcattggggagagaagcactgggggtcttcagaccagccagcaaggggccgtgccagtgcccagagagcaggtcagacaacaggcaaccctgaggcagctggctccctctctctgccctgcagggcttgccgcagggcgtgaggctccccagccacagccccctcttacttgccttaaaactggagagaggaatctagtatttgcacttagcaaaatatttaaaaactgaaaaaaatgtgcatgatctgtcactttgtataaaaacaagaaacgattagttcattaaactttttctttaccttctggtagtaaaaatagataaaataattccgtttcaactactgtgtgtaaaaagcctgtatcatatgtaactgggacttttgtaaataaatgtttgtgcgctctgctc

SEQ ID NO: 15084 - DNA, 159 bp, Homo sapiens
ccgtagtcactgtatggaataattggttttatcgcagatttttatgttttgaaagacagagtcttcactaaccttttttgttttaaaatgaacctgctacttaaaaaaaatacacatcacacccatttaaaagtgatcttgagaaccttttcaaaccag

SEQ ID NO: 15085 - DNA, 839 bp, Homo sapiens
aagtggacttaacttttaaggtagttaactggaatgtaaatttttaatctttattagggtatagttggtacaatgcttcgttgtatttagtaagcctttacaagacttgttaaagatgtcagagtgccccaagctgccgttccttcccttcctgccccacaagctccttttcctgaatttcctacctaaatattaaccatatgcctagtctctgaaactaaaaacttggacctcatcctcaattattttctcctttcaactctgttgaccctctgtctggtcttcctctagaaggtaccgcagaaattgatgtgtgctccctgccctcgtcactgcccaagcccgggcctgcacatactcactggactgttccagttttgacagctgccagtcttcctgcccctttcacactgcagctgaagttcattacctgaaggacgcctcatcatttcattccttggctccaaaccttctgctgcctctaagataaaagctcaacttcttaacagtgtacagtgtgcaacttccaacctttttatctgttctctccaccttcagtttagcgtcattccaaaaccacacccttgcaaagctttgtactccgcaccccagatgatctccaggcagctcagatctctttcctgcctttgccctgcactgttccccggtacttcctcctttattgtagcactcagctccccagccaatctgtacatccctcagaggcagcgatctgatgaattggtttttgaatcccagaaagggtctgccatggagttggcagtcatcacggtagatggcgtatgattttgctgaattttaaataaaatgaaaaccat

SEQ ID NO: 15086 - DNA, 3161 bp, Homo sapiens
ctttcctggctaaaagacccaggtaaaagacccaaccccagcagaaagacaccgcgggcggcccctccgcggaaggcgtggcagggaggcagtcgccctgcggtgcaagctgctgctccagagcataccgtggcccaggtggtatccccaaggcctcgtgccgtggctggggtcctgggaggtggtcgccctgcagtgcaagctgctgctccagagcgtaccgtggcccagactgatcctcgaggcctcctgccgtggctggggtcatggtcggctgcgcatgtccagaagcatttccttcctgcgaccatcccggcgcccctagggggagaagccaggacagcagcttccgctgtctccacagcagacacgggacggattccacagacgggagcctcattcgtaccatgccaaacgcattcactcggggcagtattaaccgttctagaaagccactgttttatagcaaaacaggaaaggaaaagctaccagttttttattcagaatttttctcagatatataggattatagcttttatatgcctttttatattctgaaattataacaaaagatactttctaacagtagtatttttagaatggcagctataaagttaactcctggacacaagtatatactgtgcactgaaaaaatatccatctacacagcacccaaggggagggctgggggcaccggcacgggggcagcgtgcagccctgccctgtcaggctgtcagacaagccccggggggcagcaggtgggctcgggacgggctgggggagggacggccatggcacttgggggctccagggtgactcccatgaggcctcccttcaaccaggctttttggccccacaaatactttaagcaaatcattaaaattataacagttaatggtttgggggtgtttaggctgtaactgctaactcctaggaaacagccttttccctggacacagatggtccatacgctgagccacgtgaaactgctgatgttttgtttagatgcacacacatggcagcgtttcatacaggtcagcaggttagaccggcttttgaccatattcatcgctatttaaaacctgtggcaaaatgaacgcttattttacagactttctaatttgaccagatttcttaatgaatagacacagaattaactaaaaacagtctcaccccatgtagtgcgccgtgtcctgagagaggtgccctccctacgaggagggaagaacaggccctggggtgcagaggcccggcacgtagagaacccagatagacgccggtggtggaactggtcaaactccacgcccgcctgggaggttgtcaggttgctgtggatgtaaggataggaggtgcccagtgctccgctcaaggaaggctggatctgggccccacctacagagagggctcagggctggaccgggggcattgtgtgcttgggccgacccgggccggtggcagacgctgttctctgtcgggagatttgcgtccccaggaccctgttacacagtgggctgttgggttggtggctggcttttcctctatggacttcctcttcctgccccacctgcataggcacacacaccttgaatctgcaccctctggagggcatctgtactcctgtgcaaaatgcccagtccagagacaaaacctcagactttgtgcacctaggtttccttctcagcagcggagactgttctttgagttgccttgaagtggaggccgagcggctgcgggcccttcgcctccctgcggctgaccttgatgtagctttaagtcacactagactgcagaggggtccgaggccagaaacccctgtcctgcatcagactttcattcccacgttcttaggctttgttactgatacctcaaatcggaagttttagttctgagaaaggcaagtcagcgttcttgaaatgcctgactggtagatatgcaactctggcctccagtcttccatgaaaataaatgctgcctggacccccacccagaccacacactgacggccggctccggcggtgcccacccctcaggctggcccggcacccaagactggccacagccagctctgtcagcatgttgtgctcggacaagctgtttccttcttctgaccaacccaggtgtgacctggggatgcagagctttctgttttgggtgttgggagaagcagcaggaaggagtcgccagatgatcaagctccccctttgctgtcatctgtgaatgagcttcgccaggtggtgggcacctgggagccatgcagaggctgtggtgctgagttagactccaggtactttgtggtcaaaggaaatcgcctagctccaggctgtgttaggacagtattagcatgaaggctgtgcgaccatcatgcctgctgatccttgaggcaggcctggtccagaaaactctgggtcagtgactgcgcagggccagccgctaccaggacggccctgaaacaggacacatctgttttttgtccctcaccctgggcaggccgcgtcacaatcacagtcctcctcctccccaccctgacgtctgagcgcagggcttgaattgttagtcccaactctggccaaagatacttttttccagagacagaggccaggaggcagtgaggggagccccgcggggaggcggcggcgactgccacagcccttccagcctgtcttgctggccgccctggttcatatttgagtttaattgtactgaccctggacccagataagcagcaactttgtgtctttggggtcacagaacattttggggcagtttaatgtggtaccaaactgaaaataggagctatttatagatggagcagcacttagtgcttcatagaaagcaatgcctatttttaaagttacaaacgcagatatctacatagatatgctttgctgagaagttaggtctgtggtagaccagaaaccacaaattgactttttttcttagaaaatatttctatttgcggtaaatatagtaatatgtaaataatgtacatctgttgatttctggagtgtctgttattcaatgatgtatatactcccacagctcgcatgaaggaacagcctctattgatacttggttgtaaagtgaagtaagattggagggtggatggctgtcagagctcttgcagatactgtgttcactaaataaaaatcacatgtattgtt

SEQ ID NO: 15087 - DNA, 965 bp, Homo sapiens
ggtacaagcagaacaataccaatagattaattttaagagttgtcttagaatgatttctttcgcattaagtctggatgcaaactgtgcagcccttaggttcctgctgtagttttgtacgacctggcagacttaaagtaaattgagtttaaattcaaagccagttgatgcggaaggaacttttttggcatgtgttaaattgtgctttaaaagacatataaagaattgggaaacatttcaggagacgatcatagcctgtataaataccagattagaacatacggatttaccatgaagttctgtcttcaacatccattctaaagggctactgtcccaaatcctgtgtgtccttttgacttgtctgatcacccaatggaagtggatacttgtaaagtctacaccactgtacttggcgttaaatcttgctgaattcgtggtaagctgttaccatgtctacattttgtagaatgattttggtctgcagcaaaattcgatttcacttctcatacccctttccttccacttgaaatgcaatttagacagaggccctgtggtgaaagttgcaatattaagtttacctttagaagatcccttctcaaactcagaaccctagcagtgttaccttaaacaaaaatgagctcgagaaaaaagtagctcagttacagagaagcaaatcgagttatttcccacataaaaagtttcccagattctaagaattgcagtatcctgtaccctaaaatttttcaaggtgactcctgttgtcgtctgttgataactttaataaaggtcatttaaggacataagtttttaaagactcccaaagtgaaacttaaacattttcgggattatcgattgcatatatcagtttatgctgtgtgctgaattactatgccatgtgctattttagtgtttggggaaaatgaaaaataaaatttgttctttagcttaataaatatgtcttattttat

SEQ ID NO: 15088 - DNA, 707 bp, Homo sapiens
ccagggccactggaaactgtcccaggaacgatggactcacgcttttgtccttaaactgacttaccatccgaggagttcccatgacgccaaaacagcgaatgtccatcaacaggaatcggatgggaacagaattccatggtctcaatgacttaagtttatgggaagtcattgtggccataatggtagcagaagtagtgagcacgctcaggtgataggacgactcctgagacccagcgaccgtggagacagcctcgggaagccctggcccgtggatggatcccttggctgtctgaggactgctccagaagtgcgggaatccagggcccacccagaagaccgtgaacagttccttagcctcccacccccaaggcagctcttttcatccaactcagtttacaggcgtggtttgtttttcaaactgggcttcctggatgtacaaatggaactgtggtgagggtgcgggctggggttttctcctgggcgtcaccaagggcagccctgggctctggctggggatgaagacgaaacccgatcgggaaagtaagtggagcccccggccccgccgagccacagccccccaactgcctattcccactgcccagttgtttgtccacatcaggagttgctgattgaattcttgctactcttctggctctggggtcggccagtggattcaggagttgaaacaataaagcgcgcgtcaccat

SEQ ID NO: 15089 - DNA, 2060 bp, Homo sapiens
gtgccaaagaccatcaccagcatctgtccttcagggtgctcggacagaattcttaccacagcaaaggcataagatgcttgatacggaaaatcagaaacttaactcttttgttgcagatagtcatcagtggctctgtaaaaacgcagaggaaaagagccagaaggtttctgtttaatgcatcttgccttatctttttttattactgtgtacaaagatttttttacacaaagaaacttaatgctgtattaataaattcagtgtgtagcttcaattgggatagttccaaaagtgaagattttgtgaggaataagtgcaaattttttttttattttaaaaaattctttgaaactcttaagtctttgtgtctgcaatgaaattgtactccttgacagttgatagattatatattcttccatccctcaaacttgcattccactatatttattttttggcaaaagatgagctgtatttgtttgaaatctgagacactatgttcaattggatgtatctgttcaaatttattcccacgtgacgtggaagtccttcgttggatgtcacaacactacatttaaggttggtaaggatgacttggaggtccatggttttcattaccaacattttaagattctgaatgtcgatggagtctcactgaagagtcaccaaaggtgcctgccctcctcccctgctgggaagtgtcagttggagactgtcccaagggtgctgaagaatccagtggcaggggttctggctgctttccatctgagtgtgggatgggaggggtgttcatgatcatttggatatagcaatctactctgagaaatggaacacaaggagttacctatcactttcacttataattccaaaagatgactacaaccatgtccatgctcagattcaaacagttttccatatcacttttgggtggtaagatgatttaattacagttttttttttaattggcagcaccactaaccattccttacattcttttttgtatgtgtggttttctttttatttaacccgcagccgacatcgtagtttcttgttttgttttgttttacagagctgttgcatgacttatgttaccatcctaaaaaacactatattaaacatggaataaattgtctttttatgaattaggctttttgaacatcctgtgttgggatttttttgtttttcaattggcaacaaaagctctgtagggctgcagacatttaaagttcacataatcatctgtaagacattatgtattttgtggaaatactagaatttttttcctgattttgccattatatggatttgctattttttgattaatgcaaaagtatatgactttgttttttatgtgatacaccataaatattaaagtgttgaatactaacagtgctgactacaagaaggatgtagtattttggctttctgcattacaacgtcttctggaggaagggagcaggatgggtttcatttgtatctagtgtgtgtcttaacatctttctaaatcggcagtgtaactgcatagtttaacttcctgtctgtctccctcattttactcttccctccttgtcttatgttttggcttttgtgtatcagagcatctttctttgcagcatcctagtcttgcttcagtttctgtggtctcttttcatcctgcttgaagattcggagtgtggaaggaggctaggaagtctggtgcagtaggtgagcagacctcttgctgcccagcccagggtgggtggggcgcacacctgtctttgtgcatgcaaatctgatacacctggcgcatcctctggagagcacaacgcatggaaaggtctggaagctctgtgtagccattccttctgcagtcatcctacccaagtaaaagtaaccttggctatgttaccaccgttttggtcacccaggaggacatcttagcaagggtgcctgcgagggagtgtgggactgggcctcatcctcgccggcgttggaaaccaaggccttgtatgccacgccttatgaagcactgtttcacagttactttcacttcccgaataaaggttaccaggtaattaatattttta

SEQ ID NO: 15090 - DNA, 2412 bp, Homo sapiens
agtcagacctcattttatatcagagaaccctttcagtatagtgaatcagaaactcctgcctgaagtcaaacaccttgtacatcagagagttcacacaggttagtgtggacatccccttgtgtgttggactcataatctgaagactcacagaatggaaaccatgattataacaagaccacatggtataacaatactagactatagacaagtaaaaatttataaatattaagaatgtatatacatgtcaccatggattggaactgttttgcatatcagggaaatcatagccaaggggaaatctatcagtataaggaatgtggaagacataatcctttggaaactgttaatactaaaagatatgtttctgatacaatagcaaacttgaaaaaaaaaaaagaaatagaagattcctgctgtgaataaacatacttcttgtgtaaatagaaactgtaaagtcatcaggatagctagttaagtcggtaaccttaaactcatgtaagcagttcccaaagaacataggacttatgtttggggagagggttgtttttattacagtacattacaggaattgtatgttcacttcgaatcatgtttgaaaaaacgttgtatccttattttgtaattcatatagtaagagtattctaaacagcactacattaatatcatttgataggtataaagtatactttttcttgcactcttctctaggatttaatgcattgatcattcttaatgaacaatatcagctctaaaggaccaatgcttttataatgttttcaactgtatctgagtcagccagagagataaatatccatgtataaaatagatagaaaactttgcttggtaatttaaaattaataatgccagttttccaagagtgagaaaatcattgcactctatacagttttaagatatacttaaaatattcccatttgtatctatttttttttctactgttttttatttggacacttacataacagtgcagagcacaatgctgtgtaacataggaattcactgtgttttcatttgatgtcgtactggttttaaaccttgtgctctactccttcctgttaatgaattaagaacacattctaacaagggtctgtggcagacattgccgagtgactttctaacataggaattcactgtgttttcatttgatgtcgtactggttttaaaccttgtgctctactccttcctgttaatgaattaagaacacattctaacaagggtctgtggcagacattgccgagtgactttcttagtcactcccttactctgctggcggagtttggttatccatttatcctcaaaaggaagtgagataaatcctgattagttttaaccagtgacactccccttctcgttgccagcagttgatttacagtggtcacagggcccaattctagacataaaacaaaggatatacctgacagactacttctggaaaaggttttctcaaaggcccaaggattcaagcaaagggaagtggaatcttgtggtgaacagtaccttgtctggatgtggtgcctggtaaccatctttcagcaatggattatagtttaatcatggcctgagcagaaatactgaaagaccctgagacctggatgatgtctttgagccaccaaaccaagcagccttgtagccactcctcctttggactgtttcttttgtgagagactaaacttatttttaagccagttgatttaggatgctctattactaataactgaagacattctaattggtacagactgaaacctttataggagttatgcagttcagaagtggactttaggtaagtcatttattttaagctgttgatatagagatttattttctgtaaattttgacgtaaatagtttgagcattagaaatcaacttgaaacaataaaatgtatgcttccttgaactgtcatatcgttgacctgcaaaattcacctttggaacgtgacacaatgttaggcatacctccttttttctaatacatggaatacattttgttggaggtaatttatgtgattcatataccactgctacagtgttagctgacaacatatagtatgaggtaaggatctaattctgtttcctctcacatgattacttgatagctaagcatctgattggtttactgctttaccactgagctgaaatgccgtgttttccatttattaaaatcacacatggctcctgtttttgtcactcagcactttttctccatattcttcaagacgattgtgagtatggtacgtaacaggaattacatctggtaagttgtatagttttgtgtaggaactctatattcatagcatatttgtggaaatgatacctatggaggtttctcacactggtgtgtcattatacattaattgtacaatatgcattttcagtaaaatatttgaaaactgt

SEQ ID NO: 15091 - DNA, 283 bp, Homo sapiens
cggatgacggctcaccgagagcatatctaaaaaacactctgcaaacatttggtcacatgcaagttagtggtcatatgacggactgcattcaggacaagggtaaagcaatacttgctttgaagaatcagatttcgactcggtctgctgatctgaggtttttagattttaaatatttatgtggaattaattaaaggtagttggctatatcgctatcatttcattcttttgacattatttgaatattttactggaaaataagactaataaattgttaaaagttttt

SEQ ID NO: 15092 - DNA, 20 bp, Homo sapiens
gcaagtaaattggcctgtct

SEQ ID NO: 15093 - DNA, 55 bp, Homo sapiens
tcttgatggattttcatacgattgtaaatgagctatattaaagtctattaaagga

SEQ ID NO: 15094 - DNA, 736 bp, Homo sapiens
atctgtacccttcgggagggcactcacatgccgcccccagcagctcccctgggggctagcagaagtataaagtgatcagtatgctgttttaataattatgtgccattttaataaaatgaaagggtcaacggccctgtttatattggtataattatttactcttatttggtataaagggttttcgtgtatctctatgtggatctaaataatacaggattgtctagaagcggtttccaggccaccgctctcctgcctacatcccatcatggctgctgcggtgtcactgggctaccgtgagatccaagttgaaatcagaagcctactttgatggtaggtttgaatgacgtgtcctacagcctcagaggcagcaggaggctagcaaagcttaaatgcctccttctctgcccccagcctctgtcccccttggaggagggctgtaggaagattccctcttcctgccaagccaccttccagtgagctctggatgaagctctggccaaccaaagacactgtccccacagcaggtgcctggtgggccacgtgttctcacactggtggaggagctgggcttctgtccaaggcacaaaccttactatggaaagcagccatatttgcagataccactgtctccttttgtcctcttcgtggctggaattcaaaagcatgtatttctgaagcctcttgtgacattgttttttttttttttttaattaaacagaaaagatatttgacatgc

SEQ ID NO: 15095 - DNA, 448 bp, Homo sapiens
atgaaatgtttcactataacgctgctttagaatgaaggtcttccagaagccacatccgcacaattttccacttaaccaggaaatatttctcctctaaatgcatgaaatcatgttggagatctctattgtaatctctattggagattacaatgattaaatcaataaataactgaaacttgatatgtgtcacttttttatgctgaaagtatgctctgaactttagagtataggaaattaactattagaatttaaagaatttcttgaatttctgtagtttgaaaatacgactttaagctgctttagtaaaacacttccattttgtgtatagactgttggtaacttcactagagcatacataacaactggaactggaaattatacaaaagtaaattgggaaggatactccagcatctgacactggcaaaatggaaacctttgagtttctctt

SEQ ID NO: 15096 - DNA, 4634 bp, Homo sapiens
cacaagtgacagtcaagcagggcgtttttgcgcttttccttttttctgcaagatacagagaattgctgaatctttgttttatttctgttgtttgtattttatttttaaataataatacacaaaaaggggcttttcctgttgcattattctatggtctgccatggactgtgcactttatttgagggtgggtgggagtaatctaaacatttattctgtgtaacaggaagctaatgggtgaatgggcagagggatttggggattactttttacttaggcttgggatggggtcctacaagttttgagtatgatgaaactatatcatgtctgtttgatttcataacaacataagataatgtttattttatcggggtatctatggtacagttaatttcacgttgtgtaaatatccacttggagactatttgccttgggcattttcccctgtcatttatgagtctctgcaggtgtacaaaaaaaccccaatctactgtaaatggcagtttaattgttagaaatgactgtttttgcaccacttgtaaaaaggtatttagcgattgcatttgctgtttgttgttttattttgctttatatatgacttgcagaggataaccataaaatgggtaattctctctgaagttgaataatcaccatgactgtaaatgaggggcacaattttggactctggcgccaaactgagtcataggccagtagcattacgtgtatctggtgccaccttgctgtttagatacaaatcataccgtcttttaaatattttgaagcccatttcagttaaataatgacatgtcatggtcctttggaatcttcatttaaatgttaaatctggaatcaaaatgaagcaaaaaatatctgtctccttttcactttcttcagtacataaatacattatttaatcaataagaattaactgtactaaatcatgtattatgctgttctagttacagcaaacactctttaagaaaaatatccaatacactaaataggtactatagtaatttttagacatggtacccattgatatgcatttaaaccttttactgctgtgttatgttgataacatatataaatattagataatgctaatgcttctgctgctgtcttttctgtaatattctctttcatgctgaatttactatgaccatttataagcagtgcagttaactacagatagcatttcaggacaaaatagatgactcaaaccatttattgcttaaaaaatagcttacgccatgctatgctataagcagcttttatgcacattgacaaatgaagagtaagcttcagcttgctaaaggaaactgtggaaccttttgtaacttttggtgatatggaaaattatttacaaaccgtcaaagaatatgaggaagttgctgtatgacatagtgctggcactgatattatccatcatctctttttggacacttctgtaaatgtgattggattgtttgaaagaagatttaaagtttcaaagttttttgttctgtttttgctttgcatttggagaaaatattgaaagcagggtatgttgtttcattcaccttgaaaaaaccatgagtaaatggggatatagaatctctgaatagctcgctaaaagattcaagcaagggacatgaattttgttccatctatcaataatatccagaagaacaacttttttaaagagtctatagcaaaaagcaaaaaaaaaaaaaaattctaaacacaaagtcaaaataaacctattgtaaaagcatttcgtgatgagcatgaaaaagattgtttaaagatgatccccccagctacccattttccaaaactacacagatcacagctcatttctctaagtggagcagttatcaagaaacccaaacaccaaaattgctactcttcacatttaatcctacaaaaagtactccaatttcaaaatatgtatgtaacctgcgatttcaatgattgttgttcatatacatcatgtattattttggcccattttgggcctaaaaaagaaaactatgccttaaaaatcagaaccttttctccccactatgcttatgtggccatctacagcacttagaataaaaacagatgttaaaatattcagtgaaagttttattggaaaaaggaattgagatatataattgagatttggtgaaattgaaggagaaaatttaagtgagtctttaaaatatattctgaatgaaaactgtattgaggattcatttttgttccttttttttctttttctcttttctcctttttcttctttttaatagtctagttttagtcagtcagtgaggaagaattgggccatgctaacgttatcacaagagaacaatggcagaaatggtattagttatataatatttaaggacaaactatatgttttgctgttttaacgtagtgactcactgaactaaatacataattgaccaacattaagtgtatttccaatacagaagggttgaaaatattacattataaactcttttgaaaaatgtatctaaaattttttaagttctgttttgattccactttttggttgagtttttatgtttttgttttcaggtagattaataaatctggcagctgatttctgcaagattcttgtgttttgaatttctcattgaattggctactcaaacatagaaatcatttgttaatgatgtaatgtcttctctcagcttttatcttcactgctgtttgctgtctcttgatgatgacatgttaatacccaatagattaattgcaacaaacacttatactcaaataactaagtaaaaataatttttcttgttatgtccatgaaaagtgcttcagaataaaaatccacaagactgacagtgcagaacatttttctcaaatcatgggcggatcttggaggtctagtttcccgtagatgctgtaaccaattaccacaacttcagtaatttacacaaatttatcttatagttctggaggcagaagttcaaaagaagccttaagagactaaaaccaagatgtccttaggtctggttccttctggaggctccaggggagattcttccagctttcacttctagagtctgctgacattccttggctcctggctacatcacttcaatctctgcttccatggtcacatactcttctactatagtcaaatttccttcctgcctcttataaggatgcttgtgattacatttaggggatgctcagataatccaggacaatctctccatctcaagatccttaacttaatgacgtgtgccaagtccctttggctagataattattcataggtcccagggattaggacatggatgtaaggggtgagggcagggctgttattcagaacaccgcacggaggaggaagactgtgtagcaaagactctaattgatttactcaggaacagtggagttctgctgagggatctaggatttgaaagtactagagtttgcttttatttaccactgagatattttccccttattctgcataaataattttgaaaactttctatattaaatttcaactattccactaaaatgtctggtaatcacatcaagcctttagattattcaaatccttccccagcccccaggaaaacactaagtcatgaaacagaaaaacagaaggtatgataataatagtaataacagttaaatcagtggtctaatccagattttattttttaatacatttcttttggtgttaatatgggttactatgtgatcttatcatttgctagtgattattacttattaggtaagaacaatgtgtaaaatatgtctattactcaaaagaacaattgcaaaatgagtcaacttatctttatataaccaggaaagaaatatattgccagaagctacagaattttgccagatgatagggatttctaaaatgagccactttgtctatcatgcagccttttcagagcttgtaatgagaaaacattacagaggagaaggtcatttggatgtttgttacttggaatcctagaaaacaaaaactaaaatttaaaaataagaagtgagtaagctattttccatttgcgatttggtatggagaagagaggaaatagaattattaaaaaaatacaaattgggtaaaagtgatggtggaaaaaatataaagaaggcaaatgtacatattaagcaattctactaagaattggaaaaatcaagtttcaaaaagatggtaatagttgggcatgatactagaaaatttcacccagtttattcagagctcaactagtacttttaggacttctttttttatatacatgagactcactttgacatacttaaaaaaaaaacagtttatggaaagtacagtttaagaggagaatttgattagactaagtggatatctttatagaaatattaatgatttcagaattttcagttacaagtgtatataccgtggctattgtttatggattcatatgtaaggtagggtcttttttgcatatagactccagtattagttactttcattctaaaattatatttatgcttctatggggaagaaaatttttaattcacttggttgtattaaaattatacttacggtttgagaaaacatgctatgaaaatcatgattatagcaaattaaatatgctcaaaatttaaatctaaaataaaagcccagaaactga

SEQ ID NO: 15097 - DNA, 1511 bp, Homo sapiens
tcctgtgttgtttcactcttagaaattgaattagcataattgggccatggaacacatatgctggaaatctttgaaccatttcaagtctcctgctcatgcaaaatcatggaagtggtttaacagtttttgttactaagctaatgtaaaattcagctattagaaaatttattgtctcagtttttataggcatctttgcatgaagaaagcagaagtttacctgaagtgatactgcatatttttggtgcatgcattcccatagatttttacatctcccacccaactcttccccaatttccttttactaacctgtgagaaaaacccgtgaaacatgaaaaaggaaataccatgggaaacgtgattctcagtgtgattccaattattacgaagcactaatcagtaacgctacaatgatcataattgcagattgctatacgtttcccttttagaatcagtgtatcagtgacctatgacttgaggagaaacttttaattcgaagattttattaaatagttgactacaataccttgctatatatacatagtttttcttcaacatcttaactcttctgagtggaaataaaaatatcaggcataaggttttctcatgctgaaaaatagaacgcggtttttattttgcttagttttctttttaattccagaaataagtgaaaacatgttacttgacagtcaagtgtggtaatatggcaagccttgttcctttctgcatgagaatctaggagagaattcataaccacaccaataacgaaatagaagttttaaactatgtgcctaatcaatgtgtttcccaccaaagattcagaaaacaatgcttgagagaaatgggttaatgcataattaattaagcattgtggagcaaatttagggttcctgtgattaattttgtgatgactaaaatgctggaaagcgagtgagttgcccattaattatgattaaaattctcacctttcacagacagacaataagccagacaacacaatcaaagctcaatagatgatttcttgcttttttcagtcatttataaatataggtgtaatttttcatggatcagttaagtacacttgaaggaagtaaatgattgtatcagtttatttctagtataaatgggtacctgtaataatactgagctcttggaagcgaatcatgcatgcaattagctccctcctcctcacctactccactcccatctttatgacatttcaaatgtttatttggaaacaacagcctagatcactgttgaaggtgttcatggcatagttggagtctctgactgtttaaagaaatcacagaacagtacttttcttttagtgtttcattaagcctatgatgtaaaatgaaatgcttctgagcagtcttgtaatattgttcattcatattgacctgcatctcatcattgcatgttttatgttttcaaacatgccataaggaaaacgagtgcctgaactgcatgatttattagtttctctccactctgcattaaagtgctaatgattt

SEQ ID NO: 15098 - DNA, 832 bp, Homo sapiens
ttgatatgctatgtcaatctcagttttgctttcctctttgactaaataaccacaataactgatttttttctttatttcttttcaacctatcagcaaatagtctttttgttgttgttgttatgtgtgtgtcagagccactacatttaggttgtagacattatatacccttggcaatgatttagctcttgaatgtttgtgttagcctaagtataaatagatcttttaaatagatcaattataaaccatagatcaattataaactatggagctaaacaaaatattaataaaagtttatctgaaacttttttgtttatttcagagcacattattagaatattatttgcaagaaatgcagacctaagcttatatgtgaacttatttctcagcttttctatgcctccatttggggatttgagggctttcttctccataagaaaaaaatttctctccagtttctaccataattaattgtgttttccagaatgaggtattatttaaggcagacactgcccctctcaaaaaaaaatcagttttcatttgcatagtgaatattttattgcatttcaaaaacatgctaggaactgcttttggcactgggagtagacacatgaacaagaccaacagtgtaatttccttcaagttacttacattcctataatagaggaccgaataaataaacaactacatgataaatataacttcagactgtgagagttattaaaaaataaggtgaaatgatgataagaagctggattaggtgtggagaataaatactacttgagataagggagacctctttgaaaggacatagccaaaagcttagtataaaatt

SEQ ID NO: 15099 - DNA, 967 bp, Homo sapiens
cctgaatttgtacataattctcttcttttaatgagttgtccacacgcatattatgactgcatattaaaatgtaattattttatgtaatgcttatatgaactatttcttcaatgaaaagtaaaattacttatttactattgtttgcctttcacatttgttattttctattaaaaattaaagtcagttttggttacttcccccctttactacaattaaaaaaagatttcaaatataatgatgttatattaactgatagccttatatgacaagtataaaaagaagggatgaaacttaaaaacagtaaaaacaagaaggaatattgcctttacatcaatttgaaaacaatgtttcctttgatgtttgctaaaattatgcatagatacatgtttgtagtcataaaaatgtattacattggttgtcttcctaaggccacagttacctttgcaatccatataacctaagaagctgcattccagaaaaagacatcactgaggccaggcgcggtggctcacccctgtaatcccagcactttgtggggctgaggtgggcggatcatgaggtccagagatagagaccatcctggccaacatggtgaagtcctgtctctactaaaaatataaaaatttagctggacatggtggtgtgcgcctgtagtcccagctactctggaggctgaggcaggagaatcgcttgaacctgggaggcagaagttggagtgagtggagattgcaccactgcactccagcctgggcgacagagcgagactccgtctcaaagaaaaaagacatcactgaaagaaaaatgaacagaatttgtcagaattagttttttcaacaggttactttgtcatacatttctctaatatgcttggtcaatttgttttggcagactgggcagcatgcagcaattctgcattatttaaagttatcagaacaatgttaattctctaaataaaattacccaaggt

SEQ ID NO: 15100 - DNA, 1173 bp, Homo sapiens
tataaacagaggaccagctccattctcaggaaagaaatgttgtgatggcaagccttacccaaatatcgtttacacagagagatgactatggcagtgatgtttaatattattaaatccaggcatttcgaatctgtttttcatgatttatagagggtttacacaaagtgccacttattaaagagcttccacagtgaagatggagaaggtgaacttgctttgaatattccagatgtgtttggtcgtgcgtatggcagtgagcaggtatgtgtttgcttttgcttgcactgaaaattaaattgctatcaagagcaaactatgaacggttttttattcaagatgtctccagagtgaagatgccgaggatgaacttgcattgaacattccagatgtgtgagatcatgtgtattacagtgggcaggtatttgcttttgcttgcactgaaaattaaattgctatcaagaataaaccatgaaacattttatcctgaacagccacagtgcctgaattcactcaagtggataaaaagtgtattttaactctgtatatattacccttaagtcattttcctgtcttcactaatttagcaatgcattcatattagctgatgaaaataggcactcacaatgacaaccagagccagtttcttgtcttttttatacattttgtcatcccagagacaatcagtatgtgcttacctgtgttcaagtagagaaaaatacagtagagtctgataggacatattcttgtaccacagacaaaacaaatcttatgttgcatttactatcaactgctgctaatacgttattataaaacttacctagctcctgaattcttcctatcttatagcttaaaacaattaggatcataggcaaatcagttaccttgcagaaagagctttgtatgacagacattgtcttattttatttctgtaaaatattagctgtatgaatatgatttaattaacaagaaaacatttcttcctgattgacaacagtgttagacaaggtgcaaagcgaaactggttgctcaagttgatagaaaacaaaattctgaatatcttcaaattaaattcggtaaaaacacattattttttcatatgtgatgtattcatgcagaacaactatctttgtattttgtttttaaaatgtgtttaataaatgatcctttgtaaat

SEQ ID NO: 15101 - DNA, 1067 bp, Homo sapiens
aactcagactcccataactagacttactagtaaccatctgctttacagatttgattgcttggaagactcaagcctgccactgctgttttctcacttgaaagtatatgctttctgctttgatcaaacccagcaagctgtcttaagtatcaggaccttctttgggaatagtttttccttttcaagtttttcaagatgtaggtatatccatgaatgcaatttgcatttaaattccacgtatcctgtagttttaattcctcattgttcttaaaagactgttgatactataaacatcagtgaatcattatattttaaaacagaaaagggcttctcagataccctccatctactggcccatcccctctcctaaacaaaactccttcaaaacaggttaaaaaaaatatgttgtcatgaatcttcacagtaacatttcagaaaggtgcttttttggtactcttcatgggaacagtttagcagccatgagtgatcttcctttgaaagagaatgaaagaccctgtgacatttcacttcaaaaataagccctgtagctctttacggtcgcatagtatgaaattataccctgcatgctgaccctcgcttggaatggaatgccagaaatgcatggcagcagctaataagtaaagctgattaactatttatttgtcaatgttattatttaatgagctttcacatgtgatttgtttcaaaactttaattttttaatgttttgaaactttttcatggacctaaatattttcctatatgatttgtggttgattagaaatatgaaatacatgttgtagatatgtaaaatgaatattttagtctccttattacatatatgttcatggtgaactttatcaatagtatggatctttttaaatcaataagatgctttgtaaagttgaaataagtaatactttcttgtttaatctgtgcaatcagaaggtgtcttgaccttcaattcaattggtttcttttaacaaaaataaacactgctaaaagttattgttgttgcctctaacatgtataaagggtgcaaaaattgtagaataaatgtataagggtaa

SEQ ID NO: 15102 - DNA, 973 bp, Homo sapiens
aagccagagcaagtgccagtgtggatgatcctcaccctgcaagaagctggaaaactcctaggaatgcattgtcctcaccttgttatacctgcgtggcaccatggcaggattccacatttcatagaatacaggttttcaagcaaacccctgttgaccatgccctaatttcctattgatttctgttctataattgaatggatattcctatggaaaattttttgtttcaaaatacaggaaaaacattcctattacctttctgaggctggctttccagcaattgtttcaaaggaaaatagatccccttaaagaaaaaatacaggctttagggaacaaagggacaagcagaacaggtgtggaagagagattttcaggaagggaaaaatttatagctacagagggtagttagaaaaatcataacttatatgtgaataaaatacatataagcagcatttacggtagtggcattctacttattaagatgcaatgaaatgaagaaaggctttatgttcaaggacctttgccatagttcagctaattgtagttttatatagaaatgatcctgaacactctgaacttgacgtagtcctgcggtgatattctatctgcagtatttgtacctccagaatggcagatccctcagcaggaacaaaggcatattgacggttctctcagcgtatgcattaaaaaaggtacttcctgaaacttttgattcaataatgactaaacatactatgtacacaattactgtaaggctaattcacgtgccatactccacctgaaagcctgagttatcttgctataagcttttcatggagcacttcctttccagaaactgatttgtaactcatttagagaatgtcctggcgtcggtttttagcatatgtggtatttaaacagagctagaatgtgatgtctgaagataatgctgcatttctgggtttcttgtgtggattttaaaataaattgtgcctac

SEQ ID NO: 15103 - DNA, 1096 bp, Homo sapiens
agaaaaaaaatctccaagcccttctgtctgtcaggccttgagacttgaaaccagaagaagtgtgagaagactggctagtgtggaagcatagtgaacacactgattaggttatggtttaatgttacaacaactattttttaagaaaaacaagttttagaaatttggtttcaagtgtacatgtgtgaaaacaatattgtatactaccatagtgagccatgattttctaaaaaaaaaaataaatgttttgggggtgttctgttttctccaacttggtctttcacagtggttcgtttaccaaataggattaaacacacacaaaatgctcaaggaagggacaagacaaaaccaaaactagttcaaatgatgaagaccaaagaccaagttatcatctcaccacaccacaggttctcactagatgactgtaagtagacacgagcttaatcaacagaagtatcaagccatgtgctttagcataaaagaatatttagaaaaacatcccaagaaaatcacatcactacctagagtcaactctggccaggaactctaaggtacacactttcatttagtaattaaattttagtcagattttgcccaacctaatgctctcagggaaagcctctggcaagtagctttctccttcagaggtctaatttagtagaaaggtcatccaaagaacatctgcactcctgaacacaccctgaagaaatcctgggaattgaccttgtaatcgatttgtctgtcaaggtcctaaagtactggagtgaaataaattcagccaacatgtgactaattggaagaagagcaaagggtggtgacgtgttgatgaggcagatggagatcagaggttactagggtttaggaaacgtgaaaggctgtggcatcagggtaggggagcattctgcctaacagaaattagaattgtgtgttaatgtcttcactctatacttaatctcacattcattaatatatggaattcctctactgcccagcccctcctgatttctttggcccctggactatggtgctgtatataatgctttgcagtatctgttgcttgtcttgattaacttttttggataaaaccttttttgaacag

SEQ ID NO: 15104 - DNA, 175 bp, Homo sapiens
gagatgatggaaaaaagccttcacttcaaagaagtcaaatttcatgaagaaaacctctggcacattgacaaatactaaatgtgcaagtatatagattttgtaatattactatttagtttttttaatgtgtttgcaatagtcttattaaaataaatgttttttaaatctgagactg

SEQ ID NO: 15105 - DNA, 2012 bp, Homo sapiens
cactccactctatgaagctggtgttcattttgtccaggactaatggtatggacagatcttctggggcttaactcaaatactgttgtgtctgcaccagtcttttagtgtctcaaaatagattattaatacatccataagtctgtggttcttctcattctcatctataatccaccactaccaagagagatttctgtgtcttaaatgatttggtgcatattttgcaacattgagagaaaactgcccccatctcaagcaagaatggcgttggtttcttccatttcaaactaatcagcattctccagcaatgacaaagtgccagagtgtatatatgaaagctaaggaaagcacaaaacaatggttcagagataaattggctaatttgtttaacagttggagactgtgcaatgtacgacttggaggagtttgtttggcataatgattttgtaggtctgtcagcattttgatatattgtggattagccaggtgaatgatccttgaaacatctctttcaggtctggagaaagagacagaatgcccttaaagtgtgaaataaccttatacctgaattacagttttgtgatataaaataaagctgagtataaaataaaaccaatcaaacacagaatttgattggatttgttattcattggtatacaacaatttttattcttatgtgtgctttaagggctgtgttttgctcttagggtactcaattttatgtttccttttggcattctttgtgcaaaaagaagcatgtggtggctctcatttaaatttcaaaattattagttttatctttaacagattactgattatacagaagatataatttattggaagaactgccaaatacattttgtccttctaaaaatatggaaatttaaatagtagtctggaaagttaccatatgataatttttaattgtgtgatctagacatgccttaggtaactgcagaaatagcaaattaaatgattaatgagcttattagtcatagtaaacatacagattcctaattctatgacagtgtacatatatgaaaataaatgatgaaaaaagaactataatatttttaaaaatatgcttttatttatatttcacataatgtaaagttctacaaaataaagctagtaggcaagacccctcagtgtatacctttaaacccataaattaattttatatcaataaaataaaatactttctctagttttggagcttctgtatttcctatagttttctgactgtccattttatccatcttagaagtattcacatcccttctatgcaggatttctgcatagttttaaatactttcattgcctaagggtttgggtgtgtcagctttttttgttttaaaaatatttaacactaaaaccttaaaataatgaagctacttatcagaccactgagccaagatcctggtattaaaagaaagtctgggtgcttaagataaagggacagagtattggtatcccagttatttgggagctttaagattggaacaagatatcactgtcttgttttcacttagatcctacttacaaagtgagggttattaacagaataaagccttcctttaaagctttataataatcatatttattaataatgctgttgtgcatacttatagtatgcatatattcagcatatgttgcatgtcttcagaattacataaaatgaaatccctttcattgcaacttgcaagtgagaaaagatccttagtggctctggtggaagaaatagtatttcttcttctcagggtgtctccctgccttggcccctccctgagccccaggctttaaaagtgaaaatgtttgaaacatgaaacatgtctgtaggaagcatcagcatggccataagtgcagtgattttcatatatgcctctgcccatttcaaatatatttttgacatgaataaatctaacagtatacagaataattcatgtaagaccctaacgtgtacatgtgaaaaagcatttctatataatgtgaggagcactggccatcaattaggg

SEQ ID NO: 15106 - DNA, 47 bp, Homo sapiens
cagaataacttctaggttatgctattttaaaataaaataagattaat

SEQ ID NO: 15107 - DNA, 662 bp, Homo sapiens
atgtcattgtttccagagaaggagaaaatggacagtctagagactctggagctggataactaaaaataaaaatatatgccaaagattttcttggaaattagaagagcaaaatccaaattcaaagaaacagggcgtggggcgcacttttaaaagagaaagcgagacaggcccgtggacagtgattcccagacgggcagcggcaccatcctcacacctctgcattctgatagaagtctgaacagttgtttgtgttttttttttttttttttttgacgaagaatgtttttatttttatttttttcatgcatgcattctcaagaggtcgtgccaatcagccactgaaaggaaaggcatcactatggactttctctattttaaaatggtaacaatcagaggaactataagaacacctttagaaataaaaatactgggatcaaactggcctgcaaaaccatagtcagttaattctttttttcatccttcctctgaggggaaaaacaaaaaaaaacttaaaatacaaaaaacaacattctatttatttattgaggacccatggtaaaatgcaaatagatccggtgtctaaatgcattcatatttttatgattgttttgtaaatatctttgtatatttttctgcaataaataaatataaaaaatttagag

SEQ ID NO: 15108 - DNA, 80 bp, Homo sapiens
gcctggtgtggagagtctgcccttcctcgtctggtagtgctggggtgtgtcaggaccgggcactgggtgaggctaaaggg

SEQ ID NO: 15109 - DNA, 2854 bp, Homo sapiens
tgtattttaaacacgattcagtttttaaaagatcgatctacatacaatagatgaataaatgttttcagtgatatgaaaaggttaagtatgccagtagtttacaaaacagaaaatacttaactaggagtaggaggctttatatgctaaaaatgataaaactgactgtaaattaatttggggaaagccagtattgttaaaataccattttatacaaaataaaaagctgctctcactgtcagctctcatattcttccaggttttgcactctacataaaattatttctacaatgtcaagactagccaaaggactttataatacaatattatattactaaagaatgagttaagtttgagattttgatgatttgattttgtgtgtgtttaataggcttcaccttattacatgctattttattttgcttttttaaaaactcaggacattaactaattttaggttttcctttatcatggctttctacagtatttctattgtttaacataaaatagtttgccaaagaagtttctgaagtcttcacagctcttaaaagccaggccagtactgactgtgtggtggtaaatgctattcattattttcttttctttcttccaagtgcatgtgtgtccttgtcttcttaagtctgagaggttgctggaaaggactgttttcttgtacttgttcatttgtgcctcagccattctagttttgttgtgtgttggaggacagtctaatgaagacaggataaatgtgattctgactagtgggaaatttcagattactttttaatgattggaatgggctataagatattgtgctgaagagaaaacagttgttctgttcactgctttcattgagaaaatgtggaatgtctcttgactaattgacaaagtgtaatgaaatgacaagctggttgaagctggtaatcaatgcatggccatatttattcattttccacacacttgaccatctactttgtataacacattctgctaaggcccagggatacaatggcaaacaagatagatgtagttccttcccttgtggcatgtcataagagaaacagatgtgcatatacacacaataaataagaaaattaataattgtattaagtggtatgaaaaaaagggggaggattgttcactcactgttacctgtgttagtatctgcaaatgcatgaatggttgaactcccatgtcagcatttttgttgccatttatttagtaccagacatagtgctggtctcacagcttaatatttggtaatgaataaattctgctagtggtatatgttgatctgaacttacaatgatgggatatagaattggcagagtggcagatgttcacaattgtctacaagtagatgtgctagacaatggaaggatgcaggccaacctctttgattacaattgagattcatgtgactattgagccctggaaatgtagcttgtccaaattgagatgtgctgtcagtataaaatacataccagattttaaagatgtaccaaaaaatgtaaactatctcaatttttatattggtgaaatcaatatgtcttggtatagtggcttaaataaaacaattttagcctttctcagtttatttttctgcaaaaagattaaaaattgtacatgaagctcatgttaactttcttttggtcagtgctattttaaaggaagtatgagttgaaaaaaaattgaaataaactatatcatattactaggacttaatatagtggcatacccaggaaatgcttagtaagtgttcccttcacattttaaaatttgagtatacaatcatgtttgacaatatagaaatttaatttttagtgaaacaattctaaaccccttttccatagacacaagaaagatggcaaatttatgctattcctggaaaaatacattgtggcttagcaaataagcaagttcccacgttacttttgttttgcttcaagtaatacttctgccagttgtgttttatgaattaaacagggaacggcatgctgaacttgaaactagatttgttcctgcttttttcacaatgtgagtagttttgaaaagtcagatctggccatttgtctttcctagaatagcataactttgttcattgttttttttgtttgtctttctgacacagaaagactgatgatggtgtccactatgtattcttcaaaacatttggcacatgctgcactaacctagtctatcttttctatcttggaatttgctcatacaaaccctatagcctagactagatcccttaccctctctccagttcctatcattcacccatttcactgtgcaagacacctcactagtcaccagtgatacagaaatgacttttaagcagtttctgctcttaagggcttaccgttttgtctataagatacacaagtataaatgacaagtacaaataacaatgaatgtttaatgctttacgtttagtgtttaagcttgttgttggaagagcagcattttgacccttggagaagaaaaactagctgtggcattccaggtggagaacctgacagaggactaagaagttatctaatgtaaaagacctcaggcaccaccttcgcataaactttttccagacaaggctaaatgtgcatgcttcataaccataattcttatttttctttaataaatatttttctacttgtaacactgtgcattatttcaaactgtttacctgtttgtaaagcttgtctcttaatcaaatttgtcttgaccaaataagtttcctgagggctggaattatgccttaactatatctatagtatttaacagtgaatcctttgtataatgaaagcatcaacagataattttaaattgataaataaaaagcacagtttcaaatggt

SEQ ID NO: 15110 - DNA, 2759 bp, Homo sapiens
tcaatgttttaaagaattgaacactttttaggattttcatgaggcaatgagacaccaaaggactagaaaataaaacagtttttgcatttgcatttatctctcctgagcatccactaaaattattcttcctaaaaaatatattgcctcactggtttctccacccttttttatggggtaaaaaactttccagaaacattctagtacaataatttcaagaggctttccagattgttctaaagaagacttttcaggaaaaagagataataaaacagaaataaaatgcatattctatacaaacactatttgactagcatgattattatatttgtaatgacatatttcatatgagtaattgaaaagtgcaaatatcaagaaataaaaataacttattgacgtctttgttctgaaagacagatggcttcaaggatgctacaattcaaaacctcagtaatgccttgttataaaaacattgtaattattttcaacttgtgaatgaaatatatttcataatttatttgtaaatgacaaaaaacctcaagcataaaaaagagactttttagagagagagaatactaatctatatggtatttttgcatttttgcacaaagagtgaaaagttatatgtgaatatcatttaagaaaataaacatgttttgatcatactgtgcagattgatctgcatgttcatgaatgagcctaagaataaagtatgtgtgtgaatgtgtgtatacatactgtaaatatagaacatgtatacagcatatattatagcatacatgaatgtaaataggtattagaaaagaaattgtgatgctgtgggggtattattaagattctactccaatagaaatgggaaggcaattgctcaaggcccttctatgcccacaaaatcacatgtttaatttctactaaaattgcccatttttcttcttttaattaggttttgtgtaaatatcattgtgggtgatatttatgaagatgagtgatctgaatagtgtagtatacagatagactacttatttgactatttcactatgattatagtatttatgtatagcaattaaaattaatttataaacgaacatgactttaatgacatacttccgtatttataaagatatcatgacttaaaattattgatgatattgatatttcaaacaccttgcagtccagttaaatgatacaaaagggcagatgatgtaaccccccaacaatgaagttataattacctttgctgtaatctaatttaggtgttttgttttacgattctcatgaaataatataggcagtccatatataagaaagcctatatccaaagatcctgaaagaattctttgaggaaaaagtgaaaagataggctaacatttgtatagctagattcaatcctttcctctaataatggaatgttaaaatagcaaacaagaacaacacatataagtgaaaaaacaacatatatctgaatatatttatcagaatataacctctggcaacagacaaagaaatctatcatttttaaatacataactctcactatattgtatacttttctttttcctcaaatctaatcaattttcaagtcattttttatgagttacttgttgaaccataggtaaattaaaatatttactgttcagtatgagaatataatttataaacaaaacatgagttttaattgtgctaacacagtaatgatcattcaagttaatgaaaatttgaaggtcttttatagcaacatgatcatcgtttaacctatttaaatcagctcacttaaaattctggctgtcatctattcaacagaaataactggactctgcttgtttggtgcactttttgaagtctcccaattcctttggataacttcattgcctagtagattacagaagttgtccataaatgcaacctcatatagtgaatcaacatcataactattcattcaatgccacaaacaggcatgatctttgccaatgaaaatctaaattacatcatgaagatatttgtgtgtgtatggtcctcctgaattcatgcaaggatgtagttttgtactgaaagaataaacactgactctaattttcagtagcatttctctataaacatgcttgttcaatacaaaattataatacatcagaaaaatgttgtaatgccttttgaactgatctataacataacacattaaaggacaaaaggagacatatcactgctttgatgtatagttaaaaagagatgccatcatcacaattattcaaatagtttacagtgtatgtttaaccaagtatagatatatttttaaatatgattatttctacctagtattttcagaattgagtttagaatgatttacttgggatgtgcggcgattcttttttagataagtgggggatgttaggaagacattgttcaagtgcttgaaactttaatttggacaatacattgaaccacatgctggaatgttttaagtgactaccttatagttttagtatgagcctacccttggaagaaagtaaggtgatactaaattagaaaaactatgtgaaactggagtggtggtatactttggaccatatcaaataggtagagtattataagcataaaagaataaaattgggctcgctttggaaattttaaacatatatgtgtatgtgtgtatatatatgcatatacatacacatatgtgtatatacacacacacaatggtttggaagtggaacaggaaatgataactctactgacatgtctataataaaatgatgtgctttgaaact

SEQ ID NO: 15111 - DNA, 318 bp, Homo sapiens
aaacaaagcgtgtgtttttgatgggagggaaaatgaggtaatggtgtgtgtgtgtgtgtgtctgtgtgtgtctgtgtgtgtctctgtgtgtctgtgtgtgtgtgtctgtgtgtgtgtgtctgtgtgtgtgtgtgtgtgtgtgtaggaaagaaagaatctcagaaaagcattatattaattttcttcatgctcaaaaccagtttttttttcctgatgaaagcacagcctaactgataaccaagatgggttttatcctcaaatatgtatttttgtgtatgtttcaaatacaagtattaggctgctttgttcttagaaagg

SEQ ID NO: 15112 - DNA, 2006 bp, Homo sapiens
cgcccaccctgcgcccgcccctctccccgacctcctcccaccaagtcctcttgggccctgtctgtccggacttcaactccagcctttccctattgcatccgactcgctctctgtctctttctgtttctgcccctcttccttcttccttctgtgacttaactttgtaaaggggatatggacaagtaagtaacacgcatcgctgtcccgggccctggctttccctttccacgggtaacgctgcctgaacccgttgcagccggaacccgcgcctcgtcgggcctttatttctcgttctctcttccttgtcctcccctcctccaccccccaggttgtgaagggcgtaacttttagagggaacggccactggaggtagagctggactaatccagtgcctggtagacagcgggcctcgcgcgggcaggagcggctcggctgacaagcctgagcggagcggtggagagggagaggctggaggcctgggcagaacagcgccgcccgggcagacggctgcttggttccagagccgctgtactgagcacctcggcttcggagcaccctgccaggcccctgggcatcgccggacgtcctactcaggctgtcggggcttggtgggggtgacttttggcagcccgagacccagagtttgtagagtttagatctcccaatgtcagtctgcctctttttctttgttccctgaggtggaaccgatgcaagtttcagcaaagggcagtcttgtcgaatcgctgcagcagctttctttcatctttatagcatatattttatttttaaaaaaactagggggaaaatagcaaccttccatttggtttcccttctataatagttttttcctctaacggggagcaatctttctctcgaaactgctaatattgatcccaaagttactttgactgcattaacttaacttacggggtgggggcgggggtgagggtaggtgcttttttcttatgcaaaaatactcctttccggtgagaccagattaactatctccatgtttgtccttttctacctcgttttttcaccactcccaaacataacctcccaatcttttttgttagtccggccgtcaattgtatagtaccaatttcgtaaattctctcaattcatgaagatcgtagggttaaacttttttgtgtgtgatttaaacttacaaacaagtgaagaagctatcgtttatttcagacgaggctgtagtttaaataccaaaagagggaaaataaaaaagaacctttgtaaaatatatctgaacctaatggtttgtacaactggagaatcgttctagattagttaccaattaaatataactccgccagtgtaagggtgtgaggtgcagttgtccaggagacgattttgtatagtatttttcttgtacattacttccagtaaatatttgaaaatatattgaagtaaacttgattttttttttttgtcacaagaaaatattaagagttattgttgcagttctgatgagctgcaggttttttgaactcacttctggaggtgcagagccacaaacgcactttcggggcctagttttgctcgaatatgaatttagataggtatcaagctgtaactaagacaatattgataaatgttggatgacatttaatttaatggagcatgtacttatttgcatttgctggcagttcaggcatagttaaagtgagagttctcctatatttcataataagtggtctgccaaaacccatgtattaaataaattgtccaagtgaaactcgactaactttggcctttgtgtatttcctgaaggtaatattgttaactgttaataaatacttctgacactacatttaaatgtttgcagattctgcaaactaattgctcattgtaatgttgaaataatttggatatttcacattgaaatgaaaagcctttctctggagcattttagatttgcattttaaatgcatgaaatgtaattgatttatttgtaatattttaaatggtataataaactcagataaaag

SEQ ID NO: 15113 - DNA, 1420 bp, Homo sapiens
gaggaaaacaaacagaaccagccacctcaccatagagtactccaacaagacatgcataccattggtgcctaagaaagatttttttacagttgtgtttttatacagaaattctttgtagaaattactattttttgttaaagattgtttatatgcttacaaagatttctcaggaagacagcagagcagaggaatctatatagatgtatgcacagacctgtctgtatgctgaactttgttaaaaatatctgccagttattaaaaagcacagtttaaatggggtggggttaaagttcaggtaagtaagttagagagaaaacattgtatgatcagctcctgcacttgatctatctatctttggcttcccaaacagtaactcactccaggccaagtgtgccttagcacgagtgaccacagtttaatagaccacacacatcgtttaacctgctcttggtcattggaaatttacactgaacaaagtgcaattaactgtagaacagttttatttttattaaaacttgactgaacaaaaggggaccatcaacattgtagacactggacactggaggccttacagagtgctagcctcttccttcaggactcacctggggcctgctgcttttatattttgaaagagtttaagggctaataatttaatttgttgtttgttaaaaattaaaatctccgttctttccggctgcattgcttttgcatgttcacatatgatgtacttttatgatgtacttttttttttttgagatggagtcttgttctgttgcccaggagggagtgcagtggtgcaacctcggctcactgcaacctttgcctcctaggttcaagtgattctcctacctcctgagtaactgggattacagtcgtgtgccaccacgctcagccctgagttagtttctagtatttttttctgactttcactctaaggatagcgttgaaaaaagaatgcacgtgtgagttactaaaaagttagaataatgtgcatgggaacagtgcagcaacatgctagaaaatcctcactgcactccagcagaggctagaggaatgccagtgttaccttacgcttctagaagcagagccactccagccagaacccattttgcagtcttctcttcgctcttcagcctgaaggtccagatgtagctggggcctctcagtttggttctatacacagggcactcgtaggtctgtttggtttcttgtctgtccacgggggtggcttttgcaaagatgaccggcatagggcatgccagctccttgagacgggcttcaacaatggttcctgcttgggtgtcccagcgggcgcctatggcaaaaacacagcggttgcaattgtgtggcagcttgctactaatgataatgatcaagtaagttgtttgatgcaataaacattcaacattctggttttgtc

SEQ ID NO: 15114 - DNA, 536 bp, Homo sapiens
aggattatttggtcttctggatttggaggcaatcagcggacagcatggaagatgtgtgctctggctcggataagagatgggacatcattcagtcactagttggatggcacaaggctcttcacagacgcatctgtagcagagtggaacttgtactaacttatgatagaatgtatcagaataaatgtttttaacagtgttatgcttgagtcttttttgaattgaacatgctaggattatcaggtaaaaattaagccttttggtactttctcaaaacagggaatttatgtgtgtacctaggtgctatttaagcctgtaaatcccagcactttgggaggccagggcgggtggatcacgatataaaaaaatttttccaagttattcctgcccattgacctaacatatggattacagtttccctttgcagtgaattaataactccttctaggatattccgaggtagtaagaatacagatagttctgtttgtgacaaaccaagctgttacttcctcctctgcattaaagttctgactgcaaga

SEQ ID NO: 15115 - DNA, 1948 bp, Homo sapiens
ttagtaacatatttttctcccataacctagtgaacctggaaatacaactttgcttctttatgaaagtaccctgggtctttcatccgtattcctgacaggagccctgatgtcttaaattctgaaggctcccctgactttatgaagggaagattgtctaggttgcagtaagttgaaatatggttttgttatttcttgattaagattttttccccttggtttgagtcttttttttccctcctcttatttgttattgttgccctaagattgtcagtgacaataaattttgacaggttgtctaatcaagttggttatgtctcatgtgaggttgtaaggtggtttttcttgttttggtttggtttggttttttaatagctcctattttgatggctgtgtgtttggccttcagagtcaaagggagtctgcatgtatgggaactgttttatagagaatggggcagaggcacaactccaggaattctctagctcctggtcaggaagccaatctgaaaacaggcatgtggaaacacaaaaatgatgtgtatgaaaagcacctgatgaaaatatttgtaagcagatcatctttatgattagaacaatttgctcaaagccctggaaaatgcctggtaacccagtgcctagaatattatatgattccaggggatggctagaggcatttctgttgttatctctgaaacatttttatatcaaaaatcagattgctggtaggtgtgttgttttgaagtgttttatctggatttagcatgtgaagatccctttcaattattaaggtataataggctgtaaagctgatttaccctactgctggactttggaaatcctagttagtttggactcctataattcagagcatacgtcattggaagacttcctggaaatcagtgtaaatcttgcaacatagctctcaagataccactgtataatatgtaattgtttgtctgcaaatgcatttttcatctataaaatgtcatgaaagaaaataaaggtagtgaaatatggacaaaggacatttatatattaactaaagttgtttatgtttgtgttcttaaatttaaaacacgaagaaaaagaaatgtctttcttgttagtgaacaggcctgttttaaatatcttagtatgatatcaaaagaataatcaatttagttacctcccaactaaaaagtaaaaatgaaaaagacgacatggcagaagttgaaacaaacttgtatgtatctgtatgtgacctctagatggaaataaaagtttgatgtttgctagccgtggtccttttggctatggttgcggttcccctgtaaagcaaatgtacttaagtcatcattcagagtgagagagagaaagcacggctgaggctgagtcagttgaccgttgaggaagacctaaggagctgtccagttcttggctctttttcactgtgactgcacagcggtttccttcttcatagtcccttgctgtagtcaccaagagagcatgctagtgttttcctcttgttcctgcttatgcagagctcagatatatgaaaaatttgtatgctttgaaggctgccaaagcatttatactctggacatagttttaactgcaactgctttggctaccagtttaaaccgagttcttcaaaaagcatgaactcgttttcattcattagccctgtttacaatgtggattttgacataaatgaatttgattttcttttagctccagtaacagaatggaataagatctattgccataaattgtagttaagaactgtaaggcaatcgggcagtgaaacttgatattgtattaacttaataggaaccctgtgtacaatttaaaatatttgtaaaatatcactgtgaatttacagatgtctttttgtcattctttaacaatgaatttcccctgtgcatagttattaatagtattggtattattaaaaactaatttggcatttt

SEQ ID NO: 15116 - DNA, 2152 bp, Homo sapiens
aggctcaggaaacagcccaccacagaggcagatgccaaaccaaagacagattgcttaaccaacagatgggcgctgaccccctatccagaatcacatgcacaagtttttacctagccagttgtttctgaggaccaggcaacttttgaactcctgtctctgtgagaatgtatactttatgctctctgaaatgtatgacacccagctttaaaacaaacaaacaaacaaacaaaaaaagggtgggggagggagggaaagagaagagctctgcacttccctttgttgtagtctcacagtataacagatattctaattcttcttaatattcccccataatgccagaaattggcttaatgatgctttcactaaattcatcaaatagattgctcctaaatccaattgttaaaattggatcagaataattatcacaggaacttaaatgttaagccattagcatagaaaaactgttctcagttttatttttacctaacactaacatgagtaacctaagggaagtgctgaatggtgttggcaggggtattaaacgtgcatttttactcaactacctcaggtattcagtaatacaatgaaaagcaaaattgttccttttttttgaaaattttatatactttataatgatagaagtccaaccgttttttaaaaaataaatttaaaatttaacagcaatcagctaacaggcaaattaagatttttacttctggctggtgacagtaaagctggaaaattaatttcagggttttttgaggcttttgacacagttattagttaaatcaaatgttcaaaaatacggagcagtgcctagtatctggagagcagcactaccatttattctttcatttatagttgggaaagtttttgacggtactaacaaagtggtcgcaggagattttggaacggctggtttaaatggcttcaggagacttcagttttttgtttagctacatgattgaatgcataataaatgctttgtgcttctgactatcaatacctaaagaaagtgcatcagtgaagagatgcaagactttcaactgactggcaaaaagcaagctttagcttgtcttataggatgcttagtttgccactacacttcagaccaatgggacagtcatagatggtgtgacagtgtttaaacgcaacaaaaggctacatttccatggggccagcactgtcatgagcctcactaagctattttgaagatttttaagcactgataaattaaaaaaaaaaaattagactccaccttaagtagtaaagtataacaggatttctgtatactgtgcaatcagttctttgaaaaaaaagtcaaaagatagagaatacaagaaaagtttttgggatataatttgaatgactgtgaaaacatatgacctttgataacgaactcatttgctcactccttgacagcaaagcccagtacgtacaattgtgttgggtgtgggtggtctccaaggccacgctgctctctgaattgattttttgagttttgtttgtaagatgatcacagtcatgttacactgatctaaaggacatatatataaccctttaaaaaaaaaatcactgcctcattcttatttcaagatgaatttctatacagactagatgtttttctgaagatcaattagacattttgaaaatgatttaaagtgttttccttaatgttctctgaaaacaagtttcttttgtagttttaaccaaaaaagtgccctttttgtcactggattctcctagcattcatgatttttttttcatacaatgaattaaaattgctaaaatcatggactggctttctggttggatttcaggtaagatgtgtttaaggccagagcttttctcagtatttgatttttttccccaatatttgattttttaaaaatatacacataggtgctgcatttatatctgctggtttaaattctgtcatatttcacttctagccttttagtatggcaaatcatattttacttttacttaagcatttgtaatttggagtatctggtactagctaagaaataattctataattgagttttgtactcaccatatatggatcattcctcatgtataatgtgccccaaatgcagcttcattttccagataccttgacgcagaataaattttttcatcatttaggtgc

SEQ ID NO: 15117 - DNA, 775 bp, Homo sapiens
taacggaatggttgcaattaaggacattttttttcctcttttttttttttttttttttaattctgagatttccccaagctgtggattcttcctactccttaagaaaaaaactttggtttatttagcatctacacttttgtcagttgtgttgctgttttccacccattttattatactcttaaaagatgtaattgttgtcattttgaacagttaaacatcttgagtataaaaagaaccccaatgttatgttatgctttgtaaatttttttttttgcttttacctagataaacttctagctaatcaaataaggaaagaaactgtctttttaaagcttcttttgtgttagatactgtattagagatctgcatttatcatgagttcctttttttttttaactttatttttgggaaagtaacacatgaagtagttcagtcatgtcaggtttgtctggggtggaatggaacagtcaggtagttgaaagtttttttttagagatgaaaagcttgtgaactcctgtaaaacatgctgtatttgaaatacatctgttaaaacttaaaaactaaagtgtgattttttttgttgttgttaagtttattgaagtttattcccttaatcagtgaaggacaacccttatttattacctagagcagttgtataattcgctgttagaaattttggtattgggacagtggataagcaggttatcacatagcatagaattcttaaaagatacatgtggggaaaagtagtctcaaataaaagctaatttctttg

SEQ ID NO: 15118 - DNA, 671 bp, Homo sapiens
tgtcatatgtgaactagaagtacgtgttactggccaaggctatttttcagaactgttaaaggtcatatgcacgttaaaagttgaccaatgaaatgaatttacagaacagtttaagaagtggtgacattttgcatgatgaatgacctgacttttagccaccaggtactctttaaacagttttccttatcagaggccctcctgtgctggtgacccagcatctgagttaggttccagcatgtaaagagctgggagggcggagaattcttagcatacattcagacgttttttctgcacaataataagtccatctgtcacttgcattccactttttgttacatagaaagagtctgaccctttaatccaaaaggtctttttacattgtgaatgctgtgggaaggcaatttctctgcacacaagaggctacgttttggaagtgatgtatgttatttgatgactgaaaatgaactgtaaatgctcctagagtatattcctctgctgaacaaaattaaacttcaaaaaaatctaacagtaacacacccctgcttgggaccctagctatatgcattttatgtgaccttgccatgcttcagtgaacatactaattctatgtctagcacatgttgatttcctatgtattctgggtattctattaaaggaaactttgaactatg

SEQ ID NO: 15119 - DNA, 3636 bp, Homo sapiens
aaaagtaaagaagaaagataacattagtgtatttctcctgtgcttgccttctgaagtggcacaaacctgtgtttatatatttaaaagatactctaggatgatcacttgtgcttagcttagcattgtaactctttaagtctatattttcctcagtgcgtttctttacaatttcaaatgttaccctgattgtttatatgaatgtagaacaccttgacatttctttttatatataaactatttaataaaaatgaaagattgaatgttcatgtgtgggttaaaaaaagaagctttaacactaattttccaaaggttagggaagattccaattaaatttatgccttataaaattatgttgtagaaaaaaaatcaacctctcccaggtgcattaagaaataagaattcccagggttactcacccatgcgtaagctacccaagtttaatttggtagctgaaatatctttttgcctcagacagctcttgaattgctcatacagaacaattctgctggtgctggagtctgaagaatattttcatttgcattttagtggttagggagaggatataagattaatggaatgtatatttttatataagacgtatacggcaccttcttgaaaaggaagcatttgaacttgttcctccctatagttctattgccttatatgcaaaattgtaccctgttgctcagagaaattattcataagagaaaagaattccaattaattaaatatcacaatagcatcccagagagacagtaggaaatttctccttagtgagagctgagtccttgagaagttaagagactgtttcctgcttcccaccccaccccgttttttgtccctccgtttgatcacctccctgttgagtatggaatgtcccagtttaatataaaacatacagtttattccacacagcagtttgactttgtaaaagtttagcaaaataactgattgttttggataactcaacatgtttttcttaaatgctgttttagtattttctacctcttaataagcaccatattttagatcttgtataaaaagttgccatctgccttatagacaaatgtagagaattgatgttcttgctttgtgttgtgttctggtaaagctttaagtgagtgtcttacccctttcctatactttcttgttatccatatcattcttttgtgagttttgcagcagtcttgaataatacagattataactactgaaaggggaaccttcgtctttttaaatgtgttatttcacattacaataatatgtgtagtagttgaattgtgttatcaaagcatgtccaacttctgtccagatgacattaaaaccaaagcctaattgttaagcctcttattctaaagtccatagcaatgctatggaatatcaagtataatgatgtagtaaaaagatttctccagaaaacactttgagatacttaaagaaattcagagcatatcgaatgttatgaatgaagagtaaaataattacaggaaaagaatgcatgatttttcattgtcacaccaaataaccagttggacaatattgcattttcaaaatggagagttatttaaagtggatgtgtagccttctggaatctgcacgtgactggcattttaaaacaactcattaaatattggattcattttatcgagatgccaagatgaacacaatgtgaatatcatttccatttctaagcagttgaatgacacagtcagattctttggtgtatgctttgttctttccatctcaagcatttatccaaattctgctcacagacatgaggaagcaggctgtagatttaagggcactcaaggggaaaacaaatgtagtttccacagtgtgaggataaatgtagaatcgtggtaatattggctgttaaattggcctgctccagagactggctcaaaaaagaaagaagcaacgaaaacaaaatgcacagcctgaatggacgtagcactgtcatgtggcatttggaaaatctttaattatcctaatgttatttcacttgcccttatgctttattttagagtcccagggacaactggatgaaacattacgtctgtagtcatcttatttgagatgggggtgggaacgaattaaaatatgatagagaactatatgcagattttaaaatctagtcagtactagcatctataaagggcttttctgaaatttaaacagcttggtgatgcatcctgatattataagcttaaaactatcttgagggggaaatgacttcttttctccttctgtcccttttctcaaaagcatctttcccccaaatgtatgtctctaggacattttatagttttaagaggaagaaaacagaaacgtggcatcatttgggaagaaccaaggtagaatttaattttctggactttaaatctcctggttaaataatgctaatcactgtaccatttgagttacatgttttaacctcttttttttttctaattattccatccaaaatttctggtgaattacacagaaatttttggaaatgggactttgtgcaggtaaccaccctgcacttcaggtaatgttcctgtcacagctgtcgactaccccacgctgcaggaaatccattcagaaatgagctaacagtctccagtgtagcaggagagccagtcacttccctccccaggccccaaagcaccccaaggctggtattccttgagtcataggtattaataataaaagcctcaatgcagcttctccatgtagttcctctcctacaagccaggtggattctggtcctaactaaagagatgggagttcacctgagggcaagaagtacccaggatgcccaaacagccgcacaggtgtcctgtgcttcctgtgagacttcctgggggaaatatacaaactaatatattttttaatgtttacgtcatttacactgctgcttttctcatattctgcttttaattacttgtagtaaatcatttgtttgggcttcaagcactgtcttccatctgcatcttccagatttatcatgagtgatcttgttctactgttaaagatgtcaagcctaaaaagtaataaagtttttatttggctgttgaaccttgatgtagcccctactacatacactacaagttatgccttctggctactacagaatctccgcagaccttttagttatgagtagaagcaataagaaggtgtccttatggtcttaggaataatagttccaatgtattggcataatttgtttgaatgtctttattttgatattaacaccggcataaatctatttttgctaccagatgatagctattttcatttgctctattttcctctgcattgtactaatctgttactcagtgttagtcttcatttttctgtgttggaaacctgcgtcatgtaaatatctgcaaatcatgacagtctaaagtgcaaaccattttcagagactttggggaatgcagtgatcagaagtggctaatttattttatttctgattattttatccagagggtacttttttaatggatatttgtaaatcttccacttaaccactgaaaattattttgttttaatcccacccttccatccatacctctgcctccccaaaaagctcctattaatttgcttatccccctcatgtagctagttgaatgtgaataaataacatgg

SEQ ID NO: 15120 - DNA, 5043 bp, Homo sapiens
taattggccactgccttatttattacaaaacagaaatgtctcatgacttttttatgtgtaccatcctttaatagatctcatacaccagaattcagatcatgaatgactgacagaatattttgttgggcagtcctgatttaaaactaagactggcttgtggttaaatgaatatgttcagtttttgaattttaatagtaactccaattcagtaaatggtatcactgtttaccccttttaaagatatgattagacttcgttagtaatgttcaacttttcacaaagatggtgagtgccatcttaaaacttactggagattggttttatatttagatttatataactggttatgtgaatatatttaaatactggggaaattgcttcactgtcttagaaccaagcaagattcacctgtgttttgtgttcatgttcatttgcctcttaaaggcaagggttgaagataaataaggtagcaatgtctatagttttggccttaactatgccaatctaattataattccctgtatttaaaatggtttcttttacttattgaaaggcattttagtgtggtttatgtgtaatattaaagattattcaacacctctcacatcttacagatctataaggtcacatgcttttaaaatagtagcaagttaaacttcactcttgaattctttacaatctaagtcaaactaagttataatttaggattgtctttaaacagccattcagaaacaaaactgtagaactgtgtatttgattgggaatggtgcttttgccaacttaaaaggattaaagtaacggagatatacacaaattttaaaattatgtgtgatcacaagactaaagataattaaaaagaaaaccacagatcatgactttttgactgtgcttgatttcatgactgatgcacaaattttaatgattaaaaagtgcaggagccctaaatgtcagtgcagcagccctaaatgtcagtgcagcagtgttaaccagtcatggtgctagattgtttacttggttttctaggactgcctcaactagaataacacttcactaattgactcttagtttctttgctcagattgagaactgcagcatttatgccagacatggacagaggaatgcctgtggtcatagttttgtgatgtgtaacagtgtataattacatactgaattatttcatgcatagtctgtgccatacacatttagagtagtccttggagattttatggagatggtgagcacaaggtaagtcataaagaataatgagaaaataaatctatgctggtgcagctgagaactgtatctttgtgggacagtgagaagactgagaagatgtgaatccatggtctcaaaggtgatagggacgattagataggtgttttaaggcctgaaagcaatttataacatatgagtcttatttttatttatagaaatgtggaaagcttgctgtaattcatatttgaagtcctagtctgagttctggtggggaatttaaaaatgcatcctggaaatcctttaaagatttcagactttgaaaggccttgtagcagaggacttggtgactgtataaagttagtggtattcagggacagtgtagcaagtagcttacaaggggacaattctggactaatgagaaagacctgaagtgaaggctagagagttgattttttttttttttggcatcctggaaatgatacaggaaacatattaagatagatacagaaatgtgttcaaccttccatcttggctagttgtggcgtttagtttgttttttgagacatggtcacgctgtgtcgccaaggctggagtgcagtggtgcgatctcggctggctgcaacctctatttcccaggctcaagcgattctctcacttcagcttcccaagtagctgggactacaggtgttcgccaccatgcccagctaatttttttgtagagatggagttttgccatgtggtcccaggctggtctcaaactcctgagctcaagcaatccgtccacttgccttggctccccaaagtgctgggattacaggcgtgagccaccaggccctgcctggttttcaaattcagaaatcttattatttaacccagaagtaatcagcccagtagtaacttaggtttaattttttttcaggtttaaaatttttctcatttattttttctgagacggagtttcgcccttttcgcccaggctgagtacagtggtgcaatctcactgcaacctccgccttccagttgcaagtgattctcctgcctcagcctcctgagtagctgggattacaggcacccgccaccacgcctggctaatttttgtatttttagtggagatggtgtttcaccatgttggccagactggtcttggactcctgacctcgtgatccacccaccttggcctcccaaagttctaggattacaggtgtgagccaccacgtccggccaatttttctcatttctatgcctcctatattaaggtctgtgttggcacagatgagtaactgccatgttctaggtcagttatacccaagcacttctggtggtttaaaatgtgattctgtaacttttttatttttatttttttgagataatttcactcttgttgcccaggctggagtgcaatggcgtgatcgctgctcaccgcaacctccgccttccaggttcaagcgattctcctgactcagcctctcaagtagctgggattacaagcatgcgccaccatgcccagcttattttgtgtttttagtagagacagggtttctccatgctggacaggctggtcttgaactcccgacgtcaggtgatctacctgcctcggcctcccaaagtgctgggattacaggcgtgagccaccacgcctggccaattatgtaattttttaaaaaggacatttctatcagggatatataccttcagaaataaggaaataggggaaaaaaagagcactataaaccacatgttttcatttctagtgcttcgctgtaagtggctaggttggtagaatcaaaaacaagggccagatgtatttaaggggtattcagatgccacctacatgcttattttgtctagaacagtgctgtctaatagaactttctgtgacgatggatattttgtagacttttgctgtccagtgtggtagccactaaccacatgtggctgttaagcccttgaaatatagctagtgtgactagaaagtattttattttaaatttacataggcacaagtggctagtggctactgtattgacattctgggtctaggactagaaccagtggtctgtaacaaaagtactttctctttactctattaaatctagaattagccgggcatggtcgctcatgcctgtaatcccagcactttgggaggccaaggcaggcagatcacttgaggtcaggcgtttgagaccagcctggtcaacatggcgaaaccctgtctctacaaaaaacataaaaattagccaggtgtggtggtgggcacctgtaatctcagctacttgggaggctgaggcacaagaatcacttgaacttgggaggtggaggttgcagtgagccaagattgtgccactgcactcaagcctgggtgacgagtgaaactgtctccaaaaaaaaaaaaaaatctagaattcttggaagtacattatattgcccttcagaatagattccagttcctgttgtgctcacctttataattttaccataagttttacctattcgtaagttggcagttttagatagataacattctggtggtagctagggatttaccttttgtcatccttttcctgcacttctcttgaattcctttatagatgtacagttttgctttaaccactgaagattgctgtaaattataaagggtgtgatagaatccacatggctgtcaagaaggagatcttaccaaggacagttgactgactagtctcagattgtttcatatcatttatacttgggtaagagtaaactagataactgggcgtcgtggtgcacacctgtagtcccagccactctgaggcaggaggactgcttgtgcccagaagttcgaggctgcagtgtagctgtgattgtgctactgcactccagcctgggcaacagataaaggaaactccatctcttttaaaaaaaaaaaaagtggtctgggtgcagtaggtcatgcctgcaatcccagcactttgggaggccaaggcaggcagatcacctgaggtcaggagcttgagaccagcctggccaacatggtgaaaccccatctctaccaaaaatataaaaactagctgggcgtggtggcggcacctgtaattgcagctatttgagaggctgaggcaggagaatcgcttgaacctgggagatgggggttgcagtgagccaagaccgccccatcgcactccagcctgggcaacaatagtgaaactccgtctcaaaaagaaaaaaagtttccttagaatggaaaatattcattcatgagctcttttggcaatccgtcatcagtatattctgaaaaccaataagatgttgccaagttgggggcgagagctatgtaatgcaaggcatatgcctgatgaagtatacaaatacacctgaccagaaactttgtctcccacataagtctcttctaggcactgtcggggtacatactgagctgctgctttggctgtattttctgtgcctcagaataaccattgtcctggtgttcatatccttagagttcagtacaaaatgttggatatccatttaataggttccaggttatcttagttggagtttggggtatttgaaaacgtcatgccttcaggctatcatttccctcagaaagctaagtaaatttactgcattcatttctcaaagagtaaaagtgcaggttgtatgtgtctatgaacatttaaacatgttaaaatgttaaatttaacattttaaatttaaacatttaaatatgtctgtaacttgaacagtgtagtttcagaaaggaccactgggctagtgtaatgcagaaaatgctgggtctaggattaggagaaaattgtgtttagtgtgtatcaataaacagcccgtggaccc

SEQ ID NO: 15121 - DNA, 1275 bp, Homo sapiens
gatactcattcttcccttcaaaacccagcctcttgcaagaagctaaaaaatataacagaatttccttcgtattgctggattctgttttctagattaaaccacaaggaccttgttagtgaggtttacattttcaggaatttaagttagtatctggttggaggaacccagaaaaggtgatgttatgacttcttgaaaagtttaacaatttggcaataaaatattagaactagaaaaatttatagtctttaatctctcatcttcagattatacaaggaaattttccaaaatcacaaaaagcaatgtgtacaacaaagtttacatcattgtttcaccaaaaaaaattgaaaagctggaaagaactcaaatgatcaataattaatgaatgactatacaaattatagtatcttaataaaaatgagaacactgtccctttatgtaaatttttgtacatagtagcattaggtagaaaagacaaaacccaaacacctagttaattgagggatggacacctctaaaaactatattgtcttaaaagtatgtggactctgttcctttatgtaaacatgtaaagaaaataagtcagcgaaaaaaatgaaacccaaaactctctgcatgtacacattacaaattgaattgtttgcttacccttaaccttctgattgagaaacataactgtttcttttatgcagataaaattattttactgaagatctagcaatggccttaattagcaactggtgagttctaattatagcaagaaaggatggcttggtatcagttattacagagccccaaatcttcatttctggagtgtgttctctaagagtttggctaactcccatatgcaagtcaattcatttaatgtgccaagaggtagattttaaacatagtctatcgtggaagttcaagaggaatttctttaagtattttgtgaatatttattttaattttatgaccaacatgtcatttggttgtaacctccttaaaactattctgggctaaagttagagaatttttttccaactgcattctgtacagcactagttacattatgacaggaagtaaaagtttacatggtgaaataatactggggaaatcggagcaacaatgtcagttgcatgccttggtcactgggttctctatagcctttaatatgtaatgcaattgggagtgtctgaagtgagggagatatagtgtacacactttttatcacagagtagatcactggaatggaattccaaataataaactttggaaggtgtaactctccagtat

SEQ ID NO: 15122 - DNA, 548 bp, Homo sapiens
gaaacctggagcctgtccctaaagctgtggcctgtaatctacaaatggctctatagcgaagaccacacggaagagtagctacatacacttcatcagctatggatcatcaacggcaatttttccttgtcagtacagctataatagtatcttgaaagttgtaaaaaaattaaagcatatttgttacgtaaagttaaaatgatttttgtctgaataaaaaaaaagcattgcaaatgctttagaaatctctgataatggagagagagacagaggaccctcctcactaccctatataaaaatcattggcacagttacacttaataaaaaaaattaaacagaagagcaccctgaaaaacattatgatggaaattaaatagtatgccagaataacatggttgacaaataagtgaacaaggattaaaaatcacttacaaacgtgtttctgtacaccctttctatcgtgtcaaatgttaatgaatctgtgatcaattgaaatgtaaatgtctgtgtaaaactacaaaataaaaactcttagactttagggagaaaag

SEQ ID NO: 15123 - DNA, 495 bp, Homo sapiens
gcttcactgtataaataggagaggatgagagcccagaggtaacagaacagcttcaggttatcgaaataacaatgttaaggaaactcttatctcagtcatgcataaatatgcagtgatatggcagaagacaccagagcagatgcagagagccattttgtgaatggattggattatttaataacattaccttactgtggaggaaggattgtaaaaaaaaatgcctttgagacagtttcttagctttttaattgttgtttctttctagtggtctttgtaagagtgtagaagcattccttctttgataatgttaaatttgtaagtttcaggtgacatgtgaaaccttttttaagatttttctcaaagttttgaaaagctattagccaggatcatggtgtaataagacataacgtttttcctttaaaaaaatttaagtgcgtgtgtagagttaagaagctgttgtacatttatgatttaataaaataattctaaaggaaa

SEQ ID NO: 15124 - DNA, 2586 bp, Homo sapiens
aaaaggaaaattcttctgcttgtctgcaaatgctttggatttagaagcgtcatgaaagcacgagtgacagctcctaacctctccttgttttattaaacattacttatctttgactgttattttatgcagtcgctcattaaaatattcctctgatgtgaaattaaatgaaggatattaatgtaaattagatgcaaccagttaagttatacctgttgctattttgcaaagaaataattatagtttttatttacccatttgatttgtgtgaagaattcatcactattttatacgtaacatatagtctactatagcatagtatgctactattgctacttctggtgtgatttgtaatgtttcttaatcattggacatcaattatttttagagagtaatgtataatttcatagcattttaaatttagtgtatcatgcgagttttttttggtagatgctgaagaatgtggttgctaaacaaagaatgctaaagaatgttcaaactttatagataactttattgttattatttattttcacacatttaattcctattaagtacagccgcaagaaagaaaaaatgatgaagttgcaaatggcagtgtgctgtcacctgcaacagaagtgcgtaccagaagtatgactcatgcaaagcattttaccgtacaaatatcctggtgcgatgatgggcctggcaacattttctactgtacttttgtttaaatttaatgaaacaaaaaattcctaagaaataccaccctaccactaacaaaatggtataaagaatctcccagccaggccaacatggtgaaaccctgtctctactaaaaattagccaagtgtggtaatgttcacctgcagtcccagctacttgggaggccaaggcacgagaattgcttgaacaaggtaggcagaggttgcagtgagccaagatcgcgccactgcactccagcctgggcgacagagtgagactccatctcagaaaaaaaaaaaaaaaaaaacagaatctcagtgtattctcaaagtaaaaaggcataaccaagcactctcttatcttgccttattgctatactatttacatcccactgcagaacagcagatttgaggcttttctatatacttctcagagcactgaaaagaaaggaagggtttgcagaggagagtgtagaaatcccagtggtagcatgtaccaacaggtgagtagaaaggtagtgttagcctgacatttgagttatactctgtgctgcctgagcaagatttgtagaatcatataattaccttttcatgtatatttgaaatcagaggtgtttaaaatacctatgagataccaatgtagccttaacatatgtcaaaatgcattgctggttagataattatttggactacacataaactcctaatattgaatcattacctatcaggtattatctttatggaacttttcaatatctttgctttataaagattctaaacatgtatctgagctggtaatattttaaaatctccattatttgtgtaaaactgtttataagcagtgtttgagagggtctgctttaccattaccccctcaatatcatgatcatccaatctcaaatgtgaaaaaaaaaaagaaatttgattttagggattgtgagtaaacaagtttatatagagagacattgtgaagttaaagttttcagaagttacatttgtgcagttcttaccttttcctcatatagtgccattgaaatagactgaaattatcttggcaaaagttagacaaccaaagacgactttagtggactggttttcaaaacttgagcagctgaaaagcaaaagccgttgtttcccatgacaatgtagcctttgtggatttgggtttgtgctttgggttgaaaagaagtttttagtcctaggccagtagatggcagcagcttttcattgcagacaaaacctcttgaaacccttcccccatggcacaaactcgcccatgatggaaagcatctagatttctgcctccttttacagttaatccaggagagggagtcctttgccaactgatgaccaacagttccaagccagatagtctcgtgaacagtgacaatacagaaataaggtgttatttctgttcagatctccaccggcctttgttcttttaaaacttgaatataggtgggagacataagaaaggaaagaaaagacttaaaactggagtgacaggacaaataatcattactttcaattcatgactgctttatattcatttgatgaaatcatttgtatacaaaccagggagagttttctttacacccttgacaatatatcacatactcttcaagatcataataatatcattaatataaatttaaacaacatggcttgttagaaaatatgctaattgctatggtctcattatgtttgcttagcttttatttgtttttctgtgaacagttagagagctaatttttttcaaaggtgattgtaagtcatattttatatagcattttgcttgattatttgctctgtactgaatttgtactctattgccattagatcttacaataatgttccactctgcaaatttttaaggttcaaataaagtttaattgtttgc

SEQ ID NO: 15125 - DNA, 1799 bp, Homo sapiens
ggaaagttggagagtacggctacctgggtcaacccaacgcggtgcgcaccaacttcactaccaagcagctcacggaactggagaaggagttccacttcaacaagtacctgacgcgcgcccgcagggtggagatcgctgcatccctgcagctcaacgagacccaagtgaagatctggttccagaaccgccgaatgaagcaaaagaaacgtgagaaggagggtctcttgcccatctctccggccaccccgccaggaaacgacgagaaggccgaggaatcctcagagaagtccagctcttcgccctgcgttccttccccggggtcttctacctcagacactctgactacctcccactgaggcggctccagccccagacaacagcccaggcatctccttgggctgggacttcttacccaaagcacatgcttagcttatctttctttccatttacagtctctttcttcctttctaatcctatctggggagctcctggccaggataatatatttgcagataattctggaccagagacttggtgcggggttaacaccttcatccagattgggtgccagcatacattttctggtgggccttaacatccctcctgcttttaggagaattcacagaacctactgttcctttcagatgaccttttggaaaatagttccctttgccaacagaaacatgccagaaggaatcttctcatcttttatctaactatatgtacagctctcccctcccttgtccttgaaagtaggatatagcgaaaggcgagtccaggagctcaggaagaagagatgcactatatgtttacacaattaattcatcccttaatttaagtcattttcatgtgtgtgagtttgctggttgtaaatactttgtcctaagagatttatctttatacagattttctagaaatgtttaggttactaaaacagggtgggcaaactctctaaactggtacaattttataggtgaaagaaaaaattccctcatttaaacccaatcagatgcctcagagggtagccttgatttgttcttacagttaagaagccctgcagagcacaaacttcagaaacccggcttcctgtgctaagtctttcccaatctctacccctttcttctcgggccaccctctgtttaaaatttgtgctgggttattcagaacctaaaagtattattcaaaccaatttcttccttccacagttatcttagctggatataatgtattttcagctcaattgttaatgtgatggatggcacaatgaatgtatattttgtgttattcgtgaatagtcttttgcatgtcgcacaatgtttgatgtccccaaagtaccacactgagttctatcagttatcctttgtgagcctatgatattccccatttcctgtacaatcatgaacagctctgagatcctggagtgatatgatccagagcagagtttacgggtcttaggatgtctgtaataaataaatatactcaagtttcaggtatgcttaagcatccgtgtatttggctgggctacaatttgttaattcctatgaagttggcacatttcatgaggggaaagggagaagggtggtaaatattttcaaagagatgggccttttcttgaataaaagttaataacagctcctttattataatcaaagctcataatggaaaaaaagactgatgaagaaatttatgaagcagatttatttttgaaacaaacatggatacttcctgggtcaagtgctaaccttttcacctccaactggatgttgacgtatatataaacagaactcccttcaaaagcc

SEQ ID NO: 15126 - DNA, 371 bp, Homo sapiens
aaacattaaagcaaaacaaagcatcaccaaacaaaaactcctttgaccaggtggttttgccttcttttatttgggagtttattttttattttcttcttgacctaccccttccctcctttaagtgttgaggattttctgtttagtgattccctgacccagtttcaaacagagccatcttttacagattattttggagttttagttgttttaaacctaactcaacaaccctttatgtgattcctgagagcagtatgaggcctgcaagaaagtgatcatataattgtatcttcactttctttttatttttgtattacattgggatgcattgtcatgcatattttttgtagaataaattctcctttgctataagt

SEQ ID NO: 15127 - DNA, 1724 bp, Homo sapiens
tagtgggcttggggctacgcgccaggagagtctccccccacccaccttttttctttggttgcttttttttttttttttttttaggttcttcctgccctttccttccttccttttctctcttctccgccccgcactccgtttcccggtttcccccctcgttggtaaggcgtttttatagtttatgtgacgtagcaatcttggttgctggaatggctgtatcatagcgatatttatctcttcctgctcctcgataggccactggccctgcaccctttaccttctccactctttgatcagaaacagggtatatgaacaaattttctagtcgagttttcaatgtgaatttgttcttacattatggctcccgaggggaagcgattactttttttaattttaaattttttttttaattgcacttcttgtaaagagtgagaaaaaaaatcaaaggcgctttgaaacaggggctctctgtgcaaggatgactaagtgtacgtctttccgtgtgtgtatgctggtgaacagtcagatttatttatatttttttgcaagcattgaataatctaagttttaaatattatttatccccatccgttcgtatttatattaaagaattctgtaccctgatggttcagaagggttcttgggccttttgttcaattgtgtattggcgtacttagaattttttttatttgaaagagaaatataattcctttaaacggtaacgatacaataaaaccagagaagatccagcttttgaaaacagtgatttaggtttgtaacatccggcaaaactgaaaaaaaaaatctgtaaacgcgaaaaatactagatttgttttgagagttcttcattccttgctgctcacattctgagaaacaaaaagaaataaagtttttattctgaataatatccgtgttaagaaggggttctttggccgaagacgtgggtctgcgtggaattcaggccgaggcgagccggcagagcaggccggacgcagcagccctctggctccagcatggggcctggccaggctattcgcctggaagctcggcgaattctcaggatggcggctggggctccaggcggctgcggcagctctggtaacgccgtgcggcgggccagctgggctgcccggttcccagctgctgcggaggcaggctgagggcgcaggggctgccgagtgctgtgcacggaagaaacaaagacatcccggcccaaggcgcagcgggagcgcacaggtgccccgcggcccagccgggggataacgcagggcggtcttctgctccatgctcttcctcgggtcaaagcggaccaactaacgcctaaacctcggtattagccagccgcgcagaggatgccgagcactttccgggagcaatcggactcctggtctcctccggggatgcttcgcggtctgttatcgcgtcaggaggaaagaattgctccaaaaatctgcacgcggagcgaaacagtttgaaagggactgaggctcacccaggtctccagcaaacggaggactgaactggggagagtcaccctgagccagcccttccctggactgccggaatcccagcattagcttcctgctgaatgtagtatttggcattctctgaatttatttcctctccttcccccacccagctttctttttatggccccagggggagggggagagagcaaggagatcggtatctttgtaataaaactgcaattttataaatttttc

SEQ ID NO: 15128 - DNA, 718 bp, Homo sapiens
tcttctagagatcttaaccagtttctatcccttacctgcttttctcttctcttctcctgctccgttcctcatccacccctccccatctggaccataatagacaccaaaacaaacccaaattggtgaaaagaataatcaaaaagaagacattatccggttaagagtctgtgctggttgccacccaagagagaacagttgtccaggatgctggctggtggaacaacctgctggcccgaaacaaggctgccaggtgtggatacctgagaaggactacttggtatcaaatacttttgagatggctacagtcagctagctggacagcccatgctgagtggggacatacacttgcatctttgttgaaagcagaagaagacagaccctttccccaccttccttacctcctcttcccccattaaggcagctcatccaagcttgtatttaactgaataaatgagtagacattgtggacctcacaagattatttaattcttaagatgtgtagaccttgatggtaggtgtgacatgttagtttttcttacttgcatttatttaagacactgttacagagatactgttgtccccttctggggcacggtctttggggagaggggagtgcatttagacttatgtggaactgtacaaattgtgatgtggctacatagaaagccatgtgctaagaataaactccatttaaaaaacattaaaaatctaagattca

SEQ ID NO: 15129 - DNA, 458 bp, Homo sapiens
gtatctgagcgtttaaagtactgagcagtattagcggatcccgcgtagtgtcagtactaaggtgactttctgaaactcccttgtgttccttctgtgaagaagccctgttctcgttgccctaattcatcttttaatcatgagcctgtttattgccattatagcgcctgtataagtagatctgctttctgttcatctctttgtcctgaatggctttgtcttgaaaaaaaatagatgttttaacttatttatatgaagcaagctgtgttacttgaagtaactataacaaaaaaagaaaagagaaaaaaaaacacacaaaaagtcccccttcaatctcgtttagtgccaatgttgtgtgttgcactcaagttgtttaactgtgcatgtgcgtggaagtgttcctgtctcaatagctccaagctgttaaagatatttttattcaaactacctatattccttgt

SEQ ID NO: 15130 - DNA, 161 bp, Homo sapiens
atgcctgggcagggaccaggccagcgctgcaacctccttcggctttgcccccttgccctcgcctgttccccaacttttctccccgcctgctcccatctgggggcttccgcagcttcaggggagcccggagctttgcaagcgtctgtgcatttatttcttac

SEQ ID NO: 15131 - DNA, 1191 bp, Homo sapiens
ggggccgatccggggccctctctgcaccggacagtcggaaaagcgtctttaagagactcactggttttacttacaaaaatgggaaaaataaaagaaaatgtaaaaaacaaaaacaaaaacaaaaaagcaacccagtccccaacctgcactctacccacccccatcacctactccagctcccaacttttgtggactgagcggccgcagagactgggtcgccttggattccctctgcctccgaggaccccaaaagacacccccaaccccaggccagccggccctgctctggcgcgtccaaaatactacctagcacaggcctctgctcgaggcacccccaaactacctatgtatccagccccagagggcctccattcccaggaagtccctatgtatcccaacactggcagacacccagcaccaccctcccagacccgcaagaaagtgaatctcactactacctactcccctaaaactacctattttgtgctggctggcttgcctgctacctagtgccgactgctcccaggcaagtcccctgctgcttacagcccgcagcttttggggtccctgaggctgccctgagaatgtgctgaggtccaggatcagggtattggcatctatttaaatcgaaaaataatatatttattccaaaaagcatcctaagtgcttgcaccctagaatcaatccctccttctctggcttggcacccacagctcaggcccatcaacccccacttctggaggggaatgttcctgagctggctgcagatctgtgggttagcttctgcttagcaggactgtggagatgcttccagcttcgctgtcctttcctctggctcctgtatcttactgttcagctgtgttaaatatgtacgccctgatgtttcctataatagcagatactgtatatttgaacaagatttttttttatcatttctatagtcttggagttcatttgtaaggcagtgtcttgacttggaaaggatgtgttaatggggtgactttgtagcatggtatgttgtcttgagttaactgtagtgggtggggaggtccaatgccctccgcaatgcccttcatctcctgtgttgtcctgtaccctgctcagctccatcctggggttcagggaaggcacacttcccagcccagctgtgttttatgtaaccgaaaataaagatgcgtggtgacaaagaaa

SEQ ID NO: 15132 - DNA, 1164 bp, Homo sapiens
tgccatttgggcttatttagaaaaaagggtaagctagagagaaaaagaaagaactgtccgtcccccttccgccttctcccttctctcacccccaccctagcctccaccatccccgcacaaagcggctctaaacctcaggccacatcttttccaaggcaaaccctgttcaggctggctcgtaggcctgccgctttgatggaggaggtattgtaagctttccattttctataagaaaaaggaaaagttgaggggggggcattagtgctgatagctgtgtgtgttagcttgtatatatatttttaaaaatctacctgttcctgacttaaaacaaaaggaaagaaactacctttttataatgcacaactgttgatggtaggctgtatagtttttagtctgtgtagttaatttaatttgcagtttgtgcggcagattgctctgccaagatacttgaacactgtgttttattgtggtaattatgttttgtgattcaaacttctgtgtactgggtgatgcacccattgtgattgtggaagatagaattcaatttgaactcaggttgtttatgaggggaaaaaaacagttgcatagagtatagctctgtagtggaatatgtcttctgtataactaggctgttaacctatgattgtaaagtagctgtaagaatttcccagtgaaataaaaaaaaattttaagtgttctcggggatgcatagattcatcattttctccaccttaaaaatgcgggcatttaagtctgtccattatctatatagtcctgtcttgtctattgtatatataatctatatgattaaagaaaatatgcataatcagacaagcttgaatattgtttttgcaccagacgaacagtgaggaaattcggagctatacatatgtgcagaaggttactacctagggtttatgcttaattttaattggaggaaatgaatgctgattgtaacggagttaattttattgataataaattatacactatgaaaccgccattgggctactgtagatttgtatccttgatgaatctggggtttccatcagactgaacttacactgtatattttgcaatagttacctcaaggcctactgaccaaattgttgtgttgagatgatatttaactttttgccaaataaaatatattgattcttttct

SEQ ID NO: 15133 - DNA, 1307 bp, Homo sapiens
tgaatctccaggcgacgcggttttttcacttcccgagcgctggtcccctccctctgtcttcaggctctgcccaggaactcgcacctgtgctggagccctgttcctccctcccacactcgccatctcctgggccgttacatctgtgcagggctggtttgttctgactttttgtttctttgtgtttgcttggtgctggtttatttgttgttttctgggggaaaaagccatatcatgctaaaattctatagagatagatattgtcctaagtgtcaagtcctgactgggctgggtttgctgtcttggggtcccactgctcgaaatggcccctgtcttcggccgagctggtttcctgcccagcctggggcaaacctagccggaaggccgaggtcccattgttggcgctgaggtgtctggcctgaggtcaatggtgcaaaggagccgccaccgggcatgtctgcctggagtgctgtgctgtgtttaatcaggggatacaggcccctgggtttcttttttctttcttcctttcttccttggccaagagaagggcttacaggcatggacatgcaggttggcaaacgggcttgactttggctgatttaaaaagtgagaaagaaagtaaaaaaggttaatttttccttcctctgtaagatatcccagctttaaaaagaaaaaaaaagaattaccaagagaaggggacttctcttccagtttctgtaaggtcttacattgcctgactaaaatgtttcatttacctctaaatttccatatccttctggctgtagataaataatgtagttttgtttatgcatttggaattagtggatttttttgtcattaaaattgttaccactggtaacatgtgacaagcacaccacaattctccctatcttgtgaagttgtttttttaaatcgccttgaacaaaaagttttttttttgtttgtttttgctttctgaaattcacagaagcctaggaggactggggtaagcggaataaactagagaagggagacattgtttggatttcctttatactgtgaagttacatgcataaaagggtcaaacctgtagatgcagaaaaagaaaaaaactataaatacaaatctgtataaatgtctattattatgaagaattgccaatcttgttttaagcaaatgcattctatcgttattataaatgttagttctagctctatttacttctaatcttaaatcagaataaattaatattgtattgctgctgtgcgtggaaaaagacgatgtttatgttcttatagaataaaagctgtggaatgaagctttttaatttt

SEQ ID NO: 15134 - DNA, 1638 bp, Homo sapiens
gactccagcggctggaattgggtggggggcttcatacacatgagataatatgcagattttgcccttgacaaagtcaagccacatggtgacttttgaaaagaggtgtgcaagagagggatgcatggagatagccccacaggaggtggtctgggactctcttgattaagatctcagtggttaagattcctaataatcattggattctgagagctgtgcatcagctagaatgacaggtttgggacccctggtggttcactcttggagcctgcagagctgcgggctgggtgtggtctccactggggattgggcccctgccagaccccctggagactaaccccaccacaccctccctctactgggagcctacccacccccaggacccctgagtaaaaaagctgtgtgctctccaagcccagttcagcttggggacaggggcaggaggaaggggtaggattactaggtgcccagaatgaggctgctttccaaagccaatgtgaacagcggctggacttggaggtagctttgaggtggaagagggctgcaaatccttgtgggaaaagaaatctatgattccaggtggcatcagtgtctttccactcctcctagccacccaccacactgatccagccctgagttcctagccaccgcctcctacagcccacctggcttttctttctaccaaatgagggtcttggttccagcctgccactcaggcccaaagcctcgacacagagtggactgttccctgaggtgggagatgtggaaaagccaagaggctgcagccaggccactggcccctgagatctctgcaggaaatggctgtggagtgtggcagtttggcaaactctccaccacacgtaatgaaacttggatttgctcagtgtctggctgcagagcagtgggcctggccagcaggtccccagctttggctatgagggccttgagtcccccaaaacaccgggttccagcaccacactcagccctcattggctcttgaactgagcttggaagcttctggtgaccttccaagagcctgagagtgaggtggaattattttaaaagataaatattatattatatatatatatatttccctgaaggaaccaaagcgaattttaaaagatgcaatgtagaggggaaaagagatgatgaaaatatttaaaggccctatctgtttacagtgttccgtggttaaactcgctcactgctaagaatatttgaatgtatgcttcatacagggatggtgttcaaaaaacttgtaaataaaggaaccataatcaattttcttttctttctttctctttttcttttttcttttgccattagttgatttcctttagggtgttggagggggtggaaaaggtattgagaatggtctttttaatctcttgcaacatttggaaagagttagggaaatgctcagaggcagtcggcctggccggcctggggatctcatctgggaaagccaggcaccctcccattgaatctcctttgcctccctgtgttaagaaatgtctgttggctccatttgtactgggagtgttggcctgtcctcaattctggttcttacccaccgtgtgtgttgcagcacttatacaggcaactgggcacaaggaaaataaagacggtggaaatttg

SEQ ID NO: 15135 - DNA, 1318 bp, Homo sapiens
tggattaaaaatagagcaagaaggcaacttgaagaaacgcttcagaactcgttgctttgcccagataatgataataatgcttaataataattgaagaatgggaaagagaaagagacagagactggcattttcctctcccgaaggagatctctttctctttaatggaatctacaactgttttaaaactttaagaaaggtaaagactgccagttcttccgccaaccccatcagcccagcccgttaaatgtcaaacgtcaacccccaaaatacgcaatttcagataagttacgcagttactgaaatcttgtaagtatttaagtgatcgttacattttaggacactgcgttagatggtaataatctggaagttggttacaaacgcaagaggccattgtaaacatctgcttgtccttcttaggtcgccattccctttgcatgttaagcgtctgctcaggtaaatcttagtgaaattcctaccgttgttgtacgttctgcaaaacattttatgtatagatttagaggggaaacgagaaggtactgaaataatgatcttggaatatttgctgtgaagggagaaagggagagaaaactcttctgaggatcatttgtcttggtagtatagtaaaaccaaccagctgaacctttcaggctacaagagaacccgggtcggtaatgtctttttaagaataatttttaattgcttataacaagcatattttgtggcatttgaactatatttactgctccaatatccgttattttccaaaggattttgtatctttttgaaaatgtttacatcatcagatgatccacagaattcactttatgtgagatctcccgagagtttccatcccaacatgatggactttggtttgaacacaattcgttttttcatttgaattggcatttcccaatatttgctaaacatttgctggagaaatcatttttcttttttcttttttagaaaactcagaatgaaaattcattcccctgaaatatttaggtgtctatattctatattttgatctattaagggattagtatttttccatgtttattgtgttatcagagtgcattagaaagattagtgattcatcttcacagcacatttttaatcaagcagttatttcaaccagcacattcgttttgttcatattcactatagaatgatatcttgtaaataaagacattcagcacactgtgaaaatgtatttgtgcacctgctttttaaatatttctactaaaaatgaaaaaaaaaaacccttagacctgtagatagtgatatcgtaatattaattgttaataaaatagtcactgcc

SEQ ID NO: 15136 - DNA, 770 bp, Homo sapiens
gtgtgccctttggccacggacactgttgggaaccaaactctgtcttggagcctccttttagctcactccacaagtaaatggatttaatcaaaggtcacctatctgcttttgattgtctaggtcacagtaatccctaggatttttcaccgcttattctttttgtctttttaacaaacatattatccgaattttttttctgcaagccactgatagtctctgctaactagcttaattgacctttttacaaagtttgatccccaagcatcctcaactaaatcattgaatacttcaatcaggatattatctgctttactttacaaataaaaccaaatcttttgtcaacaggatgaaacccatcttaaaggaaagaaaaggaattggtgtgaagagagaagttagagaagggaaatgcagtgaattactatctgtgtccatcaggaagtttgtcctgttaaccaaatggttactgcactaccagggttactggtttattttccagggagctgataaagcaggagaactgttgctgcatgttttctatttggactccgtcacaatatggtaggatatccctcaccaactcccgacactcagcagacttgtttttatatttttttctttcttgttcattcttactacgtattttttgacttaagaatgacatctttagatgcatttcagagccaatgatgatatttgctttagataattattatattattataaatatagccatattattttgaattcaaataaatttctatactggt

SEQ ID NO: 15137 - DNA, 2219 bp, Homo sapiens
catgctggtcataactgtgccaagaaatcctcaccagcagttgctgattttgaaaacagccaccttttttcaggggaagcattcagcaaccctttaaagaaaaagaattaaatgcatgctttaaattttttctgtaattttggaatgatgtatctttgtagagttaatgattttgtacatttgcacatgtaatcatcatacccattttcattactttgatataaggtgctaaacaaaaaaagctctaggttcttcagcacatttcccccaaaacaaaataaaattgagggcatgttgcatattgttgaattgtattgcggtggtatcaacctggggggaggaggggctggcactgagatttttttttcaagattgtaatgtgattgaagttttcaacacatcaactcacatatgttcaaaaccaaaataataccttcattatcaaactggttaccatgccttacataatggagttagtatttgtgagtagaaagactttaggtaatggaaatataaataagaaagaatgtttaacataatatgctaaaaatattttcatatttaaataacatacgtaaaggtgtgctttctgtgttttatattatcttgcaaatccttttgccctttaaaaagctgaaaatcttgccatctgacttactagtcattttagtgttataaatggcattttgtacaaaatagtctattcagttcgttcattcatttaacacacattgattgagtgcctgctgggtacaagggattcaatttatgcctattgatatctgcggaccaagatacccatttagtgaaatacttttttccctgaaatctgttagaaaagactttgaaatacttcagtgcaaagtgtgtgtgtgtgaagtttagttatatcttcatcttcagatgaagttttaaagcactttgtagttctctattgccaacaatttaatgtttatgtgttgccaattcttgcaaccactgccctaccaaacctgtgggttgcaaatcagaactaaaattctaagcacgtttcaaagatgaacacttttgttaagacccctattgcctcttcttcatgctcattttttactttttttaaaaggtacttttctcatcacattgtagagaggtctgcattctcattggaaatgtctgtttagctttataaaacaaacactttgctgaaataggaaaatgagccttattgacaattaagtgcttcttgcagcaggtggtcaaagaaaagcatgactaatacgacctattagagtaatctacatctggaccattccttaagtttttcctcaccgacagtaccatcatgccttgagtgttcttttctcccaagtgctattccttaaacacgagagtttaccagttgcctaataatgcaataaaaaatgctttgagatagctaactgcccataaaacaaactcaaattgcttataaagtttcttcccatgttcccatttgatgaaaagtcttacatcacatataactgggaagcaggggtccctcctcaattttcagacattttgaaaggatgacagttctgtttgttagatgagtaaacctctatattcataagttctaaaatccttcattatgagggattcaaagtatttataaaaacactgccctctaaaaatttcctcagatctgaagtatggtcttggtcctgaatatacagtgttatcctatgtttaaaagggtgatccagacatgagacgcaactagttggtgcataagaaggccccacttggctatttcatatctacctacaattgaccaaaaaaaattttttaggccagcaattattatttagcttcgctctttctagtgcaagaaactgcaggctggatcagtagttcaacagctaaacagtcataaaatagtcattgtgcatgttaaatttctttcaatgctttcaaagataaattccaatttctatttacttattcattgtgacagtattactaaacaggtaaggatgggaatattttgttatactgtgtatagtgaatgtattgtactgtgtctgtgaaaactgtgctttaaattatattttcatatgttttgttggggacagagcacattaagtctgaaagcaacagaggtttgttttagaactgaaggcaatttaatcaaaattcctgtcaagaaaagctgcttataaatgtaaatgaaatcacatttaaaataaactgcctctgaccca

SEQ ID NO: 15138 - DNA, 2251 bp, Homo sapiens
gtccagggcatatagagaccatctcattggccctaaggagccgcctctccgtgaggcccaccagcccacctcaggggaagtgccgttttgtgcacttgccagagaggccggtggggacagagggccaattcgggcaccatcccccaattcccaatactcgagaagtaaatggatggtacttggtggtcagagccagagtaggggacaaatggatggtgggatgctgaggtcggaggcttcgcttggaggctttgacacagctatgcgaatggcttttgtagcactgcaatgcagaagccaggctttgggggtagaaagggggtgcttgtgcccccaacatggccagaaatatttgggtgcatgctttttgtttgctcagtgtcaaacagagaagttttgtttctatttaaggaaggaacttattaccattacaaaggaggcttggccagggactccactggtttggtgatctctgccaagaagggggatgtaaacaggtggtaaagtttaacatacccgccaaggaactcgtttatgttggctgatagagcattcaggataccttaaagtttaataagagacgcatttttttttttcaaaaatgtgaaaagctctgacatttaacgaactgaccaatagactcaaggactgttttagttggactgggccattttattatgttccttttaatattaacagtacaagagcgcttgctgacttcgaggataactaagattacatactttctcaggagaaggctgcatgcaagacttctctgtcagggttgctcctgtggcttttttaattttatttttttaaacctatatatggaaaaggaaatttcaatgccagatttgataaaagaatgtgatgtatatgtagctgatgacccactggggaacaccagtgttccagttcacttaccacatctgtgacagtgtgtttagattggaataaatgtgatgcattacttcttatgtttttatcagtgacatggttgactgtgccctaattctcttgagttgcagttaagcaatgaaggttatttcctaatagggaagcaaaaggtgattgtcaattgatagtttaatgtttgaccacattagtgtctttatatgaaatagtagaggggaagaaattatagaaaacaaatgtgaaaaaaatacaccagtgggtatctgttctactaaaaccagaagattgttatgagtacttaaacctcactgtgaaataatgatatattttgcaattaatccctccccaactgagtgtcttactgtgttattaaatcttatcttttagttaatagttgcagtatttcttttaaatgtttttgttttaaacttaggggtaggatcctttatttgttcagttgtttccaactatttgggatactttcattccctgctatttatgaagtacatgtttatcactaagtgtagtggtttggtttacattaataattttatgtgtggtctaaaaatgcagtcactaagagaatgtacactgtggttatggtcacagtggttatggatttattggcagtggagtaccatggaggtcactgcaatggtgctaaggctgacagtggaatcttctgtttagggccttaagcccctgagggtcctggtgactcagggaatccatcacagccccgggtctttcaccccagttcactccttttatgtttggcctagattgacccatgcctgccctcttctcaacagctgagtagggaaccagccatctgaatgagctgatcgttgtttatgttcaaatgagtaaatgtccagaccacttaaaactacagctgcttttctggcagtctcgtctgcggggccaaaacttaataaaccacaggaaatagactgtcattcttagtttgctgccagggcttattttagattgagagcatactggtacatgagagcagtagtgttgtttgctcttattttcaaccagggagctatctggcaccttttgtgctcctggcttttttcaatcatagcactattgcatctcctagctatttcttttgcccagcagggtaatattgagtcccattgcaagtatggacaaggcctctggttctcctcaccacccaccttttcagccatagaacatcactgaaaatgcctaatgcctggatctgtgttctactttagtttcactgggaagtctttcagtgggagatgaataaatgttatacattgttatgtccagttatgtcaataaacccactaatagagat

SEQ ID NO: 15139 - DNA, 139 bp, Homo sapiens
actaccttcccaaaagagaacatcagaggttttcattgctgaaaagaaaatcgtaaaaacagaaaatgtcataggaataaaaaaattatcttttcatatctgcaagatttttttcatcaataaaaattatccttgaaac

SEQ ID NO: 15140 - DNA, 3845 bp, Homo sapiens
agtaagcgttccctttccccttcttatttaagacttcccaccttactaaattaccagcaaaacaaaccactctcctgtttgagtaaaatgagaaagttaatatgtggcctccttttctgaagccagatcaaactgttaccttgtgttccaccttgaatctcacagcgtccccttctgcaatgtaggtctccttcctgtgcagtgtaacatgtatcccgttgcctgttgttcggttgtgtgactaattgtggattttaagctgctattattgtatttcagtggcaatggacacattagccttttacaagaggactagagttcatcaagccttgaaaggcaggcttcacagtgccgagttggcgggaaaagcaaattcttttgaagtcttagtctttccctcagtagcggtttctttcaggttaacaagaggcatttgtgcacacacacagggctcttgtgtgtgttgtcaaggggaccctccgtggcctcccgtgagtgcatgcctgtagtgcacagtgtctctacaggtgtcttctggggggcagaaccaattggaaggaagaaagggacccctctccagtcctggctccttcctacatcctgggctcctgaagaagctgtcttcccattttccatgcgctgtgcttatgtgtggtggactgcagagctgcttccacttacaggagagctgataatttgttagctggaacctattcacttccgagattcagacatagccatgctggtggccttctgaatcactgcatggatgtcccaggaggcagctctccccacacagcagcacagccatcacaggattccttgtgtagaaatgattcccagtctagttaccaacagctagtctaggagtaattgaatggccctatggcacagttccacccacagagtagtgaatctctcagccaaggagggaaagaaaaggaagaactcttgactatttagattctagttaaatatctggaatcctagcagtcactacattatctcagcagagagactttaattaaactgatttgtttccaatgtcgggttcacttaaaggatttgacttaccaccagagcatagaaaagcatgcaaggaagaccagatgggcttagcattgggaagacagagggcaaggaggtgatagatggatatagaagcatttctctgcaggataccagttcaggccccaccattcctgccaaggccattacatcccacaaacccaaatacaaagcagctgacttccctggatcttccccccactcctcacacctcacatgtcccaggagctgccttcattcaggcgggtagctgcactgggcatggggtggtggtgggagcttaccgccacctattcaagctctcagctactcctgaaacgggcagagatgatgaacagaagtgtatgtaaatacagcagctagtgggagagcaccagttgggcctaatcctgcctcatcattcttggcaggaatctgcaaatggaaacattgtgagtatcagcaatctgggaagtgacagggttaataactccttcccagaagctgtatcatgagattttgaggggaccgagccctgttacatggatgtgaacagtgaggatcagaggttttatcagaacacattctttttttctaccaactctccagagcgtgagtataggagtgccatgagctttttagtcagcagttttgtaaactctgtatataaaatcattaaccacacattgtgggtgatgggaagacgatttcagctgacagagttaatggcaaccaataatggtggcctgtagctgctaagagcttcacgcaggtttggcctgggctttcactgttggtgaatttagagtgtccttttaggtggggcggctattctaaaagtgtctttctatcactgttaagggggggggaaagtgaggttcgaggatgacgtaggtaactctcccctcccaagtccatgttccaagtggctatgtaaagcaagatgatacagaaagctgctctaaaatctcactgagtgatttcaccttcgcctactatgaaatgtctcatcagacctgacatgtctgagataaccaaggtgattcaggatttgatcaaaagaagtctagtaagaattaattacacagaagcctcctttcatttctatgggccaaacaaaggccatggataaccctacccgctttatgtcattacccattgggaaacacaatggctacttctgttagggtacattgaccttggtcaagcatcttaaagaaggcaaccctaattgagagctgtcttggctaatactctgcaccacaattgtgatgtcctagtcctaccactagagggcatggtacagcctggcaaaagttaaaaggggtgtggcagctcccatcaggtctggaggtggtctataagcacagttgacagttgtgcattgggatgggtggagaaagacgacaagagagcagagaatctgctgatgtggctgcgcttacttttagtgactttatgtacttatattaacagctggaaataggttgttgggttttgagcaggctgttatagtgaggaatgttcatttttaaatgttcctaacagattttgcttttgaaaaatgcttgttacatgaataatttgtggaccagggattgcttttctgaaggcagtatagggaacatgaatattcaagatgaaatacaaaaattatgtttaagggtcatagtgtataagtagcttcctaggaaaccctttgtgtatcttttcagactggggtgggggctgagcatgcttgtgcagaaagaagccatagccagaaaggacagaatctctcccccactcccttgccccataaccaaacataagctagctagtcttgtctaatagatgggatttactataggtgaagatagccctcatattcaaggacagaagctctggcaggagtaaattagcaaagcagaaatagtaccctttcattcttggaggtgctttgaaattttaggtagaatataatcgaaattatggaggttccttagtgctcaataatataagacctggtgttattagaacgagtctttcttataaactaacagagcaggtatatgcctgttagaccttagctgtggggttcctttactattgggtgaatcattaggtataaaaaataatcatcaaccaggcaaattactttgcttcctagctgatgtcatcccacattggtacaggtgttattcagtactgggtggttcagcagggaagccgggtgggaccagtgtgtctgtcatgaaaccactaactgcattcctgactgaagagccatctgtcatttattggggaaggtcttcagttgagctctcagccttaggaaggaagcacgtggaggagggacggaggaggttcccttgctgggcatgcttcgtagagggccaggagcagcaggtcatgtgcacatgccgttgcagcacaagcttatgcttcccgtagccgtggcttttcattctgcacagtcccaggtcccagctcccctcttatggtttctgtcataatgtgctttatctgattgactccaaacatcccgaaatgtcacctgcagatttctcgtgggaaccaatatgtacatgtttgcaattatgctgtgagaatttaaatgtgttagatggaaaatgctattggcagggaataataataaaaaaaaaagaaaatcattctgtttcctgcagtgggaactggccatgtagtcttaacagtcttttgtacaaatatctacaaagcagataatatccctatccagtgcttgcccttggaattgtctctaaatgcatcaagcatacaataaaaaaaactgaaat

SEQ ID NO: 15141 - DNA, 1467 bp, Homo sapiens
agatacatctacccttttaatatagcactcatctttcaagagagggcagtcatctttaaagaacattttatttttatacaatgttctttcttgctttgttttttatttttatatattttttctgactcctatttaaagaaccccttaggtttctaagtacccatttctttctgataagttattgggaagaaaaagctaattggtctttgaatagaagacttctggacaatttttcactttcacagatatgaagctttgttttactttctcacttataaatttaaaatgttgcaactgggaatataccacgacatgagaccaggttatagcacaaattagcaccctatatttctgcttccctctattttctccaagttagaggtcaacatttgaaaagccttttgcaatagcccaaggcttgctattttcatgttataatgaaatagtttatgtgtaactggctctgagtctctgcttgaggaccagaggaaaatggttgttggacctgacttgttaatggctactgctttactaaggagatgtgcaatgctgaagttagaaacaaggttaatagccaggcatggtggctcatgcctgtaatcccagcactttgggaggctgaggcgggcggatcacctgaggttgggagttcgagaccagcctgaccaacacggagaaaccctatctctactaaaaatacaaaagtagccgggcgtggtgatgcgtgcctgtaatcccagctacccaggaaggctgaggcggcagaatcacttgaacccggaggcggaggttgcggtaagccgagatcacctccagcctggacactctgtctcgaaaaaaagaaaagaaacacggttaataacatataaatatgtatgcattgagacatgctacctaggacttaagctgatgaagcttggctcctagtgattggtggcctattatgataaataggacaaatcatttatgtgtgagtttctttgtaataaaatgtatcaatatgttatagatgaggtagaaagttatatttatattcaatatttacttcttaaggctagcggaatatccttcctggttctttaatgggtagtctatagtatattatactacaataacattgtatcataagataaagtagtaaaccagtctacattttcccatttctgtctcatcaaaaactgaagttagctgggtgtggtggctcatgcctgtaatcccagcactttgggggccaaggagggtggatcacttgagatcaggagttcaagaccagcctggccaacatggtgaaaccttgtctctactaaaaatacaaaaattagccaggcgtggtggtgcacacctgtagtcccagctactcgggaggctgagacaggagatttgcttgaacccgggaggcggaggttgcagtgagccaagattgtgccactgcactccagcctgggtgacagagcaagactccatctc

SEQ ID NO: 15142 - DNA, 1104 bp, Homo sapiens
gaggatgctttcctgttcatggggtttttgccctggagcctcagcagcaaatgccactctgggcagtcttttgtgtcagtgtcttaaaggggcctgcgcaggcgggactatcaggagtccactgcctccatgatgcaagccagcttcctgtgcagaaggtctggtcggcaaactccctaagtacccgctacaattctgcagaaaaagaatgtgtcttgcgagctgttgtagttacagtaaatacactgtgaagagactttattgcctattataattatttttatctgaagctagaggaataaagctgtgagcaaacagaggaggccagcctcacctcattccaacacctgccatagggaccaacgggagcgagttggtcaccgctcttttcattgaagagttgaggatgtggcacaaagttggtgccaagcttcttgaataaaacgtgtttgatggattagtattatacctgaaatattttcttccttctcagcactttcccatgtattgatactggtcccacttcacagctggagacaccggagtatgtgcagtgtgggatttgactcctccaaggttttgtggaaagttaatgtcaaggaaaggatgcaccacgggcttttaattttaatcctggagtctcactgtctgctggcaaagatagagaatgccctcagctcttagctggtctaagaatgacgatgccttcaaaatgctgcttccactcagggcttctcctctgctaggctaccctcctctagaaggctgagtaccatgggctacagtgtctggccttgggaagaagtgattctgtccctccaaagaaatagggcatggcttgcccctgtggccctggcatccaaatggctgcttttgtctcccttacctcgtgaagaggggaagtctcttcctgcctcccaagcagctgaagggtgactaaacgggcgccaagactcaggggatcggctgggaactgggccagcagagcatgttggacaccccccaccatggtgggcttgtggtggctgctccatgagggtgggggtgatactactagatcacttgtcctcttgccagctcatttgttaataaaatactgaaaac

SEQ ID NO: 15143 - DNA, 471 bp, Homo sapiens
aacataacagaatatatctaagggtattctatgtgctaatataaaatatttttaacacttgagaacagggatctgggggatctccacgtttgatccattttcagcagtgctctgaaggagtatcttacttgggtgattccttgtttttagactataaaaagaaactgggataggagttagacaatttaaaaggggtgtatgagggcctgaaatatgtgacaaatgaatgtgagtaccccttctgtgaacactgaaagctattctcttgaattgatcttaagtgtctccttgctctggtaaaagatagatttgtagctcacttgatgatggtgctggtgaattgctctgctctgtctgagatttttaaaaatcagcttaatgagagtaatctgcagacaattgataataacattttgaaaattggaaagatggtatactgtttttagaggaataaacgtatttgtggtttaa

SEQ ID NO: 15144 - DNA, 876 bp, Homo sapiens
cccctcggtcgcccacctgcacagctcccctgtcctcctccaccttcttcctctgggttctctgtgctgggcaggctctcgtggggcaggagatgggaggggagagaccagctctccagcctggcaggaaagagggggtgcggcagccaagggggactgcaagggacagggatgagtgggggccaccaggctcagcgcaagaggaagcagagggaattcacaggaccccctgagaagagccagtcagatgtctgcaggcatttgcccatcccagcctctctggccagggccttactgggcccagagcagagaaggacctgtccaacacacacagctatttatagtagcagacacagggctcccctgccctactcatggagccagcagccaggcaatggtgtggccctgcactggcccttggcctccacactcagtggtgcccctgcagttgggtggggtacgccagcaaaggatcagtttggctgccttatcccaggggctgtcacctagagaggctcacttgtaccccacccttgttcctgtgtcccctccccagccatcctcccgccttgggggctccatgaaggatgcaggcttccaggcctggcttcctctcttgggagaccccttctctgcctagtccacagattaggcaatcaaggaagacgccatcagggaagccacatccttagtcaaccagttgcatcgtgcggggcaaaatgaggagcagaggcatggaggagggaggcgtgggatgggaatagcagaaaccaaccatgtcttcagtgattgaaactcataccccattgccctttgccctccagtctccccttcagaaacatctctgctctctgtgaaataaaccatgcctcttgg

SEQ ID NO: 15145 - DNA, 787 bp, Homo sapiens
tgaggaaaatgaaaataaacagtggtcattcacctcccctgtctaattaagacaaagcagatgcttgtgggctgagtaattggcacaactctatctaaggtgtttactagtttctgaagtgtgtttcaactattgtgagaattttctatgtaataataaatctcttttcgtatgagaacttcttttcctttccttttgtctgtgaagcactgtgattctgtttctactggaaagatttttttctttttaattttcttttaaacttatttaatttgtttgaacaaggtgtctaagaatatactgttgaataaagacatgcacacagcataattcaatgtctattttggttgtacagtaattataaaatgcatgttattaaaaccagatgagtaaaatgatgtgtttataattattaggaattatatattatgtatcttttaaaaattgaaattttaaaatatggagaatatcactaagctgacaatgatattgggagatgaatttgcaacaatataaaaagctatgcaattttctttttattaaggatgaatctaaatgcattcaattggtaactattcctcttcaagtatttgcagatggggcaacatgatatttgggtagctgatgtcataattcggggacaattatctcaatcatcaagaaaaaaatttcagcacttgttttgtattattcagaaattaactgtacaggtttgttatcacaatgtataattgtgtttttccaccccacatttttaaggcaattaaatatagatatttccactcgt

SEQ ID NO: 15146 - DNA, 612 bp, Homo sapiens
aaaagacctcatagacaataaaagaggctgccagtgtcttgcatcattctagctgagcttcttcattctccttcttctccttcttccacaaagacccatatctggagaaggtgtacaactttcaaacacaagccccccaccccctgacccttggccttccctcacaccatctccttccaggggatgaatctttgggggttggtttgaggtcttagaactctgggggatattcccctgagcaaaacaaacaacgtgagatttttactcaaacagaaacaaaacatgaaggggcatcctcaaaatcctttgctaatgacctggctttcaaggcatctgtctggcctgatgagaatggacatcctggatatgctgggagaggcctgaaaaaagccacacacacagtaattgccattttatgactgtcaatgccgttactttaaatgttgtcatttttgcactggctactgatgatacagccatgctgacattcatcaccgcaaagatgatgattccagtctctggttcctttcctgagtcaggaacatttgttttctccaatttcctttcagacttaaaattgttcttatgctttttttcccacttctgtaatac

SEQ ID NO: 15147 - DNA, 454 bp, Homo sapiens
atgagtttccttgacttacactagattttgttttggcttataatgacaagaaaatggaattttttttcccactttctaatgtttaaatcccataaagctaagtttcccgttaaagggaagtgctttgaagatgtgtacccatttttgtaagttaatcatgattatcctggaaaaagaagaaaagagcttcttctttgcagatgaaaataaaggtgtttttggttaactgtcattttgtttattctactgcagtagccagtggaacaaagtttgtagttattttgccacttacttttctgtcattatatgcttatttgttttgtcatttacgtgaccatttgattctcaaacaaaagttgttccaaacaaaatgatgaactttgatttgaacaggtgcatttaaacaaccggaaatgatcacttagaaaattcaattaaaatgctgttgttttgt

SEQ ID NO: 15148 - DNA, 1171 bp, Homo sapiens
tggggaagttcagggagtgcacgcctgagttatgtgctttgtcattttctttgctaaacaaaagaggctatgaaagaactaaatatgagtacataaaattctatctttgataaattttatttttatgccctacttaatatttgcatcagtataatatatatcagtgagtcttacagaaagatatgcttccataatatgaaatagattattcaataattgagaaactttatgtgtaatcatgagagtataagaatctggattatctaacattgttagccctgtgtatgtacagttcaaaaagttcatttataaaagtagtttcctgttcctagtgtgatgtatcacaaattgtgctgaggttattttagtatgtgtgtttcattcccgtgcttctgttctgaagtcctggaatacagttttcagtgtaattaattcaactgcacttaacactaatgtccgtgttggtatagaaatgtctaaatcctatactctagttgaggaagatcttccataattttatggtattacacagggaaagctatgactgcaggatcagtctaactatactattaggtgcatgtattctcttttcactaacttatacttgtctatctagaatacaggtcttccagtcagctggtcatttaccaggtgtggacttaagttgctaggcttgcagtaagaattgccagccactcattgtgcgggtctgcgtggagctttaatcagaaaaagcctccactttctgtattatgttaacattggctcatgcatataactatctgctgctgatgtagttctccatcttcaagatttagagtgggttaaccaggtcattacatcttaatttaataacaagcattactgtagagtgattgtgtatagatctgttagctgtcagggtgtgttttttttaacctgttgtgtgcgtgtgggggttaggattagtaaggtgaactgttcaggaattctctgcactagctgtgcagaagagcagataactagcgctgctctggcattaatcccaggaaccactagcagtagtggggcgccgccaatctaacatgagcacaggtgcttcatgacaaacattactagcatgttcaactgcaccatgttctggcactgtattttgaatgacattaatttattaaataaattgtatatattc

SEQ ID NO: 15149 - DNA, 598 bp, Homo sapiens
acaagcattctccaagaagacctctctcctgtgggtgcaattgaactgttcatccgttcatcttgctgagagacttatttataatatatccttactctcgaagtgttccctttgtataactgaagtattttcagatatggtgaatgcattgactggaagctccttttctccacctctctcaacacactcctcaccgtatcttttaacccatttaaaaaaaaaaaaaagctaaaattagaaaaataactccctacttttccaaagtgaattttgtagtttaatgttatcatgcagcttttgaggagtcttttacactgggaaagtttgtagaaattttaaaataagttttatgaaatggtgaaataatatgcatgattttaagtattgccatttttgtaatttgggttattatgctgatggtatcaccatctcttgaaattgtgttaggtttggttattttgtctggggaaaaaatatttactggaaaagactagcagttagtgttggaaaaacctggtggtgtttacaatgttgctaatcattacaaaacattctatattgaagcactgataataaatatgaaatgcaaaaccttttt

SEQ ID NO: 15150 - DNA, 434 bp, Homo sapiens
caaggatgtgacttgttcaacattctcttctcaaacactgaccaaggaacagaggaagatgcagtcagagaaagcagcaggatagagacgccgagagaggagtatatgtgggtcacagcagtgagctcccacccgccttgcagtgaagatgtgaccccaggagagggagtgtctccttccaggtgctagctctggacagcagctgattttaggcaggaaagtttcttcatcgttgtcctccctgctggtcacatgagtttacgattcctttgaagtgtctcccacagggtggcaggactgggagaatctctgaggcgtgtcttccaggccctcccacagcttgtgccctccacagtgtggactcaggtcccatagacatcaggctggagtcttctctgttgttgagaataataaaagctcattatttatttttt

SEQ ID NO: 15151 - DNA, 1031 bp, Homo sapiens
cctgaaaaactgtgccagctacaaggagggtctgacttcaggaaagtggtttaaataacagtgcaatttcaaaaaaatttataactttcttttgatcatcatgtacagaggtgttttttttctttaggcttctcatgcatatgaatattttaagcacgaatggactactaaatatctgagttttttttttttttttttaaagatcctaacagaacatagcgtaacaatattggtcttccaggtgttactcatttcaattatgtgtagtataccaggacagacctattttcatgtcttatttctttaaagagctgcttcattggccgggcgccatggctcacgtctgtaatcccagcactttgggaggccgaggcgggtgggttacttgaggtcaggagttcgagaccagcctggcaaacatggcgaaaccccatcttaactaaaaatacaaaaaaattagccgggtgtggtgtcacgcgcctgtaatcccagctacttggggggctcaggcaggagaattgcctgaacccaggaggcggaggttgcagtgagctgagattgggccactgcactccaccctgggcgacagagtgagactcggtctcagaaaaaaaaaaaaaagagctgcttcacatataaatgtctatagctagtagcctggccctttaatgtttaatttgaatagatatatctgttttccgtgaattatcttgaaagttttaaacagaatgacctcatagtttttaataaagaatattatttacctaaaatgtgctagtagcatcttgcccagccataaagcaataaacttctcaataatcttaattttgatatttgaataaataatggaaactttctgtattaagggcatgtatcccatcaattggaatcagtaccttaacagaaaaaggcagctcttcaatggaattaacgtgatataaaatgtttgatataggcagtacttttataaaaaaagataagctggaaattgctccgtgtaattttttaaataaaaagtcaattatggtaaa

SEQ ID NO: 15152 - DNA, 2610 bp, Homo sapiens
taattagcgttctggcaaacatagctaagctatgcctccatgtatattaccagttaggtgcagttagcaccagaagatttataaaagaagaaagactacttgtgttttctgaagaagggtcttcagtattcagcggaatttttaggttaagtacagatcttaaactatttccctaaaatgtttctataggttgcagggggaagttattcctattttctgaatctcgacagagtcagatgaaaatactactgctgagcatttttgaagactcttggtcaaattgcatgataaatttctgcctgagcagtaagcactggcctagtgcttctgcctaaatatggaggtcagctccaactggagactggctgaattccattgctgttcagactccaaagttatattttatttgataaataatggtaattattctcctttgaaaaattagttttgtgttgctccaaaaagctagctatatatctcagctttcttatttcttttatatgttgagggattttaaagggagaggaaaagcaatttgaaaatttttcattaagtgttttattttaacattattgtttcaccttatcagcttataggaactaaattagagaatcacctctttttgtccggttatctcttaactatgttttcatttgctgaaacatattgtacccttttaaattttttacagagttttaacgtcttttccactgcatcctttataaaaataagtacaaattccagagaggttttcctacacaaatacaaaataattggggaagggctactcaccttttttatgaaacagaatatgtaacaagcagaggacaaatagactgacctggttaaacgtaggttctggatgttgatgggtagcacctgcagtaaacttgaccatgctctgaaaaaagaaatttctgggtattgatggtttataaagccagctttgtgctattggttcagtatattttatcaaatctttgacttcatcaacccagtaatgacatagtttaaattttaaaatgagagttctgttttgctgtatttctcctgctagcctagctttgtattttatcatcagcttcagtatatacttgtatatatatacctggattcaaatggttcttcatacaacttaatgatcagaaagaatgctgctgtaaacaccccactcaagattgctgctggaatttctacccaaagctgtctgagagtttatctttacctcagtgcaggcttaaataatggtgctaatactggtagatatatactgtgaagcctggttcacattcatgctagaaaatgattttgggaaatcttttataggagaggttacatgatttttctctttcacatatctagaaggacttgcctcaaagaagaatgttgcagcaaacaggatatactctagctggtgcccaaaggttcttgcaaaaccatgaatcttgcttttagcagtaaagggccagacactttggagcattgaaaggccttagcccctgctccccaactacgtgccatgctgggtagtgtgtatcctgtacatctgtgtgccaggctggggcagactgtgccaatgctcaccgaacactagaatctgctcttacacctctagcatgtatctcgttgtagcagagttgtgcactttctcagcattgtgtagtgttttctaattgcatctaaaaacttatcaaaagtgattgtgaaaacagtgtcttagaagtataaacagaaatggcaatatttatgtcctgtgattcaagcccaaaggttataaattcaactttcacagggaatagcactgctaatcttactttatgatttaaatataaaggaaaatcacagcagccttaatttcctgttggtcggatcatttgcagcagttctagttcctgacttttaaaatggatgaaattttctctttgtctgatttggaaaaggaactgcttttttgccttactgctttggtataaggatgaaaaacatgagcactctgcagacaaaatgaccttaaatcacattgattaagatattttaaaagttagcagtgaaccaaaagtagtttcagattagcagaaataaagagctttaagttttaaaagttgagattgaatatttaatgaaagtttattaattctttttccaggaatagcagtaaggtcagtttttttccctaaaataaaaagttttaataaacagaaaattatagcaacagtacttaggagaatagttgaagattgtattaattttaattataatagttatttgtcataggctattgatgattagaatttcattagttttgtccactataattttaaaaatagttgtgtcaaatacaaattctggtaaactgttaggttttaacaccagacagtattcaaaggaaattaatgtttgcaaacataaatccatagtcttcatttctttatattgtcacctttgtaaaagtgtttaaaatttgtattgtttgttttgtatatctttgggcatcttgtgtctagctataataaaaagaaacggtgccaaggttctcagatgaagtgtgtggctatgtatgcatgtaacttggtttctttgaaaacccaattatatttgtattgtggtgtt

SEQ ID NO: 15153 - DNA, 248 bp, Homo sapiens
gcctctcaggagcatgcacccctggggagcacagggaggcagaggcttgggtaaactcattccacaaccctatgggggctgccacgtcacaggcccaaaggactcttcttcagcagcatctttgcaaatgtctttctctcaatgaagagcatatctggacgactgtgcaatgctgtgtgctcccgggatcagtaacccttccgctgttcctgaaataacctttcataaagtgctttgggtgccattcc

SEQ ID NO: 15154 - DNA, 1195 bp, Homo sapiens
agtggccgggcccagacatgccccttccaaaactggaacacctagctaacaggagagaggaatgaaaacacacccacgccttggaaccgtcctttggtaaagggaagctgtgggtccacattcccttcagcatcacctctagccctggcaactttcagcccctagctggcatcttgctcaccgccctgattctgttcctcggctccactgcttcaggtcacttcccatggctgcagtccactggtgggacaagagcaaagcccactgccagtaagaaggccaaagggcccttccatcctagccctctgcaggcatgcccttccttcccttgggcaggaaagccagcagccccagactgcccaaaaacttgcccaccagaccaagggcagtgccccaaggcccctgtctggaggaaatggcctagctatttgatgagaagaccaaaccccacatcctcctttcccctctctctagaatcatctcgcaccaccagttacacttgaattaagatctgcgctcaaatctcctcccacctctctccctgcttttgccttgctctgttcctctttggtcccaagagcagcagccgcagcctcctcgtgatcctccctagcataaatttcccaaacagtccacaggtcccatgcccactttgcgtctgcactgtgatcgtgacaaatcttccctcctcaccagctagtctggggtttcctctccctgccccaggccagaactgccttcttcatttccacccacgctcccagcctcttagctgaaagcacaaatggtgaaatcagtagtctcgctccatctctaatagactaaacctaaatgcctctaggacggactgttgctatccaagcgtttggtgttaccttctcctgggaggtcctgctgcaactcaagttccacaggatggtcaagctgtcagacatccaagtttacatcattgtaattattactggtatttacaatttgcaagagttttgggttagtttttttttttttttttgctttgtttttgtacaaaagagtctaacattttttgccaaacagatatatatttaatgaaaagaagagatacataaatgtgtgaatttccagtttttttttaattattttaatcccaaacatcttcctgaaaataacattcccttaaacatgctgtggaataaaatggattgtgatgatttgg

SEQ ID NO: 15155 - DNA, 1538 bp, Homo sapiens
gctaactagtttccaaagcggagacttccgacttccttacaggatgaggctgggcattgcctgggacagcctatgtaaggccatgtgccccttgccctaacaactcactgcagtgctcttcatagacacatcttgcagcatttttcttaaggctatgcttcagtttttctttgtaagccatcacaagccatagtggtaggtttgccctttggtacagaaggtgagttaaagctggtggaaaaggcttattgcattgcattcagagtaacctgtgtgcatactctagaagagtagggaaaataatgcttgttacaattcgacctaatatgtgcattgtaaaataaatgccatatttcaaacaaaacacgtaatttttttacagtatgttttattaccttttgatatctgttgttgcaatgttagtgatgttttaaaatgtgatcgaaaatataatgcttctaagaaggaacagtagtggaatgaatgtctaaaagatctttatgtgtttatggtctgcagaaggatttttgtgatgaaaggggattttttgaaaaatctagagaagtagcatatggaaaactataatgtgtcttttttacaatgacttcagctctgtttttagctagaaactctaaaaacaaaaataataataaagaaaaataaataaaaaggagaggcagacaatgtctggattcctgttttttggttacctgatttcatgatcatgatgcttcttgtcaacaccctcttaagcagcaccagaaacagtgagtttgtctgtaccattaggagttaggtactaattagttggctaatgctcaagtattttatacccacaagagaggtatgtcactcatcttacttcccaggacatccaccctgagaataatttgacaagcttaaaaatggccttcatgtgagtgccaaattttgttttcttcatttaaatattttctttgcctaaatacatgtgagaggagttaaatataaatgtacagagaggaaagttgaggttccacctctgaaatgagaattacttgacagttgggatactttaatcagaaaaaaagaacttatcttgcagcattttatcaacaaatttcataattgtggacaattggaggcatttattttaaaaaacaattttattggccttttgctaacacagtaagcatgtattctctataaggcattcaataaatgcacaacgcccaaaggaaataaaatcctatctaatcctactctccactacacagaggtaatcactattagtattttggcatattattctccaggtgtttcttatgcacttataaaatgatttgaacaaataaaactaggaacctgctatacatgtgtttcataacctgcctcctttgcttggccctttattgagataagttttcctgtcaagaaagcagaaaccatctcatttctaacagctgtgttatattccatagtatgcattactcaacaaactgttgtgctattggatacttaggtggtttcttcactgacaatactgaataaacatctca

SEQ ID NO: 15156 - DNA, 588 bp, Homo sapiens
atacactactgctgcagctcacaaacacctctgcatattacatgtacctcctcctgctcctcaagagtgtggtctattttgccatcatcacctgctgtctgcttagaagaacggctttctgctgcaatggagagaaatcataacagacggtggcacaaggaggccatcttttcctcatcggttattgtccctagaagcgtcttctgaggatctagttgggctttctttctgggtttgggccatttcagttctcatgtgtgtactattctatcattattgtataacggttttcaaaccagtgggcacacagagaacctcactctgtaataacaatgaggaatagccacggcgatctccagcaccaatctctccatgttttccacagctcctccagccaacccaaatagcgcctgctatagtgtagacatcctgcggcttctagccttgtccctctcttagtgttctttaatcagataactgcctggaagcctttcattttacacgccctgaagcagtcttctttgctagttgaattatgtggtgtgtttttccgtaataagcaaaataaatttaaaaaaatgaaaagtt

SEQ ID NO: 15157 - DNA, 1112 bp, Homo sapiens
ggcaacaagtactgcaagaaggagctcagttacggggtttttaaaccttcatgaaaacctgaagagttcacttttgttattatgctcttaatgatttacagactgatgccagacaaaccttgggaagatgtatcaatggagcatgtgtgcaaaaaaatgtaagaggaaaaaaagtaaattaaggaaaaaatcctcactcattcccatgttgtcaataacaggtttgtttgtgctttgtccaagctgtggagactcttgtacttgatcccctcccaccaattctaaagtagctttctccagatcagactttaatttctctgcatcaggtgtatcgtattgagtggctgccctgcagaagatgtgatgaattatcctgtagtacaagattatcttattcccctgcccaggtgtgagcacgtgctctcgctccctttcaggtttactatgtttaaaactaaactgctgcaaaagttctcaatgttcttttccaacacatctatatatatatggacacacagtcacgcaagctagttcccatgactcctggatctatgtgtatgcagaaggctacatatacatagttgcttctttcctttccattgtagctctttgcctctcaattgtcattgatacatgcattgctcttattctgtctggcattacaattgcagttttgcctaatggcaaaaccagccatcccattggcaaaagagtcaacagtatctgtgtttgtactgtgcagttttcaggatgagatgacagatagcacgactacactgaggcaccctcagagaaggcagggcctgatttatctagctgtccagccgctgtggctggaggtaggctagttgggatgggcagctaagcagtcttctcttctgcctttatgagattgggtagaaagatggggcatattcatctacccccaaaagaacactataaaaacagctcctctatatttccacctctttctatttatgcaactcatcttcacagattgttctaaagtaaaatagatggtgtatgctgtatccacaaatcatctgtaacaattatgttttcagtgctgtgtcattccaaataaacctttggtaatcttcaacgattaccct

SEQ ID NO: 15158 - DNA, 2302 bp, Homo sapiens
ctcatttctccttgtcagtctccttgtcaccactctttttgagactgtttttgcaacaacaaaagcatttgttgacactcgtgctgttaagagatttgtttatgtttatattatactcaaaaacaatttcttcatctattcctgtactaatggtttctctttgcagttcacagagaatttggggctctcttcatgccttgaaattttggggtccatagtgaatattttgttatttatttgtttggctcattctttatatagtaatggaaacataagtctaggagttagaaatgaattttttagaccttagtaaaaccatttaaccataaaatggacaactgagaattctcccagctgcctgaaagcgtcgccaactgtggttatcctgcaagctgctacctgcaacttggacgttgtttccacgtgctctgctggctacgattcttgcattctgggtttggcttttttctgtgtcatcaactatggttatcctctaaataggcatttaatgaaacattgtacaaattgtcactcatttgatgacacctgggaataacattagcaggctgatgtcctgcaccattatgtttactaatcacatgttctgtgtgctgtgacgactgtcaaagagtatctggccatggcggacactcagcatttgttgattgaataaatgttagctcttctcattgtgaaggactcacttttactgggataaacaaatgcagttaagaattctggcacccttgtaaggaagaaaagagagttcaacaccttcgagtctgagcgcttgtggctagagtttgccaggagggaggaaaccagtgaccctgaaaactgagggtgcctcaggagcagtgggaccacctgatgctgaaggacggactaatgatgtttcctcttgccttctctggtgcctccattgccctcatggaacagagcatatcatagagggagaaaagtcaaacttgtaattgtgtcttacagttactggcttcatcttccttgggatatatggtcatcctctaatgagtgtaaaagtgcgcaaaacacatccttattgttcctgatctcttagtcccataaatgggaacaaatacagctttctgcttctttctttttggggaaaggacagggtgctagtgagtactgacagcatgccagctaccgaagtcacccagccattcccatgagcagcagttcatttaattgtcacagcgtcgccaggaagaagatctgataaacctaggtttacagataaagaaagcaaaatgtagagatgttgttgaggtcacagaggtgactgcctaacttcagagcagggcttctgatccctttaagaaattacagggccagccgggcatggtggctcacgcccgtaatcccagggctttgggaggccttggcaggtggatcacctgagatcgcacgttcgagaccagcctgaccaacatggagaaaccccatctctactaaaaacacaaattagccaggcgtggtggtacatgcctgtaatcccagctactcaggaggctgaggcaggagaatcacttgaccccaggagacgtaggttgtggtgagctgagatcgcgccattgcactccagcctgggcaacaagagcaaaactccgtctcaaaaaagaaaagaaaagaaaagaaatcatagggccaagttcaaaggaaatgcacagaacatatcttcacattagagttaagaattctctagcaaacaacagatttttttgttgttgttagtcacaaatacttagaactggaaggctctttgttattattgaatgtacccctcagccttctcagcatttccttatcccaagactagtgtgctttctgctacactgctagttttcagttttgttcttacccaattgttttttcttttcaacattaccaatttacagattcagtttattacatttacattaatcctcacttatgatttgagcaagctcatttccagaaaagtttactttaagatcatcaataggatttgctaatttcagtgaagtcattttgcttcaggggtaaattatcctagttaccaagtcctatttggacataaagaaaatcctacttatagaaaaggagaaaataattaaacagtcttcatttttaagtaactgatttaaaaggaaaataataaaatatgttcgtttatcatttcagaaattgctgtaacacactggaaaattcctgaacaatatagattttatcgttaataaaaaacactagctttcgttccttagaatgtcttttcttttgaataaacagtattgggtgattt

SEQ ID NO: 15159 - DNA, 315 bp, Homo sapiens
catttctgaaattcaactggaagcttcatgtgtcaggaacatcttggacaaaactttaagttgtgttgatataaatttacccaaagatgatgactttgattggataattagtaaggtctttttgttatttttcatcgtatcaggtattgttgatattagagaaaaaagtaggataacttgcaacatttagctctggaagtacctaccacattttagagatttaccgtttccatatatttaacattcctggttacataatggacatttgtcttttaatgttttttcaatgttttaaaataaaacattttgtcttct

SEQ ID NO: 15160 - DNA, 645 bp, Homo sapiens
agttgcccagcccagggggaaagggagcaagagttgtccagagaagacagtggcaaaatgaagaaatttttaaggtttctgagttaaccagaaaaatagaaattaaaaacaaaacaaaaaaaaaaacaaaaaaaaacaaaagtaaattaaaaacaaaacctgatgaaacagatgaaggaagatgtggaaaaaatccttagccagggctcagagatgaagcagtgaaagagacaggaattgggagggaaagggagaatggtgtaccctttatttcttctgaaatcacactgatgacatcagttgtttaaacggggtattgtcctttccccccttgaggttcccttgtgagccttgaatcaaccaatctagtctgcagtagtgtggactagaacaacccaaatagcatctagaaagccatgagtttgaaagggcccatcacaggcactttcctacccaattacccaggtcataaggtatgtctgtgtgacacttatctctgtgtatatcagcatacacacacacacacacacacacacacacacacacaggcatttccacacattacatatatacacatactggtaaaagaacaatcgtgtgcaggtggtcacacttcctttttctgtaccacttttgcaacaaaac

SEQ ID NO: 15161 - DNA, 3381 bp, Homo sapiens
gctttaggaaaaaaagactgcaaccaacggaaatcaataggagttgaagagattaaactgactttgttttggctgtttttttagttctgtatgtattttagcaatctcatctcacctaactgagatgtgtttcaattatattccttttatggaaaaggactctgaaaaaccctaaagtattctagggagaaactgtcttccatttcagttttgaatcagtattgttacactcaaaccaccctctttttaaaaaaaaaaaaaaaaactgtaagccccgccccctttttagtaaaccgatgtaaatttgtgatgtgcatattcttctttcttttagaagagcagtcaaattaaaggatttgacatgttttgctgttgctcaaaggaaataggagttggtgtgcttgtgaccaaggggttacacttccagcttttaaaattctcctttacatgtgctcagtgttttgttttgtgttttggtttctgttttttattttaattcccacattgggcacaagaatcagaatatggatagctagtttaagaaacttttgtgggtgcactgtagcatagatgacagaatattgatgttccccccatctccaattcagttcagggcattccacagttaaacagaaatgggaacgtggggctcttataaatgaaatgggcgctcacagttttggttttcagctcttcatgtctgtaagtgtgctttgggggaggctatgtctgtatggtcgattctcagttatcacatttgcctctcctcccactaccttcatgaacattcagtgctgtttcgcactgcagttagagagaagggacggacagttggtgacactcagccacattgctacttttatctgttctggtaagaagttagatagatggtagattgaagcaattgggtagaattagttgggggaatatttatgagttgctgtgtttgttgattagttccatctctttcccattttaactgagaattgattatatatagctctaagtatataggtatttaaacaaccccacaagcggctgtatcagtaacatttattaattccactatagtgagggaggatttccattctaaataccttattttgagggatttataaaacttagttgtaaaagagaaagcccacatagtgggaataaattgcttcagccatttttagtatttgagagcactagggaagatgtttagtagctgtgtggatgccttttttcacaccctgtctattgaatgctgcatccattcacgaagttaaatgttacatgcagttagtccttaatgtggactggatctgtacttttgttttggattaaaacatttaaagatttttgaagtgcagctactccccacgtgcatttgatacacataaaagtcatactgtgtgtgcacaaagagtacatggattttccagcatattgctttaaaaaattatataaactgttaaaatattaacacctcaggctacctgctgtattctgtcccattgacccctggaattggatttactgcaagtgattgataattcaattatgtggcttttcccctttaatcttgccatttaaattacagtagaaagacaaaatcaagtaaaataaagtgttagataatagaaagagtgttaagaccagcccacttttctcatgtttatgttctttcatttggaccaagaatctccgcatggaggttgatttgccactggggactttggctaagactattaggtttgctttcaactagatgttcctgagacaagcagagggacactgcaattccccttccatgcctgctgttctcccccatgtaagtcttctttgaaattaacggatgtgtctcctttggaacagccccataacaaaagagaactactgatctgagcataggaaagtagaggctctaccacttttcagttgaaaaagcaagactttctctgtgtttctgaaacaaggcataatgttgtcacagaatcagagatccagtctcacttttccacaaatctccaaatctccagtcttatcttgtgtgctctaatggtttggttcaatccctttccaactcttgttttcaaagcatggggcctgagtgttctccactcctcctaagaaaggagcttgggtggaagggaccatgctgacctcctccatcagagggctcttccagtagtattctcggatgcaacctccatttctcagttaccattatttcctgtatcagctttgtccttcctggagggatgcacagtgatccggcccaccactgttgttgtcttgtgcttctgctctttcctatggtttcaggttattttctgggtttcccctattcttcttttatttctttttttttttatatttgctttcctttctactgcttttagatttgcaggagatgcaagtttcagctcaatgtttggcttctctcaatatggaaatttcagaaggacagaggagaggagggaggaagaagaaagtatactcctccagaatttcagtgatctgttgtggcagtccagtggaaggaaggtcttttgaggtcacttagaagcatctttttgggacatccttttgggatctctgtaggctaggcatctcatatcttgagactcacccccagcctccaagcctctctccatttctctaacctatgcattttagagcgagaggaccgcctcactagtgtcaccatcctgccttttctaaaacatgcaggctcacacattctactcctgcttaatgtctgtgttaaacgttttctaaccatttttgttttatttttctgaaaaagttaacccctcccaactcctcacacattggctcttcctcttgagccacaaagttttgattcttgcgatgtatgtgccttattttatgttaatcttgtcaatgagagggaccagttggtgttgcccaatcagcactccaaggctgtgtgtgcaccagccagagagcgcacggtggtagcagagtcgaggctgtcttgtatcctggtttcatgtgttgttttgaactgataggaggatgttctcttctgacaagttacccttgtgtatcctgcagacatgtaaaataaaatacaagttcatttttttcaccttttttagatttttttaaaaaataaaatgtgtaatcctttttttaaaagaaacacatgtaaatacatttaagtattgtaggcatagcgttcagatgtgactggcccaggcgttcctcggacaagcctgcattccccgtgatcacgcccacctcaagcccaggggctgcagcccagccacagatgaactctacctttgctttcagaaccacttagtccttttgtaacaaagaaaaaaaaatgtttcttacaatgtcaataaaaaattctttgtatggaaa

SEQ ID NO: 15162 - DNA, 362 bp, Homo sapiens
agataccctttaaatatttttgtggaagtaagttatttataccaaaggctgggtcttcccatctaaactggtgggaaaaaaggtctatagtaaaagtaaaactgagaactcttaaaccagtagagtttctttgtctctcatctaaagtatataacctcccaaagtagaaaaagcacaagagagaagcttatctatcaaactgtctgcattagtgcaattaagaaccgaaatacgtctatataaagctttcagctgtattgtaatactttgattcgatagggctacaactcccctactgctaaccacatttcatggaatatggctacattgcatcttgcattaaatatctggagaaaattcaa

SEQ ID NO: 15163 - DNA, 711 bp, Homo sapiens
caatgaagtgactgaaaaatccagaatttcagataatctatctacttaaacatgtttaaagtatgttttgttttgcagactttttgcatacttatttctacatggtttaaatcgactgtttttaaaatgacacttataaatcctaataaactgttaaacccaccttccagccttttaggagttgctaaaattttaacagttatttcctgctttttatcacagttgatttctgaagactacattgccaagcagaatgatgaaatgactttttcgttgtcaggcaattttggttaagtcaaatcttaatgccctcttcgctatcagatgttgcctgtgtttccataaagcaaaatgctgattttggtaaaaaacatgactgcttctagagctgggaggatctgcagactttcacggattcatggaacaagaaaagaagcataggtacttttaggtgccattaggtattgatcagtgaaatcctagggtgctctatgagattgtactaggcctatgaagagtggtaagccaaataggtctccatgggagatacattatgtaaataaataaacaatggtttgctggttcctgttggtgtctccacaagtaggtaaacatgtttaaaggaacccgggttcttagattttgttagactttttaaactcaaggatgagcataagtgcttgaaataaaatgctaatacttaagtgtcaa

SEQ ID NO: 15164 - DNA, 322 bp, Homo sapiens
agacgacccagaagacccagcttgcttctagtccatccttccctcatctctaccatatggccactggggtggtggcccatctcagtgacagacactcctgcaacccagttttccagccaccagtgggatgatggtatgtgccagcacatggtaattttggtgtaattctaacttgggcacaacaaatgctatttgtcatttttaaactgaatccgaaagaaactcctattataaatttaagataatgtaatgtatttgaaagtgctttgtataaaaaagcacatgataaaaggaatcagaattaataaaatgtttgttgatc

SEQ ID NO: 15165 - DNA, 141 bp, Homo sapiens
aacaatccccttttttccatcaagctgtagcctgcagagaatggaaacgtgggaaaggaatggtatgtgggggaaatgcatcccctcagaggactgaggcatagtctctcatctgctattgaataaagaccttctatcttg

SEQ ID NO: 15166 - DNA, 763 bp, Homo sapiens
gtgtgcagagaaacccagttcaggtgtaggaggctgctgtgggcagccctgtctgatggggcacccgtgtggggctgtgctctggtgcctgagaatggctggtgcccaatcgacatgagaagacgaggaaaagacagggtttggagtctcctcaacagtgttaaaagaggaagtgacctcacagaccagctcagagatgttaccaagaatatcacagcccccagggtagggagacaagcagcagtttgttctgtctcagctcctgtcaaggatcctgcggggtgggccctctgtatagctgctctctgtcactggcccctggagtgggagcagcgtccttagtcactgcaggcccaggcgggcaggtggtcccaggacagaggtggggaagttgtcctgaggaagcagaagtaggccttgctcccgcccaacccaagggcctccagtggaccagcattcaagatgtgagtgcccgtggtgtgcaaggcactcccatggcaccgtatttattgactgatctgtgaaggcttccctgacccctgcccaggaagagttcactggtcgctctgttgtgccccacagcactttgttatacctctgccacacacttcacgcagcgcgttgtaactcatgtgtttacatgtctgtccccccagactgtgagctccttgagggcagggactgtacattctccagctctgtgtccccagggcctggcacattgtagacgcttaataaatgtctgttaaatgaatgagtgcac

SEQ ID NO: 15167 - DNA, 36 bp, Homo sapiens
ggggtgggcttgggcaataaaggcacctcccccaac

SEQ ID NO: 15168 - DNA, 1041 bp, Homo sapiens
gcctgcctgtgtcccccacttccactcaggaaattgggctgcccccaacctggccactgaatgtctccaggcagatatgctgccccctgacccccaccttcacccctccccgccaaggcctggctcttccggaggtcaattgtgcctgcaggatcagttgagcccctgctggtgtgctgcagggtgtgatgaggtgggagccctcagtgccagcctcatcactgtgtgaccctgggtctgctcttagcctccccatggctcacgttcctgccctggatgggatgtgagtggggcccacatcgtggagctgtggtggggcctgcagtcatgaatggcaagtggtccctgatgtgcagtgtctcattagttgcactgcagttaactgtggctcctgcagggcaccctgcccagaatgcccagaagagaaccatgcatacctgcactgcatttgagagccatgagctggaggctgtggttcgtgccagcaaggagcctactgtctggtgtgctgtaggcatctggagagggagagggcctgggtaggagctgggaggaagataattttcaactatggggcttcagtactgcagcgccccgagccaggctctgtgcttctgcctttaaggcctgttctcagcacaatgtctcaaaaataggtcatatcctgccactcccgtcgcagagccctttaatggttccaaaccctaagtccacacatagcccctggctctggcatctctccagccccactggccccgagctgcttgactcaccggcttcctatttgatgcacccaggcccccttgtggccaactccctccccttctcactgaggcagaagcactgaggtgggctggacatgggtgccctccacgtccctcatatccccaggcacactctggcctcaggttttgccctggccatgtcatctacctggagtgggccctccccttcttcaggccttgaatcaaaagccactttgttaggcgaggatttcccagaccactcatcacattaaaaaatattttgaaaacatgcagt

SEQ ID NO: 15169 - DNA, 97 bp, Homo sapiens
ctcaaaaaagtggttttgaccagagaggcccagatggaggctgttcattccctgcagtgtcggcattgtaaataaagcctgagcacttgctgatgcg

SEQ ID NO: 15170 - DNA, 55 bp, Homo sapiens
ggggcagggccaggcccacgggggggcacctcaataaactctgttgcaaaattgg

SEQ ID NO: 15171 - DNA, 865 bp, Homo sapiens
gagcagtggccgcaagcgcagggaggatgccacagccccacagcacccaggctccatggggaagtgctccccacacgtgctcgcagcctggcggggcaggaggcctggccttgtcaggacccaggccgcctgccataccgctggggaacagagcgggcctcttccctcagtttttcggtgggacagccccagggccctaacgggggtgcggcaggagcaggaacagagactctggaagccccccacctttctcgctggaatcaatttcccagaagggagttgctcactcaggactttgatgcatttccacactgtcagagctgttggcctcgcctgggcccaggctctgggaaggggtgccctctggatcctgctgtggcctcacttccctgggaactcatcctgtgtggggaggcagctccaacagcttgaccagacctagacctgggccaaaagggcagccaggggctgctcatcacccagtcctggccattttcttgcctgaggctcaagaggcccagggagcaatgggagggggctccatggaggaggtgtcccaagctttgaatacccccagagaccttttctctcccataccatcactgagtggcttgtgattctgggatggaccctcgcagcaggtgcaagagacagagcccccaagcctctgccccaaggggcccacaaaggggagaagggccagccctacatcttcagctcccatagcgctggctcaggaagaaaccccaagcagcattcagcacaccccaagggacaaccccatcatatgacatgccaccctctccatgcccaacctaagattgtgtgggttttttaattaaaaatgttaaaagttttaaacatg

SEQ ID NO: 15172 - DNA, 225 bp, Homo sapiens
agctgcgccctggtttcgccggacagagttggtgtttggagcccgactgccctcgggcacacggcctgcctgtcgcatgtttgtgtctgcctcgttccctcccctggtgcctgtgtctgcagaaaaacaagaccagatgtgatttgttaaaaaaaaacaaaaaaaaaaaaaaaaaaaacaagatgacgacgacaaccacaaaaaaaattgacatcagatgaaatg

SEQ ID NO: 15173 - DNA, 3645 bp, Homo sapiens
tgaccagaaggaaaggaaaccctcgccggtggggaggcagagccttatcctcggctgcccttcttggctccctgcattccagggacttgctcgtcttgtttacccctagccatcctttctttcaagggtgaaccaggccttccaccctgaccttgcatctccagactgttccagagaaggtgcggggccagctgctatgtggtggccgctgtggctgacactgagtgaaggtgtttgaaatgcaggagaggatatcccagcaaattgggatcacatgcttttgtctccacagcaaccagccactgcaggcagcatgtctttcctcccctgctctctgcttgctgttgttttgacgctattctgcttgcatgtcttctggttgggatgtggagttgttgctggactctcaggcgaagctgaagtcattgaagtgtgtgaagctctgtgcttgcatgagggcaagcaaggaatggctgtgcctgaggctgctctgggaaactccttgccccttgacctcttttgagagcattcacgtggtcttcttgctcatccccttataaatgtgctttgcctgcctcagcctcatggtcagagcagtggagactggagccctgtttgcacgttctagttgttcggagaaagcctaggttctgggctcaggtccagatgcagcggggattctgttctctgactgtggcgaccttgctttggttcttgttgaagtgaaccaagcccggccaccacgcatggcatgctgtgcttggctccccataagacgtcctctttgggtgcacggtgtcaaagtgtgggcaggagtggagagctggtgccctcaggaggagaccacagcatgtccatcagctcagcagagctcgacagccacaagtcctgagaagctttgaccttgaagggcttctgggagaggaggaatttctgcatggggcgtgaaggcacactgtcccaccacaactgaaccagaagagagtgaagactcccctcttcccatcctctgtgccaggtgccagactgtgctccttggaacttatggcccaatcttacctgttctccagggactggtcactgcctcaggacccccaagcctatgccctgagccatggctgctgactgactccagccaaggtgcaaagacgagattatgagacaggtcctcaggcctgtgttccaagtactcacaggggctctgggtgcccatcgccgggagtatggttcagctgccaccggcactgtccatttgcctgtctgtcaagctcagagcatggataagccacacagcagggcagtgcaccctggcaccatgcacggccagcaagaatcaaggcccgcagatgctaagagggcctattgtcaggggaaggtccccgctcctgcacactctctatggatacttgggttgtgggggctctcttggagagtaagtttgtggtttgtttctggtttacagtggtggctgacaccccttgtaagaaagcattcctgggaagtcttctgtgggtccaaacatgttgctccgatcatcacaggagagcaaaaggccctagataccccctttggaatgtgagagtcttgttgtctgatatttgccactgagctggtgaagcccctctaaagagatctcgaccctggggagcagaattcttgtcatctatgaggggtcctgagaaagacttgtcattttttttcctggagttcttcccattgaggtcctaggatttgcacaccactgtcccacaagagctttcctgcctaatgaaaggaggtcttgtggtgtgtgtctcctctcttctctatagttcccgagttggcccccattgcagcccccaccctgtgggtagtcttccagaagtgatgcagtggtgtgagatgccctacaccttgttatttgggagactttgagagtcattcacttccatggtgactagtgtttgttttgcctgattttatattctgtgttgcatttctccccactccctgccctgctttaataaacagcaaaccaatatctaggaagaatgactgagggatagtattgggtattggccccatggcaggaacagccacttgcatctggtcccggtgccacactgcggtgcttggtgtggttgtggagcctgtccctgcgcgccttgctcccgttgagccacgctgtctggtgggtgattctctgccctgagccaccaccctggactggcccagtctccagagctggcacaccctgcctgttttctctttttagacacaacagccgcagtttggccagccactaagtcccaccagctgaggtccgaggaaagcggggtgactcatttcccttgtccagggcccgaggagagtgaggtgtccagcctgcaaagctattccagctccttggtgttggtttgcaataaattggtatttaagcagttctgggtctgcgtgtgacatttgctgctgagacagttctgtctgtgcatggtcattattgttgcattctagccttgaggtcccaggccaacgtacacagcaaacaccagcatggggaattcttaggggttgtttcccatctggtctgaatgcactgggcaagatctcaatacagctttagaaatcctgtaagattttgaccagtggggagaaaaagaatgtagctatagatcttacatcctttcaaacaggttctggaattctgtagttactggaaagcttagggtgagtgcagagttgggaatgattccactgaagggccacctttgcccaccaggctccaaggccctccttggtctccaggtgcatacctgctgttaactttgctgagccctcgcaatgggcttcctccaggacataacgccgtgtctgacacagaagtctcccaggtggctggccacctgcttcttcctcagtcagatctttgactctccttctctgtgcccaccccatctccagcctcctctgaccctgctcacccctggggacaggacctaggggtgtgagaagtacttggctgaataaagactgtttcaaaggcaatccttagaattgcctagcatactcccagggccagaaataacccgccagaaaggagaggcgtatttgcccctgaagagtgcaggagggagaacagttgagaagtgttttgtgtggaaatgtgtccaagaggcgtcagctgctgcacagagaactcactgcccagaacactgcgcttggggaacagacctcacccccacctcaaatctgctctccactgggcctgttggcagccagctcagctggggaagggacagcatgactcgctttgtcgatgaaaagcacgaagttgtcagcacagaacctggccagtccttgagaaactccctccttggtggtcagaggtcaagcagcccatgtggcccacggtcctgaagaactgggctatgtccctgaggctcctctctaccgtctgactgtggggtctggggaacaggcatttaaaccaggctgctgccctggggagtgcccactggacgccagggtgccccatagggacagggtcacaaagccctggggcttcccctgccagtcctggtgaggacagtgtggtcactatctcagagagacgaaaaatgaatattctgtcatttcagactaaactactcacccagctcacactaa

SEQ ID NO: 15174 - DNA, 909 bp, Homo sapiens
tacagccagaggccctgtctaggctctatggccctgaaccaaagggttatggggatcttccttgtgactgccccttgacacacgccctcctcaaatcctaggggaggccattcccatgagactgcctgtcactggaggatggcctgctcttgaggtatccaggcagcaccactgatggctcctctgctcccatagtgggtccccagtttccaagtcacctaggccttgggcagtgcctcctcctgggcctgggtctggaagttggcaggaacagacacactccatgtttgtcccacactcactcactttcctaggagcccacttctcatccaacttttcccttctcagttcctctctcgaaagtcttaattctgtgtcagtaagtctttaacacgtagcagtgtccctgagaacacagacaatgaccactaccctgggtgtgatatcacaggaggccagagagaggcaaaggctcaggccaagagccaacgctgtgggaggccggtcggcagccactccctccagggcgcacctgcaggtctgccatccacggccttttctggcaagagaagggcccaggaaggatgctctcataaggcccaggaaggatgctctcataagcaccttggtcatggattagcccctcctggaaaatggtgttgggtttggtctccagctccaatacttattaaggctgttgctgccagtcaaggccacccaggagtctgaaggctgggagctcttggggctgggctggtcctcccatcttcacctcgggcctggatcccaggcctcaaaccagcccaacccgagcttttggacagctctccagaagcatgaactgcagtggagatgaagatcctggctctgtgctgtgcacataggtgtttaataaacatttgttggcag

SEQ ID NO: 15175 - DNA, 197 bp, Homo sapiens
ggttgttgggcctctctggagctgagcacattgtggagcacaggcttacacccttcgtggacaggcgaggctctggtgcttactgcacagcctgaacagacagttctggggccggcagtgctgggccctttagctccttggcacttccaagctggcatcttgccccttgacaacagaataaaaattttagctgcccc

SEQ ID NO: 15176 - DNA, 315 bp, Homo sapiens
tgccctctttgtatgacccttcctttttacctcatttatttggtactttccccacacagtcctttatccacctggatttttagggaaaaaaatgaaaaagaataagtcacattggttccatggccacaaaccattcagatcagccacttgctgaccctggttcttaaggacacatgacattagtccaatctttcaaaatcttgtcttagggcttgtgaggaatcagaactaacccaggactcagtcctgcttcttttgcctcgagtgattttcctctgtttttcactaaataagcaaatgaaaactctctccatt

SEQ ID NO: 15177 - DNA, 3255 bp, Homo sapiens
atcagaagatgccattgtattaggtgacggcaaggttttgctgatttagtggaacaagattctactgggatgtgtgctgagctgaaccaaggaactgcccgaatgtgctgaacaaggacatttgcttctcagatacgtgaattcaattttaagcaagattcttgatctgcttcagagcagctttgatttaaagtaatttcagagcgcttttccttgcatgagtaattttctgaatgtataaaatattctatttatgtttgaccttttggataaactgtgttgctgcagtgttggtccacactaccatcctaagtgaagacttagtaagtctgaggatctccaggcactggaaagagtgagaacctgggagtgaaagggttatagttagtgttcatttttcgggttttgtttcatagggagtcctgagtggggtaacctgaaatgttttaacagttgaagatcatcctattcctatccccagtaaaaataggcctttccacaatcttctaccagttaacttagctttttttttttttttttcctttaatagagtctcattcttgtcacccagactggagtgcgatggcacgatcttggctcactgcaaccctccctcccgggttccagcgattctcctgcctcagcctcccaagtagctgggattacaggcgcacgccaccatgcccagctaatttttgtatttttagtagacgtggggtttcaccatgttggccagactggtctcaaactcctgacctcaggcgatccgcccgtctaagccttccaaagtgctgggattactggcaggaaccaccaggcccagccaaccagcatttcttaaggtgaaaatacatggtgttaatttatattttgagtgagacccagtccagctgctataactgcttggacacttggcagaggacagagtactgcaaaagtgtctaagggagacagcattttgccttgggtgctgtagatgtacaagagaggttccaggagggggtgataggcagaattttggtccccatcaccttccctgcccagtgttatgcctatgaatgtgttacattatgtggtaaaagggactttgcagatgtaactaaaatttctaaaatagagatattatcctggattacctgggggaacccagtgtaattacatgaacccttaaaaatggaagaggatgcaggagtcagattcaaaggaaggcccaaggtgctattgctgacttgaagatagaggggccatgtggaaatcaagagaaggaagtgaatccttccagtgagcttggaagaaagcaccttgaggcacagatgagaagcttggccttacctgatgccttgattttagcctggtgagaccctgagcatataaatttgctgtgctatgccacacttctcacctacagaaacttagtttaaagccactaagtttgtggtaatttgttggctttaggcccctgagggtagagatttatggcttgtgttacaagtagagagcagtggagagttgggctttgtaattctttcaagggtgattgtagttctggagtcctatctacctgggttcagatctttgttggccagtccctggctgtgtgacttcactgctttaagcctctgtcttcatccttaaagtggtgatgatagtacctacctcactctgatctctgaatgagaacacatgtaagacacttagcacagttcctggtgctcaaagagttccaacacctgaaagcaccatggccctgtttgtttttcagtcaagatttctaaaagccgttattaccagaggttcagtgagaacatgggcagggtaaactcaaaatggagaacataaaaactgggactcccagaccagtcacttagaagactgctgcaggaagtaccaaggtcgttaagaatcagtaataataataagtaatgtgtgaatccattagaatgttgagaagtagacctttgacatttcagaaaaatgtatatctcagacacagccatatgtattgttatccctgagttggaagagcatcacagggcatagtttcacaaaagcttcaaaaaatatactaattgctggtaatatgtgaactaacagaaaaaaatagccatgttaaaataggagtgcctgacaattagctctattcatcttgtctcctagctgtaagcaccctagattcaaattatgcacctagaaaactaaattactatgtatgttataggcctttgaaatggatacatgaaaattagtgaaatcagaatgaacgtttcgcctgccaaagatatgtatttttataagtgatacaagggccccatgagctccatggccacatctgtacaaaacaggccctcctttcaggaactggtctcgagagagcaaaggggtcaactccctaaatggcagctgagacagtcctccctggtggcatggccctgtttcctgttgatatggtgatagttggagagtcaaatttttaccagaatttgtgaatatcatctctggttaatgattacacaaaaccttttaaaattttaaaaaattatttctaattctataaataaactctgcagttgtacagccactgtacagctaacatctcaacactggaaatgaggctggtttcttccagtttggctcagattcttcagggaagcccagttaagacaaacagctctctatactcaatccttactttgctgagaagatacaggcctgcccactcgctcccacctgctcttcacgaggagtcctttattcctgcatgtttcctgttctttgggacctttaggagctaacctccacagatgctgatagtctgtagagtcaggaataccatgtaacatgttgaagtagactaaagattagttctttggcaatagcccagtctggacttactatgtacttttgaaaataaaactgcttatttgtaaactctgtaattaggaccttttgctatttgagttatattcctttctaacttcaaacgtctgcattcatgtataatagccattttatgcacagatgaggtgattcccacactttttttcgcagatgtttcattatctggatgagtgtattacataataaatttgaataatggtagtcttccaaatgacaaaaagcaagctagttgatttgtcaattttgagtttaaatgttttgactgcttatcagcaaaaaaaatcaaagaatagcatactaatattaatggaaatgcagagtatatttaattggcatgattttttcatggatgtgtgc

SEQ ID NO: 15178 - DNA, 943 bp, Homo sapiens
tccctcacatccacaaatctctgattggaaagaagggacagcagaaaactgcttagagggatgctttaaccaaccctcttcctccccgtcattgtactgtaactgggacagaagaaataatggggatatgtggaatttttaacaacagttaaatggaaaagcatagacaattactgtagacatgataaaagaaacatttgtatgttcttagactcgaagtttgataaaagtaccttttcatgtggtgacagttgtgtgttgattggctaggtttctcccgtgtgttttatacaaaaatggaattgataaaccattttttacaaaattaatttgtctcaaaactgttctgttcatgatgtattagaaatattttactcagactttaaatattttaaatctcagattggttattcagagtaaccttagaacagaaattgggaatatatctttacaatgattgataccatggtatattgactcttagatgctattgatctgtagcaccattttttacaaacgactaaggaaaaaacctgccaattaaatcatgatatgccatcaattatgagacatcccaatttgagagatgttagattatagaaaagtatgcatttatgactgaaatggtagtggaattatttgaattctacaccaagcacttaccatgtgccaggccctttgcagagtgctctactgaccaagaaagttgttgctgccacattatagatgtggagcctaagggtcacagaaattgtgtgctatgccaaaaaacattgaactggtagatagaaaatgacagagctaggattcaaacctagatctggctgactccagagcctagttttacctggaattgatgttcagtttatcaaaggtttctccttttggtttaaaatcccaatttttggcctggcattgtggtttacgcctgtaatcccaacac

SEQ ID NO: 15179 - DNA, 8115 bp, Homo sapiens
aacgggcagcttcccctacaggcctccacccaaccaccatccccttggctagagaattccctttcctgctcatccccagtgagctagtggagagggagcaagggaggccgcagagggaaaaaacaaaacgtaacacagttaagagaaataatcgtaagagaacagtgacggacaacttgagaaaagcagtcaagttccaaggaactgacagcaacctgcaaagaggaaaacagcatctcctcacctgcgtaaaattgtctcagcttctgttgtttctcaactgaggttcgtaaacccatcaggataatccctggagggaatagatccttgcacatccagggcaagaaacatgtccaagttacccagaccattgataacagttgcatttaggttgcacctgggtaatctggcataaaagatctctctaggcctcactgttgcggtgtctatcccttcacctccattgaaatcagcattttggatctaggtcttcatggaatccttgagaagagaggcctttacaattacccagttctgagggttcaggttcacgaaaagaaatgcaacttgggataatcatgaacaggttaaagataagatttcaagaagccatctaagaatacagaaccaaattggatccatttttttaaaaaaatggttttgcatggaacctggaccaaggcaaatgtcttttcttcgcagaattgttttccaggatgccagtggattcagatagcaatgcttggagtagaatccgttactaaaatagtttcaaagttgacaaaaaattttcaaagataaaagcagttttacattgggggttgctgaggtaggcacaagaaaaagtcaggcataaagcacaaggcagactgtttgagtggattggttgctgctcactaaagttgttcccctgatctctaaatatggaggtcattaccaagaaatgctttggtatgaatgagagccagatctccactgtgtgagccagtgaattatggctaattcggctgttacagccactggttggctggattttaaaccataaaacttgaagattacctacaaaagtaacagtgtggctataagcctgagctttaatggatatacatcctcacagaaaagttggaaataaccaaaactgaagtcttaatttaccttcagtttaatctgtggatttgttcaaatactaaagatcctcaggtccagaattccagcatcatttattcttttaaaatttttaagaacttgatccattgtatcagtacctcacaatcagagttggcaaatgatggatgagtgattcaagcagtgcacccggtggaagctgaaatccatctgtgaatggaactgaagtgaacgtgaatatgctgactatatcctggaagcatttttataccatcttgaaatttcaacaaactggcttttgccagttaatccagctgtctttcaagaataaaagttggggttttcaaggatcgcctcttctatattttaaatggattttcagtagaaatgatttttactaatcaagttaatcccaccccatcaaaaggtattcctagaaatgtcatagacctaggtaactttgaattgaatgggagctaacgttctttccaaagttttcaggtattctttgtgtgacaccttctcaaccaggaggcaagtaaccccgcctccacaatcttagtattttttttaaactgcatgcctgccccttatttgagctgcctttttaatttattgcatatcctttttattatcttattttggtattattcaatctatacaatctttttgtatttattgggaaatgagtaatatacaaaaaggttttcatgtatttgtggctgagagggcgggaaataattgtgtacataaaattaggcttttttaaaaaaatagattatgatgcagaatattgttgatcttagattaaaaagtggaagagccacaaacattggtgcccttttcagactatttctctactctcatcatccacagtagaatttttaaacagatttttttaaagcttttcttttaaatttttctccgttgcaaagaatgtttcctaaattgtatgggagcaatagtatttttgatgttttaatgacatccgtatacttgtactgtattttgtactacaaggcagctgtttttcaataatgtcctgctgtatttacctacgtgttttgagtgtctatttctttgctgcggagaacaaattcctaaatagttttagtaaaggagctgagaagctagcattaggtttgcagaaactatttaagtttcaactctgaggcagcaatgaaaatttaagttgcagctattagttgattgctgtaactttttcattttcaaaccatgtacaattcttgtatagaccaacttgttttcttgcttcagtggtggttctgttgctcagctgcagtgagccagttcaattttgcaaaggtgcagtacctctcctttttaaggggttggtttattcttttttctttttgtttggctgaattgcagtaactagccttgcctttctattctgtagaaatgacagggtcttcacaatccttcaccagtggctactaagctataattagctgaatagaaagaatgtggaagtggtctgaggcatatagagtatatgccaagaacactaccatatatggcatcagctttggttaccagagaaattttcttagtcattagaccatgtaacagtaatatatcatatgtaaatctttagatatcaatttgaaaatcctccaaaaaaaggagcaaagaatgcataagctatgtgttggcaaaagtaatttatattaaaattttgacctgcctatgtaagattaagtggtaatgtcatagtggtgggtttttaagtcttaaccaatctctaaggtttgtttctcctgcaagggatggttcatggcctctcttcccactgcaggaagattgcagaaggctgtggattaattgtagcatttcactgatcttcactccagtcactagggacaatagaaacctgcaaaacacagattcattcgtaaatattattaatagcttattaaaggaaatggtctttgttaattccagtcagataatggcattgtacagacatgggaaacaaccaatttttttgtttttcagttgttgctatgaatgattttgagcctttttttttaagcttggcaaacatcccagctaatcaaaatagtcatattcctgagaagtaggaaactaaaacttcttttcatataattgttagaaggtttgtttcccaaactaccatagttacaaaggtgaaaagccaaattttaggaacagaatcaaaagaataaaaatctgtgaagagatcctactactcttccttctatgttttggttttggtttctattgtccctatcatttcagcaagtggaacagcagcaagtttttcagtgcatatgctgcacaagaacaaaatataaatctgtatggcaccaaaaatcaaagtgaaaaccaaaccaaaaacccaaacaccctatgtaactatcggaggcatatacgtggtataaatgactgtagctgtgatacacacatggctacttgtcacatcactttccataattatttactgcaaaatgattgagaggcttttggtgcaggcagccgttaacctcctgcttcctttgttacctctggattactttgcagtaaattgcaggtcttttaagagatttaagcttcagttttctcaaaacaaaacaattatcctgtcttatctgaagatgcagggttgtgggcaaaagaggctggttataataatgccctcatattgagtggtctgtaaacggctgcacacttcaggcactgtagttgctgaagatgctttgttaaatgtgaccttgactggctttacaggggtgtagaatgtaatctacacaaggtgactttgcatctatcttgctcttgaggtggatgaaattgagaagctggagtgtgtaagccatgcacataagtattcttcactgtaaattttgttttcatttttaacccaattatggtactttatccaatgcacaactgatctctcagtagatattcatttgaaaatagtgtggccttgatcagtgagaaagggaaggagaaaagtgacttttttgcttatgtagaaatgactcatttgctgagagtttgtctttctgcagcactcttggtatatagtgatcggtctcctttttgattggggaaagttaatgtttttgaccctggagttaattcagttgagttatcttatatttttaggaagtatcagaattgctctgatgaataacaaagttgactgttttgatgtccaatctcaggttttagaatatagtggtgtaaagtcccactatttttaattcttaaaacaactttaatttcgtacaccctaaaagtcacatgcataaggcctgttcagagagcagagcctccatctttttgctccttttctactttgtacttcacttgaaaaaatatcaagtgactttacattgtatatttccattgtaaccctgacatttctcaaagataaagcactttttgatcatgaaatacatgaaatctttgtgtgatgtggatcatagtttctcaggctcccttagataattgcttatgaatattgttctaactctgtgtaagaagagtagaaatctttgctaatgttagaaggtttgtattattgatccagaatgcattttgctagtttccaatggatgggagagtaaataatgctgcattcacaatttaataagttactttcccttgagccttaaggtaactttttctttcctgtcaactacagcactgaagttatagtaagtgaatgagattatcagttttcagggttggttttagagtactgtaaatcaattagctgtcttcctaaagagttacaactcccattcagtatactggataatgggtgtgtgggtggggctggggagggcgggagatagtttgtagaaaagaaaaaagaaaaaaaaaaaaacacatttaccttaagaaaatacagacaaaaaagaataaagtatgtgtcatatgctccatttgagattccaaatgcggccgggcgtggtggctcacgcctgtaatcccagcactctgggaggctgaggtgggcgggtcagttcaggtcagcctggacaacatggtgaaaccccgtctctactaaaaatactaaaattagccgggcatggtggtgcatgcctgtagtcccagctacttgggaggctgaggcaggagaatggcatgaacccaggaagcggaggttgcagtgagccaagatcgcgccattgcactccagcctgggtaacagaacaagactccgtctcaaaaaataaataaataaattccaaatgtaaggtggaaatggcagattataacttcatttcccccatttttaacttagaaaaaacaaagtccttaattttcaagtattagccccccagaagtttcagcagatagctggactcttgaataatgatttcttttgatatgtctgactttgctatttaaagtctcctttcccagccctcagtcttaaaactcagttttattactgacggatttaacagactcttacttgaaaattgtccaattatcagtactgaaaattagatttggaaaatgaaaaaataataaaatcgcatcaagaaaacttattaccttagagattcccaattgatatctgtacccctgatccaagtaaggcctttatgaatgtattttatatttcctaaagaaatagggaatatgccatcagtgtaatcacctctattcacagtcatttaatttgaaaatctaactcatgtctcttgaattagacattccaattgggataggtagagtcatgttaaaacaatagaatagcaactgccatattggtagtttcactgctcaatatgatttctaataagagcagagctttattggaagctaaaactcatttttctccatagatgattctaacagtttaataaaaaagtataattatactttaagtgtcaacagattttgagtctagaagcaaatttcattttccttgtgttatatctaatatccattgacatgggtaagaaaactaattatgtctttttagtatgatgaaatgtgggcccagagtattggaaagaaagcaatagccctattcagtgtccactaggatggatattgcagaaggcatgagtttgtccttttttcccccttaccttaaataacacttcaatagctaactttttccaaaatatccatttaggccatctcttatttcttaaagccaaatatttcgtccccagtcttaactctgagttgcaagatcaggctggttggaagaatctttatatttagaaataggatggtgagtggtttgtttattctcttgtaaaattcctttttcagagacataactgcagggagagtcccaagagaactgaagaactggattatatcattaaacacatttgtgttgtaggaatttgggagtttcattttgaactgataagatattagacataaacccttgttccagcccacatgtgtcatccctgtgtacaaaagctctctggattctttttttttttttgagacggagtttcgctcttatcgtccaggctggagtgagtgtagtggcttgatctcagctcactgcaacctttgcctcccgggctcaagcgattctcctgcctcagcctcccaagtagctgggattacaagcatgtgccaccatgcccagctaattttctgtatttttagtagagacggggtttcaccatgttggccaggctggtctcgaactcctgacctcaagtgatctgcccgcctcagcttcccaaaatgctggaattacaggcatgagccatcacgcctagcctactctctgaatttctaaaagtcagtaggttgaccaaaaagtctagaaactggctttaagtcagtatgggacgtacttataaagagtccatggttttgcacgtttcggtagacaagtaaatctgagttatttttcaatgacttaccaatatttgaatagtaactaagatcgtcagtgtatctggacttctttttttgaagttctaaaacaattatagtagggatttattattttgggcctccatccagatgtttttccaagatcatttttaaaattcatttgtcttctgtttccagataacatactttccgttctataggaatcttcactgccaatcatagtatctaccagtggctttcttagactattcactccaaagctgggactgatgtcctgccagtagagaatctacagaaataatttgaatgaattaaaaccaaatcttgatagcaggagacagcttcctgatctagatgtacaattagagtttaggttggaaattactttaaaatgtgttttttggggatgtcttcaatctctgtgtaaatacccacatgcttatgcattgtaaaccaagtgtgtattcctgtgtatgaatttgtagaactgatttctgcttcaagagaagctgcacctttaattttataaggtcccctccacctgtaaccctataaatgtctgtaaataaaacactaaaatttgtagtgataggatcaatttgggaatatctgctgagagaccaaaaagttcatttttttaagtaccttggttaaagagtaaagattattcctcttattttttaaagaagaatgcactttaacaaacatagagctgcatgggcaattcaaacaaatctgtgaagtgcagtacccattcagaaatcacacttcctgaaaaccgttcaaaagcagagtccagacgggctgttgatctcactgcctgtaggttgaagctcagattctgatcaattttgagaggagcagggctgcttcaaaagagcaatgtgaatacagtcagaagcttcagactggtctgtaaaaatggcgggtcccgtatttaccactaactagcaaaactgacagaaaaactcacagagaaaaaatgtaagaatccttcctgctggtgtgcactccttacaatagacttttgcaaatggagttttacagtctatatttaaaaaaaattgtatgtttgtaacaaataaagtatgcagaaaagtgaatgac

SEQ ID NO: 15180 - DNA, 77 bp, Homo sapiens
gcgcccgcacccgccgcaccccgaggccgccaattgtccgccccgccagcgctgcaaataaaccttctgagtcagcc

SEQ ID NO: 15181 - DNA, 224 bp, Homo sapiens
cttgtgccagcagcatggactgcgtgcctctccgccggaggtctagctgtgggcggccaagaagggtcacccttgaggacaaacctctgtgcaggaccttggccagagtggggagggtggccagccactctgagggacagaacgtcctcttgtgtataataaacctttaattttggtgttggacccctggggccttcccaggcttggtcaccctctgcactgtc

SEQ ID NO: 15182 - DNA, 1584 bp, Homo sapiens
ttaatgtggagctcaaatatgccttattttgcacaaaagactgccaaggacatgaccagcagctggctacagcctcgatttatatttctgtttgtggtgaactgattttttttaaaccaaagtttagaaagaggtttttgaaatgcctatggtttctttgaatggtaaacttgagcatcttttcactttccagtagtcagcaaagagcagtttgaattttcttgtcgcttcctatcaaaatattcagagactcgagcacagcacccagacttcatgcgcccgtggaatgctcaccacatgttggtcgaagcggccgaccactgactttgtgacttaggcggctgtgttgcctatgtagagaacacgcttcacccccactccccgtacagtgcgcacaggctttatcgagaataggaaaacctttaaaccccggtcatccggacatcccaacgcatgctcctggagctcacagccttctgtggtgtcatttctgaaacaagggcgtggatccctcaaccaagaagaatgtttatgtcttcaagtgacctgtactgcttggggactattggagaaaataaggtggagtcctacttgtttaaaaaatatgtatctaagaatgttctagggcactctgggaacctataaaggcaggtatttcgggccctcctcttcaggaatcttcctgaagacatggcccagtcgaaggcccaggatggcttttgctgcggccccgtggggtaggagggacagagagacagggagagtcagcctccacattcagaggcatcacaagtaatggcacaattcttcggatgactgcagaaaatagtgttttgtagttcaacaactcaagacgaagcttatttctgaggataagctctttaaaggcaaagctttattttcatctctcatcttttgtcctccttagcacaatgtaaaaaagaatagtaatatcagaacaggaaggaggaatggcttgctggggagcccatccaggacactgggagcacatagagattcacccatgtttgttgaacttagagtcattctcatgcttttctttataattcacacatatatgcagagaagatatgttcttgttaacattgtatacaacatagccccaaatatagtaagatctatactagataatcctagatgaaatgttagagatgctatatgatacaactgtggccatgactgaggaaaggagctcacgcccagagactgggctgctctcccggaggccaaacccaagaaggtctggcaaagtcaggctcagggagactctgccctgctgcagacctcggtgtggacacacgctgcatagagctctccttgaaaacagaggggtctcaagacattctgcctacctattagcttttctttatttttttaactttttggggggaaaagtatttttgagaagtttgtcttgcaatgtatttataaatagtaaataaagtttttaccattaaaaaaatatctttccctttgttattgaccatctctgggctttgtatcactaattattttattttattatataataattattttattataataaaatcctgaaagggg

SEQ ID NO: 15183 - DNA, 2922 bp, Homo sapiens
gaactcccctccctccctggacccaccgatgcctctcgaagccctggagacagccgttgggtgagggtggggcccccactttttaccaaactagtaaacctgacattccaggcccatgaggggaaagaggatcttccagctctgcaaaaacaagaacaaacaacatcaccgtgaattggcctttcctgaaagtgacttatctgacacatctctgtagccacatgctttttgggtagaagaagctgggcatgggtgcaccccaccccctagggtccccatgggaaagggacatgcaaggaaacagcacagaacacgaggtggtccccatgtccctggcacactagcattccgggggatgaggaatccccagcccttgaggcagaggtgccgagtgactgccatgcttcgcccgtccgcatgggcgcttctgtccagctgcacccgaggccgggggtttccctcacctcggtcttcccaagatggagatgctaacgaaactgagaagggggcgtatgtttgacgaaggtttgtgcaagtcaggcccttctggaacacagcagggcctacaacgaggggcctttgcgatgggctgtgaggatgggggtggtgggaagaattggccacgttggagaccccatgccaccccaccatggtgagtgctctgtgcctcctgctcacctgtggtgagctgggcgagctgggcgagctgggcgagctgggctggggagagcctgtgaggaccgagaggagaaatgagaagaaggaacaaaaatattatttctatgtaatttatattttacttatgccaaattatttatgataatttgccattgctatactgtaccagtgtcaaatgctgcagcctgccaagctgtgattttgtgaggcttgtccctatgtaggatgcaccgcaggcccctggccactgaaagagtgtgcagtggactgtgggtctcccatatgcggtgccgcccaaaggtggctttgcctcaagcaacctaccctgatgttttactcattggaatgtttttccccgattgtggatgacttcttttctgatggagagagtccaggagggatggaaaactcctggatttaagctcagcatcccccacatgggcttttcgatcatcttcaggcctgaagctgcacgacctgaagttcgcctgcatttatcagccctctttgtgctgctccttgccaccttggggttcctgctggggaccatgtgtggttgtggcatgtgtgagcagaagggaggatgaggaaaaagagaagaaaccccggtactgacaagctgtttttgagtgccactgtttgccatcatctaagccactgaatcaagtgtatttcaggcttatttcaacattccaatgccctggttttcctgcttgaatctgttcgtggtcaaaggtttgggggaatttgtgaccctggaacatccccagagtgaaagatggagctgggccacatcagaataaggccttggccccatcctctcacagcctaggtgctctgcaggcatgctgactgtcctgattgcgatccagcccgaaattccctcctctgctttcaaaagtcaaatcccccattcttaggccacactggtgtcacaagctcctgtcagggagctggggtttgggaatgtgctttgtgaactctgctttaaagtgaggggccgaggaaaacttagaaacaggcagagttggaagcagccaaatcacagtgggtgttgtgtgtgtgtgcgtgtgtgcatgcgtgcgtgtatgcgtgtgtgaaagcaggtggaccattccactttttagctcctattgatgcaccaaaccaagtgcctcatttctgtgccaaatgtttgccttggtcgttgtggacctccttctctaacttgcggtggcatgactgtcaggaggtgctggcattttcagcagatcctcatgtgttgaccctgatgtctttagcagaggcctctagcatctcggtttttcatccactgcaggaatgtggccacagggagcagaggtttgtactttccccaagaggtcctcatcctgagacggtctctacccatgtttaacccaaagagtgcaggccaggttccttatccttctgatgaaggatgagagagctcatttagaagtcagagcaaactagggtctcagtattgagaaacgcagcctgccagggaatcacagagacatcggggtgcccgcgatggccctcatgaagccatgcctcgacggcattcaggaagccctgcaaacgtgctttttgaactcattggccaggtgtgatttttacacaaggtaaacgtggtcaagggcatcggggaatttgctccaagcagatagctccctctgaggaaccaaaggaagcaagtttccacgatttctgaagagctggtataggaagtttctttcttccttttgtgttacatgtgcattaaacagaacaagctgtgtgtcatcacagattgtactgtgggctcagaaaccgtgagagagcccccaccgtggacaccggctctagggccacaggaaaaggaacgtttccaggcattttgtctccagggctcccgctggacaggcacgtactgccctggggagtaaatgcggagagttcacgaactgtgcccaacgcatgttatagccagggtcctactaactactcagtaaaagaacgtattgttgtattcctccagtgttaagctatagccatgttaaaagtcactgtgcatttattctcagcatcaaataccttgtaacgtcttctctgccttgttagtgcatatttttacttttctgatactgtaaagaatatatccagtatgtaaatgaatgttctataaatcttttgtatagtcattttctctgctccttaaatatcatctctattcagagtataataaaattatgaacttggtaa

SEQ ID NO: 15184 - DNA, 1170 bp, Homo sapiens
caccctgtcgctggagttggcatgcagagactttgtcaggatgggagaggccgcaggtgttgtgttctgatcactggtctgtgccctcacagcaccgcacatcgacacactgtacttatttgtccctctctaacattttaactaaaagttgattcaacaacacacagttggataaacatatcacttcatgttgctcatgtctgttttgctttgtttttaagacactgaaaagaaaagctagaatttatttattcagactttaaagaacaatttctcattgatgttgtgaaaatcgtcatgtatttagacttggtgtagtagccagaattcgtaaagctgttgcctgggagcttggtactttccctccaggcagaggctctagctcagcacggcctgtagcgcacagtcagtcttgcatttcagtgtgttcaccccgctgctcctgccccttggagcccagtgacagaaagaacagcctctgtcaccccgccgccactgccttggttactcagagcactgtggggtgtcacagctgcagcatttggagtctctctcttgctgaggactcaagcccacctgagtccactcccctcttgatgcctagagagctggcccagccaacacagctcttagctgggagctccttctgccattccaactagtttcttcctggggccagttttgggtttaggttgtaattccttatatttctttcttccacagtgtatcggatctgtcgttctggaaagaagacccttctatttagagtagaaacaaacgaaacttctaaggtatcatctgtgttaagtgatgagaccatatttctttgatgtttctgaacatcaaagctgattcagtactggtagatgtgctcattctccctgaaacatacccatcatatttcctattataattacatctcattgtcctgtggaggtggacatgataaacattatcttttgttttcttgttttgttttgtttgagacggtctcattctgtcacccagactggagtgcagtgccacaatcatggctcaccgcattgacctccttggctcaaggcatcctcccacctcagcttcctgactagctgggactactggtgtgcaccaccacacccagctaattttcaatttttcatagagacagggtctcactgtgttgtccag

SEQ ID NO: 15185 - DNA, 451 bp, Homo sapiens
ggagcctggtaccttgcataggcactatggaccctgttttgcttaacccacccaacagccaattttagcagacatcctagttttgcaggtgagaagagctgaggtacgaagaagttttgttaatttttccagttcacgtaacaagtaaatgggaaaccaggatgaaaatcaaggtttatctgtcatcagactgttactcataatcaccattcggagagttcagatgtgggacaagattctaactccagccttctcccaaatggttaatttgccagttgccctagagttacatattgtcttatttgtttgttttactgaatctgtctgagtattaaaagccttgtatcttgtgaaatttctttcaggtctcataaaagcgatgaaagagaccaggataacattctaatatttaaataagatttttgaagtaaaatccttattttgtaaattt

SEQ ID NO: 15186 - DNA, 179 bp, Homo sapiens
aagagttggtacagaaggccatgccacatgtccagaatattcaagaatgcttattctcttagatgataccgcacccataggaattgagaattgggagtgggaagaaaacctcaaagtggttcatacttgcctgtaaaaagtaaatgcattttactaataaaaaaatatggaagtaaatt

SEQ ID NO: 15187 - DNA, 85 bp, Homo sapiens
gccattatcttcagttattcagtggtttattaaatgcaaagtatatatttgaaatattaacataataaattattatgccaaaatt

SEQ ID NO: 15188 - DNA, 1127 bp, Homo sapiens
gtgggatacttggaatcaaggcatctctgtagtacagtcttctttattttttagcatagaaagttggggatgtgttaattgtatttttaagaatatattctaagttctgtacttcaaataatagcacagattttacatctgattgacatagtgtatgttaatgtaagttttgctttccagtgattacctgatacgtaagcctatttgaacaaagtgagaatgaacttttgtttctaagaagtctttatcttgaagctatataacatgaaaagtgagctcaaattttttttagttgaagattacatataaagttgtgtctgattaatattcatcttttattgaagaaagtgccttctgatggccacataattcttaatgtcagctagtataatggtttacatttggacaaagtattgcttagtgttatttaagtagatttaagatctcaaagctaaagtgccaatttttactttcttcagccaatttgttacctcttttatggtttttaatttttatcaggactaacattttcagaaatagcaaggtgtgatctagtattagattcacagaactgaaaggttaattaagaatgttggttattttcacgggagcgtgtgatatttaacattaatattttatttgacactacagcctgtaatactgctctctttcaaaaacaagttttcagatttttataacagacccattttgttttatgaaacatgttcattacagaaacatgagaaaatagagataagtaaaaagaataaaagtcactattatcctaccactttgcgggacacactattaatatttaagcatagattcttccagatgttttgttttatacagcagtaggattgtgtaatgtattctctcttgtagcctattcttcaaagcgtatcttcactttccatgttaacataaatgtccttttatgattgtctaggattccatggatggatggaatataattgagtcatctggtagagcgcatataggacaggacgctaggttgtttatcttttgtttattgtaaaggaactatgtgggatgcatttggtgatctttttaaaaaatgtataaatttcttgagtaattcctggattaaagaatatgcacttttt

SEQ ID NO: 15189 - DNA, 408 bp, Homo sapiens
gaatcaaaaattgaagagagatatatctgaaaactggaataagaagcaaataaatatcatcctgccttcatggaactcagctgtctgtggcttcccatgtctttctccaaagttatccagagggttgtgattttgtctgcttagtatctcatcaacaaagaaatattatttgctaattaaaaagttaatcttcatggccatagcttttattcattagctgtgatttttgttgattaaaacattatagattttcatgttcttgcagtcatcagaagtggtaggaaagcctcactgatatattttccagggcaatcaatgttcacgcaacttgaaattatatctgtggtcttcaaattgtcttttgtcatgtggctaaatgcctaataaacaattcaagtgaaatactaa

SEQ ID NO: 15190 - DNA, 2883 bp, Homo sapiens
ccgcagatgtcctctcggctgaagactggaggaagtgaacactggagtgaagaagcggtctgtgcgttggtgaagaacacacatcgattctgcacctggggacccagagcgagatgggtttgttcggtgccagccgaccaagattgactagtttgttggacttaaacgacgatttgctgctgtgaacccagcagggtcgcctccctctgcatcggccaaattggggagggcatggaagatccagcggaaagttgaaaataaactggaatgatcatcttggcttgggccgcttaggaacaagaaccggagagaagtgattggaaatgaactcttgccctggaataatcttgacaattaaaactgatatgtttactttttttgtattgatcacttttttgcactccttctttgttttcaatattgtattcagcctattgtaggagggggatgtggcgtttcaactcatataatacagaaagagttttgaatgggcagatttcaaactgaatatgggtccccaaatgttcccagagggtcctccacaccctctgccgactaccacggtgtggattcagctcccaaatgacaaacccagcccttcccagtatacttgaaaagctttcttgttaaaataaaaggtgtcactgtggtaggcatttggcatattttgtggactcagtcaagcaaccacagtctgttaatcatttctctatgctcagatgtcagatcctcttgttattagtgtgtcttgttctgcacagtgcaggagactttattcctttggaaaattcactgttccacaaacagcaggctgaatggcctcgcctctagattgacgtgggccagcctccttgagacacacctggcacccgtcatcggccagcggtggatgctgcataatccacctgggtacttcagccttgcgtttccacagccttcagcctgttctagaacgatcactgccttacccctgctgctgcagtggtgtgagtcgtttcacggctgatgtccctcgggggattaaaggatctaaagagaaaatggcacctggttgtcttcgtgctgtgtctcatgggtttccatagtgataaagacaaggaaacgctgcaggggccacaggcacaggctgatatttaaagatctttgcttgcagccctccgtcctgctgaaaacccccataagccagtgaacacagagcagctagaggctcctcctctgctggcttagggtcagaagtacctcacagtggttgtggacatggaagagttttgtcaacacaacactttgtccccgctccgggagatgagtcagatggtggcttgagttgtcacttggtcccctccgcccctcgggtggccccctttgccacgtccccttagcttagtgatcaggtgtgagagtggccatttccttacctttgatccctgtaaagcagaaaggactcctttgacaggcgacaaactactgtggtgagcagaatgatttcctttttcaagacaacacctgcctggcttctattaatgtgtgctggccatgatattgccccaaatccgccccactgaagtgttccctaaggaacagcatttctctgctcctcagtcaacccccgtagcctagagcagtgtcacaagcttcagtaaggccagtcagctggaagtcagtctaccgtatagtaacactgtatgtcagtctacagaccacactctagttgttttccatgaaaggtatacaaatgaagaattttctagcaaaacatgtttttaaccatcagtgctcaattgcattttcttcctttcgcagccagtcagtctttcaaactattgacagtaagataattctcacgttcacacctggtggcaggcttcactgtagggacggacattgcagttacaccacgattccttcctcttcactggctcgaggtaaacccttttcaaggaaaaacaactctaggatttcttttttctgtgtacgtagaccagtcccatcagtgtataatctctctctcacacgcctctctccaatagacagcttgtatttgcagtatttcatatttataaatatgcgtttatttaaaaggagaacaaaagcttgactctgattcacagttttgtatgtagctggtttgacgtagtcttttgtattttccctgccgaagtgaattgttggagaatgtaaaccgcctccacgtggcggcagacttcctaaggccccagctcgctggcctcgcgctgggcggctgggaattccacctgagaacaagtcccgcaaaccggggacggaaggacatttgacttttatttttgtatttaattgacatgaatgtaaaggggacagctcagggttgttttggagcctgttgactttgtatctctgcctgtgattttcttttctaaatgaaactccatgtagcaaccaggacgaagttgagaaggaaaacgccaaatgctttggttattagagtttaataggtaagctctgttacactaggtgttagagttccagaatgttcttttgtttgctaaaccttgaagaaacatgtgcctcagcctagatgttttgtcttctcttttctgcacttaatacctgacagtatgaccgatctctgcgcctttctgggggcgggcaagctggcggtagatttgtgatgtcacagtgcaaactgcagtgactgtaaattggcctggcgtgtataaacgttttcagggaatgcagaaggtattaatgaagagacaaaacctttattccatgtgctttgcttcattctgtacatagctctttggctcgtgaacctaattgtaaactttcaggtatttttgtacaaataagggactgatgttctgtttcttgtaattagaaataaacattaatacagtgttcttc

SEQ ID NO: 15191 - DNA, 1338 bp, Homo sapiens
atgaacagaggccagagaattgcagaaacccacctgtaatatgcccacaggcgtcactcaaggagtctgcatagccaggaacatcaagttttggtgttactttcttgtctacaggccaaatgcgcacagttgattttcggtgtgttcctgtataacggcttgaaaggaaaggagaagatgctgtgtcgctgcgcagctcgtgtgccaaggaaatgtgttttgcctctgaatatcttaagttgctaataaacgattcttgttggcaggttaatgggactataaatgctggagcccagcactcacacttaattatatttatgggcaaagtaaaaagaatcatgccttagactgattttggacctttgagacttttaccacatacagatggatgaaactacttactgatttaagatcttttgaattttagaaaaaacatatgaatcagatggaacaatctgaatgtgatatgctccatgatgctgtgtgttttggtagtaagaaaaaaaaattgggaggcttttcaaaggtggctttgttaggtagtaaaactgctggattcttcttcctcaaatatttggggctaacacttcacagagggtcacagtccatgatctgaccaactaagcttttaaaaatcaactattaccacccagaaaacagtcctacgtgatcatgtggccagggcatgcccgagtcctgcaagggtggcgggtggctgaggtcacaccaccactggagtggatgggcagtgccccacatggacagccattccccaggctatgaagtgacataggcctcccccacggtgcctgtgtacggagcctgatgacttcactgggagccttctggaatcctgcagagggtcaaggagcagggatgttggatgcccacctgtcaagagttcagatcaaagttgcgctgagagcatcacaattttggttcagccttgacgcgtttgtccaacagctcattggctccctttgtatgatatcgtggtcttctcacatggtgcccagtcaccaatatttataatgaggtctaactacagcagtagtttttcatatatatctctaaaacattttgttatattgaaaaaagtaatagaaatcaagatgtgttgatgaaataaaatgtgtatctgagtgagaaaacaagtatggtgaggtcactttaatgtttcacagcgatctcagatctaggcctcaggtagaatggaagctgttctgcattcactgattaacgttgctaaactcttggtgaggcacgagctaccagccaattgctcttcatcacagctatctgtcttttagtgccacaaataaaagaaaatcaaatctt

SEQ ID NO: 15192 - DNA, 163 bp, Homo sapiens
atacattttggaagagagtttttcatcttagagattggtgaacaagtgtgagggtgtgagaaactcacagaatacaaatttgcctgtatgttttgtgggtttttttttttcctttcaagatgttttctatttctaaattaaagtaatttcaaagtaaatgaat

SEQ ID NO: 15193 - DNA, 2241 bp, Homo sapiens
tggggtgcccacgtgcaagaggagagacaggagagggcctttccctggcctttctgtcttcgttgatgttcacttccaggaacggtctcgtgggctgctaagggcagttcctctgatatcctcacagcaagcacagctctctttcaggctttccatggagtacaatatatgaactcacactttgtctcctctgttgcttctgtttctgacgcagtctgtgctctcacatggtagtgtggtgacagtccccgagggctgacgtccttacggtggcgtgaccagatctacaggagagagactgagaggaagaaggcagtgctggaggtgcaggtggcatgtagaggggccaggccgagcatcccaggcaagcatccttctgcccgggtattaataggaagccccatgccgggcggctcagccgatgaagcagcagccgactgagctgagcccagcaggtcatctgctccagcctgtcctctcgtcagccttcctcttccagaagctgttggagagacattcaggagagagcaagccccttgtcatgtttctgtctctgttcatatcctaaagatagacttctcctgcaccgccagggaagggtagcacgtgcagctctcaccgcaggatggggcctagaatcaggcttgccttggaggcctgacagtgatctgacatccactaagcaaatttatttaaattcatgggaaatcacttcctgccccaaactgagacattgcattttgtgagctcttggtctgatttggagaaaggactgttacccatttttttggtgtgtttatggaagtgcatgtagagcgtcctgccctttgaaatcagactgggtgtgtgtcttccctggacatcactgcctctccagggcattctcaggcccgggggtctccttccctcaggcagctccagtggtgggttctgaagggtgctttcaaaacggggcacatctggctgggaagtcacatggactcttccagggagagagaccagctgaggcgtctctctctgaggttgtgttgggtctaagcgggtgtgtgctgggctccaaggaggaggagcttgctgggaaaagacaggagaagtactgactcaactgcactgaccatgttgtcataattagaataaagaagaagtggtcggaaatgcacattcctggataggaatcacagctcaccccaggatctcacaggtagtctcctgagtagttgacggctagcggggagctagttccgccgcatagttatagtgttgatgtgtgaacgctgacctgtcctgtgtgctaagagctatgcagcttagctgaggcgcctagattactagatgtgctgtatcacggggaatgaggtgggggtgcttattttttaatgaactaatcagagcctcttgagaaattgttactcattgaactggagcatcaagacatctcatggaagtggatacggagtgatttggtgtccatgcttttcactctgaggacatttaatcggagaacctcctggggaattttgtgggagacacttgggaacaaaacagacaccctgggaatgcagttgcaagcacagatgctgccaccagtgtctctgaccaccctggtgtgactgctgactgccagcgtggtacctcccatgctgcaggcctccatctaaatgagacaacaaagcacaatgttcactgtttacaaccaagacaactgcgtgggtccaaacactcctcttcctccaggtcatttgttttgcatttttaatgtctttattttttgtaatgaaaaagcacactaagctgcccctggaatcgggtgcagctgaataggcacccaaaagtccgtgactaaatttcgtttgtctttttgatagcaaattatgttaagagacagtgatggctagggctcaacaattttgtattcccatgtttgtgtgagacagagtttgttttcccttgaacttggttagaattgtgctactgtgaacgctgatcctgcatatggaagtcccacttcggtgacatttcctggccattcttgtttccattgtgtggatggtgggttgtgcccacttcctggagtgagacagctcctggtgtgtagaattcccggagcgtccgtggttcagagtaaacttgaagcagatctgtgcatgcttttcctctgcaacaattggctcgtttctcttttttgttctcttttgataggatcctgtttcctatgtgtgcaaaataaaaataaatttgggc

SEQ ID NO: 15194 - DNA, 1574 bp, Homo sapiens
acctggcacgaaccagatggtgccagggagtacgtgacaccaagccaactgtgtggcagaacgtgcagtgagggtgcaagggtctttcagaagttgcatcattagccagtagtaggtgggtcacatagtacctggtgtacacatcggggtgggttgatatatggggtgagaagtttaggctgatcgccagtgatagtaaacaaaatctgtgcagagggccttagcatgggatgtgtccagtattgaaaaggctgcactgccaaccatgatttgtgaaccttctgggaaattttgttattaaaagaatatatagtgtcagacggaagttataatcatcttggaggaaccataagaaaaagtgtccagggtatctatataaagagggttaaatttttttttaacttgctggttaaaacattttagaaatattcttgagatgggcaggagagtcaaagggcttgcttgccccagcagagttcccagcagacagccatggctcttcccagcagcctgtgcaaattctgatgatgaccccacccccgcacacgcacacgcacatcatgcttttccagctcatcacaccccgccccactatgggcctaccattaatagtgtatatcttggaggttaaaagagccttttggacagaaaactgggccaggaaaaggcatctcagaccacaaatagagaatttgattcctcatttgccacataagtcatctgcttagcttttcctttcttttttttttttttttttttttggaggcagagtctccgtttgtcgccaggctggagtgcagtggtgccatctcggctcactgcagcactgtctcggctcactgcagcctccgcctcccgtattcaagcgattctcctgtctcagcctcctgagtagctaggactacaggtgtgcaccaccacgccccgctaatttttgtatttttggtagagacggggtttcaccgtgttggccaggatggtctcaatctcgacctcgtgatccgcccacctcggcctcccaaagtgttgggattacaggcatgaatcaccatgcctagccacttagttttttgtcattcccacctttctatcccatagaacactcttttttatcttccctgaaccatattgatgagataaatagggctgggggctgggccccgctggtcactcaacagagtatttcccttggccgagatggaagttttgtcccaatagatgagctgctgagcatcaacaaggtgacatttttctgctgcccatttgtgtcctggagacggtggtaccctgaaggcagaggccagctgctgcaagacagcaatgacagtccacctgccggcctgattcctgcatcatggaataaccacatggctaccttctatcctctgttcccaaatggtggtggcacttatcctgaagtcatcaatgatttccctttgaaactactttattttactaatttaaactattttgtactgatgtagccctgaggtagttcatgaaaatgctgtgcactcattccatggaataaatgttggaaagctgatcttttctgatataaaatgttgaattat

SEQ ID NO: 15195 - DNA, 2369 bp, Homo sapiens
tagtttctcttactattctgagagccctatcattctacatcgcaacttcctgtgagattgtctttgtagcatttaactctgaagttctcattttaaaaattggcttgcttattgtatattttccccaactaaagtgtgaactcctagcggggtgtggtggctcatgcctgtaatcccagcactttgggaggctgaggcgggtggaccacctgaggtcaggagttcaaaaccagcctgaccaaaatgatgaaaccctgcctctactaaaaatacaaaaattagctgggtttggtggccggtacctgtaatcccagccacttgggaggctgaggcaggagaatcacttgaaccccggaggtggaggttgcagtgagccaagatctcaccattgtactccagcctgggtgacaagagcaaaactccgcctcaaaaaaaaaaaaaaaaaaaaaagtatgaactcccagaaggcagatcctgtgtccctcttttcagattctgtatcttggcacttaggacgtacactaacacaaatatgactttcaatcaatatttgccaaaatgaaaaaacaaaagaaacacgtagcatcatgtaaaaggagctggttaggtggagaaatttatttaccatagtcctgcttttggatccagtagtgacttttaacttttatatccaaatagaagctggaggctttgttggggactcataggcataaaatgttaagttatacaaatctaattaataggcctattttcctttttaagttctactactgataatttcttgacagtttttatgataaaaggttggaatttgataagaactcccatgcttttgtgtcagacttaaaactgatattagaataaagaattcaaaagctagagaaagagttgcatttgaatgataatattatgtgttacagatttggggtatatgccaaagttatcaaagttgtagaaaataaggccaggtgtggtggctcacacctgtaatcccagcactttgggaggccgaggtgggcggatcacttgcggtcaggagcttgagaacagcccggccaacatgacgaaaccccatctctactaataatacaaaagttagccgggtgtggtgttgtgcacctgtagtccctgctactcggaaagctgaggcaggagaatcgcttgtagccaggaggcagaggttgtagtgagcagagattgcgccactgcactccagcctgggtgacagagcgctgagtcaccacacctggtataagccactgtgcctgacccacaatgacttttatacatattgttaaatcatcttacagattttataatttgggggaagaaaaattttactaaatgatcttttaatggaaactctacaagaaccagaatctttgctttgttcacttatgtatccattcctaggcctagaaaaatgtctgacgcatagcagcaattattcattgaataaatggacccagcaatagtacattagctatgccatatgcatacattaaaaatgtagattattgactttcaaaagataattaatgtaacttcttactgcttctgaacatgtttgtgagttatattgctgagggacctttatcttctcattctttcatcttaatccaatgttattaaaactgaaactgaaatcaccaatattattccatatttaaaaataacatctaccttataaaaattatcattgtgctgcatttgagaatagactttttaggtaataatggtataatccatagggtttttgagggcacagaaggattcatgctaacagaacattttattttctattttccaagagctataaaacatgatattatatgatactataaggcatatttttattttccataattttttctaaaaaaaattagtgttggttttccatataacttttaactttataagtaaatatttgtctctttcagctccagtttcatgtgaaatagagtttccagatttatgtagcatggaaagttttaatacgtcagttactgatttttgccagtcattttctcaattatttacttcttttatctttagttgattttttttgtagtgacaagttttgtttctattctcatttccttttgtgtatattctatgtagatttcgtttttggttactatgaaaattacatataacatcctggagttataacattctgatttgaatttatttcaacttaacttcaatcacataccaaaattctactgctatataggtctactctttttaggttattgatgtaacaaattgtatctttattcattgtacaccacctaacagatttataattacattttatgcatttgtcttttaaatcctgtagaaaataaaaagcggagttacaaacc

SEQ ID NO: 15196 - DNA, 709 bp, Homo sapiens
catccattgtcgtacagctccaaacaacttcagatgaatttttacaagttatacagattgatactgtttgcttacagttgcctattacaacttgctatagaaagttggtacaaatgatctgtactttaaactacagttaggaatcctagaagattgctttttttttttttttaactgtagttccagtattatatgatgactattgatttcctggagaggttttttttttttttgagacagaatcttgctctgttgcccaggctggagtgcagtggcgcggtctcggctcactgcaagctctgcctcccaggttcacgccattctcctgcctcagcctcccgagtagctgggactacaggcacccgccaccacatccggctaattttttgtatttttagtagagacggggtttgaccgtgttagccaggatggtcttgatctcctgaccttgtgatccgcctgcctcagcctcccaaagtgctgggattacaggcttgggccaccgcgcccagccaatgtcctagagagttttgtgatctgaattctttatgtatatttgtagctatatttcatacaaagtgctttaagtgtggagagtcaattaaacacctttactcttagaaatacggattcggcagccttcagtgaatattggtttctctttggtatgtcaataaaagtttatccgtatgtcagaacggatttgtgg

SEQ ID NO: 15197 - DNA, 72 bp, Homo sapiens
ggggctggccagtcagggagggctagggggcaggtggggaggggaagccatggaaatacaagtcaaaggggt

SEQ ID NO: 15198 - DNA, 276 bp, Homo sapiens
tgaagaagttcaacctggagagatggaaaatcagctctcataactaagttaatttagtataaaaatagaattgatagtgagggtataaagtgtaaccatcagttaaacctctcctgtcattcctggcttccttgcttcagaattgaaatggaagtgggggtgtccctactctgtagaatctgggactgggcaaatgtttgtgtggcctccttaaactagctgttatgttatgattttattctttgtgagttaattagaataaagtcattttcttcc

SEQ ID NO: 15199 - DNA, 1277 bp, Homo sapiens
aacttttctaaacataaaagacaccatcctgttgagaaaccctaaaaatgtgaagaatttgacaaagccttccaatgattgttacacttgcttgtaggtaagataatttatattggagaaaactttataagtgtaaagaatgtgacaaaacttaaccaatactcacatcttattgcacaggaaagcatttttacttgagaaagattgtacaagtataaagaatgtgaaaaagtcattgatatcttttcacatcttactcaacaccagagtttatacttattaaaagcattataaatgcaattactgtcaaaagaaatttcagaaaacataacactttaaagtgaagaagcgtgtttattttgaagacaaacataacaaatataaggagcataggagggttgtagtacctttacttgtattacaaatcttattgtacgcattttgtactagagaaaaacactgaagcagttgctcaaactttgttcaacatcagggaatttatattggagaaaaatcctgcaaatgtaatgaatttggaaaaacattttttttcaaaaactacggcgtagaaaacatgaatttatattgaaatgtgtttttgcagatgcagtaagtatgaaaaatatttaatccaaaattgagtctatgtaaatattaaataatttacagtagaaataactaaggcactgacactttagacattacactaaaacagagtgttgagtataaaaaaatctataagttgttagattatttgtaaataactttaaaaggagtagaagattctttggagagttataattacattgaaagtatactttttttcttgaaaaaattatggcttatttgaaaagtaaataatgatgaaattcaactctcaaattactttatttcattcctattgtattcacatgtgaaagcatgtgataaattgttgctgtgtcagatataggagagattcttttttattagatgggcattatttatggttttttctgtggaagagtatgggcattaaaatgtaaggtttatgatgaaaatctaagtggagaggccctgttagtttacttttcatattgagtgatgcatgaggtaggtgtttggagtaatattctgcatcatagagaaaagcatttttaattttactttaaattaaatgtaattaaattactagtgaatcattttactaattgtacttttatgctataaatgcagtacatttgaaaatttttagattatgtataagcttaattttataattaaacatttctttaaca

SEQ ID NO: 15200 - DNA, 3667 bp, Homo sapiens
tcctcaaaactcattgaacacaagaaaattcatactggagagaaaccttacaagtgtgaagaatgtggcaaaacttctaaccatttctcaacccttactaaacataagatgattcatactggagagaagttacacaaatgtgatgaatgtgacaaagcttttaaccaatcttcaaccctttctacacataaaagaattcatactggagagaaaccctacaaatgtgaagaatgtggcagagcttttaattgatcatcaaaccttattaaacataagaaaattcatattggagagaaaccctacaaatgtgaagaatgtggaaaagcttttaaccagttctcaactcttactacacataaaataattcatactggagagaaaccatataaatgtgaagaatgtggcaaagctttcaacctatacgtaaaccttactacacataagaaaattcatactggagagaaaccctacaagtgtgaagaatgtggcaaagcttttagccaagtgtcaactcttactatacataaaagaattcatactggagagaaaccctacaagtgtgaagaatgtggcaaagcttttaaccaagtgtcaactcttactatacataaaagaattcatactggagagaaaccttacaaatgtgaggaatgtggcaaaactttcagtcgatgctcaaaacttactacacataagaaaattcatacaggagagaaaccttacaaatgtgaaaaatgtgctaaagcttttagccagtcttcaaccctttctacatataagataattcacactggagagaaatgctacaaatgtgaagaatgtggcaaagtttttaaccgatcttcaaaccttacagaccataaaaaaattcatacaggagagaaatcctacaaatgtgaagaatgtgacaaggcctttaacctgtcctcaacgcttactaaacataaggtaattcatactggagagaaactgtacaaatgtaaagaatgtggtaaagcttttaaacagttctcacaccttgctatacataatataattcatactggagagaaactctacaaatgtgaagaatgtggcaaagcttttaacttatcctcaaaccttactgcacataagaaaaatcgtactggagagaaaccctacaaatgtgaagaatgtggcaaagctaacctatcatcaacccttactccacataagacaattcatatttgagagaaaccctgcaaatgtgaagaatgtggcaatgcttgtaactaaatctcaaactttactaaacataagaaaattaatactggaaactttacaaacctgaaagatgtgacaatgattttgacaacaccttcaaacttttctaaacataaaataaatcatactggtgagaaatcttaaaaatatgaagaatggtacaaagcctttaaatggttgtcacacttgattgtaggtaagataatttatactggaggaaactcccagaagtgtgaagaatgtggcaaaacttttaatttttcacaccttatagcacaggaaagcacttcagaaaaattgtacaaatataaatgtggaaaagccattaatatctgcttacatcttactcaacattagagagttagtgcttaataaaagcattataaaagcaattagtgtaaaatcagaaaatgaaagttttttttttttttttagatggagtcttgctctgtcacccaggctggagtgcagtggtgtgatcttggctcactgcaacctctgcctcccaggttcaagcaattctcctgccttagcctccagagtagctgagactacaggcacacaccaccacatttggctaatttttttatttttagtagagactggctatcaccatgttggccaggctgatcttgaactcctgacctcaagtgatccacatgcctctgcctcccaaagtgctgggattataggtgtgagtcactgtgcctgacaaatataagcctttaaagagaagaaggttttcattttgaagacaaacattaggtacataaagagggttgtagtgtctttatttgtatcacagattttattgtacacattatgtactaaaggaaaatcctgaagcagtgctcaaactttgatcaacatcagggagtttatattggagaaaaactgcaaatgtaatatatttggaaaaacatttttcaaaaactactgcttagaaaacaccaggggatttatactaaaatatatttttgcagatgcagtaagtataaaagaaatttaatccaaaattaagtgtgtgtaaatatcagagaattcacagtagaaatatctaaggcactgacattttagacattgaactaatcagtgtgctgagtacagaaaataatccaaaattaaagttggtagataaattatttatatataactttaaaagaggtagaaatatttttagttataattacatttaaagtatacttttttctttgaaaaaattacaaaatttttaaaaagtgaatgatgtaattcaactcaaattacttcatgcttttcattctattgtattcacatgtgaaagcatgtgatcaattgctgcttcatcaaagatatgagacattcttttttgttaggtgggcaatattttttaccttttctatggaagagtaaagacattacaatgtaggatgcatgataaaaatctaagtggagaggctctttgtgtttaatttataatattgaatgatgtatgagggaagtgttcagaggaatattctgcattctagtgaaaatatcttttattttagttaaaattaaattaaaattagtagtatatcattttactaactgtacttttatgtaataaaatgcagcacatttaaaaaattttagattattgtgaacttaattttttaattaaactttttttttaacatgttaagaccaattgtgcattcagtgaagtattatcatgccactaacttcaacctatcccaccttactcaagggtgttggtaaaagatagtaacaatgtactatttaataacagagtggactaacatctctaataatttctcttgccagtgactttaaactaaagaacttaattaaagaacattgttcccataggttaaatttttattctttttcttatttaaacatatttttcttaacttttgtgggtacatagtgtgtgtatatatttatgccatatatggcatattttgatacaggcatatgaataggtattaatcacatcagggcaaatgaaatatccatcaactccagcatttatcatttgtattacaaaccgattctacacttttagttactttaaaatgtacaagtaaattgctattgactatagggtcattttcatgggtataataaaaattatatacaagtataaataaaatcctgagtcttaaaattctgagtcctgcttaaacattttaaaaattttgttatgtatttttctttgaacatgtctctctgcctgcaaacataacagaattttagtattggtttacatagagttaactatacccatatattactctaaaaataaatgttaagtgcaagaaagttatggactgtttttgtgtgagtgtgagtttgtacctattttcaaaagaaaagagcaatattggagcaaaacaaatattttaataaagtaatgtactagacaactgaaaacttc

SEQ ID NO: 15201 - DNA, 209 bp, Homo sapiens
gcaagactgataccacctgcgtgtcccttcctccccgagtcagggcgacttccacagcagcagaacaagtgcctcctggactgttcacggcagaccagaacgtttctggcctgggttttgtggtcatctattctagcagggaacactaaaggtggaaataaaagattttctattatggaaataaagagttggcatgaaagtggctactg

SEQ ID NO: 15202 - DNA, 899 bp, Homo sapiens
ggcccagcttttcccttgtggtggcctctccaggcccagaacttcctcaagtcggcctcccccggtccagtggctgcctcccggcctcctctccgggcccagctctttgctcgcgtctgcgcccgtgggcccagctcccgtctccaaacagcctccttcgactcggctcctgcccagctcccggcggccttcgtaggcccgaagcctcctccagtccagctctccagggccgcgtcttgcctcgcctcgcctcccctcaccttgcctcacctcgcagcagcctttccaggcccagctcccgcctcccggcggccttcccctgccacgctcgtgccggcctcccggcagcctccaccagcccggctcctgcctcacgctggcccctctgggcccagctcatgcctcgcggtggcctctccgggcccagctcccacccagcctgacggcgcctcccggccccaagctgccttcctcgatgtggcccaaagtggcccaaagcgtcccaaagtaggcctcgccaggcccacctcctgcccggcgtaggccctgaggggcgcggcccctgccccatactggcctcttttgggccctctcttacaccagcccctgtctcaggattgtctcttcacgcccatcttctgcctcatagtggtcactcaaggcctcgcttttgcctgatgattgcgttttctggttttgctcttgccttgtattcccttcttcgggatacagcttttacgtcttccatggtgaacctcatcaaggagactaaatcttccctggtctgtcatttttttcacttcacaccagagtgccttgggaaaaccccatctcttcttttaaccttgagagtggatttctgacgaattgataataaattttttctctgtggtttcagt

SEQ ID NO: 15203 - DNA, 668 bp, Homo sapiens
cacccatcaatctcttcacctctaaaacactaaagtgtttccgtttccgacggcactgtttcatgtctgtggtctgccaaatacttgcttaaactatttgacattttctatctttgtgttaacagtggacacagcaaggctttcctacataagtataataatgtgggaatgatttggttttaattataaactggggtctaaatcctaaagcaaaattgaaactccaagatgcaaagtccagagtggcattttgctactctgtctcatgccttgatagctttccaaaatgaaagttacttgaggcagctcttgtgggtgaaaagttatttgtacagtagagtaagattattaggggtatgtctatacaacaaaagggggggtctttcctaaaaaagaaaacatatgatgcttcatttctacttaatggaacttgtgttctgagggtcattatggtatcgtaatgtaaagcttggatgatgttcctgattatctgagaaacagatatagaaaaattgtgccggacttacctttcattgaacatgctgccataacttagattattcttggttaaaaaataaaagtcacttatttctaattcttaaagtttataatatatattaatatagctaaaattgtatgtaatcaataaaaccactcttatgtttatt

SEQ ID NO: 15204 - DNA, 4845 bp, Homo sapiens
cagcctcccgccagccacactgtgttgcagctcaccgcgcatgtgcatgccgtgcgggcagactcttcctccacacagcagacacggacctatggactatggatggatgcggacgatggaaccgttcagtaaagaacccaaggttgagtgcaactggggttgcacttcagcttcatctccttggcagggacactaaagggctgtcttcagtgctttaatggttttgttttctaatgcaataaatcgccaggatttccaaattattgcttcaaccatcagtcataactctagagaaaaacttcatcttcatctcggaattccagcagccatccaggtataatggtgagagagcaagagagaggcatgaacacacagtcacctccactccccattctttcaacccaagggtcaacaggagactctctgctgaggtcaaccctcagttccaagaggctgacttcagggttgccacagaagagggggctttccatcccaccctggcttccttcctccacccagtggagacccccccaaggcatgaggggaaagccattaagtggggtgcagccctggcggtcttcagctgcacccctcaccgcttccgttcttactgccttttctagaggactgccattggtagagctggggtgctctcagtttccgtcggcacttggctttctgttcctagagcccatcccgcaccagcattttggaacctgcagagagcctttctcccagctttgccgcctgtgctgccattagagaaaaaaagaagcataatcgtgggcatctctataacatagacagatatatatatttggcttcttcgtgtgtgatgtcattcttccctaatcgcttacacctaatataagcttgtcctccctcccacactcatccctgcttctttggggcaggggtgaggcaggttgaggggggaggggactgggactggcggtgaggttttgatacccacacccagccatctggagtcatggagacccaccacgtctctatgccggatgacctttgtaagttaaggtccttgtgcatcttacctttcccttaccttggagtttgctttgttagtcttccccagctaaaaagagaaatgcaatccaaaatggaaagatggagagatcaaacgactgtattttcacataagatcttctggccttcagattctgcaactgactcattttcaggaggttgggggaaaagatgtttatgagtttagccaacagaacaggtaatttactcctgcctgcagaatacttttcgttggggaagagaactgaatccaaggatctgttttcaacaccattccaagtctgtaatttcctgacttttcctagatgtcagccactactatgaattcaagcttgtgtagtcagattagccagtaatctctagatgtaatagttccctttgtacttttccaagctcaggtctttattttgtaatggaattaccttgctcctacttcttttgattacatcctaaaactacatgcttccccccttccagtagcgagccaccagaagctttcttgtctctatgcagtgggtaggattttttggtgcgttgtgtgttcctgatctccctccctgtcttcctgctcagctttctccctactgccttttcagacttggagcacccaaggtctccaatgaaagttttctcattcacctctgcaagtgctactggcaacagcctgagggcagctgtagaaactttccctctgtgggagactatgaatattcctgatgagcacaagtaaaactaaggcttcagccataatatggaggagggagcagatgtaagctcccaagagcctgggggatcacaggtccctctgcaaaacttcctggagttcagcccagcaaggccagaccaaggaggcagcaacctgcctttcccccttacctgccctgctgcctgcacactgcatgcctgccccttctgctgctcctgttggctgactcaccactgtccccttaggattggaattctcaactagaaccggtccaaatgcagaatattaatacatcgaacaacttcatccttaatctctgccctgggcagtttgccctctcccatctggacttagatgggagggcatagcagatcttgaagggatatactttcctgtttttccctgacccccgaaccacccaaccacatccataggggtgcaggaccctaagtagactgggtagaaaccccagggatgattcttcaaagccccctcctccatgagaggggactgaaatgctgcagctgaggctggtcttcagggcagaaaatgagtacttctttgaaggtggcttttctgcgagttcttctgcctcctgctggagaacagagacccttcaagaggtgagggttagatttcattggcagagagattagccactgtgcaggagtagggaggaaaaggagttctggagaggcgccgccatcctgttttctggaaaggctgcaggattcctttcctaacggtgaccttcttcttgctcccagtgacctggaagcaagcccaccctccccaggggaaaatctaggagaatgcattcctctgcagactgctagagagagatggcaagaaggaagacacagaattctttctgacagcctaggagttatcttcccactgtggtaaccccccatgtggcacccagggactgaaggacacagtgcgtggagacggccctgagctagcggcattccttagacttcaggagctcagagtttgtcccggtgacttgcaccctggctgctttgcttggacagtttgtcttgggtatagggaagccttccttgtcaggcagccaactcccagccctgttcacacaaattttatgctagggccccatgccagtcagtgtccccatcatggtggctatgaagctcacggctgaagattccagaaggtcctggtctcccatgcccaagggatgccatgtagccccagctggaagtgacttccgcaggaattgagagggaatagctcacccctcattctgtcctccggacttaggaaccagtgaccttggctgcccaactgtgtggaggctgagtgattgacaaacacaggttggctcattcttgctgcaagagcaggtaccccccgccgcccccctggaaagcacaagtgatgagcaagaaggcattttccttgggagagaaggggaaatggaccctgacccccttgatccccaaagaagctgcgccccacctttccagatacccacaaagcccccagacagaatctagcatcgggactattagcaatggcttccagaatgtgcttgggtcccacgtgactgatctgacaaaaaaaaaagagggatattaccatggcaacccttgcattccaccctgagtttgccaaggcacacaaaaatagggaacattttcttaaagaacactccaattcagcctgagtgcaacctgactctctgcatctgtatcctgctgggagaggcaattacccttaaagaatctgggtggtatctctgcctttttgtctggcatttgaacttgtccttctatttactcaggagagcaggagctacctgtaagccctggtatctccccatccctactcccagccccttctcccagggtccagagccaggaccccttaatctaggtaaattgacagaaatatcatcttggaaggcaaacaagatattaagcctccaatctttaaaagtatcggtttgcctgttgagcacactcctgcaagccaaacacgtgaactttggtgaactgaggtttaggtgtggtcttaggcaaacccagtggtttcagaaatgtctgggtgttttatttgcagagaacaagatgtgtcttatgagtcttctttctcaatacctgccctgtctcaaatctcacttgacaaatggtctacgatcttgcagttatccaaaagagcctatgaaaaatggacagctgcttttgacaataatgcccctcccaacttcccattcatagaatcataaagcgatatgtttcagaactgagagagaaaagtttaccttttattccaaatgcctcgtactcggtttaagtccagactcaggtcataaatcaaagacagttttgcacgttgctcttcacctaaatctagcagtttccctgaggccctatgagggcatggacagaaaatgaaggatgcaaccacccaggacagctccctggtttgggctggcctggccacgtgtggtcacatgtcctgggatctgtgtttactgtgtccttgctctccttccttgcagaagctgctaagctctgctcctcctaactgcaggtctcaaaccctattgggtcattttgccacactatttctccaaaggcccatagtcattacattttttaccatttcaccaagataacagggggggtctggaattcccctgctaggaagggccccttttcctatatcaccgtgatggtacagatgaactgagatgaaacttttagacttcagcacgtcacacatcctggttgtataaccaggaggtctgcagagctgcaacccctgaagaacatctgtcttaaaagacctcaaatcagaacattctcattggcctcttcagtgatccccatggagctaagagtccgtaacctaaaggccttaccatagccatcttccctccacacctgattgctcaactgccccagaaggggagaatctatctgaaatagaaaagaagcattaaggaccaggtgcggtggctcacacctataatcccagcactttgggaggccaaggcaggtggatcacttaagatcaggagttcaagaccagcctggccaacgtggtgaaaccccatctctact

SEQ ID NO: 15205 - DNA, 90 bp, Homo sapiens
aaggttattgggtcccttcctcgggctgtgttcttgctggtgagcaaaagtgttgcctgcagaaataaaatgcagaacgtactctacgat

SEQ ID NO: 15206 - DNA, 366 bp, Homo sapiens
gtgagtgggggcgtgcttgggaggcgcaggatggcaccggcacatctaacatctacacttctctagctcagcctcacaggccaaagcatcagcaccagaacgcacacccagcccagccccaaagagaaagaagagacagcaaagagccgcagccggtgcttgcacaccgccttgcacatagcagaggctccgggctgactccttcctggtgggaaaggaagatgcctgtcctctccgtggaggaccctgggccctcaccgcaggaagcagtttgggttttgaaaggttattgggtcccttccttgggctgtgttcttgctggtgagcaaagtgttgcctgcaaaaataaaatgcagaacgtactct

SEQ ID NO: 15207 - DNA, 382 bp, Homo sapiens
ggccgcccggagtcctgccggcccacaggcccatcccggcggggcaccggggactcgcgggcttctgctgggtcccgcctgaggtgatatcgtcactgtttaggaaggtcttcaggcctgtgtgtccctggaacatgtaatgatagggaacaggaccccagtccctttcccctcagccaagggtgtatttgtaaacttcggcccccaggccttggcagccagggacacactgaaatccccatggttcctgccacttgctaaccatgctatctgcgcagacgcttccgagggcagaaatagtcccatgtataccttttccatattactgtgaactttcaactactatcaaggataataaatttgacattatttctttctcttt

SEQ ID NO: 15208 - DNA, 1282 bp, Homo sapiens
gtgacagtatcagtgagtgccatacagaattgtgtattcaccagcatcatgaaacagttgtggtcttttgagttgatcttggcagagtaaagggacgtgtcctggagccattcctgaatctccccttctttgtgacagctcctcccacccccccaaaaaataaaaaaaccacaaaaaacaaaaaaacaaaactaaggcacttcacttagagactggagtcctgcttataatcatgcatataacctttactttgatggatctggccagaggggtgttggagcccagcccacccacataccagtcaagctcttaggggagcagaagaaaagcaggaagaatttaaatgtttaattttttttttaaattgacttttctagttattaaaagttgcttgtttcagcagtgatattgtataaagaacatcttgtaagatactcctgacatcttgctttagcacatgtacagtacagtttctatgataatgtgtttgctctaacttccctggcttctccttcagcccatccactctcctctagagcagttgggttggaggctcattgaggcaagcagcaacattggagggggagcagggcagtgctgtgtctgctgcctcccatgcccgttctgacctcagccttggaactcctcaagaacctgaagattccagtggtcagtgtcggtggggggtgggaggagagagcggcagagaagctctgagagccccttcccccacaacaaatctagctctagttgttatatttaggcaaaactttgtagtcttctttcccttttatgatggattttgataaaagtacaaaacagggtttttcttttttatcacctttgaatttggaaattttgagcacccaagctcttctgtacctatttaaagtccaccaaggggactgcagctcctagaacatgagaatcaagcctcttaattttaaactgcggaatgtggcctctgcttcctccgtcctcctgcccaaggacgacgaggattgctccagggctgctgggtagtttaccgtcccttctataggcatggagttggcactgacatcacagcttcataaccccaccaccgccagcttcccctgcctcctacatccagtctgttcttgttcatagtgagaatcctgtgttcccacttcagtgacacctgaattgtttgttgttgttttttttttttattgtcttcaaagaggaagggccccattaaagggtgaacttgtaataaattggaatttcaaataaacctcatgtacttgtgtttataaag

SEQ ID NO: 15209 - DNA, 942 bp, Homo sapiens
caccatcccggccctccgcctcctggccctgcctctatttattgcattctggttctggccgcgccgcgttgctggggtaagggcaagcactggggtcaagagcctgcacacatgagccttccgggctggaaggctggcgtaggacttggggctgtagcatcatcttcctgaccctggcacctgtgtctacttgctcccgagaagaggagcgctcatgtcttttttgcaccccaagttggctggagcatcggccaccccaagattcatctgtgacctccaggcagcagtctctgctccagaatctctggacggagctgctggcagcttctgcgagaagagagagatgtggaaggcaccttctagaagagagcgtgcctcaggttacttgaacttgaacggagactgtagactcccggactttcccctaggactgggggccctgtaggctgctgttggaggactgggtagagacattggagggaagggaagggcttttctccacacaagggcagagagtccgtctagatttcttgctgtcctgccagctctgcccatgcctgaggtggtcctacctctcacgggcaccctagctgctgacagccctttgtggccgccgtccccatcccctgccctcagcacacacatctgcacacacgcagctttgttctcacctctacctgtcattccagcatccctgcctcttgtcacaaactgccccagcaagaatttgaggttctgacaacagtacccatcccccacagtaccccttcagctcagtttctagaaagctcccttttctttgaaatctgcatgttgaattgaactttgtgattttattttttgtttcaaaaaagtttaagaaaatggaaatgggcaacagtgagtgaagacatattttagcactgaatagaatatttttaaaattaaactatttgaaatatg

SEQ ID NO: 15210 - DNA, 1563 bp, Homo sapiens
ctctgggagggcccggcgcagaggattgaggaggagggatctggcctcctcatggcactgctgccatctttcctcccaggtggaagcctttcagaaggagtctcctggttttcttactggtggccctgcttcttcccattgaaactactcttgtctacttaggtctctctcttcttgctggctgtgactcctccctgactagtggccaaggtgcttttcttcctcccaggcccagtgggtggaatctgtccccacctggcactgaggagaatggtagagaggagaggagagagagagagaatgtgatttttggccttgtggcagcacatcctcacacccaaagaagtttgtaaatgttccagaacaacctagagaacacctgagtactaagcagcagttttgcaaggatgggagactgggatagcttcccatcacagaactgtgttccatcaaaaagacactaagggatttccttctgggcctcagttctatttgtaagatggagaataatcctctctgtgaactccttgcaaagatgatatgaggctaagagaatatcaagtccccaggtctggaagaaaagtagaaaagagtagtactattgtccaatgtcatgaaagtggtaaaagtgggaaccagtgtgctttgaaaccaaattagaaacacattccttgggaaggcaaagttttctgggacttgatcatacattttatatggttgggacttctctcttcgggagatgatatcttgtttaaggagacctcttttcagttcatcaagttcatcagatatttgagtgcccactctgtgcccaaataaatatgagctggggattaaatacgaataagacatggtttctgccatcaaagatggctggtgggagagagagatacacccttattaagtgctttgtgttagtttattcatagctattgttatatatgtcaaggcaagagaggaccagagcaggacagaggcaatgggtattgaagttgaaggggtacatttgataagagagtcggtattgagaagtttaaatttgtgaatttgaaggctgcgtgggtgtggcaggtaagggaaatgaggtatctgggaaggcttgagtgtaggcaaatttattcatcccaagtcaaactcttgatctctctcacgaaaactatgaccccccctggttgcccctgacctctcaatgttggaacaagccacaaccgtggagttatccttgatgactccccattcattatcccttctgtcccaccaccacagctgtcatctgttcaccagaacgttcttttggttacactccatgtgacatcctgaggctgttgcttctctccagcttttctgttaccatcctggtcctggctactgtcacctagtgggccactataatatggcttcctaatggatcttcctgcttcctctgttgcctcattacttttctatatagcagaatgatcttttgaaaatgtgaaccagatcacattattccctagttaaaaccccccaaggcttcccatcacacttggaataaaatccaaaagaatttttctaaaccaaaaa

SEQ ID NO: 15211 - DNA, 671 bp, Homo sapiens
tcctggccagaccctgctgctcactcagctgccctgggggctgctttccctgggcacgggctccagggatcatctctgggcactcccttcctgccccaggccctggctctgcccttccctggggggtggagcagggtccaggtttcacacttgccacctcctggaggtcaagaagagcagagtccccgtccctgctctgccactgtgctccagcaccgtgaccttgggtgactcgtccgctgtctttggaccgctgtgtttcaatctgcaaaatggggatggggaaggttcaatcagcagatgacccccaggccttggcagctgtgacattgggggcctaggctggcaactccgggggctcaacggtggaaagaggaggatgctgtttctctgtcacctccacttgctccccgacaggtggggcacagacctctgttcctgagcagagaagcagaaaaggaggttccctctctctgctccttcactgctgacccagaggggctgcaggatggtttcccctgggagaggccaggagggcctgatcccaggagacaccagggccagagtgaccacagcagggcaggcatcatgtgtgtgtgtgtgtgtggatgtgtgtgtgtgggttttgtaaagaattcttgaccaataaaagcaaaaactgtctgctggtt

SEQ ID NO: 15212 - DNA, 1825 bp, Homo sapiens
tcggagagagaagggaaggggagtgtccccagccaaccccccagaaacggccttttttcctgcctctgaacccttggccattgatagtctacctttgctgggatccgaaggaactgtactccccctgccctccccgacccgcccagcttagccgatgacctgcacatcgctccactgtggtccagaaaaggaggcctttcgatgtctgagaaagaggccccacgctgtagagtcccgaaagcccaggagtgaagggggttcctggagtctctagggtgcttcttccagagtctgtcttcttgcttccagatgtggtcaacttctggaacactcgctgtagctttattgtttagccccaagcaagatttatctcctcctgccccgcatgtgtatggtgggcctctgtaaccttgaaatgtgcaatgtgaccaattgttgactaccaaaagaaaaggtctggggttgtacgaaacttgtctttctgtgacttccccaagccgcaggtgagacctggtccagggtaagaatgggatcggtggagagcctgtcgttcctcccgctaaggtcagccccctggggcactcctccttatgttgatagcatgtaggagtgagaaaaagtcattgagcataaggaatgagtgttcctgtgcccatatttaatgtgtgaccttggagaagttactctgtaggcatgacagcagaggagaaaatcatttggcatcttgaggtctgtcatgctttattatccatagtttttggggggttttttgttttgttttgtttttgagatggagtcttgcgctctgttgcccaggctggagtgcagtggtgcgatcttagctcactgcaacctccacctcccgggttcaagcgattctcctgcctcagcctcctgtgtaactgggattacaggctcccaccacacctggctagtgttttgtatttttagtagatacggggtttcaccatgctggccagactgaggtctcgaactgccgacctcaggctgtctgcccgtccagcctcccaaagtgctgggattgcaggcatgagccactgctcccggccctattatccatagttctaatccacagggattacagcataatgctagcagggccaggttcatccttgagacagtgtggctggctgtcacctggtcctccctttaccagccagccccattgcacactgtgcagcccatcccctcccagaaatagagtgacaaactctgcacttaagtcccctgtttctgtttaacttgcagtgcttatcacaggcccttccttaattttttaaacaaggctgcttgaggctggggtaaattttggggctttgggagtacacaggactactgagggacggggagttggtggcttggtgttcatggtggagacttggttctttacgcagagcaggctaaaggcgtgttttttctgctctgtttctaattcatgttaagtagttggtcatcactttggtcagagctgctgctgaagctctcttaactgtgagtcactggacgttggcagggagttggctgtgagattgtaggtgctcaagtgtttctgttcgggactgagtgtgaatctgtaaaaggggaaaatcctcgcaagaggtctacgagaaggatgagggcccaagtctagggtctaaacaaagccaggagtggtttggtatattactgagtgcaatcattgcgtgccattcctgcactcaatgtattgtgtaaaatccttaggtaaaatgggataaacccacagctggtcctacttggcctcttgaaaaccattccatcattgtgccaatctagcctgaaaagg

SEQ ID NO: 15213 - DNA, 1196 bp, Homo sapiens
aagccacccaaactgccactccactccaggtgggccactccaaggaggccctggctgctgccacctggctgggctgccctcccaacccccgcctctggctcagagcaccctccctcccggcccccatgctcccttctctgccatgggccctccgtccccgccccgtgtcgtgtgcatgatctctgtgagtgtgcgtctgtacgggaagaggcagagggaggcagccagcggggcgtgatgcagtgtgcacagcgaggagcagacccaggcagggccgccagggtgacacaggccacccttccttgccttcagtaactcggtgggcccaggttctgctcttccctggggaccctaacctcgcctccagctgacctgccctgtcctctccagctgtccccacaagcagagccctgaggggtggggaccagctggccacatggtgctgcttttcaggttaggggagaggtggccctgagggacagcccagctctgagtctcagtcgctgatcactgccagggaggctcaggctgccatggctccaggctccctcccctgcctaggggcaaagtccatcgggtcctgggcctcagcttcccttcccacattcctccggccccaggagcaaccccttgggctaggtctgaccccaggtgtccctctggaaggggctggctggtgccctatttccagccaccccagcagctagggaggcaaagcaggctgcagtcagtccctcaagccagcgttgcatgtttgggatggtggctcctgttgtcttgcgctctgggaagtcagatgtcatttcaggcctgcagtctcatcctgcccttgccatcctcccatcgatgtgccacgtgggtgtcacgtgtcccagatgcagtattcggcagccagccggggagggctacctcctcctcctcaccaccttggggcttctcatgggaaatgtgcccccgccccaggaccctctcccttgtggacaggcagggagatgcatgcgagtgcatgcagcaggggatggggccgtgtccgtgtgccccaccctccctcggctttactcctgcccagtgactgtgaccactgtccgtgttgccttcttgaacagcgattccccccaaccccttcaccaaaggtcttggtacaaccagctgcccattttgtgaaatttttatgtagaataaacatttgtatctgt

SEQ ID NO: 15214 - DNA, 462 bp, Homo sapiens
gagttgctggcaagaagatggccgggcgtggtggctcatgcctgtaattccagcactttgggaggctaaggcgggaggatgacttgaggccaggagttggagaccagcctggccaacatggtgaaaccctgtctctactaaaaatacaaaaattagcctggcgtggtggtgcacacctgtaatcccagctactctggaggctgaggcaggagaatcacttgaaccctggaggcagaggttgcaatgagccgagatcacaccactacactccagcctaggcaacagagcaagactctgtctcaaaaaaaacaaaacaaaaaggaggcacaaaaccccaggcttcaagtctctgcagcctgctccacatttgggcacagaaggactcagacaggcactgtgtgggcacgaggttttacaggggtggtcagacctcaggctttaatgaataaagacactactccc

SEQ ID NO: 15215 - DNA, 389 bp, Homo sapiens
gggacagacgcagggagaccccaccaccaccaccaccaccaacaccaccaccaccaccgcgagctggagcgcgcaccaggccatccagcgtgcagccttgcctcggaggccagcccacccccagaagccaggaagcccccgcgctggactggggcagcttccccagcagccacggctttgcgggccgggcagtcgacttcggggcccagggaccaacctgcatggactgtgaaacctcacccttctggagcacggggcctgggtgaccgccaatacttgaccaccccgtcgagccccatcgggccgctgcccccatgctcgcgctgggcagggaccggcagccctggaaggggcacttgatatttttcaataaaagcctttcgttttgc

SEQ ID NO: 15216 - DNA, 149 bp, Homo sapiens
gatccagcccccagcccccagctggcccctgactccatgtggccttagctgggcccatctgctgggcctcctctgcctcccctgtaaaatgggacctccgaaccaaccctgcccctcagaaatgccctgcctattaaatgagctcccag

SEQ ID NO: 15217 - DNA, 602 bp, Homo sapiens
agcagagacttcactgactgacttacaggtgccctattctgaggtacaggagccgcggctttctgatgggggaaaatgccgccttaggctggagccaacatgactgtcctttaaactccagtggctggccaggcacggtagctcacgcctgtaatcccaacactttgggaggccgaggcaggtggatcacctgaggtcagaagttcaagaccagcctggccaacatggggaaaccctgtctttactaaaaatataaaaattagctgggtgtggtggcgggcacctgtaatcccagctactcgggaggctgtggcaggagaatcgcttgaacccaggaggtggaggttgcagtgagccaagatcacaccattgcactccagcctgggcgacagagtctccatctggggaaaaaaattaaataaataaactcccgtgacttgcatgtttgcttctgggacgtctgtgccccgcaagtgtttgagtttggcctccaccccattgatgcggtgacggggcggaaaggcgcagagaagctgagggcggtctctgatctgtgtgtgggttgacattttagctaataaagccttgcagtgtttgttggc

SEQ ID NO: 15218 - DNA, 287 bp, Homo sapiens
acttttctaccctgagtgcgagataagaacgatgggtggaagagagcaacgccagagcccaggcgcccagaggactttcttccagcttctgctgtccttctttgtggagagcaaggtgacatacacagagagaactctggctgttgtgcataggacctacaagtgggctggggttggtggctcacgcctgtaagcccagcactttgggaggctgaggtgggaggatcctttgagcccaggagtttgagaccagcttgggcaacatagtgagaccctgtctctaccaa

SEQ ID NO: 15219 - DNA, 517 bp, Homo sapiens
tggagagaaaactcctggcagggccctatggtgggaaaggctggagtcttctagtcccaagggattgggagatgacaaaatgaatttttttttcttttttgagatggagtcttgctctgtcgcccaggttggagtgcagtggcgtgatctcggcttactgcaacttccagctcctgggttcgaacgattctcctgcctcagcctcccgagcagctgggactacaggcgtgcgccaccatgcctggctaatttttgtattagtagagatgaggtttcaccatgttggccaggctggtctccaactcctgacctcaggtgatccacctgcctcgacctcacaaagtgctgggattacaggcatgaaccactgtgcccagctgacaaaatgagttcttaaacttttttttttttcagttttttttccactttgaatcagaaatataatctgcagtatcatacttgtttatattacattgtgtgcctcactattcattaaaaatcaagaaagttttattgt

SEQ ID NO: 15220 - DNA, 856 bp, Homo sapiens
acctccctcacctgcttgggcggccccgtcccgggaaccactggcactccttggcagaggccagcgcgtggccagccccccggggttcttggatggtggtggcggaggaccctgcgtgcagtgtgacgctctgtcctgaatcccttagcgggtacctaccaggaggatcagggcaaggtccctctccagctgcaggtgaggcctgcggaactcagcttggatggcagcctttggtgggccgctgtggcccgcacgtctctgttctctccaagtaacatgcgacggtgtctggtgtcacgtctcgcctgagaagcccgtcttaggaaagcttagcttgaacacagtgctcgggaggtttctgctctgtctgtcatggcagtctcttggtttgtgtctggccaaggccatgcgtgtgcctcggaccgagccccagcttaggcgagggagtcaggctggcttcggccctcggttttcattcaggccaccctgctcatggcccttcctggccgcctgccacaccgcaagctcgctggggggacactagaagcaccgtggcctgggattccatctggagctgtccgcaggcaccagccccagcctcccaccacgctcactgcctggcttggaaaagttaagaagcccctcaggaagagaatcgaggctaagttcctctgcgccgagggccccgagcatatccgccaaggctcagctgcagtgccaggcggaggaggaagatccagaaattgtgaacaatgtttgatttagtagcgtgacttgcctttccctttaaaaacatcttttacaaatctgtcttggaataaagtctattttctgccttttggtttttaagctctga

SEQ ID NO: 15221 - DNA, 120 bp, Homo sapiens
acgtgcctgcttccccttcgccttctgccgtgattgtcagtttcctgaggcctccccagccatgcttcctgtacagcctgcagaactgtgagtcaattaaacctcttttcttcataaatt

SEQ ID NO: 15222 - DNA, 4084 bp, Homo sapiens
agccaaaccaacaccccatatgtcagtgtaaatccttgttacctatctcgtgtgtgttatttccccagccacaggccaaatccttggagtcccaggggcagccacaccactgccattacccagtgccgaggacatgcatgacacttccaaagactccctccatagcgacaccctttctgtttggacccatggtcatctctgttcttttcccgcctccctagttagcatccaggctggccagtgctgcccatgagcaagcctaggtacgaagaggggtggtggggggcagggccactcaacagagaggaccaacatccagtcctgctgactatttgacccccacaacaatgggtatccttaatagaggagctgcttgttgtttgttgacagcttggaaagggaagatcttatgccttttcttttctgttttcttctcagtcttttcagtttcatcatttgcacaaacttgtgagcatcagagggctgatggattccaaaccaggacactaccctgagatctgcacagtcagaaggacggcaggagtgtcctggctgtgaatgccaaagccattctccccctctttgggcagtgccatggatttccactgcttcttatggtggttggttgggttttttggttttgtttttttttttaagtttcactcacatagccaactctcccaaagggcacacccctggggctgagtctccagggccccccaactgtggtagctccagcgatggtgctgcccaggcctctcggtgctccatctccgcctccacactgaccaagtgctggcccacccagtccatgctccagggtcaggcggagctgctgagtgacagctttcctcaaaaagcagaaggagagtgagtgcctttccctcctaaagctgaatcccggcggaaagcctctgtccgcctttacaagggagaagacaacagaaagagggacaagagggttcacacagcccagttcccgtgacgaggctcaaaaacttgatcacatgcttgaatggagctggtgagatcaacaacactacttccctgccggaatgaactgtccgtgaatggtctctgtcaagcgggccgtctcccttggcccagagacggagtgtgggagtgattcccaactcctttctgcagacgtctgccttggcatcctcttgaataggaagatcgttccaccttctacgcaattgacaaacccggaagatcagatgcaattgctcccatcagggaagaaccctatacttggtttgctacccttagtatttattactaacctcccttaagcagcaacagcctacaaagagatgcttggagcaatcagaacttcaggtgtgactctagcaaggctcatctttctgcccggctacatcagccttcaagaatcagaagaaaggccaaggtgctggactgttactgacttggatcccaaagcaaggagatcatttggagctcttgggtcagagaaaatgagaaaggacagagccagcggctccaactcctttcagccacatgccccaggctctcgctgccctgtggacaggatgaggacagagggcacatgaacagcttgccagggatgggcagcccaacagcacttttcctcttctagatggaccccagcatttaagtgaccttctgatcttggaaaaacagcgtcttccttctttatctatagcaactcattggtggtagccatcaagcacttcccaggatctgctccaacagaatattgctaggttttgctacatgacgggttgtgagacttctgtttgatcactgtgaaccaacccccatctccctagcccacccccctccccaactccctctctgtgcattttctaagtgggacattcaaaaaactctctcccaggacctcggatgaccatactcagacgtgtgacctccatactgggctaaggaagtatcagcactagaaattgggcagtcttaatgttgaatgctgctttctgcttagtatttttttgattcaaggctcagaaggaatggtgcgtggcttccctgtcccagttgtggcaactaaaccaatcggtgtgttcttgatgcgggtcaacatttccaaaagtggctagtcctcacttctagatctcagccattctaactcatatgttcccaattaccaaggggtggccgggcacagtggctcacgcctgtaatcccagcactttgagaggctgaggtggtaggatcacctgaggtcaggagttcaagaccagcctgtccaacatggtgaaacccccatctctactaaaaataccaaaaattagccgagcgtagtgacgggtgcccgtaatcccagctactcaggaggctgagacaggagaatcacctgaaccccagaggcagaggttgcagtgagctgagatcacgccattgtactccagcctgggcaacaagagcaaaactccgtctcaaaaaaaaaaaaaaattacaaatggggcaaacagtctagtgtaatggatcaaattaagattctctgcccagccgggcacagtggcgcatgcctgtaatcccagaactttgggaggccaagacgggatgattgcttgagctcaggagtttgagaccaggctgggcatcatagcaagacctcatctctactaaaattcaaaaacaaaattagccgggcatgatggtgcatgcctgtagtctcagctagttggggagctaaggtgggagaattgcttgagcttgggaagtcgaggctgcagtcagccctgattgtgccagtgcactccggcctgggtgacagagtgagaccctgtctcaaaaaaaaaaagattctgtgtcagagcccagcccaggagtttgaggctgcaatgagccatgatttcccactgcactccagcctgagtgacagagcgagactccatctctttaaaaacaaacaaaaaattatctgaatgatcctgtctctaaaaagaagccacagaaatgtttaaaaacttcatcgacttagcctgagtcataacggttaagaaagcacttaaacagaagcagaggctaattcagtgtcacatgaggaagtagctgtcagatgtcacataattactttcgtaatagctcagattagaatggctaccccattctctagacaaaatcaaattgtcctattgtgactcttctaaaaatgaagatgaagagctatttaatgacacaccttggattaaaacgggaatcacatcttaaagctaaaaatgaacctgcaagccttctaaatgagtcactgagcatcactagtgacaagtctcgggtgagcgtaaatgggtcatgacaagatgggacagcaacaaaatcatggcttaggatcgacaagaagttaaaaaacagctgcatctgttacttaagtttgtaagacagtgccctgagacctctagagaaaagatgtttgtttacataagagaaagaggccagacatggtgtctcacacgtttaatcccagcactttgggaggcaggggcgggtggatcacctgaggtcaggagttcaagactagcctggccaacatggtgaaaccccgtctctactaaaaatacaaaaattagccgggcatggtggcaggcgcctataatcccagctactggggaggctgaggcaggagaatcacttgaacccgggggacagaggttgtagtgagccaagatcgcaccactgcactccagcctgggtcacagagtgagactccatctcaaaaaaaaaaaagagagagagagagaaagaaatagaagagaagagccatcttggcagggttattttatatctgagcaaggagtttaaatgagactagtttagattgtctgctgatgcagccgtccatagcagtacccctaaaatcccaccagaatacgggtccctctaacccagtggctggaagaaccactgtctagagcaacttttcttggaactgtcccagctaccaagtcagacaccaaggtttatgccaccaggtaacacgggaatcacaggtacatgtcgctccggtcagattagttggctttggcccctcgaccctgtgcaggagctagttctcagcttgcagctggaagttccctct

SEQ ID NO: 15223 - DNA, 169 bp, Homo sapiens
ctcagctgaattttcatccgaggacgcttggaccccgctcttggctctgcagccctctggggagcctgcggaatcttttctgaaggctacatggacccgctggggaggagagggtgtttcctcccagagttactttaataaaggttgttcatagagttgacttgttcat

SEQ ID NO: 15224 - DNA, 182 bp, Homo sapiens
ggctgggccttcccctgccggcccagaggggcttctgtcctgtgtgttgtgggaggggatgggaggcgcccctcgagtgtgcgtgtatcagggggtctcttctattctcccttgggttttatgggcgctgtgggccctgaaggaagacctgggcccagtgccctcaataaagagaggcccag

SEQ ID NO: 15225 - DNA, 130 bp, Homo sapiens
tcttctccgaggcccaccgaagggtactgaagagcctcacctgggggcattttgtgggtggagggccagagtgtgtatacccaggcttgtctggaaggagaaggcctttgctgcctgaaagtctcatgtt

SEQ ID NO: 15226 - DNA, 2777 bp, Homo sapiens
ggccccaggggaactggcagcgcacgcggatgctactactgcagtctttatttttttcccatgagttgggggtcgggtgggggagggaaagggagggatgaccttcccagggagaaacccacgacctgtcctgtctttgatcgcctctttgacatttttgccaaaataccactagtggaaagtcaggctagctgtgctggtattggaatagcagcctcacactggcgtctggactgttctgtagattcatgcaagtggagctgtctgtctctaatttaacttattgctagataatagggttttcagatgaaaagaaaacttaaagaggaatggccctcattcagtaagttctgtggttccagtaaggatttttatgtacatacgctctcgtctctcgttttgggtactttctatctcatctgtctcggctctgcatgttttccagggtgtagcctacagacatggaacagtgtaaatcccagactgacagacttagaacctgaggtctcattcatccttatggtttaggccttgccagttttccgaagtctctgattagttgacagtattaacactaaattgcagtttacagtatttctacattacagccatatgtaacatcaagccatcgattgtgtacttttcctttgctagttgtttgggctttaacatccttattcagccttatccaggttggttttgctgttgatcggtctcctaggctaaatgagaatgaaagcgacttcaggtcaggtggctgtgggattttttttttttggtccttctttcctcttaacgtaaatccaccaccaaaattattaatcctcttgagagaaacgtgaaacgccacaaaaatagagaaaattcaggtctgtatgtcatggatcgtgttggtattttcagagaacatcccgcttctgaagctgctgcagctccctcctcagggatcacactgccgtcacccactctgcactggggcgtttcctactgcgcctcgtgctggcggacgcagctgggtgcagaagctgtggggtcggagaggcgtttggagaaggtctgtggtgcagtgtgtgaaaattcaggtgctagaagcctactggtagaaaaacccaaaaggaagagctatatccttaaccattctgtccaatttcgggagccttgtcagtgtgtcagtttttcctccccgaagacactccttccccaagtaattgtaggaagataaaaaaactgttaccagataacaaacactgaactcctatttgaccagaactttttcctctcgagatagttttttctttttaatgaaaaaagcataggaattggagattggcttgtctcacgcagccagtgcacatttggaattgacggaaacaacgttgctatttccacccatttgttttcggcagccttaaggccctcattctcatttcgggtgaatctgtctatctgtgaacgtggcccgcatgtgcattcttttttttatatatataaagtcagtgacgaggaactcccgagacgtgtaatgacaccacacttgttttctttgtttctttgttttatttaggcaagaagaggtgtgagtaattgaggaaaaactgacagatgcttttgctaataccaaaattgagcttacaattaggaactgagtatgtgtaacaggatacaggtgacagtgaagatagaagaaccacgatgaccacagactcaatgtgctctgtaacatcgcacagtttacccagcatgactttccttaggaggccccctcctcacgctagagtaaaagtcccagttaagtgaagcctaccagaagaactagtagaagaagctttgccgcttttgtgcctctcacaggcgcctaaagtcattgccatgggaggaagacgatttggggggggaggggggggggggcagggtaggtggggctttccctaatttatcttcatgtccagtgagcagtgttgcgtttttccttgtagcatttggaaatgatttactggaattacaaaacctatttttcctttaaatttcagctttggctctggctgctttttagaataatgcaagataaaaatcacacctgagggctgaaaacggagagggaatgggagacttgatatttaagcagcttgaatggtttttcttttctttatttttaaagaaatgcacttgcctatgatactgtctctccagtgaaatgattactcctccattactctattgatacaatattgtgcatgctagtgttgtatttctatacagtagcttgaaattgattaacttatactgtaggtgttatgtattcctatgacaaaaaaaattaagtcttcaaattttttaaaggttttttttttttaatttaatttttccttttgggggtaaagtttgctctaccaaatagtgattgtaacaaattgatctgttttggatgttgctatagtgacatgcagttatatattttgtttttaaaagggggggagcaaaagaaacaccagtgttagcttaatcttaatgtctggtgtttgtcatggtgaaattataactattacagtgttggagaacaacaaatatgttctctgaatgagcctttgtgctttttgtcatgttatgcagtgaactatttttaaggtctaatcagtgattatttttccagctccgtgtttctctaaggaattatttcacacacggaccatctttagcagtttcctcagtgatggaatatcatgaatgtgagtcattatgtagctgtcgtacattgagcaaataaacttacagatctg

SEQ ID NO: 15227 - DNA, 729 bp, Homo sapiens
cccagcccgctctgcagaccacctcttcttctgggagctgtgacctcccttcctcctccaggaagccctcctcttgtgatgactacagttcactttgcccctccttcccttgcctgggagagagcctacctagacagtgcagtcctgcttgggggagcctggctgtacccccgtccacttactgcgtgacctcagcctgtcatcgactgttgtgagcccaattcagtgaaagctcctgtggttttgctcagccaaaaccaaaacgaggggaagaggatgattcctaactcttctgtttggtggggctctttttatagcaccagactctgccttccttgacctagatccaggaggctcaggggctctttaaatggggtatctcctcttcccccaacccatcttgggatccccaagaagagggaaggcaggaggggcctacagctcctaccttgggccctcaggggctgcagaggaacctgggtccctgtcctgccctgctccgcgagggcctggactaactcagatggtgctcggctggacaaggggactgggggaggggccaaagcagggacagtggcccctccctgcagctggaaccagcatctctgatttatgccgtctccaccacagagcctccactttgcaggagtgaagaaccctgggggcctgtagccaccagttcataggtgccaagtcaataaagcattgtcccccgtctcttataactgc

SEQ ID NO: 15228 - DNA, 229 bp, Homo sapiens
tgacagaagaagcagatgtcaccgtggggccactgatcttcctggacaggaggggtgaccatgaagtagagcagtgggctttgccttctgacacctcagtggtgctgctgggcgtaggcctggctgtggtggtgtccctgactctgactgctgttatcctggttctcaccaggaggtgtcgcactgcctcccaccctgtgtctgcttccgaataaaagaagaaagcaat

SEQ ID NO: 15229 - DNA, 2906 bp, Homo sapiens
atcactctgttcattcctccaggtattcgttatctaatagggcaattaattccttcagcactttagaatatgccttgtttcatatttttcatagctaaaaaatgatgtctgacggctaggttcttatgctacacagcatttgaaataaagctgaaaaacaatgcattttaaaggagtcctttgttgttatgctgttatccaatgaacacttgcaagcaattagcaatattgagaattatacattagatttacaattcttttaatttctattgaaactttttctattgcttgtattacttgctgtatttaaaaaataattgttggctgggtgtggtagctcacgcctgtaatcccagcactttggaatgtcaaggcaggcagatcacttgaggtcaggagtttgagaccagcctggccaaacatgtgaaacgctgtctctattaaaaatacaaaaattagccgggcatggtggtacatgcctgtaatcctagctacttgggaggctgaggcaggagaatcgcttgaacctgagaggaagaggttgcagtgagccaagactgagccactgcactccagcatgggtgacagagaaaactctgtctcaaacaaaaaaataataaaatttattcagtaggctggattctacacaaagtaatctgtatttgggccatgatttaagcacatctgaaggtatatcactcttttcaggctataattatttgggtaatcttcattctgagacaaacttaatctatatcatttactttgcaacagaacaaccctacagcattttggttcccagactaagggaactaatatctatataattaaacttgttcatttatcattcatgaaatataaaatacttgtcatttaaaccgtttaaaaatgtggtagcataatgtcaccccaaaaagcattcagaaagcaatgtaactgtgaagaccagggtttaaaggtaattcatttatagtttataactccttagatgtttgatgttgaaaactgctttaacatgaaaattatcttcctctgctctgtgtgaacaatagcttttaatttaagattgctcactactgtactagactactggtaggtttttttggggggggtgggtagggatatgtgggtaatgaagcatttacttacaggctatcatactctgaggccaattttatctccaaagcaataatatcattaagtgattcacttcatagaaggctaagtttctctaggacagatagaaaacatgaattttgaaatatatagaacagtagttaaaatactatatatttcaaccctggctggtagattgcttattttactatcagaaactaaaagatagatttttacccaaacagaagtatctgtaatttttataattcatcaattctggaatgctatatataatatttaaaagactttttaaatgtgtttaatttcatcatcgtaaaaagggatcatctcagagagaacagcagtattctgcgtatttttaaaaatgctctagagtaacatttgaagtaattcactgtagtgtatgccagtcctagaaataatttttttaatttctggtgtctgtttctaatacactaaccaagttttcaaaatatatttacaaagatgcatctttacccattattttaaaatgattaaggaggatagttgcttcaggtaacaagctaatttttcaaatattaggcccttacagaactatttagtcaaaaagtaagatattcctttaaaatatataacccaaagctttcagttaaacatgatatatcacaaatactattaaaatgttaaagagaaatgcaaatagcattaaatgatgaccaaaatgtaaaatattgtagatttcaaaagctgtgtctctattaggtgggataccaaatgtaaatgatgtaactgacgttgttttttactttttactttttaaaaaagactaaaaacgttttgatattatacaatgtatttgtttcagataaggtcattgtcatttagtatatataattaatatatgtacaagtttaagtaaattcctgtgagtaaaaatggacttatcacaaaacatagttctaaagaaaggtatatgctcatatacacggtgtccattaatttaatgggaactaggtataacttcaggagaatttggcaaataattcattaatccatgtaaatattcaaaagcttgttctatccacattatttcaagggatcactttatttttcattatactttcacagcacttttctagtaaattctgtaacacagaaattccattttggaatcatttcatgttaccaataattctagacttttataacatttaacatgttgatggaaatagattacatctgctagaaccttttgccttaactattcaccaatatatgctaatattcataaatatggattgactgtttacaaacattagaatcttgtcttggttccattttgatggctaatatttgttatcttaattaagactatttctgaggtcatgattacttgaaaatattgactaaaactgggtccttagaaattccaggtggagctgatttacctatgactgaggggaaaaaaaaatcaaattttactgataatagtaatgctccaaatgaattaatgacacatctgttcaataaataaagagcttaaatatacaaaacataagaaatctgggcaacaaaacttgtggtctttacttttgaatagctacccaagaaaaggttttaaaggtaaaagttatgagtaatgtcatcacaataagctcttgtttaaaattcttttcttttatgtataattaggtttatgtttcatgtctttttaaaaccttataaaagatttaattatcacatctattcttcaatgtggaaatattaaatattgttggttgtaaaat

SEQ ID NO: 15230 - DNA, 607 bp, Homo sapiens
aaaagaaaacgcaattggatctgctgctgccattttaatcttgctcattaaccttactcctttgagaattctttaacaatatttaaaattggtaacaaaaatagtttagccataattgtttagccatgtgagtttcaggttggtacacgttcagacagaactgctgtatcacattccaattttgaatagccagtgagcaatcaagtgtagagaaatgataaatggcctaagaaggcatacagtggcataaacgatgctcttcctagtagcttaataggccacaagctagtttctgttgcactctgaaataaaatatgctttaaaaatgtagggaacagtgcttagaaaagcaaaaactaggtgtgtcattgaaataataggcataaaaattaaatgttacataagaacactatttggaaagagggtccttttaaaaactgaatttgtactaaatcagatttgccatgtccagtacagaataatttgtacttagtatttgcagcagggtttgtctttgtgaattcagatgaaacatatttatttttttttatttataaaaggttgatttaggaatattttgtcagtcattaaaaaacctgaaaacata

SEQ ID NO: 15231 - DNA, 243 bp, Homo sapiens
cttctaagtacatcatctcctttctattgctgttcaacaagttaccattaaagtgttctgaatctgtcaagcttcaagaataccagagaactgagggaaaataccaaatgtagttttatactacttccataaaacaggattggtgaatcacggacttctagtcaacctacagcttaattattcagcatttgagttattgagatccttattatctctatgtaaataaagtttgttttggacctc

SEQ ID NO: 15232 - DNA, 2258 bp, Homo sapiens
gccgcgcggccacggccaacccgcccgccccggcgcaggcagttcttcttaggttccgtctcacggcgttttaatttattttcactgtcacacgcatagatccacgaggcaccaaggcctgggagcatcgacgtgaagtcccacgtgtccggtgtgcttgggcggcatcgcatcaacgcgcagacctaaactgatcctaaagcccccggttcccttgtgggggctttggcagctatggaagaaccaaaataacgtgaagaacatcacagagagacagtgcagtgtagctttagtttaagaaaaaaaaatattcctccccactgcatgaaggacttggatgtcatccaaactttatatcaagaaacaggacaaagttaagagcaatcacaaactggaatatcgccttaaaaatcaaactgcacggagcaagctgaaactgagacaagattatatcttttaattgatctaaagcgttgtaaataaattgttctcgacatatctagacaggggttaaagggtttctttgacacattcggaaccgttcacccatgacatgtttccatggctcacccttggcatccatcctcggtgttagcagcagcgttccctgcctcctgcaggatgacttagaaatctagtgagtttcttggtgtgatgccatttttattgccctttctgtgatcaaatcatatttctgtacattttcagtggtagaaaaaaaaggttttaaaaattgtatcctagggaacagtttgccataagtcagaattttgcagtttagctcatagatcttaattggtttttctctaaaatatgaattttataattgaaggaccacaatttgtttaatcaagataggcaacgctgcagttcctttatgaagaggcttttctgtcgtcccaggctagcagagatggatagcttctttgtcagcaatgtgatttcacttattttattgtcttattttaaaccctgtctccatgacttcatttgcactttgacagagcagaggcagagtatttgtcttatatttctcagattataatattaaaaaattacaatcaatttattttcattaaagaacgtgagtctttttagcattcctttctgcttatccttctttccttaccctttgtccttttgtttccattagttttctttcgtcttgtattccttgccactttattttgttagcaacttctagatgtttatcttcatggatctatgattgacctcctagtaaaattctaagtcttgcctttcttccctgctgttttagcatttctttgtaaaatgttagcttcaattaattagccattggtacttactgtagctacacatattaaaaggcaaagtgtttctgaaggcaatttctttttaatatgcccgaatgaatgaggcttcatcctttccatattcttactctttacaggagttcaaatgcaaataagctccacctccctgcacttgtagtctaaaaagtaaaaggggcgatcaggtccatctcaaaggtcacacgtaatagcctccctgggctgatcattccctctccttgtaattgcagtatcctgagtagcagtttaattttcatcaaacatcggagtagtttagttgtttgacaggaggagaataaggctgaaagcctcaagtgaaggatcttgcagcttgtaaaagcaatttccaaaaatgaaacccattcatcgtaaacaaaagcacaaacacttgtagcagtttataatgcttttggtttaatctcaattagtctttctcccctggactagaaatccagtatagtttgccattaatttattgaatctggttttggacaatgcttctgtagtgtagctgcacgtcctggtactgtatcctctgactttattttccatgtattacaaaaggaaaaaaaaattgagattacactggcataaactctagtttgcacagttcacagctactacttgtgcagtaattgctttatgcggctgtaatccataacctgtgaagacagcacatcatctaaatcccattccaaataatatttgtgtagtgttagctgtgaatttaccctgtacagctgtatctctataaatataattccatgtattaatagtcacagaaagactgtaagtgagcaactatttttatgaaacgtaccactatggataaattaacttttacagaaatcttgtttactgtatgatattctaaaacactgtcaaataaaatatatatccaaaaatcttttctttttccaacta

SEQ ID NO: 15233 - DNA, 2355 bp, Homo sapiens
tattttcttatgtgggtcttatgcttccattaacaaatgctctgtcttcaatgatcaaattttgagcaaagaaacttgtgctttaccaaggggaattactgaaaaaggtgattactcctgaagtgagttttacacgaactgaaatgagcatgcattttcttgtatgatagtgactagcactagacatgtcatggtcctcatggtgcatataaatatatttaacttaacccagattttatttatatctttattcaccttttcttcaaaatcgatatggtggctgcaaaactagaattgttgcatccctcaattgaatgagggccatatccctgtggtattcctttcctgctttggggctttagaattctaattgtcagtgattttgtatatgaaaacaagttccaaatccacagcttttacgtagtaaaagtcataaatgcatatgacagaatggctatcaaaagaaatagaaaaggaagacagcatttaaagttgtataaaaacatgagttattcataaagagaaaatgatgagtttttatggttccaatgaaatatgttggggtttttttaagattgtaaaaataatcagttactggtatctgtcactgacctttgtttccttattcaggaagataaaaatcagtaacctaccccatgaagatatttggtgggagttatatcagtgaagcagtttggtttatattcttatgttatcaccttccaaacaaaagcacttactttttttggaagttatttattttagactcaaagaatataatctggcactactcagttattactgtttgttctcttattccctagtctgtgtggcaaattaaacaatataagaaggaaaaatttgaagtattagacttctaaataaggtgtgaaatcatcaaaaagaaaaatcaaagtagaaactactaattttttaagaggaatttataacaaatatggctagttttcaacttcagtactcaaattcaatgattcttccttttattaaaaccagtctcagatatcatactgatttttaagtcaacactatatattttatgatcttttcagtgtgatggcaaggtgcttgttatgtctagaaagtaagaaaacaatatgaggagacattctgtctttcaaaaggtaatggtacatacgttcactggtctctaagtgtaaaagtagtaaattttgtgatgaataaaataattatctcctaattgtatgttagaataattttattagaataatttcatactgaaattattttctccaaataaaaattagatggaaaaatgtgaaaaaaattattcatgctctcatatatattttaaaaacactacttttgcttttttatttaccttttaagacattttcatgcttccaggtaaaaacagatattgtaccatgtacctaatccaaatatcatataaacattttatttatagttaataatctatgatgaaggtaattaaagtagattatggcctttttaagtattgcagtctaaaacttcaaaaactaaaatcattgtcaaaattaatatgattattaatcagaatatcagaatatgattcactatttaaactatgataaattatgataatatatgaggaggcctcgctatagcaaaaatagttaaaatgctgacataacaccaaacttcattttttaaaaaatctgttgttccaaatgtgtataattttaaagtaatttctaaagcagtttattataatggtttgcctgcttaaaaggtataattaaacttcttttctcttctacattgacacacagaaatgtgtcaatgtaaagccaaaaccatcttctgtgtttatggccaatctattctcaaagttaaaagtaaaattgtttcagagtcacagttccctttatttcacataagcccaaactgatagacagtaacggtgtttagttttatactatatttgtgctatttaattctttctattttcacaattattaaattgtgtacactttcattacttttaaaaatgtagaaattcttcatgaacataactctgctgaatgtaaaagaaaattttttttcaaaaatgctgttaatgtatactactggtggttgattggttttattttatgtagcttgacaattcagtgacttaatatctattccatttgtattgtacataaaattttctagaaatacacttttttccaaagtgtaagtttgtgaatagattttagcatgatgaaactgtcataatggtgaatgttcaatctgtgtaagaaaacaaactaaatgtagttgtcacactaaaatttaattggatattgatgaaatcattggcctggcaaaataaaacatgttgaattcccc

SEQ ID NO: 15234 - DNA, 1211 bp, Homo sapiens
acctgaatgccatgtgggccattctattccccctatgtgtagaactgtaactcacattaaaggttaacagcaacgaatcaatcataacaaatatgttgttcgtgcaaatgcaactacaaataattatttaaacatttttatacaatgtttttaaaactgttggattatcaccagattaatgcaaaataacagagcgagttatcagtttgaatttcaacactgcctgagacatccctctggggaaagtgaaagagagggtttacttacctactgtcttgagctcacatacctcaaaatctactactgtgtggcacctgaaaggagttgaatgaagcttagcctttcattagcaatgttaattctattcaaccagcacctgcttccacagaaattctgtccaaactatcatgaagtggtgtgacaagggtatatggacccagaagataatacaatataagaagggatcactggaagcttgaccccatgcacattttggtgaaaatgtgcctagaatcaaatgtgacacgtaggctggaactgagtaccattcagaataggatctgaagagatcaaagcaatggagaccaccaaactgtcttgaaggcatgtctatggaccttaagtccatgtctatgttttcagctcttctcacagcataaaagggcattgtccttacttttgcagtggaaaactgaatggctgacaagatggaagagtaaccatttcagcattgtatgtggtttcatttttcttagttatctggctactgaatagccggatttttcagttctgtcagaaactctaaatttccaaaaatctaagtgaaacatggatgaaactctgttagaaaattgttaggattttggagtatttggggagggggactactggaatgctgtccaagttttatactaagatatcttacctgtttgttattaaccaaatatttttaaaaatatttcctccataaatattcatttaatattaggttgatatttatcacataaaaagtaaaggctactgttagctaattgtcacagagaaggatttgttttctgttgttagtgaatttgaaatccttgactttatgtgctacagccagttccatctctgtttgtaaattcttactttccattccatatcatattctgttccctataacctcttcattgttttcttttcttttaaaaataataaacttttctatgatc

SEQ ID NO: 15235 - DNA, 452 bp, Homo sapiens
ctgaagtaagtgtgtctgaagcacccaccaatacaactgtcttttacatgaagatttcagagaatgtggaatttaaaatgtcacttacaacaatcctaagacaactactggagagtcatgtttgttgaaattctcattaatgtttatgggtgttttctgttgttttgtttgtcagtgttattttgtcaatgttgaagtgaattaaggtacatgcaagtgtaataacatatctcctgaagatacttgaatggattaaaaaaacacacaggtatatttgctggatgataaagatttcatgggaaaaaaaatcaattaatctgtctaagctgctttctgatgttggtttcttaataatgagtaaaccacaaattaaatgttattttaacctcaccaaaacaatttataccttgtgtccctaaattgtagccctatattaaattatattacatttc

SEQ ID NO: 15236 - DNA, 251 bp, Homo sapiens
catgggctctcaactgatggtgaacttcttctggtgagtgacagaggctgcagtgaagaataatgagtctaatagaagtttatcacagatgtctctaatctttatagctgatccctacctctctcgctgtctttgtacccagcctgcattctgtttcgatctgtcttttagcagtccatacaatcatttttctacatgctggcccttacctagcttttctgaatttacaataaaaactattttttaacgtg

SEQ ID NO: 15237 - DNA, 290 bp, Homo sapiens
ccttctaaaaaccaaatctgcatagttaaactccagaccctgccaaaacatgagccctgccctcaattacagtaacgtagggtcagctataaaatcagacaaacattagctgggcctgttccatggcataacactaaggcgcagactcctaaggcacccactggctgcatgtcagggtgtcagatccttaaacgtgtgtgaatgctgcatcatctatgtgtaacatcaaagcaaaatcctatacgtgtcctctattggaaaatttgggagtttgttgttgcattgttggt

SEQ ID NO: 15238 - DNA, 3680 bp, Homo sapiens
tggggtgagactatctactgtcttttgaagaatttatatttggaaagtaaaaaagtaaaaaaataaatcatccaacttctttgcattacttaaaagagatttctgtaatacaggaatgactatgaaggtgttataataaattattctacatactcatttgactggataaactttacataaaattaactaattttttaaataaatgcattgcttaatggtttctcattatgtttatcaaaaaacaactgtagctgttattttcagtacttggctgcttttctgtgaaaattattattttacttttggaagacaagattattagaatattgaagaaaaattggagacttataatcatggtaaatataaaactaaatatgttttaatatttctgaatttttcttttccatcacaatgtaagatatgcagaatacaagatactttggcattctcatgtgaactttctgtactctttaaggattattttattagtgttgtttaagccatgagtgttaagtagcaggtgtgttgtgagtgctgtaacccatgaaaggaaaaatgtcattctgaggcttgtgcccttcgtaaaatattcattaaagtacattcacactatttttgctttataacacagtctttaattttcactcactgtggaaataaaaactaaggtaacttctcagaaagatatcaaatctcagaaagaatgtcaaatcagatgaagttatagttaggattctaactactgtaaaagatttttgcttccctcttgtggtaaaaaaaattatattctcacacatttcttttttctctacagacggatatctgtttaggaaagatttgaaagcagattatcagtaggtacatggatacatcaagttcatttgcagaaacaaataactgaaataaaaaacatgttaatccttgtatcatactttaatatgaaagtattgtttatagataatttatctcacaagtcaaaaatgaagattttgcagcactgaaaatctattaaagctccaaattttaagtttctaaataatcttcgctgaaatctaaaatatactataacaaccgtgttttatttgtgaaaaaaatattaaagtgatttgctctcaaatatcaaattttcttctctcttttatattaagagacagaaaattgtttcatgagttcacttaactactgagatattcagagcatttttacctctctcttaaatgttataaaaaacaattgtatttttaagaatgtttatttatcaaagtctttccttcttctattaaatatttagcaattacctttctaaaatatgaaattttgtaagatgttttcacctaaataaaaattgaaagcaagtggattacacaggagaaccattatgaacatttatttagatattaatcttaaacagtgtttatttcagttttcaaagttagcttataggttatacatttaagttaaagtgctcataatcacttgcaatttcattgtaaaatgaacaaatacataaatattttaagaaaaatttaagtttattcagataagtcaccatgcttcaaaagatctaagaaatgcaaatatactgaaaattgacatcctctgaaaattccacttgctatttacccaagaatccactggaggtcattactgccattaaataataactgaaaagactatgtagtgaaatgtatttttaaaaactatattcagtaaaagcctgctcaatttggagaaatagaaccacaaacacagatcacaggggccttacaaagtttatgtctgaacaaataagtcaattaagtacactttattgaaaattgccttccattaacacacaagaaagaaagcaggattttctcctgtatctgaattttaaaattaaaaaggcagataagacataaatagttatcattttaattgcaataacacagacaagtagttaatgatgataacaatggtgtaacttgtaaactaaatatttggtaactgaagcaataggcagaggaaaatagcttttctatgacacaagtcataagaagtccatatactgaagagcgtttgattaaaataaagtgactattaaccagaaaagaaacattttacataaaatgctaaaatttattataggaaaataaatcaaacccaaagaaagtttattcaatgctaatttgaaagaaaattgataagaaaactttgagggcccaagtccacaatttggtgagaccactaaattttacatataattatacacacacatatgtacatatatatgtatataatcttgcttcccgcctgtttatggcagtactgaagagaaatgggaaagaagagggagggagagagaaagacgaagggagagagaaagcagtttccaaggatatgtttcatgtcccaccattttctcagtttctccctctctctcccaacacacacacacacacacccctcacatactataaaataaatcttcactgccctatcaaaatacaaataaatcaatctatgctgttctgtccttcttgagaatctaaaacataccacaaaaatacatccccagtcttttgttctgtctgaggttagaattaattcaaattcagaatctgttgtgagaaatgcccaggctttaaaaattaaaaatggatggatcttctctgaactcagggagggcacatacttagatacctacaagacttggaggaattaagagttcacccttcatctcaccaaattttccccatttttctctttcttgtagaaggagagaaaccatgctctctagcaacattgagcaaaaatcataaccactcatctaatttctaagaggcacctccatcgagggccggtctcctgcttctttagacctcttctatctttgttacaggagaggacctgtggatagacttagttttgacataaaacaatgcccattcacctcctccttcagcacaacgtcacccattgggcaagagatccagatttgttaacaaaaaagattttacttcgtgattccacgtctataattctatattgctaattttttcttttgtgtgaattactgaatatttcagagcaaagctatcaacttggagaaacagggattaaaaataaggataaacactaataagagctctagaaaaaagggaacagaaagtctgcctgtttagtaagtggcaattccatacatattttagagttttttctatctaaaattagttaaatacttagaatgtttgtaatgagtgttcgatatttgctataggttttagggttttgtaaatcttcatagtaattataaacatttgtaaaatttgtaaaatactataagtcattttgagtgttggtgttaagcatgaaacaaacagcagctgttgtccttaaaaatgaattgacctggccgggcgcggtggctcacgcctgtaatcccagcactttgggaggccgaggcgggtggatcatgaggtcaggagatcgagaccatcctggctaacaaggtgaaaccccgtctctactaaaaatacaaaaaattagccgggcgcggtggcgggcgcctgtagtcccagctacttgggaggctgaggcaggagaatggcgtgaacccgggaagcggagcttgcagtgagccgagattgcgccactgcagtccgcagtccggcctgggcgacagagcgagactccgtctc

SEQ ID NO: 15239 - DNA, 3022 bp, Homo sapiens
gctgcattacctctagaaacctcaaacaagtagaaacttgcctagacaataactggaaaaacaaatgcaatatacatgaacttttttcatggcattatgtggatgtttacaatggtgggaaattcagctgagttccaccaattataaattaaatccatgagtaactttcctaataggctttttttcctaataccaccacctaacagagaacacaggtgaatgcagatgttcactttagcagacttaatgtttcctatgagatttcactgtacaggtttgtctttcttctttgcctgagaaataaaaatgtcatttgccatattgccatctaaaggagaaaaactgcatcagcaaagccattgtattgaactaaaagtttaaaatgaactgcatggatttactaagctgatgaatattccaaaacgtggttggattcaaggatatattttgtctaccggccctcatgtttgtatgtacttgaggagtaaaatgagtaaaatgatactgaatgaaatgttctgtggaaatattaaaaaaaaaaaaaaacataagccatccatcatccagaagaaaaatggaatacactgatctactactgatgtcttctttcagctttgatctaaagatgtattttattaaaactataatttaaatgtaccatgaaaaatatgcagtaaaaattagttgttttctaagctagagtaggatttgtcttacaattattgtgctatgtagtttttgttttaaaaattccaatggtgtgctgctttctttggacattttattttcaattctataagagggatagatgacattgttctagaaacacatatacatcattaagagtgaatctctaaaaccaggatataaattatgctttatttctctgagaaaatcaaacaaatggaagctgttcacacctccccttctttaagcattatctaaattaatttttacttgcataatgttcttagaaaaaaaaacagaacatttaagcaggaaaaaaggaagaaacaagttgatttttaagtgcattttactataatgaatcaatgaagggaaaaggaactgcatatttcatgaaaataataagcattgtcttaatatactgttaatagaaaatgtgtcttaattccgtgcttgaatccctgcatgatatttgagactaagatctctcttatgattctaccaagaattatatctgtgtcacttaatttttttaaaagagagagatcaataactattcagagcaacatgttaaaggcaaagtttccaatcatttacatctgtatcaggtgcctcttacctttccttatttaagacaattatttgtacaagaaacacatgactcttttcatatcaatgggagggacttttctacaaagtattttccaggatgcaacccacatttaaacaatgtaaaattctttgtttcctgcaacaacttacaaaataaggtaaaagactaaaattcaagatttgcttccttcattgtcctaagacgattcgttgagaatcactgactttgagatatttaaaactttcagcattatactgtggtttcttttgcactgcactcacctattcaggactcctcccccaggttcctcatcatgcacaaaaatgcaaagaaaacatcttattagtaattaatgaagcaacattgaaattctaactctagctgtctttggattctaattaactcagcatcaatttctcacctcagactacagtgaatttttatttcctatcagctgaaatatttcacagatggaagctcatgtttcagttttaatgactgccttgaataaacaagttgttgccacttgtttcaaacaaaagcctaaaaataatctacattcaattttaggctccattgactaatatggtgttgcttttggaagtactgtatatcctcacatggaagccaaattgttaaattatttgaaggacacaccactgtacagaaagtagtgtttcaaatataaatcgaagaacaaagagtgctccaaaaaataggtcattcttttattttcataaagtatctaaactgtactaacattcagtgttgtgtttcattctaaatttgcagctgaaataaatttatttgcgatagcagaaatatcttattattcatcctcagaaataaaggatttgaagggatagagattatatgataaatttatagaagactttcagaatttgaatgcattttgtttagtgttatgaaatgacaatagaaaaaagtctcgacttcaattaaaagttacacaaacaaacaaatctacaggcatgtctttatataccatcaggtctaagttttcaaagaaaattgtagatataacttgcagataactcattacagtcataatctctgcccatgtgtattgagagggggcagtttgcacgaaaaagaattattggcccatttaataattcagctttaaatagactttgtcatatgcatgaatcatcagagatgaaactgtttgagagactcatgtgaccttacgaaaattacaacagcagtcttaaagtatgaaaaagatgcatcacagcagagacattatggcccagttgatatcaaatgtaaaatgtaaatgcatgtaaatgcacacttcattttatgtattatttagtaatttgcagtggtatgtgtttaatatttttgctacctacacattaggcaaaaaaaagatgtaaataatttgggagaaaaagaggaagaacagtgtaaaataaaactttctataagtactccatttcaatgtgttcaacatcatcctaaaaggcaagattttcccacgcaggtgacaaggtggtttatgtactatttaagggcggaaggtgcgtgcccgttcaataagcatgttttttgccaggtaggaaatatgttccatatctttacttatcattgcatttcagatgggaactagaaaaactggagagaaaaatgtaatgaaactgctgctgtaaattattccttttagcatgtattcacttgctaaatacacatttcttc

SEQ ID NO: 15240 - DNA, 3883 bp, Homo sapiens
ttttctacttaatttaaagaaaagaattccttacctataaaaacattgccttctgttttgtatatcccttatagtaattcataaatgcttcccatggagttttgctaaggcacaagacaataatctgaataagacaatatgtgatgaatataagaaagggcaaaaaattcatttgaaccagttttccaagaacaaatcttgcacaagcaaagtataagaattatcctaaaaatagggggtttacagttgtaaatgttttatgttttgagttttggaatttattgtcatgtaaatagttgagctaagcaagccccgaatttgatagtgtataaggtgctttattccctcgaatgtccattaagcatggaatttaccatgcagttgtgctatgttcttatgaacagatatatcattcctattgagaaccagctaccttgtggtagggaataagaggtcagacacaaattaagacaactcccattatcaacaggaactttctcagtgagccattcactcctggagaatggtataggaatttggagaggtgcattatttctttctggccactggggttaaatttagtgtactacaacattgatttactgaagggcactaatgtttcccccaggatttctattgactagtcaggagtaacaggttcacagagagaagttggtgcttagttatgtgttttttagagtatatactaagctctacagggacagaatgcttaataaatactttaataagatatgggaaaatattttaataaaacaaggaaaacataatgatgtataatgcatcctgatgggaaggcatgcagatgggatttgttagaagacagaaggaaagacagccataaattctggctttggggaaaactcatatccccatgaaaaggaagaacaatcacaaataaagtgagagtaatgtaatggagctcttttcactagggtataagtagctgccaatttgtaattcatctgttaaaaaaaatctagattataacaaactgctagcaaaatctgaggaaacataaattcttctgaagaatcataggaagagtagacattttatttataaccaatgatatttcagtatatattttctctcttttaaaaaatatttatcatactctgtatattatttctttttactgcctttattctctcctgtatattggattttgtgattatatttgagtgaataggagaaaacaatatataacacacagagaattaagaaaatgacatttctggggagtggggatatatatttgttgaataacagaacgagtgtaaaattttaacaacggaaagggttaaattaactctttgacatcttcactcaaccttttctcattgctgagttaatctgttgtaattgtagtattgtttttgtaatttaacaataaataagcctgctacatgtaaaaagaaccaaactcacaatattaacataaacatctttcatattttgttagtactttcaaatgttttcaatttgactttccctctgaatatgcatggtgtgtttcctgtctgtttaagcagaactcacctttccttcttgtaacacagaacccttagccttcttctgttttgccttttcacgccctttatagtgtgaaatgaaaaattagtcacttcctcacatggaaggcagcttttcagaaaataacagacattgctcgtttctcatgcattctacatatcttgaaagaaaagtctgtgagaaaaccctgtgattagagggcaacttaatgcaagatctgtggctctatgttgagagcattctctctctgttatttttattttatttgcattgcttacctatctcaaagtagtcaaactgatatatgagattgagtactcccttttgatattatactgatgaatatttgtaggtgtttcactataaggaacagctaaggaataattttaataaaagtgaaccagaacaaatcactcatttaaaaagtaattcagaagaacagtgtggcatgatcagacttctaattgaatagcgtaacaacagtgtttgtaattatagatttgcttggacaaaatattccaggaactcatagcgagctcaaagcaattaagtgggaacatttttaatttaaaaaaaatttccaaatatttgtgggtccgacagtaatgatcaaaatatgaatgactttggaaaatttacatgaagctcaagtgttaggattgacttatgaaaataaattttatttctatccaaatttgaatgtccaaaccattttttagttacttctttctaatcctagttattcagacaaaatttggaaacttattttatgaccacatctaatattctggctgctttggatacaatactcttgatttatgataattagttaaaatatattaaaaatattattagtaaaataaaatttcacacaataaaaaacaacatagagtacacatatttatatgtatttttaaagataaagaatatctaaaatgtgtttttttcttagctttttagttgtctagaacatttagagaaagagtatgaatatattaaatccacaaacacactatatacttcctcaccactgactattttatcaaatttgccttaaaataatgaaaaagaaaagtatagttaatggtttcaaatatgctaagaaattgactctgcggaggggatcttaaaatgcctgtttactcatgttttcgtatttttcttgtctctaatacttttgtctttgtctgccttgtgtgttcttttctgaatttcatttcagcaatttatgctgctaaatagaatcccgcatgtctgcattcatttacattcaacttattgtaaattttgagattttatttagaaatgaattgtctaattaatttatgtagagtccttttttccaaagagctcaaaacactacatccacattattgacttttggaaaccaaccaaattacttaagaaatggaaaagtagtcacagagaaatttagtaatttgcaaaagccacaacagtagtggaagaattaaaattcataaagtctcatcattctgttggctaaaataatgctctttacaatatgctggctacaaaatggtcttactcttgaattttgcttttggttcatattttggttcttcatattctagtatgttttgttcctgctgaattttacagactcagctaaacaataagttattagtagtcacttgttttcattatcataattgaatttccaagaacaacttgatatcattcagctgtccaaaaaataataagagcattcattaaatactgattttcttaaacttaaatgttgtatttcatatttatttatataatacaaatggaaatcaaaactgaaatagcctccctttagaatgtcacatttttcttagaaaacattttggaattggttaaccttattgggaatggataatttagaaacaaaccaaaaaaaaaaaaagatatttgaagtgtttttataggagatgtatttttatcatagtaaatgatcacaattttaaataattcatcttacaagtcaggtaaaataaaatcgattcccagattccatacattaggagtgcaaagacaggatcatacacatgacttatacctctcatttaaatattttatagtataaagtatttatggaaagggtttgagatagatgatttttgggaaagggcaaaatgtgtcagatgccctagttaatcatgtaatttaattctggtattgtgagtggttagcaatcaattttgaatttataattctgctattttaaaagaaatgtagtcttgtagtatgaaataattaaaaattgttaaatgtatattttggttgtattataataaaatgcaaacatgactgttctatgattata

SEQ ID NO: 15241 - DNA, 549 bp, Homo sapiens
agagacagtgctgtagccttgagactaatgaacaaagaaacctgctctagttttacaggaccatattttagggtctgtcctcatacctgtcacattggtgatctcacagaggagggccatgccgctgaaaagggaaggagattgaaacatttgattgccttatcacatggtcaagtaccttgccaaataaaggaaagcaaatgatttgggtctcaactgaagatgaagctcaactcaggaagagatttatctgtatatacacataactgaaaaccaagtttaagcccaccaatgcactgctgatgcatgccatataattaatgggtaacttttattctttatgatgtctacataacaagtgtgatttggaaggcacatgtgagcatatgcattatgatccaatttatgttttttctttgtttatattttggggaaaattaaaatttttttaaggtatatttttcccattatttattttcctgaccttaaaacagcttttctactaaaaaatggtgagcaatgaagacaataaatttttcatttttccat

SEQ ID NO: 15242 - DNA, 474 bp, Homo sapiens
ggctgccaaggagaagtacttaccaggactcttcaaaatgatacattaggacagtgagtaatttttggataaggtatgctgaagaatctcctgcagaagtctgatacatgattttcatgttaattgtaaatgttaattccctcttgcaagggagacatatcctagatcactttgctttttctttaaggagctgatgttgcacctaaacattccaacccttaaagctaaaacagcacaaaaaaatttcacttttgaaatgaaatttttataattgtatggcaaaaggctatgtaaaaacaaatcttgcatcttaagacaaatattcttttatttctgttaaactgaatatacaattgttccctaggcaaccaacttttgcttataactacaatttaatttcacgttgacaaaacacagtgaaaagacaactttgtgaagatctaattacaataataaataaaataatttatacaa

SEQ ID NO: 15243 - DNA, 51 bp, Homo sapiens
acttttgctacagtatattttaaaaataaattcaaattattctaccatttt

SEQ ID NO: 15244 - DNA, 611 bp, Homo sapiens
actctgactgtatgagatgttaaatactttttaatatttgtttagatatgacatttattcaaagttaaaagcaaacacttacagaattatgaagaggtatctgtttaacatttcctcagtcaagttcagagtcttcagagacttcgtaattaaaggaacagagtgagagacatcatcaagtggagagaaatcatagtttaaactgcattataaattttataacagaattaaagtagattttaaaagataaaatgtgtaattttgtttatattttcccatttggactgtaactgactgccttgctaaaagattatagaagtagcaaaaagtattgaaatgtttgcataaagtgtctataataaaactaaactttcatgtgactggagtcatcttgtccaaactgcctgtgaatatatcttctctcaattggaatattgtagataacttctgctttaaaaaagttttctttaaatatacctactcatttttgtgggaatggttaagcagtttaaataattcctgttgtatatgtctattcacattgggtcttacagaaccatctggcttcattcttcttggacttgatcctgctgattcttgcatttccacat

SEQ ID NO: 15245 - DNA, 144 bp, Homo sapiens
tgatgctgtttcaacttgaaacaacaactatagccaaagaagatggagactcttaggcaagaatgtttttcaccattattctctcacaatgattttatgtctttctttcctataatttaaataaataatttcagctctacctct

SEQ ID NO: 15246 - DNA, 1361 bp, Homo sapiens
atcaagaggaagctgcatgaatgtaatcaacattccaactggagctctcctttgcttgtcctctttgccttcggtaatatgtataaacttacatcacgactttctcttaacagctgttgtaaagtttattactttatgtacaactgaagttttgttttagttttgataataaattctttggaactttaataagatctagtctgttacaccatttagaactttcctgagccattatcagtcatgccttattttcttgctaaaactctatgtaaatttaagtatgcaaaatgtttaagtcacattatttatttttcattgtgagacactaaaaactgttaatcagactacagctgttatctttcctctcctacaaagaatactccacacataaaaacttaggtaaatgacatagacgcacttgggtgaaataaaacaacaaaaaaggtaatccagtaatccacgtcaggattcaccttagaagtttagcacacgcccttcaaaacctgttgaataatttgattggcaaatactatctgtcaccaagtccctttttgtcatctatttaaacctttgttaactctccttaaaaatcttgtacattataagcttaactatataaaaagaaaattgatagaaaaagactaagggaatatatggaaatattaacaatgtttattttggatgaatggaattctagatgactttaattttctttatatcagtatttttcagattttctatatgctttccttttaaaatcagattttagtttttaaaatactgatacatccattttgatataccatgtattcacactttaaaaaatacacatagcagagtatcggaaagtatgtaccaaaacattgatctggctaccactgggagtcaggatcatgagttcatcttcttccttcttactgcttttccaaacattctccagtaagcaggtactacatttataatggaaggaattttttaaaaaattttaagctgtacactttcaagtaagatctgaattctaatgctggcttgtgcctcttactatgtggtttggtcattatagataatgcccagtttcagtttccccatctttgaaaaggagataatatgttatctcttgggagtagttctgaatatgaagtgtgttgatacaagaagcactgacaatgtttctgtttcttaaatttaaaactggcctggtttgccttttttatcaagagagcttaacagataaaaaatgaaattagtctattttctacttgccagcagagtatctgtcttattttaggatgcagtgtgaaacttaccattcaactgaacaactagttgtcaactaatgaaaataaaacattttctctaag

SEQ ID NO: 15247 - DNA, 2962 bp, Homo sapiens
aaaaagcattgaatggaaaatcaatatttaaaacaaagttcaatttagctggatttctgaactatggttttgaatgtttaaagaagaatgatgggtacagttaggaaagtttttttcttacaccgtgactgagggaaacattgcttgtctttgagaaattgactgacatactggaagagaacaccattttatctcaggttagtgaagaatcagtgcaggtccctgactcttattttcccagaggccatggagctgagattgagactagccttgtggtttcacactaaagagtttccttgttatgggcaacatgcatgacctaatgtcttgcaaaatccaatagaagtattgcagcttccttctctggctcaagggctgagttaagtgaaaggaaaaacagcacaatggtgaccactgataaaggctttattaggtatatctgaggaagtgggtcacatgaaatgtaaaaagggaatgaggtttttgttgttttttggaagtaaaggcaaacataaatattaccatgatgaattctagtgaaatgaccccttgactttgcttttcttaatacagatatttactgagaggaactatttttataacacaagaaaaatttacaattgattaaaagtatccatgtcttggatacatacgtatctatagagctggcatgtaattcttcctctataaagaataggtataggaaagactgaataaaaatggagggatatccccttggatttcacttgcattgtgcaataagcaaagaagggttgataaaagttcttgatcaaaaagttcaaagaaaccagaattttagacagcaagctaaataaatattgtaaaattgcactatattaggttaagtattatttaggtattataatatgctttgtaaattttatattccaaatattgctcaatatttttcatctattaaattaatttctagtgtaaataagtagcttctatatctgtcttagtctattataattgtaaggagtaaaattaaatgaatagtctgcaggtataaatttgaacaatgcatagatgatcgaaaattacggaaaatcatagggcagagaggtgtgaagattcatcattatgtgaaatttggatctttctcaaatccttgctgaaatttaggatggttctcactgtttttctgtgctgatagtaccctttccaaggtgaccttcagggggattaaccttcctagctcaagcaatgagctaaaaggagccttatgcatgatcttcccacatatcaaaataactaaaaggcactgagtttggcatttttctgcctgctctgctaagacctttttttttttttactttcattataacatattatacatgacattatacaaaaatgattaaaatatattaaaacaacatcaacaatccaggatatttttctataaaactttttaaaaataattgtatctatatattcaattttacatcctttttcaaaggctttgtttttctaaaggctttgttttcctttttattatttttttcttttttatttttttgagacagtcttgctctgtcgctcaggctggagtgcagtggcacgatctcagctcactgcaacctcctcctcccaggttcaagtgattcttgttcatcagcctcccgagtagctgggactacaggcatgtgccactatgcccagctaatttttgtacttttagtagagacagggtttcaccacattggtcaggctggtcttgaaatgctggcgtcaagtgatctgcctgcctccgcctcacaaagcactgggattacaggcatgaatctggccttacgtaatatattttcttaatggctgcataatatcacatcaaataggcatttttcaaacctctttccttattaaacatgtagactatatccattttttactaaaataaataacatttcagataatatctttgcactgataatgttgccaagccatttctaaagtgaccttatcaatttaattaccattggatgagggtgttgctttcatcgcaccattgtagattgtcttttttatttcaatttgcgtttatttataactggttgcaaaggtacacagaacacacgctccttcaacttatctttgataaacccaagcaaggatacaaaaagttggacgacattgagtagagtcatggtatacggtgctgaccctacagtatcagtggaaaagataaggaaaatgtcactactcacctatgttatgcaaaacagttaggtgtgctggggctggatactgctcttttacttgagcattggttgattaaagtttaggtaccatccaggctggtctagagaagtctttggagttaaccatgctctttttgttaaagaagagagtaatgtgtttatcctggctcatagtccgtcaccgaaaatagaaaatgccatccataggtaaaatgctgacctatagaaaaaaatgaactctacttttatagcctagtaaaaatgctctacctgagtagttaaaagcaattcatgaagcctgaagctaaagagcactctgatggttttggcataatagctgcatttccagacctgacctttggccccaaccacaagtgctccaagccccaccagctgaccaaagaaagcccaagttctccttctgtccttcccacaacctccctgctcccaaaactatgaaattaatttgaccatattaacacagctgactcctccagtttacttaaggtagaaagaatgagtttacaacagatgaaaataagtgctttgggcgaactgtattccttttaacagatccaaactattttacatttaaaaaaaaagttaaactaaacttctttactgctgatatgtttcctgtattctagaaaaatttttacactttcacattatttttgtacactttccccatgttaagggatgatggcttttataaatgtgtattcattaaatgttacttt

SEQ ID NO: 15248 - DNA, 74 bp, Homo sapiens
gattgagagggataatgtgcccatgtctcttaaggagtttgtgctacttaaataaaaaaaacatttttaaagtt

SEQ ID NO: 15249 - DNA, 887 bp, Homo sapiens
ggatgccaatgtttttaattctcaggaactgtgaatatgttatgccacattgcaaaagaattttgcagaagtgattaatttaaaatgttattaagggccttgagatggggagattatcctgaattactttggagggcctaatataattgtagggatctttaaaagttgaagagggaggcaaaagaggaggtcagagtgatcctgtataagaaagacaactacttttgaaggaagttaaaaggtggctttgaaggaggaagacaccttgagccaaggaatgaagggggcctgtaaaaaaagattgaaaaggcaaggaaacagattctccattagagtccccagaaaggaatgcagccttgctggcacctttttagcccagtgagatcaatgtcaaacttctgacccacagaaccataagatggtaaatttgtgttgttttaaaccactgagtcagtgataatttgctgaagaagcaaatagattaacatagcaactaagtagatgattagttgcattataggtgaagtcaaaaatacagtcctttagtaaagtctctatttcttccttttataagagtaattatatttaaaaaatctacctacccttctggaattgctaatgttagtgtttataaagtcttaaatgtgtgcataaaaaactaaatgtgaatataaaatctaaataaaggaatatgtttgcctaatatagtttaaggaaatgataatcatttctgtgcattttgttggcatttcagctaatattaaagagtaattttcagaggcattgacttaaaaaatggcaaatcagataatgtcggtattttcaagatacaatctagctctgacataaactgaaagacgtgagacaaattatatgaccttaatttt

SEQ ID NO: 15250 - DNA, 1513 bp, Homo sapiens
aaaaggttgcaaggaacgaatatatgtgattatcactgtaagccacaaaggcattcgaagagaatgaagtgtacaaaacaactcttgtagtttactgtttttttaagtgtgtaattctaaaagccagtttatgatttaggattttgttaactgaatggttctatcaaatataatagcatttgaaacattttctaatagttatgatacttatacatgtgctttcaggaagttccttggtgaaacaattgttgaggggggatctaggtaattggcagattctaaataatataatttccagatagtaattttaagagtactcatcgctcttgccaaataagttcagggtattcaaatcttggactagtcctgcaaggtataaagaataaaaatcccagtgagatacttggaaaccacagtttattattatttatctgggcaattattgtgtgtgtgaggatggaagggtagggaataatcgaacatctaaagccttgaataagagaatactaattgttttggtatgatgatactcagaaatggagatattataggaaaaagaaatcctttggaattttaactaaaatcactgcatatgggaaattaagagatccaggaccatatttgataagagttcctaaaaataatgtaattattaatgctaaagactgctcatgtatcttgatctaattactaaataattacatatttatttacctgataaatatgtatctagttctacaaggtcacatttatgtggaagtccaaagtcaagtccttaggggataattttgttttggctcagttgttccctgcttcctttttttttttttttttttgagatggagtctcgctctgttgcccaggctggagtgcagtggtgcgatctcagctcactgcatcctctgcctcccgggttcaagcaattctctgcctcagcctcccaagtagttgggattacaggcacctgccaccatgcctggctaattttttgtatttttagtagagacgggggtttcactatgttggctaggctggtcttgaactcctgacctcgtgatccacccgccttggcctcccaaagtgctgggattacaggcatgagccaccgcacctggccttccctgcttcctctctagaatccaattagggatgtttgttactactcatattgattaaaacagttaacaaacttttttctttttaaaatgtgagatcagtgaactctggttttaagataatctgaaacaaggtccttgggagtaataaaattggtcacattctgtaaagcacattctgtttaggaatcaacttatctcaaattgtaactcggggcctaactatatgagatggctgaaaaaataccacatcgtctgttttcactaggtgatgccaaaatattttgctttatgtatattacagttctttttaaaacactggaagactcatgttaaactctaattgtgaaggcagaatctctgctaatttttcagattaaaattctctttgaaaaaat

SEQ ID NO: 15251 - DNA, 1767 bp, Homo sapiens
aagagaagtaactgttactcaagccaccacattttgtaatgcagagttttttttccgtgaaagatttcttaaaatattacttttggccgagcatggtggctcacccctgtaattccagcactttgggaggctggggcaggcggatcacctgaagtcagagttcaagaccagcctggccaacatggtgaaaccctgtctctacaaaaatacaaaaattagctgggtgtggtggcgggcgcctataatcctagctactagggaggccaaggtgggagatcgcttaaacccaggaggtggaggttgtagtgagccaagattgcaccacggcacgctagcctgggtgacacagcaagactccatctcaaaaaaaaaaaaaaattactttcaacaaggcatatagtctcttgtaatatatatgtatactattacattgtacagaatctgtacttatgtttggtgtgtaatataccaattagttttatataatatcctcataagctattctaatttttgagagaaacacaaaaagttatagattgatagtctgtataatattagacaaaatagtaagctttataaaaagttatttttggtaaatggtaaggaatttggggtggaatgtgatgagattaaaatgtagctttggtataacttcatgtgtatttcaaaatatactgaacgtcaacatgatttgaataaagaaaatgtattttctacttgaaccacataacactgttatttaaaacagttttctgcagtctataaacatttctcaacatttttttaaaagtcttagttaaaatgtaaatctgatatacagtagtgtttctcaaagtatagttcatgaactccttgcatcataattacctagatgcctcttaaaaatgaagatttcagagacccattctaaacaagggcattcactctctggaagtagcatggccttgtgaacttaaatttggttttgttttttcttttttgctgttagaataatttcagacccaataaggaatttcgattattaaagttgagaaatttcacaaaactgcctggcacacaagcacacacatacatagacacattttaagtgataatctcttgatattagaagttgcatttgttaaatacatgctgtattttttatgagttgacttaatagtttatgtatattgactttgctttgtaggaagtaaatcaccagatatcttattgtttcatttaggaaagtagtgatatagatgaagagccaacttgatgaatgtgctattcataagctagaaactacagtttttccaaactaataaactgatgaattctaaataagttcagagatatagtcatatttaaagttgtcctacagtttgcagataatttttatattactattcttcacattaacttctgcttatttttaatggtactatatgtaggccttattaaaattaagattgtatggttaagtaaagttaacaagaaagcctgatttatctttaattctgtgctaggtacttttgattctacatgaacaatacccttttcagttcccttcattctaatgtcctcaactgttaccaaataccctgttgactcccaaacctaagattttagcctcaacttcttttctgaacttcaaatcttaatttccaagttatacttgttctaggtccatctaaatggtctacagagaacttcagttgaatcatagctggaaacagaatttatttcctctatttgcttcattctgtccttccactatattccctattt

SEQ ID NO: 15252 - DNA, 433 bp, Homo sapiens
aatatacttctttttgatttggttctgttaagttttttgatggcttttccatatgttgtaacaggaaaaaaatggtgtctatgaatttcttcttaatttaacaaatttggttaatttataaaatcacagattggtaaatgctataattatgtaatgatcaggattgagattaatactgtagtataaattgggacattataacagattccatattttatttcctaaaatctaaattcagtctttaatgaaataatattagccaaatggtggaactaatttatttcttttgaggaaaagataataaagaatgtaattaaatttaaatttcttggaattcccagttgtatattcatcacctttgtagcatttgacaaattttatgcttagcagcttcttcactgttttgaaataaaatatcctattacctactgat

SEQ ID NO: 15253 - DNA, 1522 bp, Homo sapiens
cattaagaaaaatcaggattcccttataaagaaagtgcaatgtctgaggaaatttcaactgtgaaaactacaacatatttactaaaatgcatgaattttcttgtttttggaattattcctggactattcagtagccactcagatgccactgtgtgaaagggccataaatgttgcctgctgcttgaacatctatttttttctcttccagtgcttgataactctgggagataatacactgcagtcgtactagtggttaagatatttgggaataaaattaatacttttgactagaagcgtctaaggataaaccaacagaaattgaatctggatacatctttaagatgtaatcagaaatgaccagatgactctagttagaatttttgaaggagggattacattaatatttcaaaacccttactctgtagataagtgtattttaattttttcccctcgtatacttttatttacctggggaaggagcttttagggttggggggtggtttgctatctctttagctagcagaatagtgtgcctttgatcctcacacatcctgtattatggacacagtagccatgcttcacggggaggtcagagctggctaccagcagtcttgccctttactgagcttagtgtcatctttggatgctgtcatatgctgctttgagtgaaccagagaaacagccatttgcagcatgagaaagccccaaaagctctgggatttacctccactttagtaataatgaatattttttagcattagaatgtgttatgtcatttgaattaattttgactacactttggcttgggagaggaattattttaaatagacattggtactttttgaacttgatagctaaagattctaaaatgcatgttttatactaagttttaaccagtcaggaaaattttatgtaactagtgatagtttatttttttgtatgaattttgtttaggctgcaatgtttagcttttgttaactcctcactcttgctgtcttaagttcattactatgtttaatggcctacttgccaagatatttagcatgtaaaaagcagggttttgattaaaaaaaaaaaacggcttcatattgaagctgagacttacaataacaagttgagtggcaagcctggtatgctgtgtcttattgccagaatcttagtaaatgtaatgttttaaaagtttgttgtctttgtatattaataacaaattatgacaagttaagtttaaataagagttacattattgctctccctgtgtcatattttactaagattttgtgcctcatgtctactgctgaattgtttactaggaatgttaaaaggaattgataattcattttcattttacatttttatataatcaggtaacatgacatacaacttgatgtacaattttgcctgttacaaagggtgtgctaattatagtggtatatgcacagaacatgttggcatgacaacaggctgaataaatagctattttacttaaaaatagctgtgttcttatcagctccctttggactgc

SEQ ID NO: 15254 - DNA, 10217 bp, Homo sapiens
ggcctcagcagccgccttaagctgatcctgcggagaacacccttggtggcttatgggtccccctcagcaagccctacagagctgtggaggattgctatctggaggccttccagctgctgtcttctggacaggctctgcttctccaaggaaaccgcctagtttactgttttgaaatcaatgcaagagtgattgcagctttatgttcatttgtttgtttgtttgtctgtttgtttcaagaacctggaaaaattccagaagaagagaagctgctgaccaattgtgctgccatttgatttttctaaccttgaatgctgccagtgtggagtgggtaatccaggcacagctgagttatgatgtaatctctctgcagctgccgggcctgatttggtacttttgagtgtgtgtgtgcatgtgtgtgtgtgtgtgtgtgtgtgtgtgtgtgtatgtgagagattctgtgatcttttaaagtgttactttttgtaaacgacaagaataattcaattttaaagactcaaggtggtcagtaaataacaggcatttgttcactgaaggtgattcaccaaaatagtcttctcaaattagaaagttaaccccatgtcctcagcatttcttttctggccaaaagcagtaaatttgctagcagtaaaagatgaagttttatacacacagcaaaaaggagaaaaaattctagtatattttaagagatgtgcatgcattctatttagtcttcagaatgctgaatttacttgttgtaagtctattttaaccttctgtatgacatcatgctttatcatttcttttggaaaatagcctgtaagctttttattacttgctataggtttagggagtgtacctcagatagattttaaaaaaaagaatagaaagcctttatttcctggtttgaaattcctttcttccctttttttgttgttgttattgttgtttgttgttgttattttgtttttgtttttaggaatttgtcagaaactctttcctgttttggtttggagagtagttctctctaactagagacaggagtggccttgaaattttcctcatctattacactgtactttctgccacacactgccttgttggcaaagtatccatcttgtctatctcccggcacttctgaaatatattgctaccattgtataactaataacagattgcttaagctgttcccatgcaccacctgtttgcttgctttcaatgaacctttcataaattcgcagtctcagcttatggtttatggcctcgattctgcaaacctaacagggtcacatatgttctctaatgcagtccttctacctggtgtttacttttgttacctaaataatgagtaggatcttgttttgttttatcaccagcacacagattgctataaactgttactttgtgaattacatttttatagaagatattttcagtgtctttacctgagggtatgtctttagctatgttttagggccatacatttactctatcaaatgatcttttctccatcccccaggctgtgcttatttctagtgccttgtgctcactcctgctctctacagagccagcctggcctgggcattgtaaacagcttttcctttttctcttactgttttctctacagtcctttatatttcataccatctctgccttataagtggtttagtgctcagttggctctagtaaccagaggacacagaaagtatcttttggaaagtttagccacctgtgctttctgactcagagtgcatgcaacagttagatcatgcaacagttagattatgtttagggttaggattttcaaagaatggaggttgctgcactcagaaaataattcagatcatgtttatgcattattaagttgtactgaattctttgcagcttaatgtgatatatgactatcttgaacaagagaaaaaactaggagatgtttctcctgaagagcttttggggttgggaactattcttttttaattgctgtactacttaacattgttctaattcagtagcttgaggaacaggaacattgttttctagagcaagataataaaggagatgggccatacaaatgttttctactttcgttgtgacaacattgattaggtgttgtcagtactataaatgcttgagatataatgaatccacagcattcaaggtcaggtctactcaaagtctcacatggaaaagtgagttctgcctttcctttgatcgagggtcaaaatacaaagacatttttgctagggcctacaaattgaatttaaaaactcactgcactgattcatctgagctttttggttagtattcatggctagagtgaacatagctttagtttttgctgttgtaaaagtgttttcataagttcactcaagaaaaatgcagctgttctgaactggaatttttcagcattctttagaattttaaatgagtagagagctcaacttttattcctagcatctgcttttgactcatttctaggcagtgcttatgaagaaaaattaaagcacaaacattctggcattcaatcgttggcagattatcttctgatgacacagaatgaaagggcatctcagcctctctgaactttgtaaaaatctgtccccagttcttccatcggtgtagttgttgcatttgagtgaatactctcttgatttatgtattttatgtccagattcgccatttctgaaatccagatccaacacaagcagtcttgccgttagggcattttgaagcagatagtagagtaagaacttagtgactacagcttattcttctgtaacatatggtttcaaacatctttgccaaaagctaagcagtggtgaactgaaaagggcatattgccccaaggttacactgaagcagctcatagcaagttaaaatattgtgacagatttgaaatcatgtttgaatttcatagtaggaccagtacaagaatgtccctgctagtttctgtttgatgtttggttctggcggctcaggcattttgggaactgttgcacagggtggagtcaaaacaacctacatataaaaagagaaaaagagaaacttgtccatttagctttcataagaaatcccatggcaaagggtaataaaaaggacctaatcttaaaaatacaatttctaagcacttgtaagaacccagtgggttggagcctcccactttgtccctcctttgaagtggatgggaactcaaggtgcaaagaacctgttttggaagaaagcttggggccatttcagccccctgtattctcatgattttctctcaggaagcacacactgtgaatggcagacttttcatttagccccaggtgacttactaaaaatagttgaaaattattcacctaagaatagaatctcagcattgtgttaaataaaaatgaaagctttagaaggcatgagatgttcctatcttaaataaagcatgtttcttttctatagagaaatgtatagtttgactctccagaatgtactatccatcttgatgagaaaactcttaaatagtaccaaacattttgaactttaaattatgtatttaaagtgagtgtttaagaaactgtagctgcttcttttacaagtggtgcctattaaagtcagtaatggccattattgttccattgtggaaattaaattatgtaagcttcctaatatcataaacatattaaaattcttctaaaatattgcttttcttttaagtgacaatttgactattcttatgataagcacatgagagtgtcttacattttccaaaagcaggctttaattgcatagttgagtctaggaaaaaataatgttaaaagtgaatatgccaccataattacttaattatgttagtatagaaactacagaatatttaccctggaaagaaaatattggaatgttattataaactcttagatatttatataattcaaaagaatgcatgtttcacattgtgacagataaagatgtatgatttctaaggctttaaaaattattcataaaacagtgggcaatagataaaggaaattctggagaaaatgaaggtatttaaagggtagtttcaaagctatatatattttgaaggatatattctttatgaacaaatatattgtaaaaatttatactaaggtcatctggtaactgtgggattaatatggtcgaaaacaaatgttatggagaagctgtcccaagcaaactaaattacctgtacttttttcccatttcaagggaagaggcaaccacatgaagcaatacttcttacacatgcctaagaacgttcattgaaaaaataaatttttaaaaggcatgtgtttcctatgccaccaatacttttgaaaaattgtgaaccttacccaaaaccatttatcatgtccattaagtatatttgggtatataattaggaagatatttacatgttccatctccacagtggaaaaacttattgaggctaccaaagtgtgccaagaaatgtaagtccttagagtaattagaaatgctgttttcctcaaaagcatgagaaactagcattttcatttcttatttactccctttctatatcaatgcaattcacaacccaattttaatacatccctatatctcaagcatttctatcttgtactttttcagaaaataaaccaaaaataatcctttggtctctctatcttctgacctttgtaagcaacagaaatgtaaaaacagaaggggtccaatttttacacgtttttttctcaagtagcctttctggggatttttattttcttaatgaagtgccaatcagcttttcaaaatgttttctatttctcagcatttccaggaagtgataacgtttagctaaatgagtagaagtggacttccttcaacatattgttaccttgtctagccttaggaagaaaacaagagccacctgaaaataaatacaggctcttttcgagcatctgctgaaatactgttacagcaatttgaagttgatgtggtaggaaaggaaggtgacttttcttgcaaaagtctttctaaacattcacactgtcctaagagatgagctttcttgttttattccggtatattccacaaggtggcacttttagagaaaaacaaatctgatgaagactaaagaggtacttctaaaagagatttcattctaactttatttttctgcgcatatttaactctttcctagcacttgttttttgggatgattaatagtctctataatgttctgtaacttcaatattttacttgttacctaggttctgaacaattgtctgcaaataaattgttcttaaggatggataatacacccattttgatcatttaagtaaagaaagcctagtcattcattcagtcaagaaaaaatttttgaagtacccagttaccttacttttctagattaaaacaggcttagttactaaaaaggcagtcctcatctgtgaacaggatagtttcgttagaagtataaaactcctttagtggccccagttaaaacacacataccctctctgctgctttcaaattccctagcatggtggcctttcaacattgattaaattttaaaatcctaatttaaagatcaggtgagcaaaatgagtagcacatcagtaattcagtagacaaaacttttgtctgaaaaattgctgtattgaaacagagccctaaaataccaaaagaccaggtaattttaacatttgtggaatcacaaatgtaaattcataagaagctctaattaaaaaaaaaaagtctgaagtatatgagcataacaacttaggagtgtgtctacatacttaacttttgaagttttttggcaactttatatactttttttaaatttacaagtctacttaaagacttcttataccccaaatgattaagttaattttagaggtcacctttctcacagcagtgtcacttgaaatttagtagggaaggatattgcagtatttttcagtttccttagcacagcaccacagaaagcagcttattccttttgagtggcagacactcgacggtgcctgcccaactttcctcctgagtggcaagcagatgagtctcagtaattcatactgaaccaaaatgccacatacactaggggcagtcagaaactggctgagaaatcccccgcctcattcgcccctctgctcccaggaactagagtccagttaaagcccctatgcgaaaggccgaattccaccccagggtttgttataacagtggccagtctgaaccccatttgctcgtgctcaaaacttgattcccacttgaaagccttccgggcgcgctgcctcgttgccccgcccctttggcaggagagaggcagtgggcgaggccgggctggggccccgcctcccactcacctgccggtgcctgaaattatgtgcggccccgcgggctgctttccgaggtcagagtgccctgctgctgtctcagaggcatctgttctgcaaatcttaggaagaaaaatgtccctagtagcaaacgggtgtcttctgtgcataaataagtacaacacaattctccgaaagttcgggtaaaaagagatgcggtagcagctgccctgtgtgaagctgtctaccccgcatctctcaggcgctaagctcagtttttgtttttgtttttgtttttttaaagaaaagatgtataattgcaggaatttttttttatttttttattttccatcattctatatatgtgatggtgaaagatatgcctggaaaagttttgttttgaaaagtttattttctgcttcgtcttcagttggcaaaagctctcaattctttagcttccagtttcttttctctctttttctttgttaggtaattaaaggtatgtaaacaaattatctcatgtagcaggggattttcatgttgagaggaatcttccgtgtgagttgtttggtcacacaaataaccctttctcaattttaggagtttggattgtcaaatgtaggtttttctcaaagggggcatataactacatattgactgccaagaactatgactgtagcactaatcagcacacatagagccacacaattatttaatttctaactctctgtggtccctagaaaaattccgttgatgtgcttaggttaaagttctgaagatacccgttgtacccttacttgaaagtttctaatcttaagttttatgaaatgcaataatatgtatcagctagcaatatttctgtgatcaccaacaactctcagtttgatcttaaagtctgaataataaaacaaatcccagcagtaatacatttcttaaacctcacagtgcatgatatatcttttcattctgatcctgtgtttgcaaaaatatacacatgtatatcatagttcctcactttttattcatttgttttcctattacctgtagtaaatatattagttagtacatggaatttatagcatcagctacccccaggaacagcacctgacaggcgggggattttttttcaagttgttctacatttgcataaattatttctattattattcatgtatgttatttatttctgaatcacactagtcctgtgaaagtacaactgaaggcagaaagtgttaggattttgcatctaatgttcattatcatggtattgatggacctaagaaaataaaaattagactaagcccccaaataagctgcatgcatttgtaacatgattagtagatttgaatatatagatgtagtattttgggtatctaggtgttttatcattatgtaaaggaattaaagtaaaggactttgtagttgtttttattaaatatgcatatagtagagtgcaaaaatatagcaaaaataaaaactaaaggtagaaaagcattttagatatgccttaatttagaaactgtgccaggtggccctcggaatagatgccaggcagagaccagtgcctgggtggtgcctcctcttgtctgccctcatgaagaagcttccctcacgtgatgtagtgccctcgtaggtgtcatgtggagtagtgggaacaggcagtactgttgagaggagagcagtgtgagagtttttctgtagaagcagaactgtcagcttgtgccttgaggcttccagaacgtgtcagatggagaagtccaagtttccatgcttcaggcaacttagctgtgtacagaagcaatccagtgtggtaataaaaagcaaggattgcctgtataatttattataaaataaaagggattttaacaaccaacaattcccaacacctcaaaagcttgttgcattttttggtatttgaggtttttatctgaaggttaaagggcaagtgtttggtatagaagagcagtatgtgttaagaaaagaaaaatattggttcacgtagagtgcaaattagaactagaaagttttatacgattatcattttgagatgtgttaaagtaggttttcactgtaaaatgtattagtgtttctgcattgccatagggcctggttaaaactttctcttaggtttcaggaagactgtcacatacagtaagcttttttccttctgacttataatagaaaatgttttgaaagtaaaaaaaaaaaatctaatttggaaatttgacttgttagtttctgtgtttgaaatcatggttctagaaatgtagaaattgtgtatatcagatactcatctaggctgtgtgaaccagcccaagatgaccaacatccccacacctctacatctctgtcccctgtatctcttcctttctaccactaaagtgttccctgctaccatcctggcttgtccacatggtgctctccatcttcctccacatcatggaccacaggtgtgcctgtctaggcctggccaccactcccaacttgacctagccacattcatctagagatggttcctgatgctgggcacagactgtgctcatggcacccattagaaatgcctctagcatctttgtatgcatcttgatttttaaaccaagtcattgtacagagcattcagttttggctgtggtaccaagagaaaaactaatcaagaatataaaccacattccaggctgctgttttctctccatctacaggccacacttttactgtatttcttcatacttgaaattcattctgctattttcatatcagggtacagacttataagggtgcatgttccttaaaggtgcataattattcttattccgtttgcttatattgctacagaatgctctgttttggtgctttgagttctgcagacccaagaagcagtgtggaaattcactgcctgggacacagtcttataagaatgttggcaggtgactttgtatcagatgttgcttctcttttctctgtacacagattgagagttaccacagtggcctgtcgggtccaccctgtgggtgcagcacagctctctgaaagcaagaaccttcctacctattctaacgtttttgccctctaagaaaaatggcctcaggtatggtatagacatagcaagaggggaagggctgtctcactctagcaaccatccctccattacacacagaaagccctcttgaagcaaaagaagaagaaagaaagaaagcttatctctaaggctactgtcttcagaatgctctgagctgaatgctcttgctcctttcccaagaggcagatgaaaatatagccagtttatctatacccttcctatctgaggaggagaatagaaaagtagggtaaatatgtaacgtaaaatatgtcattcaaggaccaccaaaactttaagtaccctatcattaaaaatctggttttaaaagtagctcaagtaagggatgctttgtgacccagggtttctgaagtcagatagccattcttacctgccccttactctgacttattgggaaagggagaactgcagtggtgtttctgttgcagtggcaaaggtaacatgtcagaaaattcagagggttgcataccaataatcctttggaaactggatgtcttactgggtgctagaatgaaaatgtaggtatttattgtcagatgatgaagttcattgtttttttcaaaattggtgttgaaatatcactgtccaatgtgttcacttatgtgaaagctaaattgaatgaggcaaaaagagcaaatagtttgtatatttgtaataccttttgtatttcttacaataaaaatattggtagcaaataaaaataataaaaacaataactttaaactgctttctggagatgaattactctcctggctattttcttttttactttaatgtaaaatgagtataactgtagtgagtaaaattcattaaattccaagttttagcag

SEQ ID NO: 15255 - DNA, 1809 bp, Homo sapiens
gagcctgatattcttcctccaagaatttgatctcagtacccatttaatttttttggactcaagatctatgctttaaaccggcaaggttatagatacagcctctagctcttcagatctgtacatgcagtatttaatttcctcttaaacatgttatgagttctacaaagacaatagtgaaaaaggaaggagtgagatatatgaaaagtagcaaatatgttccttggtttggttaacatcattgatgacaaaataataaggagctatgactggagtcaggagaagttagtgtaataagctggctacacagaaccccactacttaccaggcatggattgaagaagattgtctactcaaatggcatttagacattagaatgtctgggaaaatatttctcaaagacagcaaaaacctctcaaactgaggagcaacatttattcttactaagcagatcatcaatgtatcatgtgcttggcactcaaggatcttccaaaacagaggaccaaccagtcttctgaaggtcatgcccacagaagtcatcagaccttaccaaagtaggttggagaattagattgccttttcatgcagtgagattcagttaagcaaaaatgaaatttgtctctatagctaattagcttatcaactcccctccaaacaaacaattaaaaaaaaaacatacagacactcaaattccacaagctaatgaacaaaagggactcttgtgagaagactaatgagtccctcatccagaagatgccaatgtactggcagattaacatacaacctatgttttgaacaaaaacaaccagcgatacgtaatcaaaatgtaattttcccctaataaaattatggatatgggcagtcatcaatggctgccaaaaccattaagtggaaagctgattaaaaaacaaaaatttctaatggatttatcaaactgtcccaaatcctgataaatattaacatcacagaggaagaccagacattatgggcctggaagtactataggagtgcacacatcacccgtgacatggtcttgccaaataattaaacctgaatttgatcaggtctctggatcttatttgcaattcaaaagaaattttaaaaaaatcctactaacaccaccacaaatatgcaatcagcaatatccagaaaggggaaattcacaggacaaaaacctggttttcttttttggtttcttcaaccaaaaaagaaagaaattgcaaaggaccaaaaaaatgttggggaatctatacattataagggacttaacaactaaagggcaacatatagactttagatcctaatttgagcaaaatctaaaatcaattattaggcaatcagaaaaatttgaacacagactagatatttgaggatattaaggtactatattattgaagattccatggttatgttttttaaagagttcatgccttttagagatacatactaaagtatttgtaaataaatgacatgatctagaatcagtaattttgtgtttggggtgtgggggtggtgaaagggaagtagaaccgaaacaagattagtcctgagttaacaatggctgcaagctggatacatggaattcagcacacttttctccctcttactgattatgcttttgaaattttctcttgtaaaacatttagaaaacaaaaacaaaaaaaatgtgatttgtttctgtcttcaaaatctcattagaattttttcactggaggaagattttcccttgcttctgcataaaattttaactccataacttataagctcactctttattgttactttctaattgacaaataaaaattgtatatt

SEQ ID NO: 15256 - DNA, 1162 bp, Homo sapiens
gacaatacatcacctgtagttcaaatacgtttatttatatctttatgattttattctctctctctattctcatggcactttcataacattatggctaacctctaattacagattttgcttttgcctccctgaatgaattacaagcctttttaagatatgaaatatgcctacccgcagagcttggcacaaagtggagtcaatcttttaatgttttaaatatgcattttcagactcaaataattaagaagtttcattgatatccactggtcacatcataactgtctatagggcaataaaatctgtgttaaactcaattgcttttataagttttctaaattatttcttcactgtgacagcaaagatttaaataagatgaatgtaaaagagaaagcttattggactcaaacccacagatccacaccagagttctatttacctcatcttggtatcaataaaaacttatgtggaaggtaaatatattgttccccatccaccacataacactctccccaacacacacacacacacacacacacacacacacacacacacacactccttgtaccccttgcccttctcccagctcattgctccaggagagagaagagttcaaaaaataaagtaatcataaacttgaactctctccattctcttgttcccatttacaggtgaatctcttcctttaagccatttttgtctcctgtgaatacagccttatctccacctgtttcttagatcccatctcccctggcttattttttccattcattaccctctttgttccctttacttctcaacctgtgctatatacatgctgttctctctgttgagattgccttatttccatctaacattctctctcctgctattctgatttgtcattcacaactgatttcaagagtcaccttcaccaggaagtcttccttgaccaccatcattcctgcctgattagagggcttcctcatggtaatatgtgttctcaagttttcagtgtcaaggaatgccatcccagaagctcattctcagatgcacaacagccagaacagtctcaagcagcattctagagcttggaatttaagaactacgcattgcctataaagtgaaacataggctaatatagattaaattgaatattgaataaaaaatatatttatttatccac

SEQ ID NO: 15257 - DNA, 680 bp, Homo sapiens
actttcatgggctaaacagtacattcgagtgaaattctgaagaaacattttaaggaaaaacagtggaaaagtatattaatctggaatcagtgaagaaaccaagaccaacacctcttactcattattcctttacatgcagaatagaggcatttatgcaaattgaactgcaggtttttcagcatatacacaatgtcttgtgcaacagaaaaacatgttggggaaatattcctcagtggagagtcgttctcatgctgacggggagaacgaaagtgacaggggtttcctcataagttttgtatgaaatatctctacaaacctcaattagttctactctacactttcactatcatcaacactgagactatcctgtctcacctacaaatgtggaaactttacattgttcgatttttcagcagactttgttttattaaatttttattagtgttaagaatgctaaatttatgtttcaattttatttccaaatttctatcttgttatttgtacaacaaagtaataaggatggttgtcacaaaaacaaaactatgccttctcttttttttcaatcaccagtagtatttttgagaagacttgtgaacacttaaggaaatgactattaaagtcttatttttatttttttcaaggaaagatggattcaaataaattattctgtttttgctttt

SEQ ID NO: 15258 - DNA, 387 bp, Homo sapiens
acattcttaatatgtcatcttgtttgtctttatggcttatttgcctttatggttgtatctgaagaataatatgacagcatgaggaaacaaatcattggtgatttattcaccagtttttattaatacaagtcactttttaaaaaatttggatttttttatatataactagctgctattcaaatgtgagtctaccatttttaatttatggttcaactgtttgtgagactgaattcttgcaatgcataagatataaaagcaaatatgactcactcatttcttggggtcgtattcctgatttcagaagaggatcataactgaaacaacataagacaatataatcatgtgcttttaacatatttgagaataaaaaggactagcaaataaaac

SEQ ID NO: 15259 - DNA, 1869 bp, Homo sapiens
atgtgaagcaaacacagcatcgtgatcactgagccatcatttcctgggagaaagaccatgcatttaaagtattctccatcctcccaggaaccgaacatatcatttgtgaagaattattcagtgaatttgtccattgtaaatctgaagaaagttattcttggtactgttgctttgggagacagtctaggaatggagtctcccactgcaacttgtgaactccatcattcatccaggactgagatgcaaatgtcacagtaatgcaagcaaagtatcaaagaaaaacaatgaaattgacctagttcagatacagggtgctccttgtcaatactgagccatttatacctttgaaatattaaaatcactgtcaatatttttatttttaactctggattttgaattagattatttctgtatttggctatggatctgatttttaatttttttaaatttcagtcaattctgatgttactgagatgttttaccatccttacaatgtaaaccacatgaactacgtgacctctgcaagacaaagcggctttctaatagagagattagtaaatatgtgaagaaaaagacctgcatttggcaggaagatgtatgctttgaatgcaaaagaaatttagagtcaatttgctgaaaacattacatgctcagcttggttttggacaagcctgtccattgggcaggacctagctgttgtaaagaattggtcttaatgttgaatgtattttggttgctgatgtttataaactgagaggtcacaaagaatctatcactaaaaatttttacaaaactgccaaaaatataattcttagtggaagacaatactccctttaaagagagtttgccactcccctaaactccaggatttataaagcaaattactccaaggtttataaagcagattacctcttgcccttgggtgctatctagcagtaaaagataaatttgttgaatattggtaattaaaagactccacataagtccattaactgctttccacccagcttcaaagcttaaaaagagctcaggcttttccaggaagatccaggagggctaattagaaatcaacttgtggttgaccgcttgtttcttgttattaccaaaacaggaggggaaaaaattaactgctccaaatttaaccataaatcaattcatgtttaacgtttctcattaaaatccagtattatattatcatatctctctttacttcccagtataagatttttgaaaatcctgaataaaccagtatcgttactggcacctgaaattaatttgtgaatttgcaacagtaatcagagttaccattatttaatttgtatgctaaatgaggaggtacattgaaaccctccaaatctccagtctcatctatgtcatattttgccactgcctttcagaagtgatttagttgtggaaagataataaattgatttgttatggttacatatttagcgcacccagagaaaattaattatatttctacagagaaaatgaatttgggatactaaagtagtttaagtctcctttactgaatgtaagggggggatcgaaaagaaggtatttttccaatcacagtgttatgtagtattgttctatttttgtttacaaacatggaaaacagagtatttctggcagctgtggtacaaatgtgataatatattgctaaaatattttagatgttattatgctaatatagtaggggttgaagaaaacaaaatagcttattatagaattgcacatagttctgcccaaattatgtgaaatgcttatgcttgtgtatatgtataaattaatacagagtacgttaaaagcaaaaagatgtatatttgcatatttttctaaagaaatatattattcatcttttcattc

SEQ ID NO: 15260 - DNA, 2542 bp, Homo sapiens
tgcatgtaattgtgaatttggaatttgttccaacttaatggcttgcagtaccactttgataaaaatcagcatcaaaacattcctagtgttcaaatactgtggcattttccattgaaaattgctgaattttgcttattttataaatcacattagttaatacagtggtctttgaatactgtttcttaatgactcattttagcccctattttcaggggtagtgagagggtgtggctccactaatttccagtttgtttttctattgtttgccaactgtcagattaaatagcattataatattttgttgtaatcataaatgcaggtttatgtcccatgtaaggaaacttagtgggagagtaacagaatgcctggagagcctgactctgagctcttgaagtagtcagccagtttgtggtaaaatggtaattgaattttcctaactgcatcaactgtaatgatatactcccttctcctcctttatttagttaaaattgtaggctgatttctttttacctacaatcttcctaataatttttgatgataatgacccctcatttctttctgcccaaagacctcattctttaaataaaacttgttattttggcatatttctggtagggcccattgcacatgtgtatcagtatagttattatttcatattaactttatgaattctcttgacttggcttataatagttttatgatttttactacataggtagcacatttatcatttgtgacagaataatgtgaagttaagtaattactgaactttaaatggaaatagtatgcaagaaactcaggcattgaacttgaagataagagtattattgctttaatccagtgtatttgtttatggaaagaaaaacacaaaggcagactgttgagtaaaaaatattaaatattgttaaatattctgtattttggaatttatccatttataggcttcaaaagtaaatttttaaataaaatatattagtcgactgtgttacttctttaagtctcttttacattctcagtagaatctgagaaatggtcctgacaactcagattccaacccaaatcaagcaaagttaatatttgtattgttggaacttgattcaaacaaataagcaaatcttgactctatttcaaaaatctctttaattctttatattttgggttatgaatgtattttcttggattttactgagttttcaattctttttgttcatccctaataacctgtcagtttgggttctattttttctggcttcattcgtcattatttgggcctctacctgacaggttaaaaccaccggaactgagtgtggttaagggacttaaacagataagcctgacgtgtgatgggagaggcactggtttgagttagatgacctgggttcatatctctattccttaacttgctcactgcttttgtccttgatttcttcattacaccatctatttcataggatagttgtgagaagtagataatatgttgtaaagtgcctggtatgcgataatcactcaataaatgttggttctcactaccattaacagaaattctcagaaaaggtagttattttaaggacaagacaataggttgttttcaggcttcaaggtgatgaaatacctccaagtaggtattttcatcaggcaattggagagtgactcattcattcaagaagtttttaactgtactttgtgtcaagtatgtgacaccagagctcacgggagattcagaaatcattgtcaataattaaagttgtgaaaaacgggaagagcagaaggccaaagaaaatgacttaaaaatgaaaacaggagaatcaacaatggaagtagaggatatcaaagccttaggaaaaccaatgatggcaagagaaggatggatttcaggattgtttagctattttatgaaagtactttgtaaaatatttaaaaattttaatgtggacagtatcatcaagcagatagagatttcaggaaaagggattttgggtggtataaaagtgattctcatcactgcatggttcaacatttcttatgatttttatttctaagtactatttaaagtaggtctctacctggcattttgtcttgctccttcacatcactgtgtctgctgagattcctggcaggcagggaactcctctggacacactggcatgtcgctgcccaaccagggatccttctgccagcaccctctttttccatctaaaacaaatatgcaacattttaagcatcagaattctggagcagagaaccctagcacctgtccccatgaaaaactctggttctataaaatagttttcctaattttttaatgctcctaaatttcaagttagatatattgaatttacttctttgagagaatgttgaaaaagtgtttgataatttgggtttatgcagtcaataaataataaataatgtcatcattctatactgatgaataaactttgactaaatatttattgggaagcagagtagcattgtggctaagaccaaaggctatgaagttacactgcctgagcataaatcctggctccaccattcacactatgac

SEQ ID NO: 15261 - DNA, 275 bp, Homo sapiens
agaaagaaaactgactgaagcaatgaatttataatcagacaatatagcagttacatcacatttcttttctcttccaataatgcatgagcttttctggcatatgttatgcatgttggcagtattaagtgtataccaaataatacaacataactttcattttactaatgtatttttttgtacttaaagcatttttgacaatttgtaaaacattgatgactttatatttgttacaataaaagttgatctttaaaataaatattattaatgaagcctaa

SEQ ID NO: 15262 - DNA, 1268 bp, Homo sapiens
cagaccgatttgcacccatgccatagaaactgaggccattatttcaaccgcttgccatattccgaggacccagtgttcttagctgaacaatgaatgctgaccctaaatgtggacatcatgaagcatcaaagcactgtttaactgggagtgatatgatgtgtagggcttttttttgagaatacactatcaaatcagtcttggaatacttgaaaacctcatttaccataaaaatccttctcactaaaatggataaatcagttatgtcaattgtcagatattaaataacagtgtgtgaccccaaaagtacttaccctaaaacatgtgttgcctggaagcacatgtgtgtatcgctgccttgccatgtcttgttcagaagacacaggggagcagggttagctcacgtgtctttagaactccagtactcacccagggactccagttcacaggccagaaaacatatgcattatgaagttcccctctactccatgcacatagtaagtctgactatggcagtcagacttacttactcccattttcccttcgatatatgactttttctcagtaaatattaacctgaattattccaactccccttgtactcttgctttttcaattctcctgttgcaatgacacataggaaaatcttaaaattcttgggagtgttgtcacacctgaaaattatgagtctctatgatcttggcacaaattgtacatttgagtgtctttgacttggttaaaggaagtttgttcacttcgatgactggatacagaatgaatcccataattgacatgggcgaagctaaaagtgtccccaaagactacactgttgttgaggtggtggtagtgctggtgggtttttgtttaatatttaaacttcttgttgtggaggctgaaaagaaaaaaaataatagaaaggtaaacaaacaaataaatagaaaagatcaacaacccctttggctatctactgagacatgactaggaagaaaacatgactttatcattttgttatagaaactgatatataaaggttacacattttcatttatttgtttttctgatttgaaggtataaccttcatgatgaattacttcttcagggtgttaaggcagtgactttagaaacaaatttttttcttgtttttgttttgtttttgagaccgaatctcactctgttgcccaggctggagtgcagtggtgcgatcttggctcactgcaacttctacctccgaggttcaagagattcttgtgcctcagcctcccggatagctg

SEQ ID NO: 15263 - DNA, 99 bp, Homo sapiens
actctagatagtaaaaaaaaaaaaaaaaagtctacatattttgtaaaagtaaactgataattgtatgataagtggcactgtaagtaaatagcaaacacc

SEQ ID NO: 15264 - DNA, 467 bp, Homo sapiens
attgtacttttggcatgaaagtgcgataacttaacaattaattttctatgaattgctaattctgagggaatttaaccagcaacattgacccagaaatgtatggcatgtgtagttaattttattccagtaaggaacggcccttttagttcttagagcacttttaacaaaaaaggaaaatgaacaggttctttaaaatgccaagcaagggacagaaaagaaagctgctttcgaataaagtgaatacattttgcacaaagtaagcctcacctttgccttccaactgccagaacatggattccactgaaatagagtgaattatatttccttaaaatgtgagtgacctcacttctggcactgtgactactatggctgtttagaactactgataacgtattttgatgttttgtacttacatctttgtttaccattaaaaagttggagttatattaaagactaactaaaatccc

SEQ ID NO: 15265 - DNA, 2140 bp, Homo sapiens
agagggacactcaggacactttacgggatcaaagtgggtctacaccagtgctgcttcctgaatgtttgtgtgtgaacccttgtttcctccaaaacaaacgacagcaacgaaaactccttaatcagaacactgatccaatgaggaatggagcttgtttctgtgacccaggagaacttagtgcaagactacaggagttaacagatggccagctccttattttttaatgtagaataactcctgagtttatatcaaatcctgaagaaataagcctcagttttccatctgtttttgataagaataagaaagggagtgagtgtgaagatggtggttagcagtttcactaagactgatattttaggcctcttgttcacatcaaaagatattggtgtcagaataccagcattttcctgccatgcaaaggattaaaacttagtttacactatgtggttacaaatatatgtcaatgtacattttgaacatatttatgtgctatggaaggaaatgctggtgactaaaataaggtttactctgaaagaggaggaattttattcaaagcattcaaacattttattcaagtgtttcaaaattcaaagcattgtattcaaagttgcagtgaaggcatcaacttatgtaaaaactcagaaggaaggctcctctgataaaaacacagctcctttattatgctgcttttcttgttcactttacacactaagtaaacacttattgtcaggtgcctagtcttgagtgaattgttagatgtgcactgaactcgggatgttggggattggagagagagaattgccaaagtaacagcaaaaatatctcttactttgctttgtttataaataaattagtagattggaaaaactagtgttagggaaagaaatcacatgttcagagcctaattcagtaggaagggcttttctctaccctgaaatgaaggtaatccaaaggcatccattttctaggcttaaaagatatatttttgatatatttaattatattctctacactccagcattaatatgtctgtttaaaaattactaattctcaaatggctcaagaacattagaatttaagtaccttttagagtaattattttaagcaaatagcctggacgtaagagattctcatgccagcatgctttcatttgtcagttgttgtgactgagagataatgaatgacacctgaaatgcatatggtatttttgggagagttaaggtataatttgaaggttggcagaccagttgcgctgattactcttagagaagaagaaatggaaaaatgaaagaaggcaggaaggaaagaaaggatataggaagagagggaagcagaaggcaggcatttttctattttccccacaaattatttcaaaaaaaatctgtattttctgggatatgtcattggcaagaggaagaactggtgttttgaaagcagtatggattctttaaatgcctctcactcttacaagatagtaggctttgagataataaacttacccgtgtcaattaacatttaaactggcatatagaaaaaaaggaggatttttctgcattgtaaaataatcagtatggtttatatgttgaatttgacatttgtgtgtaatttcatggtggcctagtgttgtggtgcttctggtaatggtaatagaagctcaactatttttttgtggatttcagtttttatcatcagaagtcctagacagtgacatttcttaatggtgggagtccagctcatgcatttctgattatacaaaacagtttgcagtaggttatttgtcatttcagttttttactgaaatttgagctaaacatttttacatgtaaatacttgtatttaccaaagatttaaatcagttgattaattaattaactcaaatactgtgaactatctctaaaacactagaaaaaagaaatgttagtatctcaattacaccaactgtgcaaatgaactttgataaaatagaaataatctacattggcctttgtgaaatctggggaagagctttaggattctagtagatggatactgaatactcaggcccacttaaattattaatgtatacattgtgtttttgtctttatgctatgtacagagaaatgtgataattttttataataaatattttttatgatgataa

SEQ ID NO: 15266 - DNA, 970 bp, Homo sapiens
gaagatcagccctgggatagtgctgtctttttgtgggtactgcagtaaagaacatccctcctgggaatgaagcaatgcttcatcccttttacgtccatctcttgtttaaattcaagtccaggcttttttatcatgtgaaatcattcattttctgggtgttttcttaaccagatcattgtgaaattattcataattattatttggccctctgcccagaaacctttgtttgcatctgaaaattgatgggatttggtcaacactaacatgatttggggaaaggagcaagtcagaatagaaattagtactcccctccttgaactaggattgtagtcccaaagaggctactgtaaggcaatcatggtgctcagagcagtgtttcgtgtgtgttttaaactggtaggaaactaggtgcatatttataaaaataaaaaacactgggagaaatgaaaaaatatatatcaaatatattcagcctggcttcaaattgtaagcatgcacaaattctgtctctggattatattatgaagcttttatgtgaaacatgtttctttgtaatgaaaaccacattggagatgtttagtaatcatattgttactggtaccaagactactagggaaatgcctttgtactttagggaagtacttttggcattttactgtacagacagaaaaaactgagatgtagcccctctcctggaagtgctaattttgaaaaactgctcatatgatgtacatgtactgattactgcctattttaataaacactcttgaaaaatgcatgttgccctgttgctgcctgccctattctcctcatctccccatcattggtacccacttgcttttaaaatccactttatcttgaataatgtaagacaaatatgttctgacataagtatttaattcatgttgccttgcataatggtcagaggcgcatgaatttgtgaaggtggaaataaactatttgtaaagtg

SEQ ID NO: 15267 - DNA, 2233 bp, Homo sapiens
cagcatatcaatagcagagatggaagtctggtcatatggtgcccacatctattgaagtaaacatgctgataccagatatccctggctctctgtcttcaaggcacatggtagaactatacttcctagctttctgtgtggctgggtgggtcacatgacaagttcagacagatgaattatgattagaagcatttaattgttaatacatattctagtgctctttccctctgtcatcacaactgacaatgtttcagacagtgacttctccaacaggctggttccagagtgaaaatagagcccagtagagtctgtagctgatgcaatatggacatgtagggtgagtgagaaaatgcttttgttgggttaagcatctgaggtttgatggtttgttgctactgcagcacaaccttacccatcctaacaaatatgactattattgactaacctgacaacagaagagtctttccacttctgctgtgatgaggaacagagttttttccctgttatatcttaatattagatagcagcagcctctggaaatagttctttctctaccacttcttacccatgtggcataaagccagctactaaacctcttcacttttcagctttcccttttaaaagtgggagtaaataagacctttctcatggagttattgatcaaatgaaataattaaataacgagtatttaaattttaaatttaaatgaaaattcaaatgacataatgcctatgaagtacttatttagtccataatatcctcagtaaatggtagttagccttactaacacaaaggaaatggacaaagccatgccattttccaaagtagtttctaggaccatattatctctaaaaatcccaactttctgctgtaaatttgaactaatccagaacaggctaatccattgcaatggcctattcatccttcttcttagagtttagctatcagtcatcttgttgctgagaacaaagccagcctagttgtttgtaagcaagcctctagagagacagaaactgtcttgtatttctttgaatatcctctactgcctctaacactgtgcctcggctatatttctggatctttatttaattgttttgaatgcttcttatgtttaatttctgccatatccattaggaaaacaacgtaatccttcctccaacaccgatggtataagcctccatgaccgggaaacatttgcccccaagtttaaagaatttagttctgtaaggcttgttgacccatctgacaggaattcctgtaccaagtggtcagtcagtgaagatctctttccactggtaactttatcaagaaagtaagatacaagactgtatgtaaagtatattatcctatgtgaaatcaagggacagaaaataactggaaggaaatattccaaaatgttagcagtagtttctcccggagaatgtgatgtatacatttggatgggtgatatataaagtacttttcatagatctgggcaagagatattttagagggctccacataccacaatcacccacaaataaatgtattaaagagcacacagatgcctttatcactcaggatgtggcactcagagctggcccagcatagtctataacacttaacatcactctcatgaccacactgctcaggtcctagggaagtgtgcctctgtatctcttccctgtatccttaaaagaaaagatgacctaatttgaaagttgataaaaatcagggattatgatgatgttgcttcagaattcttggaggacgtaagagaaaaatagtgctgggttatgagaagaacaaaacttaccaaattcctccctgaagataacataaatgcaatagattcttttacaacaaagtgtcatttctcaataatgccaagaatcctttttcatgcttctcttcttgttcacattcctggttcccatgctactcaattaacataatattcagaaaagttgcagatggtgatttaggaacatgttgtaatattaacatttcatattacccttaaatttgcatgcatgcatcatatgtgtatcatggtaccaattctttatattggtaactaggtggatatagaacatttacaatgtgaatagtgttatctctataaaaacaagatttaattaaaatgttcatatatgaaatgaaattttggcatatattaattataacttggattttaccttttaaagttaatagatcattttgaatattttaaaagactttaataaacatataaaat

SEQ ID NO: 15268 - DNA, 155 bp, Homo sapiens
catccagaagaagtgttgaagtaacctaaacttgacctgcttaatacattctagggcagagaacccaggatgggacactaaaaaaatgtgtttatttcattatctgcttggatttatttgtgtttttgtaacacaaaaaataaatgttttgatat

SEQ ID NO: 15269 - DNA, 344 bp, Homo sapiens
atgggctgctctctcttactctcttttttgggactactgtgttttgctgttctagaaaatcataaagaaaggaattcatatggggaagttcggaaaactgaaaaagattcatgtgtaaagcttttttttgcatgtaagttattgcatttcaaaagaccccccctttttttacagaggactttttttgcgcaactgtggacactttcaatggtgccttgaaatctatgacctcaacttttcaaaagacttttttcaatgttattttagccatgtaaataagtgtagatagaggaattaaactgtatattctggataaataaaattatttcgaccatgaaaagcgg

SEQ ID NO: 15270 - DNA, 129 bp, Homo sapiens
gtggtctttatgctgtaatgtgaaagcaaatatttcttcgtgttggatggggactgtgggtagataggggaacaatgagagtcaactcaggctaacttgggtgtgaaaaaaataaaagtcctaaatcta

SEQ ID NO: 15271 - DNA, 257 bp, Homo sapiens
aagccccagtctctggagaaaagagagaaagggataatcacctggaaggattccaaagccctgggaatggggaaccccacatcccatccctacctaatttgttaattttccctgaaaaccttctgcagtttgctcattgttttagcgaggtcacgagagagtcactcatgactttcttggtggtgggtatatgccctgacaacttctgtaagccccccttcccccaacaggcaatgcctctaaaaatcacccaataa

SEQ ID NO: 15272 - DNA, 642 bp, Homo sapiens
ggcccccccacacacctacatgcagggacggtgcccagtttgggggatcaaggctgagccattcttgtgctggagtgtgcaccgtgggagcaatgtggcccaggtggactcaggagggaacctggccccaaggctgcggccacttcagaggcactggctgagacggccctgaaatgtgaagctccgcggacactcccacacgtgtccccgtctgcgaggagtcccggggtgtggggcatggggtggggctgcacctcccagaggcccctcccacccttcccttcccctctcccttctgcctttccaggactagaaccgggaacctggagccctccgggaacgccggccctggggcagcagagccaggatggagccctcctgagctggcatctcagacagcacccgggcccgccacccctcaccaagagagatggccatggggctcagggcctctttaccatgtgcagtgaccatttctcagagcaggacttgcaaagaggctttaatttcaaaagtgaaggaaggaggccaggcgccgtggctcacgcctgtaatcccagcactttgggaggctgaggtgggcagatcacctaggtcaagagtttcaaaccagacgggccaacatggtgaaaccccatctct

SEQ ID NO: 15273 - DNA, 277 bp, Homo sapiens
gaggacagccaaggactctcccgggcctctccggttctcccttgcggaatgatgggcgcatcctgtctgccacgtgctgacggtcgggaagcttcagtggagaggcctaactctaatgtcgcctgcttaagcaaatcatgcttctctgtttcacgtagttgggttgacaagtttctgcctttaagataaatgagtaatagtctaatgaccagctcagccatttaaaatattttcttcctattctgttcaagaaacagtaaacttggtttcaatcttt

SEQ ID NO: 15274 - DNA, 1567 bp, Homo sapiens
gcactccccctccccaccccatctcagtgttaactgactgctgacttggagtttccagcagggtggtgtgcaccactgaccaggaggggttcatttgcgtggggctgttggcctggatcatccatccatctgtacagttcagccactgccacaagcccctccctctctgtcacccctgaccccagccattcacccatctgtacagtccagccactgacataagccccactcggttaccacccccttgaccccctacctttgaagaggcttcgtgcaggactttgatgcttggggtgttccgtgttgactcccaggtgggcctggctgcccactgcccattcctctcatattggcacatctgctgtccattgggggttctcagtttcctcccccagacagccctacctgtgccagagagctagaaagaaggtcataaagggttaaaaatccataactaaaggttgtacacatagatgggcacactcacagagagaagtgtgcatgtacacacaccacacacacacacacacacacacacacacacacacacagaaatataaacacatgcgtcacatgggcatttcagatgatcagctctgtatctggttaagtcggttgctgggatgcaccctgcactagagctgaaaggaaatttgacctccaagcagccctgacaggttctgggcccgggccctccctttgtgctttgtctctgcagttcttgcgccctttataaggccatcctagtccctgctggctggcagggggctggatggggggcaggactaatactgagtgattgcagagtgctttataaatatcaccttattttatcgaaacccatctgtgaaactttcactgaggaaaaggccttgcagcggtagaagaggttgagtcaaggccgggcgcggtggctcacgcctgtaatcccagcactttgggaggccgaggcgggtggatcacgagatcaggagatcgagaccaccctggctaacacggtgaaaccccgtctctactaaaaaaatacaaaaagttagccgggcgtggtggtgggtgcctgtagtcccagctactcgggaggctgaggcaggagaatggtgcgaacccgggaggcggagcttgcagtgagcccagatggcgccactgcactccagcctgagtgacagagcgagactctgtctccaaaaaaaaaaaaagaagaggttgagtcagcagggacttgggttccctgtgtgtgaggggggcattcttgcctgccagctgctcccgaggtggccttgagaaggaagaagcaggatgacagagcctgagcagcggaaccagcctgcaccctcccttctggcccagcgacctgggctgtggctgagacaataatgaggccagaagtagccggagcctgtcaggaagggcaggggaggactgtggggtctgggctctgtcgctgtaaccatctgctcccaggctgtgtgcagaaaatggcatttacactattgtgcagctcattctcatgaaatactgccattgttgctaaataaagcttgtgtgctctgaatatagccaagcatag

SEQ ID NO: 15275 - DNA, 3143 bp, Homo sapiens
aaagcaaccaaaggcaacagagtctagctcatggccaccagaccaaaagcatccagcttctgtgcacctcctgcaaagctggcagaggccctggaattccagatcacctgaggggaaagggttgtctctctcctttctgttgggggagggggatgggggacttttgttggtggctcccacccatatatccctcctttaccatagtactcccacccacttccatcacccatccaataaaatgcagccaggtttagcctttggctttggtcacacaggatattctgctgtgttgcaacccatgtggtgataaggctcacagccctgagctctttacgggagcatcaactcacagttaggggactgggcgtggctgattgagggtttggaactggtggctatgccagctattccatctcaaaacagccttgaggccccttttcaatttgagcagctgctagatatcttatcagagctcagattccagatttcacatcccagcagccggttctgggtagcagatcaatttccaactggaaaataactatataatgtatgcttattggaattctgccacagcaggaagcttgagtcaaaatgtgtttcccctttgaaaggagaaggaattggagcagcttttcctggaggcccaggatatttcttttctgggtatcttggctgaaaattttgttttacatagagaaaaacgatcttttaagggtcccttttgctgcattatctgtccagtttgacttttttttcagtgaaaacaccatgtcatggagtgtaggaaagagcagaccaaaatcagccctagagccaaccagtcagtcccaaagctgtgacctctgtgccactgttgtccatagaagagcatcgactgtgtcacttaaaatattagtaaaccatgatgcagcaactgctaagagctaaactaacaaaattgtgtcatcatagctgctggcttggtgtgaactcgcttaaaagcaatggtgaaaggataacctcgatgatgtaaatccacccaaagatactgttctacaaaaagtagggtgtggacgcaaacctgtgacagcagagggggacgacttcacactcactgcctcatgtggcccctttcccagtggcagctggtgacactaacgattgctactcggttcacttgcccagatgtcttcatatgatgagcaaggccagaagcaaggctagattcgaagtttctgacaccatttccagtttgcacaaaagtcagtattttatcttaaagtggcttgatttccaatagctgaacttgggcagaaaacagcaggccaatgttcctatgtggtttctttgttgttgtttttgtttggggtgggggcaagtacagggtaattcatgagcaagacatttcactgctgtcgaagtctctgggatcccgctgtgggtctgagatggcctgggaaggaccttgtggacaatggttttatctgttctttttgtcactgttaatttctgggctgctgaggttctagaatagaagggctgccaaatgaggtttgctgcaggaggaaagtttaatcccccattccaaaagtccaggccaaatggtgggcttagcctctttgaaaagttctgccttgcccccacaggtgggcacatcctgtgtctcattcaccatgatgcttcctgagggtgttctagaagcccgttccccagtggctgtatccagcctttccttgcatcatcttcctcttgaaggtgaggaagtgaaaactacagacctcccccggacagcccactctctatcacgagcctaacccgcgggaggcggaagagacatccattcgagaactgaagcggcctccgggatgaggtcagaggccccacctgattttcctggtggtggtatccaaaatcttcagtaactaggaaggaaaccagggtctcatggtttaaaagactttgaagcaggaatgttgcatttgacgcctttaaaactacctttttgctgttgggaggagtcgggggcgagccttagcagctgcaccgccatccccatgctggttggtgctgccctgcctctcgtgccgggtgttgcttcagcccagagccagagggctgggtcccgggtcctccacaggtgaccccggtggacacacgcgttcccatcctggcctccgtctctgcttttccacttctacctgcgtgtgggtttgccgccttgtcatcggttgtgtgagtgtcgcagacctttccagagctccggttcactctttccaaacaggcctccctgtcggtggcactgcactcctagaaccttcagtttctacgatggtttgtttggtccttttgaaccaccccaaagaactcaacatggcaaagcaaatggtaaaagcttcccgactgttctactttgggtccgcgcgaagcccactcacgtgtgatctgtgttgcccctctcggtggtcccaggcgatccagccatgccccctgcccctctgcccagatgcttcaggggcccggcttttcaggcttgccctcaccagcggccgtcagccgacactcagggatgtagctaacaccactccgccagtgctttcagtaggaagagctgaggctgcctgggaggcccggggcgaccggaaaagggctctctcaagttctgaaaagagaatctgccaccagatcgaatttcgacccctgagcttgttcggacgtatggtccaaattcagattaaggtggtcacccaacccgagatgtcaggaaaggccttctgcagagaaaatgtccccccacccgccatctgcagccaggtgtgtgccacacggcagccttcccgaaacatagtatggattttaaaaatgtgtttatttttgtttctcaaccactttataacgtattttttaatttattttgtaatgtcttgttttgaagtattgctgctatccttgttatccttcccactgtttttatcactgatttattttgtgaaagttgtacactaatgttctatgtcaaaatcaaaagtatttaatgaaatactagttctatttaatgtggttatggaaccagctggaaacacaaaacaaacagtgattgtacagcaggctgggcccaggaggtcaggttcattttgttacatatgcaataaactcacgacttt

SEQ ID NO: 15276 - DNA, 1716 bp, Homo sapiens
ctgcgacccgtgggaggagatgccggggacctgggccgcgctgccaggacctctgctgtgtctcgcccaccctgtgccctggcgccgctgcaacagcccctcatggccaggagccccccatggcctggggcctcctcttcatcttggcacagaaattgtttgggggatggggggggggactgggggaggggtagctgctatctttgagacagaaagatgcaggacagcatttcatatgtaaccatttgaatgtttttgctgtttttagaattcagagcccttgctggggggtgcctgggagatggggtaagaagagctttcatttgtctggtagatagatagcatgtaagggggtggttgtcccaggaggcagctgctgacaggtttgctacacacagccccggactgtgttgcctgggtgctcattcagagaggggctatcatctgggagcctgtgcccctgggtcctcgagggtcatggcttgtccctggtcagtcctgtctgactgacctcagggcctcacctctctgcccttccctgcccggttcctactcacctggctagggccagtgcccattttcagccctacccattgatcatttcaagaaacctctgtttactgtgtggcacccaggcaaaacatgctccacaaattcaacttgtatatttggcagattaaacttgacattatcgtaatctttgttttggcaatccatcctttggcttccgtgctcgagccgtttttacccagctgggtacggtgccacgttcaggcacgtgcacccggcaaggttcagggcacatacctacctggggcatgacatctgtcaggtggcaccgagcaggatgcggggatggaccctagataccacagcctgccccctcccctcctttagccaagtcaggatcttaggcctcagcaggcagggacccttccaggccacagtaggctgaagcagcaccaggatcctggcctggcctggcctgtaggtgtcccctggtggttataattctgtaactctaggggagaaggggaatagcactagcattggatgtcgccaaggcccacattttcctgagagaagccacaaaagatgtgcaaatgcccttcagcacaggacctggtgacatgacataaactccaagacagaacctcagtttacagcacacgaaaaaaatatcttgccaacattgtaatgacaaaataaattcccgtgaagttccacaaccaggccgggcatggtggctcatgcctgtaatcccagcactttgggaggtgaggtgggtggatcatctgaggtcaggagttcaagaccagcctggccaacatggagaaactccgtctctactaaaaatacaaaaattaaccaggcttggtggtgtatgcctgtaatcccagctacttgggaggctgaggcaggagaatcgcttgatcccaggaaggcagaggtggcagtgagctgagaacgcacaactgcactccagcctgggtgacgagcaaaactccatctcaaaacaaaagttccacaaccagcctggagtgtgtagcccctttgtccaggaatttgactagtcaatcagtgacacctggtactggcagttttgggagtggcagcccaggatggacagcagtggggagggaaccatttggcataaggccgttgggcttcaggatcaattttgttggcaagcagtaaaaataagctatctaccta

SEQ ID NO: 15277 - DNA, 836 bp, Homo sapiens
tgggagcacagctggaacaatgtgctcggcccccagtgctctgtgggagccccaggacaagtgagctggtgtcacctcctgcctgggggaagagccaggccctgaggaacagccgcagcgtgtcacaggtgttggtgaggacacacactaggcccaaggtgcctgtgctcccagcaggtccaagtgcagctccagccacctttgcgtgtcaccttcacgggacttccagctccagctacctttgtgtgtcacctcacacaccacaagggggctggggcatctggtccctggggcctgggccgccccgccgggttccataggccgatgctctgaaagaagagacgtggggctcgagagatttaaagattttatttttacaaatcacagctgatagacagcgaagccttccccatagagaccgtgctccaactcgggcctggggcactgctcgctgctcccaggaagggggtggcgtgacaggcaggaacctgcgaagtccagagtccagggtggagcgcgccagcctcagccagagcagccacgacagccacagtgtgtgcactcgatgatgcggccctgcaacggaggaggacagtgagacgatgccactgcgccacgctcgcccctgcacactcacatatgtggcaaccctcccacgaaggacctgccaccatgccatatagggacacacctcagaaacccttccttgacagctctggacagggaaaatttggctccctcatgaaggtagaaccagctgctgttgacaccgaggttacatctgtatgtctatttataatatgttctgcaaatccaacacacgtttgccaatcaag

SEQ ID NO: 15278 - DNA, 166 bp, Homo sapiens
agaggacacactctgcacccccccaccccacgaccttggcccgagcccctccgtgaggaacacaatctcaatcgttgctgaatcctttcatatcctaataggaattaacctccaaataaaacatgactggtacgtgtgctgattgcctgcctgtctgccgtagcca

SEQ ID NO: 15279 - DNA, 297 bp, Homo sapiens
tcccagcactttgggaggccaaggcaggcagatcatttgagatcaggagtttgaaaccagcctggccaacatggtaaaatcctgtctctactaaaaatacaaaaatgagccgggcatggtggtgcatgcctgtaagcccagctattcgggaggctgaggtaggagaatcacttgaacccaggaggcggaagttgcagtgagctgagatcatgccactgcactccagcctgggcaacagagcgagactccatctcaaaaaagaaataaagtgctgtcattttgatatgtttctatgtg

SEQ ID NO: 15280 - DNA, 385 bp, Homo sapiens
atacaaactttacaaaattctgtgtatagccaggtgtggtggcttacgcctgtaatcccagcagtgggagaccgaggtgggcagatcacttgagttcaagaccagcctggccaacatggtgaaaccccatctctactaaaaatagaaaccttagccaggcgtggtggcacatgcctgcagtcccagttacttgggtgcctgaggcaggagaatctcttaaaccaggaaggcagagattgcagtgagctgagataatcccactgcattccagcctgggcaacagcgtgagacttcatctcaaaaaaaaaaaattgtatttgtacttttaaagggattttgcagtatgttgtagttaaacgttaataaaattatatttgtaattagg

SEQ ID NO: 15281 - DNA, 110 bp, Homo sapiens
gttattctaaggatttctactttggtcttcaagaaagctgtgccccagaacaccagagatttcaacttagtcaataaaaccttgaaataaagatgggcttaatctaatgt

SEQ ID NO: 15282 - DNA, 462 bp, Homo sapiens
tttccctaaggacttctggtttgctcttcaagaaagctgtgccccagaacaccagagacctcaaattactttacaaatagaaccctgaaatgaagacgggcttcatccaatgtgctgcataaataatcggggattctgtacgtgcattgtgctctctcatggtctgtatagagtgttatacttggtaatatagaggagatgaccaaatcagtgctggggaagtagatttggcttctctgcttctcataggactatctccaccacccccagttagcaccattaactcctcctgagctctgataacataattaacatttctcaataatttcaaccacaatcattaataaaaataggaattattttgatggctctaacagtgacatttatatcatgtgttatatctgtagtattctatagtaagctttatattaagcaaatcaataaaaacctctttacaaaagt

SEQ ID NO: 15283 - DNA, 1152 bp, Homo sapiens
attttcctaaggacttctgctttgctcttcaagaaatctgtgcctgagaacaccagagacctcaaattactttgtgaatagaactctgaaatgaagatgggcttcatccaatggactgcataaataaccggggattctgtacatgcattgagctctctcattgtctgtgtagagtgttatacttgggaatataaaggaggtgaccaaatcagtgtgaggaggtagatttggctcctctgcttctcacgggactatttccaccacccccagttagcaccattaactcctcctgagctctgataagagaatcaacatttctcaataatttcctccacaaattattaatgaaaataagaattattttgatggctctaacaatgacatttatatcacatgttttctctggagtattctataagttttatgttaaatcaataaagaccactttacaaaagtattatcagatgctttcctgcacattaaggagaaatctatagaactgaatgagaaccaacaagtaaatatttttggtcattgtaatcactgttggcgtggggcctttgtcagaactagaatttgattattaacataggtgaaagttaatccactgtgactttgcccattgtttagaaagaatattcatagtttaattatgccttttttgatcaggcacagtggctcacgcctgtaatcctagcagtttgggaggctgagccgggtggatcgcctgaggtcaggagttcaagacaagcctggcctacatggttgaaaccccatctctactaaaaatacacaaattagctaggcatggtggactcgcctgtaatctcactacacaggaggctgaggcaggagaatcacttgaacctgggaggcggatgttgaagtgagctgagattgcaccactgcactccagtctgggtgagagtgagactcagtcttaaaaaaatatgcctttttgaagcacgtacattttgtaacaaagaactgaagctcttattatattattagttttgatttaatgttttcagcccatctcctttcatatttctgggagacagaaaacatgtttccctacacctcttgcattccatcctcaacacccaactgtctcgatgcaatgaacacttaataaaaaacagtcgattggtc

SEQ ID NO: 15284 - DNA, 151 bp, Homo sapiens
ttccagcctgcttgcaaccctggggtcctcttgttccctgctggcctgccccttgggaaggggcagtgatgcctttgaggggaaggaggagcccctctttctcccatgctgcacttactccttttgctaataaaagtgtttgtagattgtc

SEQ ID NO: 15285 - DNA, 1749 bp, Homo sapiens
ggcttttcttcccctgaccaaaactccttccctgtagtccagctgagggacacacatccctgggccctcttctgcccttcatgtctctatcctggatggtccatcttctgggtctccctaacggtaccgtttggtatctgccctttgtgtgcttcacaagaggcagtcccatgggaggtgggtctggccaatggagatgggacaggaaattttccaagacgcttttgggaaatctttttgtagcttttaaagagatgtgcggggaagacatatggatgttagcagccatattggaactgagaacacaggaatggtggaaaggtagaagaaacagagtttttgttgccgttgtgaaattgttgaaatttccttcatgccaagcttcttgttatatgagataattacgcccttattgtataagacaattttagttgtatttggttacttgcagcctgaagtaccgtaactgcactaaagggacgtagtgtgaacatcccgcagtataggcttaagtcacttttgtgaaatttgacaaaggcatagaatctttttctatccagtcaggcattgcctattctttccagtaactactgattcccccacttttctgtcttagaaaattgtgggaatcccccctcactctgcctatgttgcactctctctcttcccaaccataactctgccctcagctattaactgtgctgtgtatttatcaagttggtatgttgtatgtacagtgttattcatgtcatcatgagaatgttgaacgcttgttaaatatcttttgctagcctcttcatatgctgttgcatatgactctcatcacaactcagtgagatggaaagtcaaatcctatttgtacaaatgagaaaactgaactctttagagtaactagctcagtattggccagctggtaaatggcagtgttgggattaaaatccagttcttatctactctccctttattcagaagcatttattggatgttgatctttgtttcaggttttgattttgttacttttttatactgtgtatattttcctcagtctacccttctgctctagattgtctggactcaggagattgtggcagttactggatagttatttttaagataatgattgcttttctctgtttatataagtcatgtgtacttattgtagaaagtttgtaagatgcaaaaagtataaaaattaaagttatgcactactaacatttcaatatattttctcccagattttcagtaaagactttcaggcagtgatttaacgaggattttattttaacttatattttagtttaaggggaacacgtgcaggtttgttctatagatcaattacatgtcacaggggtttggtgtacatattatttcattacccaggtaataagcatagtacccaatagatacttttttgataccccaccctcctccaccctctaccctcaagtagtccctggtgtctgttgttcccttttttgtgtccatgggtactcaatgtttagctctcccttatacgtgagaacatgtgatgtttggttttctgttcatgtgttggtttgcttagggtaatggcctccagctccatccatgttgctgcaaagacatgatctcattctttttttatggctgcatagtattccatggtgtatatgtactatgttttctttatccagtctactgttgatgggcatttaggttgattccatgtctttgctattgtgaatagtgctgcaatgaatatatacatgc

SEQ ID NO: 15286 - DNA, 274 bp, Homo sapiens
gaagcaagggttggaggcaatgtgggatctcagacccagtagctgcccttcctgcctgatgtgggagctgaaccacagaaatcacagtcaatggatccacaaggcctgaggagcagtgtggggggacagacaggaggtggatttggagaccgaagactgggatgcctgtcttgagtagacttggacccaaaaaatcatctcaccttgagcccacccccaccccattgtctaatctgtagaagctaataaataatcatccctccttgcctagcat

SEQ ID NO: 15287 - DNA, 758 bp, Homo sapiens
ggacctcctgcctgccatgttgctgtggagctcgcactcctcaggcatcccctgatgttgagtgatacaaactctatcaccggaatcgatgctgctgcaatgacaagacttctttctggttttcagattctaaagtttaaaacaacgacaacaacaggagcgcttgaaagttacggtgcttctccctctccagtgtggactcgctgatgtttggaaagattggacttgctacagaaggtctttccacagtgatgacaccagtagggcttttccccggtgtggattctgtggtgtttattgaagttggagctgtggttgaaggctttcccacactccttacacttatatggcttctctccggtgtggagtctctggtgggagctgaggcccgcatgctgactgaagctcttcccacattcgttacactgataaggcttctccccagtgtggatccgatagtgacgaatgaggctgcctttcccgctgaaagccttgccacaatctttgcactgatatggcgcctcttctgtgtgcattctctgatgtttaagaaggtctgagctctgcccaaaagcttttccacacttacagtcatagggccggtccaccaagtgtgttctgtagtggagggtgaggtttgagctgtggctgaaagctttcccacacttggtgcacacgtaaggtttctccccagtgtgtgttctcctgtgtttggtgagatttgagctattactaaaggctttgccacattcagcaca

SEQ ID NO: 15288 - DNA, 1172 bp, Homo sapiens
aagagccacacacccattttcctcactttccctgagtctcaagagctcttgccttaccctataaatctcaacagcttaggatgtgtccctttcaactcagacttttcattttagagaatggggcagatggggcaaatcgttgaattttcccagaaatcacaccagccttagaaagcgtcaaggcaagtggatggcgtgctgggaatagaaagcagctctgggaccagttaccccatttaggaaaggagtttgcactaaactgtttttctcacagcagaggaacctttccaaggtggggatggaagcacagtcgggacagaattcgatggattcctttagttggagtccgcgtagtcagcacagacagcagtggaaaggacgctctgggtcctgttatttgctagggagggtaaagggagactatttcaaagctactgttcctagtccagctttaagtttcggtaagaaacatgctgttttgtttcatgatttcgttaattatggaaatttggcattgagggattattttattgagggtagaagagattccagaatcatcatctgtgatgatggtgtcctttagggctcttggagcagccagaccatgtttccaagagaaacctggtgatattgccagcagaccccctgccatcccccccagttgtcctggggctgaatgggcaaatctgtccaaacagctagtaaccggctgtgagggagagggtcagaagcacttagcgttggcctctgattgctgtcctctcttgtcctcttcccactccaatgatgaaaatgattttctctaaatgcctgggtaaggatgctttcaaggagctcacttggcctgcttgccctgccctctcacctctgacacccagccccaggagccagaccactcctgcctccacctctgactcttcagcagctgaagattaatgcagagaaagagcaaagcccaaaagggagaaaaaaaaaacaaaaaaacaaaaaaacgaagcccagagaaggcaggctgtgcctgagcctggtagcagagctcgttgctgggtgaggatggcactccccgagttttcccaaccgacgggatgaccttccattgtgttttcccaaccctgctcatcctgtagcataaatgaagtgcactattaaacagaatagtttttcagaagaga

SEQ ID NO: 15289 - DNA, 175 bp, Homo sapiens
tgctccacctgccagcccccggattcccacacatgcagacatgtacacacgtgcacgtacacacatgcatgctcgctaagcggaaggaagttgtagattgcttccttcatgtcactttctttttagatattgtacagccagtttctcagaataaaagtttggtttgtaagttctg

SEQ ID NO: 15290 - DNA, 589 bp, Homo sapiens
caccgtgccagctctgttccctcttacactccagagacccaacgcccccagaggggatccctgctcccgggctgtgcctcccctgggatgcctcccagacgggggtgaagaggcctggcagagctgcctgtcttgtgtctgctgatgagggatgggggaagaagctgtgaagtgggcgggcatggctgggactaagccaccagtattccccgagttcctgtggggggggctggccccacccctaggccagggcaagggttcccagagctcccttgtccccggccctttaccctggttctgagtttacaaagtctcttcctcattcccgttgagttctttcccacctctgacattccctccctccctcccgcagggctgagattagagggtggtgatggctaagggcccctgacagtgaccttcctgtctcaggggttggggacagggccaggtagcctcctgccccttatgtttacgtttgcagcctgaagcactttaatttttttttttttggtctgttcctgtaacttattttccaactattgcttccaactgaaataagactattaaatgcctgttcaggagggag

SEQ ID NO: 15291 - DNA, 686 bp, Homo sapiens
acatcagactacagatttaggtggaagagcagccatgtttgaagggcacatgtgatgagtggggggcagcaagatgccatttctgcatctcccagaagggatgagtctttgtcccgatgcaagccccctcttcgctgggctcccagcagtgcttccctcctccaccctccactcattttgttctttccccccaactttttttttttttgaaacggagtcttgctctgtcccccaggctggagtgcagtggcatgatctcggctcactgcaacctctgcctcccaggttcaagcgattctcctgcctcagcctccagagtagctaggattacagatacgtgccaccatacccggctaatttttatatttttagagacagggattcaacatgttggttaggctggtcttgaactcctcacctcaggtgatccacatgactctgcctcccaaagtgctgccattacaggcgtgagccactaggcctgacctccccttcccctttcctgccccaaggcagatccacatcaccgaagctccctagaggggcaaaagatggagtgagccacaggaagtttggggcgtggtgagttggaatgatacgtccatttctctatgaaatatttgctactagactgttcatttctctctgacatgtttgttgaatgaataaataatttgaaacttcta

SEQ ID NO: 15292 - DNA, 623 bp, Homo sapiens
cgggggaggggtgccctagcatcagaagggttcatggccctttcccctcctcccccctcagctgggcctggggaggagtcgaagggggctgcagagagggtagagaagggactttgcaggtgaatggctggggccccaaatccaggagattttcatcagaggtgggtgggtgttcacaatatttattttttcatttggtaatgggaggggggcctgggggtatttatttaggagggagtgtggtttccttagaaggtatagtctctagccctctaaggctggggctggtgatcagccccaacagagaaaatgaggagtttagagttgcagctggggaaggggtttgaaggaagttggaagtggggaggggtgggggcatctggtctcagaaatggaccagctggatgcagggcaggggactgagggtgcttgagtaggatgtgagacttcatgggcctgggttctgttgagttttttcagtatcaatttcttaaaccaaattttaaaaaaaacaaggtgggggggtgctcatctcgtgacctctgccacccacatccttcacaaactccatgtttcagtgtttgagtccatgtttattctgcaaataaatggtaatgtattgg

SEQ ID NO: 15293 - DNA, 533 bp, Homo sapiens
atcctgtaccctctttggtctcatgtcctacaatctgcattctggccataatggtcttctctgctgttccttgaacattccaggaacattccccccatcccctcgtggcctcaggactggctgcttcctttggtatgctattctgatacacactaagcaccctccctcacctgttataaaaaattcgctgggaggccaataggctgaaatggctcctgcactttgggttcctaagtcagcaaactgaaactcaactcagagtgaaagtgttgtgtgtaacctaggagcaggaaacttcagcttaaccagtcagaaactaccgactaacctctaacaagagatttatggtcagttaacctctaaatatgaactttccactctaaccaatcaaatagtttctttgtcttgctcccagagacaccttgtaagtgtcccctctggtttcctcggtggtggcgccctgaactgctggcggtctgccactgcctgattgataaaattgctgaatgctcaaataaacctgttaaaattgt

SEQ ID NO: 15294 - DNA, 142 bp, Homo sapiens
ctggtgctcctctgctccctctttttctcccttctctggggcgcaggagggagaagttgctaagtgctgggtctgttcattggctatgaggttcaaatgtgtgtggtgcagtttctgtgttaataaagcaggttacagtcga

SEQ ID NO: 15295 - DNA, 71 bp, Homo sapiens
accccaaagatccctggagggctagttcgtatttttgtgttaaactatttgttagaataaagtaattttgc

SEQ ID NO: 15296 - DNA, 137 bp, Homo sapiens
ggggaaccccagacccttagagagtcctgacctcactcttacctggggtcccatatcagccccttcattccatgtattccagttgtaaaacaagtatcaaaatattgggaaataaatatcagatagttctgagtcag

SEQ ID NO: 15297 - DNA, 439 bp, Homo sapiens
gcctcccttcccttacaatgtgcctttggggctgcccggccttgcgtcagccgcctgccccctcttcctatgcagctttaatgtccccgtgtccccggggtgggagttcaaggctcagtaatggcctggtcccccggcccctgccccatctcctcatcatccccagccttgatggaggagggagggcttcaggacggggcgtcagagggagccccctctgggagggaaccaacccccaccctccctcctgggaccccccagcagtagacggcttgggggagtcggaggctccccggcagacaccccacccccatcttgttcccttgaggtgcctcctctcctctgcccaggggagggagtgtggacagtatctggaagttctgggattcaggttgttattaaaataataataataattaaaaactctgaagaaacttga

SEQ ID NO: 15298 - DNA, 1095 bp, Homo sapiens
gccccaaaatcggccctccctcacccctttcccttcctctctatttataaggtccctgctccacccgaccccacctgcggtgccttcagccccaaccaaagacactagtgcacccccttcacagacactgacctcagaggccccactctggtgcccccagaccctgggcccccagcctctggcctccctccagtagccccacgagtccccacctctcagtgctgacggtgccttcatgtccccgccggccctgcccctgccctctgtaccccgtgaggggtggcaggagctggagtctcccccttcctcctgtgccctccccttccccccccaacagctgctatgggggggctaaattatctctattttgtagagaggatctatatttgtaggggttcggggcccaggccgggtccctatctctgtgtataaactgtacagaccgtggccgccctgcctgtgtgtgtgtgtgtgcgcgcgcgcgcgcgtctgctccgcgtgttggtggctgtggccatggctctgtgcccaccagcatctccctcctgagatgccggcctctcatgctcccggagcgtccgccaaccccccgtgtcacctcccttctgttatcgctgacagctttcttgcgtctcatttgtcgccgagccccgagcgcacggtgatgctcgggtctgcccccgaccccctgccacaggccggaagccgcagggggcaccgtggggaagctaacccggccccttcccccaggagtcactgtgccagccccaccacatcctggaagaggagggggccccgggaaggggcctcccctacatcgctgctgtcgtccacgccctgctggaccggccttaggggtgaaggtgggggcacagggcccaccccgcccgggaccccgggagcagaagacgcgcctgggctccgcgctctcagagaagcacgtggtgagggtggcctgggcctgggcacccttggcctgccggcctggctgcctctggggtcgagggtctgggtggaaggaccgcgggtgtcgcaggtgtcgtgtcagccgcaataaacagaagccagaagccctctgggtggccctcaggtgta

SEQ ID NO: 15299 - DNA, 440 bp, Homo sapiens
ggccctggggatcctcacatccccgtcccccagtcaagagctcctctgctcctcgcttgaatgattcagggtcagggaggtggctcagagtccacctctcattgctgatcaatttctcattacccctacacatctctccacggagcccagaccccagcacagatatccacacaccccagccctgcagtgtagctgaccctaatgtgacggtcatactgtcggttaatcagagagtagcatcccttcaatcacagccccttcccctttctggggtcctccatacctagagaccactctgggaggtttgctaggccctgggacctggccagctctgttagtgggagagatcgctggcaccatagccttatggccaacaggtggtctgtggtgaaaggggcgtggagtttcaatatcaataaaccacctgatatcaataagcc

SEQ ID NO: 15300 - DNA, 141 bp, Homo sapiens
tggcactcctccccacacacctgctcccaagctcagatggaagtcccttaacccccatgccacattgcccccctcctcctttccctcttgtcctcattaatggtgatgtttctgggttgaaagaagtaaaaatgttttaag

SEQ ID NO: 15301 - DNA, 2212 bp, Homo sapiens
ccagcccggacccccagcccctgggctgtaggccagggcagccacagcggcgtggaccgagggtcccagcctgcaggctccccgcagagagcacaggaagaggcaggggcggggtccccagcacttgttacaaacacacgatgcaccttaactcacccaccacgaggcactttacagactgggggagggggtttttctttttatttttttttttaattttaaacgactgaagaaaacattaggagaggcaaaaatattgttaaaaactagactctaaacaccccttcctgctgtgaggatagtgggtgtgacaatggaaggtccacagaggtttttgttttttggttttttttttttttttaagaaaaaaagatgaaaaatgaaaaaaaaaatggttaggaggctgaaagaaaaaacacactgttattttggggcagtggggacacaggccccgtggacctgtcctgcctggcccccaaggccatacttaccccccagaaggcgggccatggggtaactggaagctgggggccagcagtttgcacaggaggcctgtctgagccccacccgccagacctgttgtgagcagctcctgtcactgaggctggctgaggtgtccggggtggggccaaagtagccccttggcttcgctgctttgggggacagttgcacaaattggacgagtggccccagctctctggctgccatcttgtgctggccgagtagacgggaggggccaagccgtgccaacctctctggctggcagggtggggcagcaggactctggttctggtgaggggcgtctcccactgctgccattttgggggacaccctgggtttgaacctgaaagccccagctctctgccttgccacgtgaatgtattctttgggccacaagcccccgcctcacccctgcctgagctgcctcacccctgtgagcggcgggggtggatgattgctccagaggctgcagagagaaggctgagctgtttctccagtgaagggggcaggaggaggggcctcaaaggcaaggagtgggtggctttgggcttagggttgcagtagaggggctgccgcccggggccccaacctgtagccagctcgtaagatgtggaccacccagctctgcacctgacccttccgctgaccaaatgggagaggagcaggtggccttccgggtctgatatgatgcgctttttaccgttgggtaaggttggggtgaagagaagtgtgcggctcctgggtcagaggaggctgccccttctattgctcacccacttcttattcccggtcccctacttgggttcgtctccgcccattttgggttttgtaacagttttgtcttttgggtttctcatccagctcctcccattgacctcattgctcagagtgcagtattagggcaaggcttcgccactgcctccctccatgaatgtatttctccctcctgccctggggacatggggagtggcccgtttctttccccatctagtcccagaaagatggtgtttggttttctgttgttggatttttttttttttttttttttttttgcaccaaagtggcaactaggtcagtgttgggggatcaagctggcctcggggtggggggcccccacctgcctctccctggttcccacagtgttagcgtccctgaaaagacaatattctctctaaagcaataaggggtgacgggccggggggagtgtttgctgctgctggcccccagctccccttccctcttgccaggtgtgggggagactcctgttgtgactgaatgtaacccccccacccctgccgcagccaatgcaggggaagggggacactcttcctgtctcttctccccagctaaagagactttggacttagggggcccatgagcctggagaggccttaaccctgtgaggaagtatagggggagccctctcccacccccatccccttctgagagtggtcaatgtttacaagcccctgagcccccctgcccagggactcagaccctgttgctgtccttccccggccccggtcttcctgggccctcgctgctcccctgcccttcctggggttggggtgggtgcaggggtcaccgtgttccctgtctgccttgtacccacagtctccccgccccctctccaccctgtgtgacttccctctcttttacctgctcctgtaaatactcccttctcccaataaaacttggtgtgtgttctccc

SEQ ID NO: 15302 - DNA, 480 bp, Homo sapiens
ctgcccttcccggtcccgcccccgcgcgcccccgccgcgcgcgcgcgccggcgcccccctccgtgttgcccgctccccctcggtgtttgcatgcgccccggccctgccccttggccctgcccctgtccccgggctgcgtcgggacctgccagacccccctcccgggtcctgagcccgaactcccagagctcacccgcgggtgaccgggggccagcccaggagggcgggtggtttgtgcgagttcccttgccacgcggggccccggccccatcaagtccctctggggacgtccccgtcggaaaccggaaaaagcagttccagttaattgtgtgaagtgtgtctgtctccagcccttcgggcctcccacgagcccctccagcctctccaagtcgctgtgaattgaccccttctttcctttctctgttgtaaatacccctcacggaggaaatagttttgctaagaaataaaagtgactatttt

SEQ ID NO: 15303 - DNA, 896 bp, Homo sapiens
cctgcaggaactccccaccccagggacaccgcctccccattttccggggcagagtggggactcacagaggcccccagccctgtgccccgctggattgcactttgagcccgtggggtgaggagttggcaatttggagagacaggatttgggggttctgccataataggaggggaaaatcaccccccagccacctcggggaactccagaccaagggtgagggcgcctttccctcaggactgggtgtgaccagaggaaaaggaagtgcccaacatctcccagcctccccaggtgcccccctcaccttgatgggtgcgttcccgcagaccaaagagagtgtgactcccttgccagctccagagtgggggggctgtcccagggggcaagaaggggtgtcagggcccagtgacaaaatcattggggtttgtagtcccaacttgctgctgtcaccaccaaactcaatcatttttttcccttgtaaatgcccctcccccagctgctgccttcatattgaaggtttttgagttttgtttttggtcttaatttttctccccgttccctttttgtttcttcgttttgtttttctaccgtccttgtcataactttgtgttggagggaacctgtttcactatggcctcctttgcccaagttgaaacaggggcccatcatcatgtctgtttccagaacagtgccttggtcatcccacatccccggaccccgcctgggacccccaagctgtgtcctatgaaggggtgtggggtgaggtagtgaaaagggcggtagttggtggtggaacccagaaacggacgccggtgcttggaggggttcttaaattatatttaaaaaagtaactttttgtataaataaaagaaaatgggacgtgtcccagctccaggggt

SEQ ID NO: 15304 - DNA, 120 bp, Homo sapiens
ggacgaagttacagaactgagattctcgggtcccagacacgcacctatgtacctcccactggtgtccctgcaaagcctggcgcttttgacatcaataataaaagtggcagggctgagcaa

SEQ ID NO: 15305 - DNA, 963 bp, Homo sapiens
acacggcctcttcccctacggccacaggggcccctcctctaatgagtggtcggaccgtggggaagggccccactcagggatctcagacctagtgctcccttcctcctcaaaccgagagactcacactggacagggcaggaggagggggccgtgcctcccacccttctcagggacccccacgcctttgttgtttgaatggaaatggaaaagccagtattcttttataaaattatcttttggaacctgagcctgacattggggggaagtgggaggccccggacggggtagcaccccccattggggctataacggtcaaccatttctgtctcttctttttcccccaacctccccctcctgtcccctctgttcccgtcttccggtcattcttttctcctcctctctccttcctgctgtccttctccggccccgcctctgccctcatcctccctctcgtctttcgcacattctcctgatcctcttgccaccgtcccacgtggtcgcctgcatttctccgtgcgtcctccctgcactcatacccccccttcaacccgcccaaatgtccgatccccgaccttcctcgtgccgtcctcccctcccgcctcgctgggcgccctggccgcagacacgctcgacgaggcggagcgccagtggaaggccgagttccaccgctggagctcctacatggtgcactggaagaaccagttcgaccactacagcaagcaggatcgctgctcagacctgtgaccccggcgggacccccatgtcctccgctccgcccggccccctagctgtatatactatttatttcagggctgggctataacacagacgagccccagactctgcccatccccaccccaccccgacgtcccccggggctcccggtcctctgcatgtctcaggctgagctccctcccccgcggtgccttcgcccctctgggctgccaataaactgttacagcc

SEQ ID NO: 15306 - DNA, 1582 bp, Homo sapiens
ggcctctcctctggcggggagggggaaaaagacccgcccccttccgcagtttccccagccagcctctttcctgccatttccgacgctgcgtctcctgggaagtcccctctgactcctgccctcctgcccttaccggcgcaggtccccccactctgtcccttttgcccttactatcttgcctctagctcccccaaacaccattgcccactccctgacctgaacttgcggactattaggtgggggctgggggtgggggccttgagctgctgttatccaccctctgtttttccaaagaactggtccccgcacaggcttcagagtccttccttccctctccatcacctcacccggggcgtgaactccccctttcctggcttctcccttctgccccctcgtgggtggaagaactcaggagtgtgtgggatgcccagcctcgttcccgagcgcagccgcccaatccgcgtttcttttcttccttctgccctttctaaagccctaaaaactggtcctgcattgccctccacaccccaatcccctccccctgctcaagcttctggtgccagagatcagtgccctctccccacttctctctagcccctcatcctcatcctcgctggatctctacgacgcttaacaccgcagtgcccatttttctgtccctgttttccttcccatcaccagcccagtgtgcaatccagagagagagagagtgatactgtaaaatgaaatgtatttagaatgctcccccatttgggtccttgttcatctggtgatgcactttctgagcctgcctctctcactggggtttcctcctgctttgcacaactttgctatttcgcaggctcccccgtgccccagctcacccgagccgggcggggtggtggtggtggtggtggtgtgtgtgtggtgtggttctagctgaagagtttggtacagtggagggcgggtccctcagcctggcataggggctgtctcctggttccaaccaggccgccttctagtgcaactggaattcccacctcctggtatttctggacaccactccctttctctggatcatttatgcttttagaactttgagagtcttctatttaattgcaagtagtaacagctgcatctgcacagcgctgtctccaatactggttccccacatcaaaggcagagggagaaaacagaaggctgggaaagatcaaagtgacttctaagtcattcaaagtagctaggagcctcccagcgaatagaacccgggtgtcccaagcctagagcatgacctagaacttcactctgtgggatgatgttagcttgaacttcttgttgggcaatgcgtaggtgctaggagaatgttgacagtgagtttggggttcgctgggatgggatccgagatgtgggcagaggtggacaccagcaggtggaagaatgtggacaaggtggggggtaggggcagccgccgcttcgccactttccgcagctctggttttgctactgtgctgctctccttgggtgcatcctgtgcctggccacgctgccaccctccttgtcacggtgaccacgattgtatgacaataaaatggaccttttggcc

SEQ ID NO: 15307 - DNA, 212 bp, Homo sapiens
gcctggccgcggcctttcgctgagcccctgagcccaaggcactgagacctccacccactgtggactccatgcctccaataaaaggtagttctgggcccagcgcagtgcctcatgcctgtaatcccagcactttgggaggccaaggtgggaggatcgtttgagcccaggagttgaagaccagcctgggcaacacagtgagacttcatttctac

SEQ ID NO: 15308 - DNA, 303 bp, Homo sapiens
cactcaaccactctgccaaacctgccctgccattgtgcctttttagggggcctggcccccgtcctgggagttgggggatgggtctctctgtctccccacttcctgagttcatgttccgcgtgcctgaactgaatatgtcaccttgctcccaagacacggccctctcaggaagctcccggagtccccgcctctctcctccgcccacaggggttcgtgggcacagggcttctggggactccccgcgtgataaattattaatgttccgcagtctcactctgaataaaggacagtttgtaagtcttg

SEQ ID NO: 15309 - DNA, 317 bp, Homo sapiens
cagctctggcccgtgggccccgctgtcttcccactgccccaaggagaggggacctggccggggcccattcccctatagtaacctcaggggccggccacgccccgctcccgtagccccgccccggccacggccccgtgtcttgcactctcatggcccctccaggccaagaactgctcttgggaagtcgcatatctcccctctgaggctggatccctcatcttctgaccctgggttctgggctgtgaaggggacggtgtccccgcacgtttgtattgtgtataaatacattcattaataaatgcatattgtgaccgttc

SEQ ID NO: 15310 - DNA, 194 bp, Homo sapiens
aggagacgcgggagcccacggagaacgctccaggagggcctgtccatcctcgctgtcctttccctgttctccccctgccccccgtctctatcctctgtggccttcagctaatttctgctcccctgagattcgtccttcagccccatcatgtgctttgggatgagtgtaaataaaacggggctgtggcttgggaa

SEQ ID NO: 15311 - DNA, 1766 bp, Homo sapiens
ccagccttcacctgggactgccacatccccagtgaaatcagcatgtttctcggtgcagatctgaaatcacatccagctcctgatgttttcttctccctctgactgcagaggaagtgttcctacctgcaggaaggcacctgtcacacagggcgttcactcagaccatctgtgctctgccctgagttcagttgagaaaatcctattatcaaatttggatttcctggccccagaacttcccaaagacctgtaaaatggagggatttaccacctcacatatgtccagttaaacagtttgtggacttgtaaccgtcgcagcccaatgatacaacagtagtttaatcacgtgtattggcttgaatgtgattttcattccttgattcacccaacaaataccgactggctgagcacctgctgtgtgtgcactgctgttctagctgctgaccatagacagcataaatgaaaaagacagaaattcccaccttcgtggaactctccattttcctaaatgttaggttggtgcaaaactaatcgtggtttttgccatttttaatttttaatggcaaaagccactattacttttgcaccaacctaataggccgattcagaaacttgagtgcaatgtcttggatatgcaaaaaagaaaatcaaaacgcattcttcattctctataagagttctaggcggggcgtggtggctcacacttgtaatcccagcactttgggaggccaaggtgggcggatcatgaggtcaggagatcgagaccatcctgaccaacgtggtgaaaccccatctctactaaaaatagaaaaatcagctgggtgtggtgccgcgtgcctgtaatcccagctacttgggaggctgaggcataagaattgtttgagcccgggagacagaggttgcagtgagccaagattgcgccactgtactccagcttgggcaacagagcaagactccatctcaaaaaaaaaagagttctagcccaggagcggtggctcacacttgtaatcccagcactttgggatgctaaggcaggcggatcacttgaggccaggagttcaagaccagcctggccaacatggcaaaatcccatctctactaaaaatacaaaaattcacagggtgtgttggcacacgcctgtaataccagctactcaggtggctgaggcataagaattgcttgagcctgggaggcagagattgcactgagccgagatcgcgccactatactccagcctgggcaacagacatcctgtctcaaataaattaaattacattaaatgtttaagaagaagtctaaataagtttcatatgctgccctccctcagataatgagggaacctggggtacttaaaatgccaaatgaacgtatacttgatccttattcatagattttgtatttgagaatttgcctactcactaaaatatgtttgtaacccccaaatcaatactgtggcactttctcagttattcgcagacacacagagacaaaaaatttgaagtgcctggctgggcgtggtggctcacgcctgtaatcccagcactttgggaggccgaggcaggcggatcacaaggtccagagatcgagaccatcctggccaacatggtgaaaccccgtctctactaaaaatacaaaaattagctgggcatggtggggcatgcctgtagtcccagctactcagaagggtgaggcagaattgcctgaacccgcgaggcggagactgcagtgagccgagatcgcaccactgcactccagcctggtgacagagc

SEQ ID NO: 15312 - DNA, 3125 bp, Homo sapiens
ggcccgccctacgctccccttgctgagtcccctgccaagcgctcggagcccccccaggacactctgcaccccctcaccccggtcctcctcattagggtgcagggcctaggtctcttccaggtgggggaggggggagagtcaggaataaggggatccccagaagtgcagagctgagcaggcttgggcctgtcatggctggccggaagtgtccccagctccctacagacgctgtagccatcactgcctctccagggaccctcctctcctgcccaggacagacccagccagaaccactgctaggatgggccgcacccaggggtctggcctccagggacctagagaatgggagggagaacggggccccaggagacccggccgccaccccacccgctacccttgggtgccacagggctgtgctgttgccaacagtaaacctgctcttactgtccaggctctggggtcttgtgatgagggtctggggagaaagtgggcccggggggaccccggaggctgtcggtggatgtgccgatgatggggctgacagtatgggctctgggcatccctgttcccccctctttcttccccccactcttctggggtcgggggttcctttcccttcccagttgctgtccctgggtcccctctttcatgtcccacaggccacagagcccagtgtgtccaaccagctgttctctcctcaaagcagcccccaagcaagtcccttctctagggtgtccctgaggacagcacagaggcgggactcagagaccccattcctcttcacgcagcccttaccccaagccctctagctgtgtggctggcagtgttggccacgtaggggctcccatccccccaccattgtgtcacatgggctgccaggctcagctcccagctgcgtccacagtgacctggatcagggtggggacaaggactggaccctccttctccagaaggccttcagctcttgccttgccatgcagtcacctccttccccctctgaccccagatcccaaaggtgcaccgttgccccagcccctttctggccccatggggtttctctgatgccttcatcatagaggcccggggctggtccgatggttggcaaaacttgactccggcccagtccccactcttggggacttagaacccctgctgtcctgggatctggcctgcctttctttggtcagtccctgtggtcccccaccagctccccctcccatagggctgcccaccaagccctgcccccagcccaagaggagcccccactgcctgcggggcagtgatgtctggccaccggctcacaccaatgacttggtcctggggtggcagaagcagcaggtgacaggagcagggcccctgtccctctcttctggccctgtggtacccaggccacacgttgtgcccgctcttggggctgaccggctgtagggaccaccagccgctgctactgtgggccgccccggggcagggtgggcagggcttttgtgggttatgaggacacagaagtccctgaggcccccagacctggctcagccaacctccttcctcccccggttgccccccactctaaagcctcctccctcccagcgtccactggctccaggctcctcacaacagcagctcatagacacggggcgtctccaggtggtcccagccctccagatgtttctagctctccaggtgggcgctgttttcacgtctgcctgcatccattcattccttcattcctcacctttatcctgttatctctatttttttaagctaccaggaaggaaagggaagaagagatcacgaaactgggacccccagaagggaggagtgggctttgaacttagacatctacctcagagctcaaataggttgtttaaaatcacattcaattttcagatgaaggggaactttatagtttttttttttttttttttttttgagacagagtctcactgtgttgcccaggctggagtgcaaatggcttgatcttggttcactgcaacctctgcctcccaggttcaagcaattctcttgcctcagcctcccgagtagctgggactaaaggcgtgtgccaccatgcccagctaattcttgtatttttagtagagacggagtttctccatgttggccagactggtctcgaactcctgacctcaggtgatctgaccgccttggcctccgaaagtgctgagattacagttgcgagccactgtgcgtggccagaactttataataagagacttgaagctgggtgtgacggtgcacacctctagtcccagctactcgggaggccaagacagaaggatcaccttgaggccaggagtttaaggccagcctgggcaacatagcaaaacctagtccctaaaattaaaaaaaaaaaaaaaaaaaaaggaaaataaaggagacttgaaatttttgaactaaatagtggtgatggctacacattgtgaatgtaattaacaccactgagttaaacacttaaaatggttaaaatggcaaattgtatgttatacctattttactacaataaaaagtataaaaaagagaagatatttaggtgacttacagcaaccaattgcaacaaaacaaaatgttaagaaatgatctttttatgaggcaattggaaatttgaacactgatcaactataggatgattggaattattaatttttaaaggtgtgataagatactgcacttggctgggcacagtggcacatgcctgtaatcccagctacttggcaggctgaggtgggagaatcgcttgagctcaggagttcgagaccagcctgggcaacgtggcgaaatccccgtctttacaaaaacaaacaaacaaacaaaaaagatattgcagttgtgttgtaagcgtccttatctttcagagctacatagtggaatgtttatggaatatttaggataaatgatataggcatttgggatttgctgcaaaatgacccagaggcaggggtcagggggagaggtagagatgagacaagaggtagaggggagaggtagaggtagccacgagctgataattacagacaagagatgcggagtatgtgggggctcattatcctgcatagtctatctttgtatatctttgaacttttcaagaataaaaaagcttaaaaagtata

SEQ ID NO: 15313 - DNA, 607 bp, Homo sapiens
cttcaacagctgcaggagcacttccctatcaggcccagaggaggcagggagtgtgagaagatacaccacgcacctcgcgttcagcactcctgccgagggggcttcctgaggggttccagaggggcccacgtgtccctccacctcctccctggcccaggctgcagagcctgagctgggacacgccctgaagcttctggaccctgagagagattgtttcttttctttactatttttttttttttttttgagacggagtctcactctgtcgccaggctggcgcgatcttggctcactgcaacctctgcctcacgggttcaagcgattttcctgcttcagcctcctgagtagctgggactacaggcacacgccaccatgcccagctcatttttgtatttttagtagagatggggtttcaccatgttggccaggatggcctccatctcttgaccttgtgatccgcccgactcggcctcccaaaatgctgggattacaggcgtgagccatcaagtctggcgagagagattgtttctagatgagggtgggggcgggtgtccttagcccaaagcttgtgccagtctctatcagaaataaatgcccccaaaacctc

SEQ ID NO: 15314 - DNA, 1144 bp, Homo sapiens
accgcctccttggctccagacttgactgatcccgggattgaaatgaggagcacagaacagggcctcctgcaactcacggggtttcaagagaagatggctgacccctgatgctgtgagcagtgtgagccctgcccaggagcaggttttgatgggaacgtacctccaggcagcccccttccacctggaccgtggccacacttttttggttatttagtttgtcacagtcttggggacatgggatcatttgagcttaaaaaatactgggggccgggcacagtggctcacacctgtaatcctaacactttgggaggctgaggtgggcggatcacttgatgccaggagttcgagaccagcctggccaacacggtgaaaacccgtctctacaaaaactacaaaaattagccgggtgtggtgactcacagccgtaatcccagctactcgggaggctaaggtgggagaattgcttgaacctgggaggcggaggttgcagtgagccaagatcacgccactgcactccagcctcggtgacagagcaagactgttttgaaaaaaaaaaaaaatgggaacattttaaatgattttcacctttattatgcatctattttcatggggtttcccgatatctcactgtccagtcccttcatttggggaatgtgttggattagggaacagggttgaagatttgaagtttagactaaagagctgggaacagcttcagagtcaggctcagcctgactcatgcttgacacccccacgcccagggagggttgggggatgtgaggagggcagggaaatctgagagcctccttccagccccataacgctgttaacaagtaggaaaaattaaagctcccggccaggcgcggtgactcacacctgtaatccgagtactttgcggggctcaggtgggaggattgcttgaggccagcctgggcaacatagtgagacccccatctctacaaaaaatacaaacattagctgggcgtctgggcatggtggcacacacctgtagtcccagctactcgaaaggctgaggcgggaggatggctttaccaccatgtcaaggctgcagtgagctcatgatcataccactgcacttaacttggcaacagagcaagaccctgtccctaaaataaataaaagg

SEQ ID NO: 15315 - DNA, 546 bp, Homo sapiens
gggccagagggggctctgctcggcctgtgagccccgttcctacctgtgcctgaccctccgctccaggtaccacaccgaggagagcggccggtcccagccatggcccgccttgtggccacccctcaccctgacaccgacgtgtcctgtacatagattaggttttatattcctaataaagtatagcgggagagacctggatgtggacttgagcagcggtgacttcgcaagcaaatggattgtcaggcttgatgcaggcagatgacctgtttcaggggcgtccggctggcagggatgaattcattctggaccaaagatccggggtccaggggctgctgcgggggctgtgctgagccggagagaagtgtgcaaacccatgagctcccaagagtctctgctctagaagcctcaactcctgggcctgcctgtcagtcaaagcaggaacacttcttcctgcataactcgaaacacctttccacaggcttcttgtccacagtagagtttaataaaaatattcactgaaagacccccccccacccccatcggccc

SEQ ID NO: 15316 - DNA, 109 bp, Homo sapiens
ccttcagcctcaagcaggaagaacaaaaaatcaagaacttggcaagttttctccatttgttgcaagtatgtttactagctgaatctcaataacaatgtaaacaagcaac

SEQ ID NO: 15317 - DNA, 3339 bp, Homo sapiens
aatttcctgaggtgaaaaaccgatattgaagattcatttttcttttttccattcttcaggaccttcggcaaggtgagtcaaggctctctacctacctagatgtttttcagaggcctacaaatacaagtatctttcttatatgcacattctaataaatgatgaaattcagtccaacatgcttattataaacatagcaattcttgctctatcaaattagcttatatgccaaatattaaatatggtttatttaggtaagcataaaaacataggggctatcatttttaaagacttgattttctctattgtggtaaaatatataaatacatatttgccattttaaacatttaccattttaaccatttttaagtgtacagttctttcgcattaatgcacccatgaccaccattcacttaaatttttaaaagaacagtatattctttttttcctagagccttcagatgagagggaacagtatattctattgcacgtctacaattcccaaaagacctcttactttgggaggccaaggtgggtgggtcacttgaacccaggagtttgacatcaacctgggcaacatggtgacctcccgtctctctcggaaaaaaaaaaagaaaaaagaaaaagccgggtgaggtggtgtgtacctgtagtcacaggtacttgggaggctgaggtgggaggatcacttgagcccaggagatagaggctgcagtgagctgtgatcgtaccactgcactccagcctgggcgacaaaatgagaccctgtctcaaaagaaagccctctccttagctgagcagaggaagggaaggagtgtggctatgagaatatgatttatgccattttctgtttttaaatctagaagatcttctaagcacaaatacagctacaatgaaatattttacagacaaaatgttaatagaccatattctttgaattaaatttgtttttaattttctctacacattttttttttcctggagtctcttagctctaaatatatcaatcagatttataattttttttacctgattcagatgtcttacatttttatattaaatgaaccttaagcatgattcttttggtaagccagtatgaatgccagtggttggggggcggggggggagtcagttgacataagatttagtcctaataaggactctgtattcacttgattattctgacccttcctaagggagggaggtggattagataccactggaggcccattctgtattcctaatccagtctcagcactttattcatacaaaataatcaaaataggttttctacaccaaatgctacccaggcagtgctctataatttatttgcacacctgtatgtgtggtgccacgttagccactaaatctgaacttttaccctgctttcatcatggatttttttgtgtaacctgaaacaagtcaccagtgctcactgtgcctgtttcctcatttgcaacaagaggataattccgacctacctctgaaaaatgtgtagattaaatgagtttttaaagcactttagaaaatataagggagaaaatgatttcttaagatatcactgcctaatatagacaggtatatttgaaagctaaatacaggttaatgcttttgataatgtattgttcctgttgcaaatttaagcattatatattaggagactaaacattgaaaactttcactgatttttaaattggagtaatagcctaaataagtgtaaataatctttatcaaaatttagtgtttatctacaaagatgcgaatcagtcaaggggaaatgtgtatgcaatgtgtgtgtatatgatgtatgcgaacatatgtgattttggggtactaaagcacaaaaaaatcccccataaaataaaccttcctgaaaagactgatcataaactttttcactccaagcagatgtgaatcaagatgttaggtttatggtgagttagctttgaggtgtgttgccctaatactagccagcgttgttgtagccatattccctgctgctgcacgccgaattgaaaatccatctcttacctcttctctatgaagcaagccaggtatgtcttgcttaagtatttcttctccatgaatggccttaacattattttgtattcacgtgtactgtttaactgagggtctcaaagcactttaaactgttgtgttctatttccactcgtctggcctgcctcatttttctaggcccttttgtaagctgtaattttttattaccactcatgttctttctacactgacactattcattaagaacatcaagcttcatctctgcttacagaatctcaccttattgagtgggttccactttatttttcatttgttatctacattttgaagggtttatgtgcaaagtgaaaacaaattttgaaaaataagacaaatccattctcttcttcaattcagtctaatatgcattgtagtgtcttttaatcagtcttatcctctaagtcaacttcattttcctcttcgtgaatacccatagcaatatgtaagattttattgaagtttcctgtgataactgaggaatactttgctatgcctcactgcccaatagggtgggtcatcaattaggagaaatcccaaattataaaagccaacatatgccgtgacctacgtaggaaaagatgtatttgtgcatcttctttctgggtagttaaaaattactccctcttttctctagcattttgacatttcagactcaatgctctgatctctagggagtgtgattattcaaactaatgagaggacaagaagacacagttttagaatctactgctgctaaagcacattaaaaacaaatcctggtttttaatgtatgcatagtttcatatttaatgaatatgctttcattaaatagggaggtagatttgaaaaaaccgttataaagaaatgtgccttttggggaatgaatacttttgttcatgtctagcccactgggaattttgttttcaccttatactgagtcctttttctaatgtaaaaatatttcttccaagtttgatttctgtatcagggtaacattgagaacacacatatttctgtttgaggatttgtgacttcctatggaaacagtcttgcatctatgtatttacaaatgaaatttaaagtattcttaaagctttgccttaaatactgcttgcatactgatttacttaatgctaagcatggcaggggttataaatttaaatactataagacctggctgaatcccagatgtatcaataaattgttatagtagcttatggaaaatgctattaaagataaattttcatacattgtatttttagtcaagtaaaatatggatgaaaattaataaagtactgtcaaggg

SEQ ID NO: 15318 - DNA, 187 bp, Homo sapiens
atgaggacctcaccctaggatggggttataagcctctcatgaagttcataatttacacgttttaaatactagacgctagatttttttttctaagggtgaatactagtagtccaggcttgatttggagggtgaatgacgcctagcaagatgtattgtacttgtgtttttttaattgaatacttcaaag

SEQ ID NO: 15319 - DNA, 180 bp, Homo sapiens
ccagaagatggagaccgtaggggaaatgccgtgtaatccaagcagttcaggctttggggccaggtggacagggtttgaatgccagctctggaatctgttagtggggtgacctcagccaagtcacttaacacttctgaactttgttttctcttttgtgaaataaagaaaaaatgaatctac

SEQ ID NO: 15320 - DNA, 1022 bp, Homo sapiens
agaatcaaaaagtttattttttttcttccaacatgtgatgtgttgctctccattcttttaaatctcgcactacatctgatatcaggaaatatctgtgaaggacttggtgattacctgaaagcccttctcaagaccgagtgtacaccactttcccacactgtgaactaatgacaagtgacttatttgctcataagtaaatgtcttcatgttgatgtgtccgtgaaagttgtgatctgttgtaatatcagttacagtggcagtattgacaataagaaacagtttaacagaaaaatgaaatttaagcacaaaaaatttaagagattttatgtttaaaatggcatttagcacagtatttaacattcttggtcacaaagctatttaagtggactgtatttcggctatgtctcatgttttatatgattaaattatcattgtttgtcctttatgtattctcttctacaatacaacacattgaaactgtatttacttgttatgttgtaatattttgctgctgaatttggggctacttatattctgcagaaaattaattgaaatacctattcaagaagatagttgtaaagatattgtatctcctttaatatactccttaaaaatgtatgttggtttagcgttgttttgtggataagaaaaatgcttgaccctgaaatattttctactttaaattgtggatgaagaccctatctcccacaaataagttcccatttccttgtctaaagatctttttttaagtgttctgtggctgatttactaacagtaactgccattttttgtctgtgataacagagtgatttgtaaaacagtggttgttttttcattgtgttttcttcgtggattgttttttctgcgggtcatattcataccttctgatgaagttgtacaacaccagcaacattataatggccctgtagctctgaatgctatttgtgtaactgaaaggttgcactctagggtgaaccaagctataaaagcccatgcttaaataaaaattatgtccaaaagcc

SEQ ID NO: 15321 - DNA, 507 bp, Homo sapiens
aaacaagcttcaaagccatatggacactgtgacaatgactaagccaagctgtgttcatccagctacttagctggccaaggagaggagttctttggctctattggatttgtccaaacaggtgctggcccagcatggaatctgatgaaaatattctgattggtctgggtggatgtgagcagaagactatttaccagggaccctggagtatttggaagcaacgtgttaattataaacagcagggtttgagcacaatctgttctactcttaatgatgttatcttaacactgaaattgcctgaaacccatttacttaggactacattttgctctgtgaactatcccctgcgctttgaacgtgccagcagcccttgtttatatgcccattcttttcacttcctctccacaggagcctctgcagtcgcttgccaaagcagattttcctaaggccactgttttaaaagatcatagttgcaaaatataataaatacaagttctttttaaaatccaa

SEQ ID NO: 15322 - DNA, 198 bp, Homo sapiens
tgttataaaagagaatttacttttcaagctataatgctattttgattaatgatttttctttaactgaagctctaatttaatgggaggaaataaaagtttgaataccagctttctattttctaaatattggattatatcatgaaaatcaagcagtttctatttctttaaatgcttttattaaagcaatctaattatgtg

SEQ ID NO: 15323 - DNA, 1461 bp, Homo sapiens
caaattctaccaatattgcattctgagctagcaaatgttcccagtacattggacctaaacggtgactctcattctttaacaggattacaagtgagctggcttcatcctcagacctttattttgctttgaggtactgttgtttgacattttgctttttgtgcactgtgatcctggggaagggtagtcttttgtcttcagctaagtagtttactgaccattttcttctggaaacaataacatgtctctaagcattgtttcttgtgttgtgtgacattcaaatgtcatttttttgaatgaaaaatactttcccctttgtgttttggcaggttttgtaactatttatgaagaaatattttagctgagtactatataatttacaatcttaagaaattatcaagttggaaccaagaaatagcaaggaaatgtacaattttatcttctggcaaagggacatcattcctgtattatagtgtatgtaaatgcaccctgtaaatgttactttccattaaatatgggagggggactcaaatttcagaaaagctaccaagtcttgagtgctttgtagcctatgttgcatgtagcggactttaactgctccaaggagttgtgcaaacttttcattccataacagtcttttcacattggattttaaacaaagtggctctgggttataagatgtcattctctatatggcactttaaaggaagaaaagatatgtttctcattctaaaatatgcattataatttagcagtcccatttgtgattttgcatatttttaaaagtacttttaaagaagagcaatttccctttaaaaatgtgatggctcagtaccatgtcatgttgcctcctctgggcgctgtaagttaagctctacatagattaaattggagaaacgtgttaattgtgtggaatgaaaaaatacatatatttttggaaaagcatgatcatgcttgtctagaacacaaggtatggtatatacaatttgcagtgcagtgggcagaatacttctcacagctcaaagataacagtgatcacattcattccataggtagctttacgtgtggctacaacaaattttactagctttttcattgtctttccatgaaacgaagttgagaaaatgattttccctttgcaggttgcacacagttttgtttatgcatttccttaaaattaattgtagactccaggatacaaaccatagtaggcaatacaattttagaatgtaatatatagaggtatatttagcctcttttagaagtcagtggattgaatgtctttttattttaaattttacattcattaaggtgcctcgtttttgactttgtccattaacatttatccatatgcctttgcaataactagattgtgaaaagctaacaagtgttgtaacaataatccattgtttgaggtgcttgcagttgtcttaaaaattaaagtgttttggtttttttttttcc

SEQ ID NO: 15324 - DNA, 1275 bp, Homo sapiens
gcagtaccttgtccacagattagaaaacgtacacaagtgtttgcttcctggctccctgtgcatttttgtcttagttcagactcatatatggatttcaaatctttgtaataaaaattatttgtatttttaagtttttattagcttaaagaaataatttgcaatatttgtacatgtacacaaatcctgaggttcttaattttagctcagaatataaattagtcaaaatacacttcaggtgcttaaatcagagtaaaatgtcagctttacaataataaaaaaaggactttggtttaaagtagcaggtttaggttttgctacattctcaaaagacagcaggagtatttgacacatctgtgatggagtatacaacaatgcattttaagagcaaatgcaacaaaacaaatctggactatggataaataatttgagagctgccacccacaaatataaatacagtactcatgctgactgaaataataagacatctacaaatttataaacaaaaagtgattgtcattatcctgcttatgtactagattcaggcaagcattatagactttttggttgcggtggcttttgcatttatattatcaatgccttgcaggaacgttgcattgataggcccattttatttttttattttttttttcgagacaggatctcactctgtagcacaggctggattgcagtgcaatcctgcaattctcaatcttgcactgcagcctcgacctcccaggctccagtgactctcccacctcagcctcctaagtagctgggagtacaggcgcgcaccaccacgcctagctgatttttgtatttttttgtagagacgggggtttggccatgttgccgaggctaactcctgggattacaggcatgagctgtgctggccgggtttttttttcttgatgtaaacgtgtacagctgttttattagttaaggtctaatttttactctaggtgccttttatgttcagaactctttccactggactggtatttgctcaaaaataaataatggtagagaagaaaactataaaaatggacaaggctttcttctatcagtagcgtttaccctttgtcaccagtggctttggtatttccatgtctggcattgcataaacttctctggtgtgaaaggataaatatgcctttctaaagttgtatatcaaaattgtatcaatttttattttctatgatttctagaaacaaatgtaataaatatttttaaaatctcctttctactggttatgtaaataaatcaaataaatatatc

SEQ ID NO: 15325 - DNA, 1004 bp, Homo sapiens
gaatggaaaacgcagaagagacgtacaacttctgaaagatctcagaggactggcattgtctggagacggcttcctggaagaggagactccagcagagccctgaagtgtggacaagcttccattcactgcaaattcgtgagcacactctggtgtcaggatctagtaaggaaatgggcttgagcagagcagggggtacctgtggggttcttctcttcattttcaccaccacaaagctggtctaagctgccatcaattcccacctggacaactgcaaaagccttccagctgttcctgcttccactcttgctcctctacaattcattctgcacgcagaagtcagaatcaaaatcaaagttcatcatgtcattctcttgacttgtggcttccctttgctcttaagctaaaagtaaaaatcattatcatggctacaaagtcttgtgtggtctgggccacatcctgtgccaggctccctttcattgtctatattccagtcaagctggccttcaaaatttcagcacattgggtctttctgccacaggcccttgcacatacatgcttttccctctgtacatgtgattttctttcatccccgctttccaaagctaactctgactcatccttcagactgcatcttaatgattacttccttctggaagactcccctaattttcacaactagatgagctctcccttatatgttgaaaacaagtatttcttgtgtgaacagaaatgtttaatgtctgccttcccaactcagccacaagctctgtgaggatggggactcagtctttgcatccctcagagcctaacatagtctcagttaatacgtgatagctggagcgtgacatttcattaggaacagtgaggctagttgagaaattatacctcaccagtatataggagagtaccattaggaattcttaatgggatgaaaacctgaattcatgtctagaccctgccacctgctggctgtgctgttttaaataaattgcagatcctctcag

SEQ ID NO: 15326 - DNA, 1297 bp, Homo sapiens
ttaaagggagaaatacactgtatgaagtatatgttgatactatgacatgttgccaacaccttgagaagcattatttgtttctaataaaagtaatggctttgtcaatatattggtgggtttaaaactttgctgcttttttacataaagcctgtgcctttcctagaaagttaagatgtaaatgtattctcacatgtaaatttgaaagttcaggggtctattatgaaatgatacacatttttaaatgaaccataatttttttcactaagctgtttgccttccaaagtgtttacaccttaagccttaacatgtatcttcattcagaaaacagttatattgtcataccatagtaggaagaaaaacctttatttggaatatacactactgtaagtttgtacagatcatatacctaccacctgtctttgcttaaagagccttgattacataaatatgtaggaaaaaacatattgagttcaaaatttatatctaacattgtttatgttatgatttttttttaattgcaaagactaggtgtatatttttttctgtttttctaaatgacccgtggtacttaataggtgtactaaaattgtgttgggagcagggatttggaaatttctgagagatgtgtagttaatttagtaattctgtttcatgagatatgatctgttatgctagtggtttaataggcttgctatgtaagtagaacgtggctcaactagatatctttatatgtatgggcattactcttagtgatatttgtttcctgtcctttgttgctcatgctgtttaagtgcaggctgagacccagcctctttgtaagtacagtaaaataatccaccgttttttacagaccctagtcaaagggttaaaaaaattaagattgctttccatgtttgaaatttaccattgagagtcaatgaagttgctattttgagtttagcattgatattgtgaaaataagtgcaatttggatttcatgtttcttaatattcattcttgtttcacaaatgaatgattaaggaattatgcatcataaaggaacctaagtgaggtatatgatgagtgtattgtctttgcacacacatataggtatattctgaatacaagcttattcacattttgcttcctaatctttttgttgtacagggattcaggtttcttattcttacaacatgattgtttatatgtgaagcacatcttgctgttgccttatttttgatgcttttattcatgacaagaattgtcaatataagaatgtatatcttttttgcaaccaatttaataaaggagttgaaag

SEQ ID NO: 15327 - DNA, 2797 bp, Homo sapiens
gctttatgactgggtgtgtgttgtgtgtatgtaatacataatgtttattgtacagatgtgtggggtttgtgttttatgatacattacagccaaattatttgttggtttatggacatactgccctttcattttttttcttttccagtgtttaggtgatctcaaattaggaaatgcatttaaccatgtaaaagatgagtgctaaagtaagctttttagggccctttgccaataggtagtcattcaatctggtattgatcttttcacaaataacagaactgagaaacttttatatataactgatgatcacataaaacagatttgcataaaattaccatgattgctttatgtttatatttaacttgtatttttgtacaaacaagattgtgtaagatatatttgaagtttcagtgatttaacagtctttccaacttttcatgatttttatgagcacagactttcaagaaaatacttgaaaataaattacattgccttttgtccattaatcagcaaataaaacatggccttaacaaagttgtttgtgttattgtacaatttgaaaattatgtcgggacataccctatagaattactaaccttactgccccttgtagaatatgtattaatcattctacattaaagaaaataatggttcttactggaatgtctaggcactgtacagttattatatatcttggttgttgtattgtaccagtgaaatgccaaatttgaaaggcctgtactgcaattttatatgtcagagattgcctgtggctctaatatgcacctcaagattttaaggagataatgtttttagagagaatttctgcttccactatagaatatatacataaatgtaaaatacttacaaaagtggaagtagtgtattttaaagtaattacacttctgaatttatttttcatattctatagttggtatgacttaaatgaattactggagtgggtagtgagtgtacttaaatgtttcaattctgttatattttttattaagtttttaaaaaattaaattggatattaaattgtatggacatcatttattaattttaaactgaatgccctcaataagtaatactgaagcacattcttaaatgaagataaattatctccaatgaaaagcatgacatgtgtttcaatagaagaatcttaagttggctaaattcaaagtgcttgacatcaaaatgttctagagtgattagctactagattctgaatcatacatcacatctgactagagaccagtttctttcgaatgattcttttatgtatgtagatctgttcttctgaggcagcggttggccaactatagcccaaaggccaaatttggacttctttttataaatgcagattgtctatggctgctttcccactactccagcctaaggtaaacagctgcaatagaagccaaatgagaatcgcaaagcccaaaatgtttattaacctgccctttacacaaaattacacaaaaagtttcctgatctctgttctaagaaaaggagtgtgccttgcatttaaaaggaaatgttggtttctagggaagggaggaggctaaataattgatacggaattttcctcttttgtcttcttttttctcacttaagaatccgatactggaagactgatttagaaaagtttttaacatgacattaaatgtgaaattttaaaaattgaaaagccataaatcatctgttttaaatagttacatgagaaaatgatcactagaataacctaattagaagtgttatcttcattaaatgttttttgtaagtggtattagaaagaatatgtttttcagatggttctttaaacatgtagtgagaacaataagcattattcacttttagtaagtcttctgtaatccatgatataaaataattttaaaatgattttttaatgtatttgagtaaagatgagtagtattaagaaaaacacacatttcttcacaaaatgtgctaaggggcgtgtaaagaatcaaaagaaactattaccaataatagttttgataatcacccataattttgtgtttaaacattgaaattatagtacagacagtattctctgtgttctgtgaatttcagcagcttcagaatagagtttaatttagaaatttgcagtgaaaaaagctatctctttgttcacaaccataaatcaggagatggagattaattctattggctcttagtcacttggaactgattaattctgactttctgtcactaagcacttggtatttggccatctccattctgagcaccaaacggttaacacgaatgtccactagaactctgctgtgtgtcacccttaaatcagtctaaatcttccagacaaaagcaaatggcatttatggatttaagtcattagattttcaactgacattaattaatccctcttgattgattatatcatcaagtatttatatcttaaataggaggtaggatttctgtgttaagactcttatttgtaccctataattaaagtaaaatgttttttatgagtatcccttgttttcccttcttaaattgttatcaaacaatttttataatgaaatctatcttggaaaattagaaagaaaaatggcaaggtatttattgttctgtttgccataatttagaactcacacttaagtattttgtagttttacattcctttttaacccattcagtggagaatgtcagcttttctcccaagttgtatgttaagtctattctaatatgtactcaacatcaagttataaacatgtaataaacatggaaataaagtttagctctattagtgaagtgttaa

SEQ ID NO: 15328 - DNA, 1485 bp, Homo sapiens
ggtgcggcctccagggcgcctcctgccggccccgaccttgggacaggccttccgcccggaggaatgaacaagtgtcagtcgagtgtttacagatccggccaggaccccggcccccaatgcactttacgcgcgaagaagttgccggatggttgtccctgtcccgggccgcggcgcggtcgtcttggacgctggggcaggtgtgccctctgctgcctcccgtacccggcctgcggagggaggggacagctggacccgcaggggaggtccctttcttcctgaccaccgattgagacgtctccaggaccttaggggcagatccgttttctcactgttggactctacctcactggtctggaagtcctccgaagacattatttttccaaaggaatttggtttcgtgcttgtgtaataaagccagaatttacttgttctttatctccccctttttctatttcactgtcacccctctttgtggacagaagttcgaacatgtggtgttgcactagtttgtgctcagggtattctgaagcccactcgtttcctaatttttactggattccaaagctttgatcgaggatattttttaagaggttcaagcttgtgactgttagtagtgcaaggatttgtatgggctcagtgattacaaacaaagacatgcaaaatacaactgtttaaacattttcaaggtatttttaaaggttttgtattgaaacaatgtttatatttactgagctcctaaaaatggtagaatacacatgaaaacttttgtttaggaaaagttaacttgttaaattcttttgaattgaataaaaaaatgcattgaaaccatatggtgtgtgattaaaaaaaatgaataaattgtgaagaactggttttggttacaggagtcactggaatccgactggagatgatttggccccctgtcctggtctaacatacaaatctaggaatattatgcgttaaagtattttaaaatacattatccttgtaatgtattttacaaggataatgtattttaaaatgggagttgcataggagagatggatgtgtgtaaacattatcactaaaatgataaacagaatacccattagaattcttagaactattaatgatcaagaggggtggaggcatttcttggtatcaaataactggttaaggttactttgggcgaaatctatttcctttttgtttttgttgttggataacaagaaatgtctagactaatattcatcagttttacaaacataatgaaaattagttgatttttagttgatttttttgtcccaacattttttttaacctttttgccactcattatatgtttgcagttctaggtctttgacagctgaagaccacaggaatcaaacaggcgagacacacagaatactgacccttctttacgcttttatagtgtttataccatatggcccagtgtggaattcttgattatccaagtgcctttggtcatttgtggcaggaaaactt

SEQ ID NO: 15329 - DNA, 970 bp, Homo sapiens
tgacatgaaatctttgttcatctccactttgtgctaacccattcatagttggcagttaaacacatactccaaaagactgctactatctactattttaagaatgtaattgattgttcggtatttcctatcgacgtttatttacctctttagcacttatactttagcataaaaaatgttgagttatcaccacctttcaattccatggacctgatttttccagaaagatgttttcctctttcagatttttgtacaaggctaaaatgtctttcccatccataaccaagtcctcctatgggtacataaacccaaagtccccacttcttttaaagggatatgatcaagttataacatgtaccctgcttcccccaaccctgccttcttcactaaataagcatgtagctcagtggtttccaaatttggctgcacattcataccaatcaccaggggatttttttaaaatcctgatgcccaacttgcactccacattaattaacatgtctaggagtgggagcctgacagacaccactattaaaaaaaaaaaaaatccccaaaatgattccaatagacaacaaagttgaggaaccactggcacatcccaagctaagatacaaggttaaatggcctttttaagtatgtcatactggatctttaaataaagcaaggcttttgttacactttgtcatgttattaaaagcagacctttgggctgtttaaccgtgtaacaaaaatgccacgtgaaaaataaaaatttttattgtatagcaattctctataaatagtagataatctaagtccttattttctgatggctcttgttccactattaacattgtttttaatttttaaaatcctatcagcagcctcctaattagcagtgttaggaatttgccttatgttttccatctcatctcctgaacctgttattctgagaactcataaataaaattcagccaagattaatcaatcaatc

SEQ ID NO: 15330 - DNA, 386 bp, Homo sapiens
tcaacatataattcagaaggatcttcatctgactatgacataaaaacaactttatacccagaaagttattgataagttcatacattgtacgaagagtatttttgacagaatatgtttcaaactttggaacaagatggttctagcatggcatatttttcacatatctagtatgaaattatataagtattctaaattttatatcttgtagctttatcaaagggtgaaaattattttgttcatacatatttttgtagcactgacagatttccatcctagtcactaccttcatgcataggtttagcagtatagtggcgccactgttttgaatctcataatttatacaggtcatattaatatatttccattaaaaaatcagttgtacagtg

SEQ ID NO: 15331 - DNA, 133 bp, Homo sapiens
cagaggagaataaaaaatggctgaggtgaacaaggtaaaacaactacattttaaaaactgacttaatgctcttcaaaataaaacatcacctatttaatgtttttaatcacattttgtatggagttaaataaag

SEQ ID NO: 15332 - DNA, 488 bp, Homo sapiens
gcagagttaaagagcaaaagcttgtgcctttgtttctggtttctgatgtacaagcccctggggctctgttgaacctgtgaaatactgacaatgtcttctaccttccttccccacaccctgtccttattagacacctgctcagtgtggctggaggttgaaatgccaccaggaaaatgccacttcataattgaaaggggaaagtaatgaaattgtctctggtttcagaaacttttcctcttaccttcctttctctttcctaacttaaaaataacagtttccatataacaagtagaaatttaagtaagtactctactaactaataatcatttcagtcagataaacctaaacattaaataaatatctccaatattaggatggaatacatatgtatggcatgtactagattgtcctatattttatgtttatttggatttgcttttatttgtaaaattattcttttctgaataaactgcatacaattcaaaatg

SEQ ID NO: 15333 - DNA, 2271 bp, Homo sapiens
tttttaagctctttgccaatattccatttctctagaatgtttatcctaagcacttgtttgtcagccctctcatactatgaacatatgggtagagagtatattttctgctgtatgttagtattatgagaatagttacagcaaaaacataactcagtcaaatgatatgttaatatgaactggaatgcaaagtgcatactttttcattcaaaatgggtattcttgatttcctcagaactgataaaaaataatgcaacatcaccaacagatcctgttatttcctctgcaggatacagttcaatatgatgcatgaaaaatgctccacatttaaaggacatacccgtgtatgttatgaaaacatggtttgatactttgtttatactaccctcagctgaacccctatatatgaattccgttttcattgtcaagaatgttactgtagtattctctagaacttcaatgtctttgtggacattgttgtgaaattggtgactatgtatagctgtcgttagtctttttgggagactgttaggaacagtttgtacagtatatacttgctaaatgagttcattatgacagtcacattgctgatgcttactgagaactattacctactcttggctcctgttactccgtaggcttcttaatcttccaggcattacagcagcacagtgttctactttttacatcatttctatgttcggttgtttttaggcataaacaatgtgtattgcagtgcatttcggcatttgtgccatactgaaagaatcaaaaacaaatcatccaaattaaatttcaaacattatttcagagaacacagggcaagacacatacagtgccttcagatattaagcattccacaacatcgtgcattctgtatcagctggtccagtccattctgggtcctagattactgtcattgtctaaaagtaacttttaaaaagcagagttcatgaaaactgcaatgctgggaaaagaaggaaacatgaaaataaaaataagacagtttattagaaatagcatttcctcataagcataaaaagaaaatctttgttgccaactgaagcacatgatgattttgtggtcctttatggtttctattacattcagtaagaaagatgtcaacatgctagaaaattaattttaaaactaagttattccaacactaaaagcatacaacagcatgccaacagtaatatattattctccaagactttacctatgtaagtgttcaaaactctgcagcattaaacaacgtgtatgcaaattgttatggatacatttcagaatctaagaaatcaggcaagtgcttaaaaggccaacggtccaagggattacatctgcagtttaaaaagtaaatatatattctatcgtattcataaacaatatctatcaaatgggttacctccaaatatgaaaatctataacaacctatggttgaaggaatgctcagtttcatttgccaataaattggtttctcataacttgcatcaagtttaattttaagtaaagctttttatatgtagatattttgttgaatttgtaaatacacttaaaatgtagatgctatatgcttataggtgttacatacaaataaacatgcaatgtttatgttgtactgtataagaggtaagctaattaatgcagtgaatgggattggaaagcatctacttaaatatctattgggttcccccctccccccaccttttttgctgtgaaactgaaatagtgaacttttctacgtattgacagcagatttttcgatgaaatcttcagagctttgcctatggggcacagtaggcctagtaacctggcatgtttgatatatgtaggtaaagcataatttaaagtaatcccaggtaaagatggccctaaatactttcatgtctctatattcatttttcacagatccacctgtctcttgaaaatataaaaagacaaaacaggtttgccttggcatcagagagcacaaagattaaaagttactttaaatttgccaatattttgggagaacaataaaactacattttttcctcttccatactggtagatgcgaaatttatctgtgcatgaaagggtcacttctgtaatagtgcaacagatttggtattaaaaattaaatgtggttttaaaagttcctctctcttttgtaatttatgttcccaattgagtgtgaatgtccaagtaatggtgtatgtaatggtacaggcaaatgtgactggatttccctcaaaaaagtaactattaaacagtcttgatctctttgtgactttt

SEQ ID NO: 15334 - DNA, 774 bp, Homo sapiens
tgagtatatgcttatgttctcataaatgaaggtctgtttagaagatcaaccacattcaataaggaattgtggggttcgacatgagttaactttgaaatacgtatgaattctggagaatcctgaaaaagacggtgcttcaaccagcttgcatagcacagagaatattcttggttacagaattcatatgggaactaggcttttaagatgttaataattagctaagctttagtaacccttactgtgctagtagattttagtagatattggtgttatattgtttgatgtttgaaaatatattaatatatgtgccgaacaagaaaccgaaagctatattgtactgtgtatttttactttagtcctcataatcatgttgaatttatgtgatcattgattttatttcatatggaaaagctaatttcttcttaaatttacattacctaatattctcactagctatgttctccaatccacactgccttttattgtaatatcatctaaatagatgcagaaaaatggaattttctctattaaagtattttacatttgacataaaaaagaaccagatacagttttctattcagatatgtttattttaacattgtttggttaaaaaaggtgaagttccagtcaaccactttttacccctgaaatttcaagataatgctatattaacttttccagatctaacactagcttattcttccctgttataaaatggtttgaacttactgaggagatattcctatcattaacaaaaataaactatttaaataa

SEQ ID NO: 15335 - DNA, 103 bp, Homo sapiens
aataactaggttttaaaactatggctgttaaataagctttttccagccaaaccaaactacatgtaaagtgaactgtttcctgtataaagttctcatcttaatg

SEQ ID NO: 15336 - DNA, 24 bp, Homo sapiens
ggaaaaaagtgaataaaactttac

SEQ ID NO: 15337 - DNA, 548 bp, Homo sapiens
ctgcatgaatctacctgagttgctggcattgggaggccagttactggaaaggaatggaaaaaagaagcctccaaaagggaaaaacttctgacaatatgatgctgtgcgagaaatatttacagcacattaaaacgatctgtattattaaataaataattttcaaatgttaaacagtattaaatggcacctgattttgtgttaaattttagttccctgttgtttaatgcccccaaaatatgcagacctttgggaatataaaaatattgcacccacatgtcttaatggggctgaatttcagattatttgttacatatacttattatattgattgttgggttttgattttggtgcttgctgctgaaataaattgaaaattaatattcaataaaaatgatgtatttgtcacttgctgttaaggtagaacaagaaggaacacatattatacacataatgatgggaattacattgtgatttgtactatctacaaaggagtaactgccagttaggaagaacagtaaacagtgatgttaaaataaaacaatgatttg

SEQ ID NO: 15338 - DNA, 2165 bp, Homo sapiens
gtcacttttctatgtacctgcgatgcattctttgcccgtttacaaaataagaagtatgatgagaagacatttagtgtaggcactttaataacttactcagctccttcgatgaatggaattaaaacttgcttattaaatatcatgttgcacaatattaaaagttgctgatctaaaacgccagatgttaaatgaagtatggctgaatttcattaaaacgtttctcatttggaagtggtaaatagtgataaagactccttttgtacctttttatgttcacttttttttatatagtttaatcttaaaaccaatacgatattgtcaaacgatacaatgtgtgacaatgttgtatcgtttttactgaatacttgatacttggagaaagcttattaagtcagtgcacatcctaacacagtggtccttattttagaagacttctgtaaataaggcaaggtttatcagtgcagatcatcagaattaaagttcaagcaggcgagcaagacagtatacttaaggggttgcaaagcttgggactggaaattgttttgttcttgaaacaaaatacttctttaaggttgcttttgctgtttgactgctgtctacattcgtaaaattctattttgtgaattggtagctaaatcccttactaccctgacaccgtggtatctactgtatttcttttcaaggtgcaatttgcttcagagttccaatcagctagattaagcaagaggctccagaagaaatgtttacttgaattttgcgcttcctttcttgatagtttcctatataaaatttgtcattgaacaagagcaaatgctgaagtattaatgaggcacaaatgactgtgccccattagcaagaattcaggaatcaatacagacagtattaaattaatagcttaagtgaagaaaaaaaaaacttagtgaaaatgtattagcacgattaaatggcaaaaggacttataaaaggcaagggcattaactttcagtcctgcacaaaataaaaaattcctcacgactctccacttttaccagtggagtttgtcttagctgacctgtcgtctttctcttgaaggaggattgctgtagacttctctagcttgaatattgcaacatagcatcttaggtctagatagggatgctaatgccagttgtagaagtgtgaaaaaagcaccttgtatgtagtaatgtattttatatctttgttttttcttttactgactgtttataacactcaattgacaatagatatgaactgtattttaaatcatactgttaaatattttccctcttttgttgggaagctcattttagtttaaccatgtttgttttgttggtagcttacctggaaggcagtgaccacttttttatattctcttaatgaaaccattcagcaggtatatgctgttgaggctggttatagaggttttctataataaatgttcaagtatttttgtatataactggttaattttaataagagataccattatgtgtaaaaaaaagtaaaaataaacgcaaacagttgttgatgcagtatgattgttataattatgccaaatactttacgtatggaaaaagaatatttgtacatatgtgcttttaacaattctgccatattgactttacaattttgaatgtcggaaaaattaatatatgttaaatatttatgtttagtgaaagtgttcataattgagaaaaggaacatatgcattttagctttgtatcttgcaagttttgcagtcagaaattttttgaactagcttttgcttttgataacacttcgtgtttgtaaccacattcatatatatatacatatatatgtgaagctccatatttctgttgctttaaagaagtaaaaccttccatttaaataagatgacatgcataagataacaaagcttccttgatttccttttcctgtgtaatttaatagatttgttgactagtgcttgggcacattataaatcagtgttatttgctcttggagccattttttaaaaaaaattttggcagtgagcagttgaatttatcttgaatttatcatgtgtgtgtatttctgaagcagctacatagcagaacattttaagagattctgttagcccacatgttcatgttggttgctgctgaatggtaaatattaaataaaattaccagattaatcttaat

SEQ ID NO: 15339 - DNA, 1463 bp, Homo sapiens
tttggaccccaaagcgggatattaataagcactcatactaccaattatcactaacttgccattttttgtatgctgtatttttatttgtggaaaataccttgctacttctgtagctgctctcactttgtcttttcttaagtaattatggtatatataaggcgttgggaaaaaacattttataatgaaagtatgtagggagtcaaatgcttactgtaaatgcataagagacgttaaaaataacactgcactttcaggaatgtttgcttatggtcctgattagaaagaaacagttgtctatgctctgcaatggtcaatgatgaattactaatgccttattttctaggcatataataatagtttagagaatgtagaccagataaatttgtttactgttttaagaaaactaccagtttacttacagaagattcttttttccaaacagtaggtttcatccaagaccatttgaagaactgcaaactctttctcttagaaaagaaagagggcagcctaaaataaacgcaaaatttgcttatactccatcacattcagatgtcttggttgtgacttattaccagtgtggcagagaacccaagttacattttagatcaaaatattctttatgtaggtattgttaaaaggctagagcctacaagttgctcttccatgcgttggtcagggggccctgaaaacactggtaatattaagagtctttctcagggtaacttaatgttttcttaatgaacagtgtttccagctacaaattcttccaataaattgtcttcctttttgaaaagtactctcatagaagaaatttagcaatttctcgttgactgactcagtctattttaagtattcagaaaagattttgatccccattgagttaatgctctgccttgaaaattatttttctgatccttgttagtgataacattttttttctactgaaggtcagaggataggaaacaagtatttctcttctggtatacatgtaatgtattctgtaaaaaagtattcatattggcaattttagttaggcataatattgtggttgtaatttttaaaacttagtgttttgtctgattaaagcaggcactgatcagggtatctcctaagaggtaattcacttcttattcctttccaataattattacattctaaattttcatctatgagaaataacaaacaagaagggaatagaattaaattggggtataatctaatcttcattgtttaaatggtttgccttctcaccattgaagccatttttttatagcctcagaaagaggaaataatgcctccaccattttctacctggtgacttgaaaattgaacttttaagttaggaagaagttagagtcagggaacttgtataccactatctatgcagcattgttatagtctgattatttctgtgttttgaatatgattttcctaatgctctaaataaaattttgttaaaaatt

SEQ ID NO: 15340 - DNA, 2596 bp, Homo sapiens
tatagaagcaaaaagcccctttcagtccaggctcctaaactaattgcttacaccaattggaaatactaacatgaactcagtactgaaaacctggtttgcataaaagaaatgcagaggtttacagagtttgctatttttttctacttctcaattttaaaatttattcttatatagaaagcttaaagtttcatgcagagtgactcatgtcatagcagaaactactgttactttagcatttagcactatcatagaaaggtacctttttctctttagtgctattgtgaaaacaagcataatttgctatatgttttccttttcaacttttcagtgttgactataaaccattgaatggaaaactttaagatgtagaaagctgtagattgcactttgatgactcacaagttaaatgtgatacagaaaaatagatcggttagttgttttgtgatgcacttatctttttcttttttctaactaaaattgtgatgttacagaaagtcattttatgttccttttttgtctgatgatccaatatttactgaactttttgtaattggtgataattctttttatttcttccttatattaaaagctcatttgacagcatcagacattgggggagagatgtcccccaaagtgtgtattctaattttattagccctatccaataaacaccattgccaaagtagtattttcataactttcttgttgatttgggccttggtgtgaagtatatttacctgagagttcacttttacttttcttaaacttaggcttcatttacaaaatgttttatttaagcaaggaacaatgtaatactcaataatgacctaaaacacctttttgaaagggtttgcacttggaagagagtttatgttctgttgaaaccaactttgatagggtcctcacctttccgttaaggaggtgccgcactacaagtttcaaattatatggaaaaacctaaaattaaccctctgttggtgatctcataaaatggttttgaccttttggtatcttaatttctatctaaactttatcagaaaattttctttgaatatatcaattagttggctgtgggaattttccctttccacattaataaatgcctttctgtgtttctgaatcagaagcaaatgattagggaaaaatatatgtccaaacaagacaagattagtttaaacagttaagaacatttagtccacattgtcttgtcagccagcaattgtcatggaagctatcatttttaagagtgccactgtgtggatttttttttcaagtggttattacattaaaattacctcatactgaggtttttgcactgaaatatcacagtttcagatttcatggttaatgttgtgcgtatgtttgtatgtttttaaaggaaacttgcattttcaatagttgatcctaaatttcataaactgcacttctttactctggtaaagctgatgtttttgtgcttattgtgaattgccgtagtacctttgaatgtcaaactttatttagaaatataaaacttatcctttatgatataaatggttgagtgtatgtacccagtatttctaattaaatttcacatgctaaattaatgaaagtaacaagattgtaattttttaaagtcagttgattaaatgcaataaatattggttgctcaaatatgccacaaataactcgaaatttttcatttactttcaacagcataagattctttaatatttaggattgactgttctttccagttaagcactgaaggattatgtcttgtagcttccccaagagaaggggaaggaaaaaaaagcactatgttaaggataatacagaactcttttgaactattttggtagtaccttttaccatactgtttgctttttgatttgggtaaatatcttaagagcaaagaaaacaatacaccaaatgaaaatgctttgaaagtaaatgaaaacagcgcttttgaaaggctggtatagtatgaccctggagtcagcctttgtgttacagcgaaaatgttggtgctataaattctgattgtttacagatgttgattctgcttatgctccaaagtgtgcatgatgtattttacgtagtactctgaggaagtctctttataaaacctactaccacttagtataaatttgtttgaatttatatcatttgttactgtaaattcagcttattccaattaggttggcacagatttaaactgatacacattccacaaaaaccaattcagtgtataagtattgaagtataagcagtcattgcagcttgatgccagatcatgtatgtaataacaagtggaagttaatagggccttctaatactgtatgggtactcctaagaattatttcattttggatataaagaagttatgaggcctcctgtcacattcacagctggttctccaaaataatttggttgtttcaaaaacaaatggtaatcatttggttggattcttcagtatcatgactagatcatgtggttttaccatagttgccaagtggtgggaggtagcatacctgaaaatgtacgtgtgtgtttgttgtattttttcacattttgtgaacaaagcacatttattaaaaattttaaattttctagt

SEQ ID NO: 15341 - DNA, 3196 bp, Homo sapiens
gggagcatctgtaaatctttagccttgtgaaaactaaccttctctgctgagcaattgtggcccatagccatattttgagaagaaattcaagaatggaatcagcagttttaaggatttgggcaacattctgcagtctttgcaatagttcacctataatcctattttaaatctcagagtgatcctgctgactgccagcaaaggtttgtaattaagaagggactgaaccactgccctaagtttctttatgtggtcaaaaactagataatgaaagtagcaggtgctaagtatcagtgctaaatgctctgtatgtcactacatatgaaaaaacatcaaaaaacaattagcattggacatcttaataaattaagttgacatgaggtaaatgtgttgataaaaactaattttagaagtttgaagactttaaaacatttcatactactattgttttgcaaagactaaaatatttggggacttaaagtactgtaatccactaaagacgtgccaatgaattattggaatatcacactttaaaaaccgccttgtaagttctggggagcattccaaagcagtatattggttccaattagagtttactttttttgtattaatacattgctatttctaaataccactttcctcatctactagtaagattgctagcattgaactgtattatgtggtttttgttgatttggtataaagtttttccaattcatttatattttacaaatgctagatattggtctgggaggcaacattaatggtaccagcctgtcacaactgagcagttctaataatgcagaataaatacatgttgccttaaagggttatctagtatccttcatcttatttagcactggagcaaatagccaagggaaatcaaatcagtaactggtcatggtcatgcatctaaaagtgcatggaagatcatttattactttttccttttttctcacatggtttgaaacttaaagtgcacatcactgaaataatgagattttcttctacggtgtgctaccctttctaaactgttctaagaagcaggcagttgatgtatgtttatattttaagtcagctgtcaaggggagaccacagccttagtatgacatcctgcacaatttgtgaagcatttattctactgaaggcacagtcttgtttatactttctgcacattcagtgtattggtaatttaaattatttcagttttaacttgtgaaagcttatattatgatttctggtattttagaaatacattagagtctgtgagtctcattctttaagatacagatgtgtgaacttcaatataaagttgcatttgccaaaatttacccgtgtagcctgttaattttcttgaaataagttttacatttttggcacataacaactttttttttaatttgggaggcaagcacaaactaggaagactagctttattatggttttgctttttgattcttgtagctactacattccagactggaaatgtatgaatgataatcaacataatgctgataaactgacataatattatctgtaaaagcattatttggtagtttattataatcatccctctattattcttaaatgccagtagtatttagagatgtgtacctgcttagttaattggctcagaattttaatataaacatcacactttaatttggagcatagtaccatagaaatttggggttctaaatatacaacttgtaagaagaatggtttacactaacattatgacaaaactagaaaaagttattatttttgtttgctttctgttgttttgtttattggttggtttttgtgaagtttatttttttttggtatttgataattaagattaggaatctaataacacagaattccatattgctatagtacttctgtaaagagaatatcaatataaataaggaaaataaatcaatgaaatgtttcaatgatatatgcaactattcagttttgctcttataaggacagctcaagccatgaattagtgagcattctgacctcatttttactttacaccaaagttgattagatctgagacaaaatttaatgcacaacagtgagttggatctagcaataaagtctccttggtactgaaatcattatctaaaataaaggaaatgttatcaaaagatgttctgataacattgtgattgtaactcaaaaaaatttatagtagaaacgtaattgcaatgatgataataactaactctgcttagaggttcaaatatcaccagcaatcagtaaaaaattcagcaataatcttaaggccagagagaacaggttcaccattgcatagacaagaaaacagatatgggttaagagttggggactgaggagtcaagagcaacggccacgtgaagctgcctgactccacctagctatttggaataaccgattcccacagttttggtaagaaaccagccccagtaatcagtaagtcaggctgaactgcagtgacttttatttaagcctactcctgactaacttggcatttgcaggtcaagcaggaagcagttgacaagacacatcctcagtgaatcaatgccatttgtaactcaactggtaacagtagtaatcatacaaaataaaaacctgcttcagtgtcttaatgaccaaatcacattatctattttagcactcattccaaaattcagtatttaatgtaattaatctttaatccataaaaatacatccccactgtagcggggcagggggtgtccaacttccctgtgagactgattatcaataataatgtgtctccctcttggactgagcacacatctgagctgaacggcctttaaattgtttttcataatagtggtgatatgtttgcgtggatacgtctgtactatttcatctggttcattttgcatgtaatagatttatctgtgagatgcctggctgaagctaggcattcagtctgtgactgtggaatcctatgcaggtattaaccaaggcagaaagaggtgagtaacttgcccatttctccacagagaccccatttaaataacacaaaattgaccacagtgattagatgaaaaaattatttgtagataggataatctattgactgaattatcttttgcagatatcagctggttggatttctcaccaggattgtctatagaagttaactgatttatgattgttaacacataaatatggccacttatccatttgcctcaacttc

SEQ ID NO: 15342 - DNA, 3392 bp, Homo sapiens
cctcagcactactattctctcttaaaagataagctatttaaccccaaacatttggattggtgaatgggactattcattgttcaaagatccagtgcagtttttctcttgaaggatcatttaaaaagggacgcgaataagtttgctccttcatataagtaattattctatataggaccattatgtttggatcattaaatacctatatgaatatgagatctgaagcacgtcaagttgaaattaggtacagctgttgctccttagcaggctatgaagttgcaatgcttcacatctcttcactacttaaagtgctatttcttgcattcatttctcttgcaataaagcttcatttttttttccccttgagagtatatattttcccctacggttttaaaaaacagataaaacatggacaatggcagaggacttttttggtcttttagtattgaacatgaaatttgttcaatttatcatttatcaggattcattgatcaaatatttcaacctttcatatttttaagaaaacacccatatatattgaaatgcaaacttaaacatattctgttcacttgagtgtaatacttgatgcatgcacacacacacacacataccttctttatagctacaaagtcagggcgttcataggcaaaatctgacaagactgaaacaattgggagattatctttcaattctgaaaaattctgtgggtggcctgtctttaagcaatgcttttctcttgtgagggaagactgtaacacagctgaactatttcagtgtcaactattcagaattgaaaatgtaaattaaaatttccacaagcattgcttcagaatgaatttgtacctataaagcataaggcattaaatgacaataaaaattccaaatggactatttgttccacattgtatttttgtcttcaaatattttctaagagaatgaattatcccccaaaatgcatttagaaaacagtctttggtgatatttattatatgattatcaggttgttagatgataactcaaaattttcagtaggcaaataggtaatgtggaaatctgaagaagaaatgaatatccagtatagcagtgactttgactgctgttattacctatagctaagtgtgtatgataatgaaactcatcattttagtcaagtagaggcaatgcaaagattcacatagtttatttcaactatttattgaatgattactatatgcaaaactctgtgctctgttctgtggcatagaacttcctttgatatgctgcatagctagttctaggcataggtacgtagtgtgacacttctgacttcactgaaattatggaagaaagacacccagaggaggcctctttggttggttcttttttcataggaaattccttcataaaacatgtaacactgatcttcagatagaaaaagcaatctgtttatttacctgtaagggcaaagtcaatgagtacaacttgcatatgtcatcccatataactaagacatatgcatttatgggaagacaaaacaagaatgaaacacttatactgactttcatctggtagtagatgatttccttaatttttattaggtacgtaactatttccaaatcctctaattgcatactactctcaagtcccattgaaaatgaatgcttgacttcaactttttagttgaccaaatacaaacatcctaaagtagagcttagggcaaatatttgattgagagggcacaatttcattcagtacaagagaagtactgtaagcagtacctagaaataatctctaaaattgctatcctgataattttgttgacaggtctaaattacaatgaagttaaggttaggatttccttagttcttaatgtctcagtttttgaattctacctttaagggttttagtcaacatgccatatctcattattgcagagaacactacattactttatgaacacaggtgtctgagctagaattattctcttaaaagacaacataactttttatgtcttttatttactttttggtaatattaacttaccaaatcttctcctatgcatttttaatatgacaaaacaaattttaaaagatttgaaataattgtatttctctgaattcagtgaagaaataattcatgattcaactgcatctccaaacattactcatgaccttgaaataaaataggaacctatgaaactattgatatgtgaatagatgggttatttcaacctgttttggtcacatcactatgccgagcaagaaaagtggatctcagggaggactagcagcccctggttaagggagatctggctgtgagtcatcatggcaagggtaatctttacaagcatagctgcctgcactctgtctctccaagtactggttaaggcccaaatgaaggcatgtcaggagagttagaggtgcatcacacatccgcttcatatgttgggtaagaaacataacttagtctttattttgctgggcttctgacttttagaaacaaaattctaaaaatttgcaagtcaagtaagtgtgggtagcaaaaacaattatctttaaaaaaaaaatcacatcagtataggccatcaatatcacaatagatttctcaaggtaagagaaaataagctcatgagatgacattcacccttcaacataaaagaacattgggttaatgcagccttggtttcctgctgagctccagtattttgatagttaattatttcaactaatatatctatgtctatatcatctatcaatttattaagcaggtctatctttaatttgttatctcaaaccagtctgctggttaaatggaaacttaaaaatatccatggcaagctttgtatataaatgaacaaaaaagcaagcaaagcaaaacaataaactagcagaagaactagtaaaaatacaagcagattcctctactgatttctgtttttgtgatctctgactttcctttcaaatttttactgagaatatcgaaattggattatgcaataggatcttatttagttatttgaatctgtcttagccagttcctgtagaactgagaaataagattgactttgaatctgcaacaagatctgaaataaatgagaagccaagctcttcaagcacctctatctctgtactcctatatgaagagaacagtaaaaaaaattactggtatttatttggttaaattcatttgcttattttttctgtttttggaaataatttgtaataaaaatcatggcaacataattcactttccatcttttaaaaatatattttgccattaatccaatatgtttccatcactttgccaaaacctatttaaaacagtgaattaaattttcactaggtttgaatgatcatgttttataagaaatgtctttattttagtgtgttaaaaccttattaaacaaacaactgttt

SEQ ID NO: 15343 - DNA, 5403 bp, Homo sapiens
gaaataaacagacccaattcatcaactggaaagcaattctatgctggtgctatgcaattatgctctgtgtttcatatgttgctttggcttattttttttcttaaaggaatgtgttgttcatgaaaaactgatagaagcaacagaagaattcgcaggaagaaaaatcatagtgttaatgaattattgagggcgaaaaaaaggtgttttcttctttgactacggagtccaaatccacttaaattctgttttcctgaaaagaggtacagcataagaaatagctctttattgatgttttaaaagcagcaacttggtggtgtactactggaactaatgactgcaaagtgttaaacgactgaaatatacaaacagtctcttagttactcatttccatcttctcttcaactttcacatcagtcttccggaatcaagatcaacatatcaggtggtcattgcctttctccattgtctagtagacatgtctaaagttcaaactttataggataaataaatgtataatagattatctgtcacttgtggttgaaaggcaaatctacaataaatgtgagaattttccacaataaaatatggataacttataaaaacattggttactaaaattagatcctcattttattgtagttggttcaattacactaattctaaaagcatccatgcatatttatatctccagtctctgttcaggaaaaggaacatattgaatattttcctcaggaatatggaccagaattgtatcccttcacacaaacatacacatacacatatgcacatcattcaggtagtatatgttcttttgttttcttcatgcttctgactgcatcagaatcacattccaaattctcttttcttatgaagaagagatgtcagatcatcaattttagtaaataaaatataaaatgtccccctgcaaggacagttttcaggtacttaaaacttttcatcagtattggacagaaatcaattagttgttgatttggtttttctccaaatggataaaatattgaaaattgaattgccaattgacaaaataattattacaacaaactatttcttattattttcagttctgagaggaacgtaaggttctatttctataaacacttagagtgtcctatgatctttggttgcactgttagcatttattataagcacttataactatgatgcttcatttagatttttatctcttgcgcttgttttaggttaggaaattaagttaccaagcacgttgctctgtgctggacctccaagagtgatcatccgatcaatgagtattcatggaggcatactcagaactgcagtgagtcctgagaaaatgtagaagagttgaaaaagatatggtcttactcctaaggtagttaatgagaatgcatgaaaaacaaaaacaaaagatagaagacatatagaataaaaaatctaagcataaactgtaaatacagaaggtcagagaaaatgaaaatgactgacaaactttatgggaacagcagaatttgacttctctttgaaaggcattaattgagtgaaagtgagggcatataaaggaataataccaaccaaatgataaaagtgagaataataggggaagtatctttataggactttaattagaaagatctggatgccctagaagatgtctgttggggagttctgaagcataagactgacaacaggttgtgaaggcccttagaaaactatggtgaaataatatagtattaatataatagaaacaaatctttttagtagcagggaggatgctaaaaactaaaatatatattactaatgagtgagatgtaatctttcatgaatattaagctttgggataaattttgaaaggatcttttagttgcttctcacatggaaaatatgtcactatgaaatgtgagaccctaatgctgataaaagtagaaaaatagtaaatcattatggtataataattatctcaggcttagcttgtatcatttgctcagaatttggagaattaaaataattttattgtttgacatggaaaaataattactaacttctgggtacagtcattaaagcctgatagataaattcatctgaaatatgccatgtgaaacagctattagatacatcttctcaataattttcaagacgatattacatacttttaattttataacaaaattccacttcattatctgagttgataatttgattaaatgttaaaaattatagataaggaatatattttggagttcatagaaaacacaccactttattagatagagactggcttcagttctcattttatctgctcttctcatttcttcatattttgagtagacttgcactgatgatgtcattactcagtcattattttctgttctgttaaggtacaactactgggccttgaaatctatccttcacaatcttggctgagataaggacttggcacaggatgatagagcctggacacaagagatctggagagggaactgctatttgctgctacattcagattatgagatgtcagggaactgtaaaaagggtaatgaatttttaaagagagtaaagagttatgctgtgtcccggtcaactgaaatacattaaaaattaattagatggtagttcttaactttttaaggcagataccttgagaatctagtgagttatagaccctctccctagaaaagtatagaactgtttatatggacaataattcacatgcattcagagatcttagggatctcctgaatgttttcttggatcccaagtgaaaaattcctgaatcaggtctcttaggtgtgcggttaatgtcatgtataacaatggggggacccttacttatctaaatataattatcccaatcctaataatgatgaggttgcataggaaagtaatagtgtaccaaactttagattattcactaaaaaagttgttcatttatgaagtagtcgtttatcaaacatgtcctccccactcagcaaactatgccttctatttattatatatgggtcagtttcactataattactgagtgttataaacatctgaccataacattttgaaatgatgcaaataaatttccaaacaaaaatagtgtgaatttaaaagcaaattatttgagtatctaagaaacaagatagacttctagaaaaatttgactctctagaatatttcttgcagaaatgagatttttcataatagtaaaagaggcatatgtttatcaaacaatgctgtcacaaaaagcatcaactgtaatgggactattaatgcataattattgatttattcattcaattaatatacaattatcccttttcatttaaagatttaattcataattacaattataataaaacttcctttaaagtaagatacaataattttattgtttttcattcttttttcaacaaaatatcccatccaatcattttttatattattaaatattggctgctttttcttggattcacattaaacagccctttccaacttccaattgtcttaaaataatgatgacctcctgtgagtagatacagctctttacaatttttttctttagtgccttttcttcttgaatttttcctatatcaaatggagaatatatgtacagatggtattttctcagtttataggcatatcagtgaccatggctttctttatataggtttttaaaaaagccctaaataataaatagccagatgagctggggacattgagaaatagccttcctcttcctttttcaactcatttttttcccacctacatgactgtaaatcaaatatttaatagctcttacttaaaaaaacagatacaaagaatgtcttgatttggtgtgctcatttaccataatgtcatgaggggaattagatttcacaactttaaaaggaatatatttttattttattttgaaaaactgagtcatataggaattttcttatacttcaaggcatcatggaaacacttttttcctgtttggatattgtggaatttaaacgttcaaataaataaatggcataactaagtgttccaaatttttttacaatgtctttgaccctattcaaacactttaggtatttactgaccgtctgatgtgtaagatgtggaataaaactggaatcaattaattatttcactgtgttatcagcgcaagatcaaccatctgggtttcttaaagacacccgaaggattgaattttgtttcagtattgataatggcatagtctctatgtgctacatggaattacatcatttatccctccagtgccctatatgttgataagtatgtcagtttgacttagtatacatatatacagagatttcattacatttacctaataaatacaaaatacatttcgagtgttactgatctcctatgttacatgagcctcctgtaatcattgtgcattgatgttccaatgttttattgtttgtatgaattttaatttgaaaacaaggaaacaatccaaaagcagaaaaaatagcttttcttaaaattttcagtgctacattttccctctgaggtccatagagatttgaatgtataggagattatccgaaaacagctattttgattaaaaaatatatctcccaggattcaaccaacttaatgatgaagtactattgtctactgctttatacataaaagggaactttttatctgcttgtaaagggatttttatgtgtatttctgcataatcagatgacttctattgtgttttctactgatgaaattctctgtaaaatgtctttttcttacattatccaacaggcataaagaataacagtaaagacttttgtgtttgtaatactacctcttttatccctgcactactgttttattgcaaaaattctatattgtcactgtattttttccatagaatataaattttgttcttgtgctaaagctggtagtttatgtagcagacaaaatatacaaataaaagaagagactgattttgctgaaagaattatatataatcaagaagttacatattgttctttaaatatgatactgaattttaaaagcaaacgaaattcaagaatcttatctaacagcatagcagttgcttatggcatacaaggctaaaattaattcagctatttaatcttaataattattatgtagttaaaaatctttgactttaatagtgttttacatatacaaatagctgaagtaacattcctataattttaatctgacattggttagatcaagaaaacattgttaataagactgtagaatttgtaattattgctatttttcatttttaataacaaagtaatgtgtcttattttctaagaaaatggagaactttggtgtactttaatacatacaaaaatctttgtaaaaataccttaaaatgtaccaatattttctttgcatatattaaatgaaagactataattatgaaatgtt

SEQ ID NO: 15344 - DNA, 927 bp, Homo sapiens
ccccagcaggcgtcaccatccaccttcccttctacaaggactccattggatctgcaagaacactggacctttgggttctttctggggggatatttcctaaggcatgtggcctttatctcaacggaagccccctcttcctccctgggggccccaggatgggggggccacacgctgcacctaaagcctaccctattctatccatctcctggtgttctgcagtcatctcccctcctggcgagttctctttggaaatagcatgacaggctgttcagccgggagggtggtgggcccagaccactgtctccacccaccttgacgtttcttctttctagagcagttggccaagcagaaaaaaaagtgtctcaaaggagctttctcaatgtcttcccacaaatggtcccaattaagaaattccatacttctctcagatgggaacagtaaagaaagcagaatcaactgcccctgacttaactttaacttttgaaaagaccaagacttttgtctgatcaagtggttttacagctaccacccttaggggtaattggtaattacctggagaagaatggctttcaatacccttttaagtttaaaatgtgtatttttcaaggcatttattgccatattaaaatctgatgtaacaaggtggggacgtgtgtcctttggtactatggtgtgttgtatctttgtaagagcaaaagcctcagaaagggattgctttgcattactgtccccttgatataaaaaatctttagggaatgagagttccttctcacttagaatccgaagggaattaaaaagaagatgaatggtctggcaatattctgtaactattgggtgaatatggtggaaaataatttagtggatggaatatcagaagtatatctgtacagatcaagaaaaaaagggagaataaaattcctatctcat

SEQ ID NO: 15345 - DNA, 374 bp, Homo sapiens
tccaaatatttgttttaagttatatatacacatcttattgaaccatccaaaaatcattgcttttaactgtttgcagcacaatataactttacattctttgccaatattccataggaaaaattttgacaatgtggagtttttttttaaaaagtggtttgttactttgacttataaatacaatttgttatgtttatgttaattgtgattaggtagtaaagtataagtaattttttggtttgatcgtatctaaatcacattcaaaattaaagttatatctaatatctttgacattttttaaagtgtgttcatttgtcagtgaatcgtacaggatttgtaaagtgttcataaattgagctttcttttgtttctttttt

SEQ ID NO: 15346 - DNA, 883 bp, Homo sapiens
gcctgcctacaatattctcattattaacttcctctatttcacacagaaaccaaggacaacaagatacaaatacctttaaattgataaaatgttttcactgtaatataaattatgagtgcgggaccactattcaatttttttttgtaaagaatgtatttataaccaacattttgttgcttttttttttaattctgtaggattgaacttcaataccaggaagttatgccaacttttcaagtagttttataatagaaaaattgtaatagttttaatcaagatgttcaggggtattaaaacagaactgtgtactgtatatctgtatatatgtatatatgtatgtatatttaaggaagtccagaaatcatactgcatacatgctacaaaaaagtagcaaaaaagtacaaagttggcttagataacttgtaccgttttaaatggagatcataattttatgttcacttgatggggaatgactagaatggggcaataacaaatcatttctaaacagttattttccattaaaagccatattaagtattttgcttgttaaattctagttttatgttttaaatctcttagtggttacattgccatttggtagcatcatgtatatatttatgcttataagtttgcattatgactcctgtaaaatatgaaattataatgcaataaaagtgttatctttcttacaaaagttttgtacctaagtggatatagataactgcataaatgaataaattcagaattaactccttcaatatttctagtagcacaactgataatattgatattttctacaaatgttacttctaaaattacagacaaaattacttacacaattcagttaagatgctttgacactgaataaaatattgatttcatg

SEQ ID NO: 15347 - DNA, 1270 bp, Homo sapiens
aaagaaatgtcacagaagaaaaccacaaacttgttttactggacttgtgaatttttgagtacatactatgtgtttcagaaatatgtagaaataaaaatgttgccataaaataacacctaagcatatactattctatgctttaaaatgaggatggaaaagtttcatgtcataagtcaccacctggacaataattgatgcccttaaaatgctgaagacagatgtcatacccactgtgtagcctgtgtatgacttttactgaacacagttatgttttgaggcagcatggtttgattagcatttccgcatccatgcaaacgagtcacatatggtgggactggagccatagtaaaggttgatttacttctaccaactagtatataaagtactaattaaatgctaacataggaagttagaaaatactaataacttttattactcagcgatctattcttctgatgctaaataaattatatatcagaaaactttcaatattggtgactacctaaatgtgatttttgctggttactaaaatattcttaccacttaaaagagcaagctaacacattgtcttaagctgatcagggattttttgtatataagtctgtgttaaatctgtataattcagtcgatttcagttctgataatgttaagaataaccattatgaaaaggaaaatttgtcctgtatagcatcattatttttagcctttcctgttaataaagctttactattctgtcctgggcttatattacacatataactgttatttaaatacttaaccactaattttgaaaattaccagtgtgatacataggaatcattattcagaatgtagtctggtctttaggaagtattaataagaaaatttgcacataacttagttgattcagaaaggacttgtatgctgtttttctcccaaatgaagactctttttgacactaaacactttttaaaaagcttatctttgccttctccaaacaagaagcaatagtctccaagtcaatataaattctacagaaaatagtgttctttttctccagaaaaatgcttgtgagaatcattaaaacatgtgacaatttagagattctttgttttatttcactgattaatatactgtggcaaattacacagattattaaatttttttacaagagtatagtatatttatttgaaatgggaaaagtgcattttactgtattttgtgtattttgtttatttctcagaatatggaaagaaaattaaaatgtgtcaataaatattttctagagagt

SEQ ID NO: 15348 - DNA, 1610 bp, Homo sapiens
tggaaatgtggagagaattgaagaaagcgcactttcactcttaatgggagagctataaatggcagagctatgtgtaaatattttaagagcatgcagccatcttggtgtgtgcatgagtattgtctcttttgatatcaggattatttattgctaacgtaaatagatagcattgtaaataatcatcacaatgatcaaatcactgaaccatgtctccgcacatttccctaaaagtacaatgtttagactgctatggtaatacatattttaaattctaaaagcatacacaatgtgtaactgaatggtttgtgaaaaatatattgatatatatactagttgctatgaaaatatcatggaataatagggattttagggtggatactttattttcttttatgtttctatatgttgcgttgtgatgacattatcttttaaattaaaaagagatttggctagttgtgtgtgtaatgttactttacagtccgactctcctgatgtacctcttttcatgatctttttctttccttcccaagaaactgaggaatgtttaatatgaaaacatacatcggatatgtgaaaagcacaacaaaattcttaatgtacacagtaaaaaagtaaatatataaatgtagatggcatttaggaccacagcttgctggatttgtgttagctatgggaataacttgattttgtataagctatttagagtgaggctggaggtggcagcttcacagaactggagaaccaggccaagtcccctccccaacctaattaggtcattcaggacagctaagtcagtatatttagagcaatactagcatacgtttttcttaattgttatcagcattgaccaagtggtttggaaggaggcatgctttaatatcacaataattttgatttgtaaaccaagaaattaatcctgtgtttatctaacttcataatagcaattattgcccgaagctatagtggcatatttacaaaagttcttattactgggcggactgataacatttaaaaaataattgtgtttgaccccaaatgactttatacccaattctacataaaaatatagaagatctatctttttttgttaccttcagatgttcactaaataactcagtttttaagcagaagttttcagggcattaaatatatgttgtgtatgaagtatctcaaactggaacataaatttagtgatcaaactgccattcacagtgtaaggcagcacttaaatttcgaacctaaagtttagatgcattgtataaaaaaacctaaaagcagtatctgttatttagctgtaaaccaagttggaagctattcggataatttcttaaatattgatgaactttggagtactgtttcttccttcaaactgaatgtaattaattcatgaataaatgcaccttatatgtttaaacaatctttgtatacttttgggatttttggtgcttatatgctaaatcacattcagcatgtgtattttgacatttaaaatacttccctcaattctgtaaattaaaagaatagttattttacagttccagggattgtgaaataaatgttgcagttttttaaaataatgaaaataaatactcttggttttgctttgtgaa

SEQ ID NO: 15349 - DNA, 356 bp, Homo sapiens
ttgggaattatattttgtttttttcttcccaggcaatacacctctgaacatgtgtgtgataaatgggtttgctaatgtgctgttttaaagtataaagcataatatgttttggttaacacaatgtactttttgaactataaatctttattttaatatggaaatgtttggaacaggagatgcaagccactaacagagaactttaataattctaccctgtattttataaatacgtatgtgaaagtgatgatcatgctatttgttaatttattgtgccactttttttcttttgttttttttttgttgttgttgttttttgagatggagtctcgctctgtcacccaggctggagtgcagtg

SEQ ID NO: 15350 - DNA, 1741 bp, Homo sapiens
tatcacacagctttgcagaaggaaggaagaccttgatcgacattgttttttatttttttaaccttgtccttgtaattacattcattgtttgttttggccaaataaaaatgcttgtatttctttaaaaagtaagcctgaatgtagagtaaaaggggaaatgccaagattttggggtttttttgtttcctttttttgtttgtttgtttgtttgtttttttggagaagagcatcctcttttgtgtagtttgacctaaaaatgaaccttggctctgcttgtgatcagaacatgaacttttttttttaaagaagatttgagcatttttctgtaatcacatcaaaatgatgttttctgtgtaaagcgagatacatatttctcataatgcagcattgtgagaagtcagttcggaccactgcaccaacactgtcgtatccttgttaaaatggtgtgtaccttacaaattataatttatgtgccaggttcgttttgtacttaatttgctattattgtgatgtgtataaaatctttaatcttggttcttagtactttgaattggtctacaggtatattcctgggatgaaaggattgccaaacccaaatatagactagattatccaatgggtttgtgtctttgttccattctcaacatttcttctttcaactataagtaatccccaggtgtggggtagcaagtgtgcttccgtcaagataccatattctcctgctccagtataacagcttgcaggcaataaaaatctatttgctcataactacttctgtatttattagacttatatagagcaaatgcagtaaaagaggtttgcagtgtttcaaacatcccaactatctgactctgtgtttttgtttcttgagttttttgtttgttttgtttgtaatattttgtttttaatcaaatgagtaaaagatagtaacactgactgttctttgtacctaataggcacatacattgttaaaagaattactatgacagcatatttccatagcagaggaaatatatatttcatatattattagttaatattagtaatcaatgttaactaataattagtaatgttagtaatattaactagtaattcacattattagtggttctctcaaaatattttcttgctagggtttgagagataattgtattatgttgcgtaagttctctatgaattatttttgtgatatttcccaaaacatattggcagattgtgctactgcatttattaataagtaatttttaaatgaaggcagttaatgcagaataagtggaggtatccctgcatttatgaaaacgtttattctgaaactttagaaatgaaacaacttggacctccagattcgttctcccatggtgtaataagtggtcgttaggtacctagactagccttaaaaatctatttaatctacagttactatttagcattgttttggctcattttctgggccctagggctaagataacaaacaaggaaatttcttccttcttccgggattaaagactaactctaccaactcactatctttgaaaggcagtttgggaatgttctccctccttttcttctctattcacacaccaaatactattttctccaaaccctcaaatgtccagtcatgctatcccaaactctccaatggcaccatccccaagcttgctgttccacgacacattgctctgtacttagtaattacccacccttcttttcctttcaataaaatgtccatttccttgataca

SEQ ID NO: 15351 - DNA, 76 bp, Homo sapiens
tggcatgacttttgaggaagtgtattaaacctgtatgtgaaatcaggtcctaatactgacaagcagtttgtctgtt

SEQ ID NO: 15352 - DNA, 167 bp, Homo sapiens
gaaatctggagaattttctgaagatgtaaccagatctttccaaatacaaagattagataaattgtcttattgtactttatgtagagagaaaatttcagcttctctacccaagtatgaacaagggtgaaatttgtgttttaaaaataaaactccttatcatgcccagc

SEQ ID NO: 15353 - DNA, 54 bp, Homo sapiens
gcctagaggttgcctgaggcacaggataaaagactcccgagcaattgatataat

SEQ ID NO: 15354 - DNA, 1983 bp, Homo sapiens
taagcacaaaatttctgactatcttgcggtaatttctggaagacattaatgattgactgtaaaatgtggctctaaataactaatgacacacatttaaatcagttatggtgtagctgctgcaattcctgtgaatacccgaaacctgctgttataactcagagtccatatttgttattgcagtgcaactaaagagcatctatgtgccttcatcaagaagcccatgttttgagattttgctcatgaaccatctgcaacttgcttcatcataagaataatttataacttgaccttcaaagagattagagcatttgtttcatcttacagttggagttcaatgtaacattttaaatgcaatttattatttcagaaatttcccatgaaactaaaaatagaaaataagatatacaagttaattcggtacttggataaatcatttctgcattgttgttccagagaatttgctgagaaatcaaagccatggtcatctggtgatgaagagaaaagtttaatctaaatgatatgtgcatttcctcatttaaaaaatccaattggattattcttaatatatacatgtaatatgaaaattgagattgaagcactaattccaaaattatggctgaatatactaaataacagaaaagttacagataagaatttatttctactgaactctatagttagtgtaatataattcatatttttatgatattggcacactgagaaattcattttgtagagctatggataaggcttgctatgatttgcactattagtacagtatagttagaaaggaaagctgaacactataaaactattaacatattttcgtatatgagtaacaactttgcttaagtgtttatcttagttcagaaatacataatgtcatatgttaaaaataaagagatgtagaaatctaaatgaattatcactgtgtatacagacagaaaaatcacataactctggtgtgttaacattgcaatgaaaaaatgaaaaaaagaaggaaaaaagaataagaatgaaaactgctgacgtattacaaaacagaaaaataaatgatttaaaatcaaatcaaaaagaaaaaactaaacatttaaacaaaaatgggataagaatagtcttctagaagtgaggatgcgaaaaagaatgagtttccaattaccctgatgtgacaattacacattgtagacaggtagcaaaatatcacatacacccccaaaatatgtacaaatattatatatcaataaataaatttttaaagagtaagtgctattggcattccaaaattcagctaaaggaaaaatgatcaaaaacaaagtaaggtgcacagttagcaaaagatgcagatgttatatcacagcaattctcatgctaaaaatacaacaaaagacaaagcaaaaaataaacctttgcttttttttttttttttttttttttgagacggagtctcgctctgtcgcccaggctggagtgcagtggcgggatctcggctcactgcaagctccgcctcccaggttcacgccattctcctgcctcagccaaacctttgctatttttaatcttcgttggcactttccagctgttactgaccttgtcattttttattcaaataagattatttacaaacttattcttgaaactaaatatagtaaagagggtttttaaaataatatttaacatacgaattattaattggccatgttcattatttatctatgtttattaatgggccaatgcaaaaaatcattttttcaaagaaaaatttgtccatgtaaagcttaaattataatattgctgctttgtataactcttctatgtttattctattcatttgttcctttccctaccatattttacacatgtatttataatctgtagtatttattacatttctgcttttttctagtcattcaatttatcactgctgaattgcatcagatcatggatgcatttttattatgaaaaaataaaatgacttttcaaatt

SEQ ID NO: 15355 - DNA, 83 bp, Homo sapiens
gtgatccaggagtatttgtttgatgatcggcattttgttcactgctaatagggtaatacagaggtcacagagtatggaaatgg

SEQ ID NO: 15356 - DNA, 1089 bp, Homo sapiens
ttattaagtgactttggtgtgttcatgggaaactgatgtaattaaatattctgttatattaagagcgtgttcttattactgacattttgtaatcaagaaaagtgatatagaaaatatgtaggagactgttaaaattggtgattatggtaatatggtcatgtgaatcaatttttgatttataaagtactcacacaagttgtttcaaagatgatatttctgtgaacagagaggccatgggaagatttgaaaattattaaagaaaaattcctacagattttcaatgcagagaccataatcaaaaagtaaactttctttagtagtatgttcaatacatcatttaattttttaagttatcctgaagaaggaaaggtccttaattattatagtctaaacaaatttatagattactgtttgaagtaaataatacgagtgaatattttcaaatgtgataaaatagcacaagtggctggtgataaaatttgaaattatggttaacctcagctgtgatcttatgtatgtaaagtgaaatttaaatagataattataggttgattacaaaatccatagtgtcattttattttagtcattattgaattataccatttactctgttttcttatagtcttaattttattatattttgttgttactgtattatatttgaaaaccttcaaattagaatacattgtacagttaaagaaattgacttggtacttaaaagaaagatttcccattgcatacaggttattggagaaattttccttttgttgcatttgtggaagttagttttctggcccgtggcctttaattttcttaatcaacctaattacatcaggatagaggtagagtttctgtaaaagaagagacattaagagttcctgaaatttatatctggcatacggataggcttatattcaaaacatcttagtcatacgaccataaattaaaagtggagtcactaaatagtttgcagtacgtttctaatataagtgtaggtgggtatcaaaacaagacaaatgctgttcagggaaagaagttggcaagcttaaggttaaacaaaaataaaattacatgtgttttcgccttcct

SEQ ID NO: 15357 - DNA, 2572 bp, Homo sapiens
tctatatattatatatatatatatatttttaaggtgaaatactaaacactactttctgtctgtggattctgtaaaattatcatgtaaatgttctaccaatttgctgtatatttttgttgccttttttgcttttttttaatctgtgcaatacctcatttaatctgtaaaggtttgtcgtaatcctctacaaagctactccctgttattgtgtgcaagtttacaccaggatgctcacttgatttgtgaatatttttcattccatcaacaagggagtttaaatactatatgtgagactgacaaaaaccttaatgtaatttacttataatgccagaaggaaaacactattttcataccctactttttctgtacctaaattttcttaaaaaaaaatctagtatagcactacattcttttttaagtgatgcagaccttagtttctttagcccctttattttgaatacaatgctacatatgaatgttgaagctgatacattgcacagttctgtagacatcactacaccgatgtagtttctcaaattttagcaatatgctctacataaaatcactacagagatactagtggggaagacgattaacacacctcttacagtaatactgcctgttattggtatagcagtggtatttgcagactgggatcataaggagcccttaaatacttgttattgactggggttatttttatgctgtagcaaatgtgacaggctctttttagcaaaatttttgaaaatttttttggtattactctgaaacaaaatttaagttggagtttcagggatttagggagtagttttcattctacatgaactgaggtaatattatggtaactccaatatttggttaaaaaaactatacaaatcagaatagtactaaaatactgtagaattttagcatttttattttgcactttgtgtggattgaggtgttcagaaataccaaccataaaaatgtaatctagttggcaaaggtgtgcgctaaaacacggaaccgaacatgcattgatttggataacttttgagggtttttgtcaaatagcatgtgaagagttacatttttcttaaaagattggtggtcccaatgtcagagttcttggaacagataactgaatgatagattttttttttttaaagataaaactttacaacctgcacatttgttatgcatactaaatggtgtgttaaaattagggtttctttgcctctctacactacactaatctgcctaaaggtggttgtttcatatttataatgctaattatcatacctacctactttaaattttaggtagaaaattatctgatttaaatacaaacatatttttctcacattgagtaatatgcataatgtagttccaaatgtatttcattactatagtcacaatatccaactaaaaattacgctatctagaattgtaccaaccaaaatctcgtattggcagatcttgacaggctggacctgcaagatgtggcttgaattttaaccatttattacataatctctagtgatcatgcatctagttatcataagaaataatttaaaaggttttgttgctgaaagcagtaagtggtgcagtaaaatacttaagttattcaaagaatgttatctttcttgcaagagtaatttaagcacatgggaaagattctagactttttgtttcttgcaacaacagtgccctctgctgctagaaacctttttctacttactatcatttttattgtggcttgagctcagtcaatctggtgcagatgaggctggacaactactaaccaataaaatcaggagtttgtacaaaagttaaatggaacattataattattttaagtaatgttaattgaaaaaattttttctttttgacaatataaaaaacattttaaatttcctagaaatgtcttcagggtaatgccaatttaagatctctcttaacttgtggccaagaaattctagattttccagctgactttggtataatatatatttatcaggaacttctctcagcagagagtacccattcttcgagttcaaagcacaattttaaacatgtaaaatggatatataatttgccaaaggtaattaatttattctttttttcttaaagaagaaaaagacattggttgttgttacaaaaagtctaaattactgttggttgaaacacagcagctgtggagttcagtccaggcatgaagactaaatctgctttaccaagtaaggtgtaaggttgcatgtttcagtcctctaccatcctgcactgtgagcagcactatacctgtgcgttgtctgaaagccttccgtatattctccagctaaatggtcgtctggtagcctttgcatttaacaaactagcatgaggctttttatatctaaatgctacgtgatagacaatttcagctagccacatattgtatgtatgagattcataaagactttcaatcatttcattttcagacaactgaaattttgtttagtatgtgaattctttttttgaaatgtatagtgaataggatgttgcactggtggcaattcatcatggagcataataaaattaatttgacccaaat

SEQ ID NO: 15358 - DNA, 463 bp, Homo sapiens
aggacagtacttggttgggtcagatttatttgtttgattttcatatcccgtgaaagtttttaattcatatttttccttatagggaaaaatgcaaaaaagaaacaataaagaaagaaatattaactactgtagaactgattttacaaattaatatttgtgctttgaaaaaaagtttctatttagttatttaagaagaatgagaaggccaatagttttagattattttatctggtatggtgctaatattttatttgaaaaaagttactgcaacttaacttaaaattgctaacgttttttcttcttttaaaaatacaattattgtatattgattatagcaatgtgattttgtaggttattttatatttgagttgtgattgaaagtatgttgtatatggtattgtgagatgatttgtacttggaagcattcacaaagtagcaccaaataaattacactttattcttt

SEQ ID NO: 15359 - DNA, 1575 bp, Homo sapiens
tattgccatccaatttagcatacataaaatgttgccactcaccttccctgtttgagcttcttttcctgacctgagttttgtatcagcaatgttgatgatgttagcatgggtatgggattagaaaatgtccttaccttaaatctcttggcttttactgggtgcaaggtaaataatggctatggattttgttttgctttctgttttgcttttgtacaaagagacctgcttaaacaagtactgctgagataagtgtctgatcaagctacagtgtactttaagtagaaatggcaaagttgctttgttggggtgctgatactgatgattttaggataaattcatttctttaaacttgtaatacatggttttattgcttgtttctctccaggatagtagagatttctctatttcacctcaacctaataaaagtggtcagatttataatgttaatgacttaatattatccttttctaatagtctcatgtaaaatatgccgctattacaacttacaactaattgaatgagatgttaacttagtaaaatagtttgatttttacctgacagtgtttgtcaaatttaaaatcatgaatattcaattttatacaaacatttatatatatatatatagatttgtgtatgttatttgccaaagacagatataaattacctggtttaatattagtgaagaataaataagtgcacacatttcaactgtttcatttatttgccctaagttgagctgaaaaatgatatgaggcaaagaatcgaaataggtgtggcaatgcagcagatgtttagggctgtctacatcccaggtactgtgctaagcactaaacatgtatttgatcctcacagcaacctatttttccgataagaaatctgaggcttgattgataagctgacttgactaagttcacacagtttgtaaaagctagagtctgtgccttaattcacataatctctattcagagcctgtactgttaaccactcaaggattctggaacagaagctaacagttttctgcaacgagtctttgacttaaacatctgaaataacattggaaatagattataagaggagtcagtgtgtttttctatagtttcaaaatacttttaacatcttattgtcaaaaagattggataactgactttctttgctcataataactctaaattctagttcctgagtacattaacacatcttctttacctaactaccaatgtcccccatcatcgacttatcagcttgtttgagacaatgagaaagactgattttattttcaagaatatagactcttggttcaaaacattttcaggaaaaatattttaaaaccctacagttgaacaggtgtgtttccgtgttgatgatgtgctcaggatacaaaggtgaaataaacattttttctgccttcaggaagccctcaatctagaagagtagaggtccaaaggtgccatatgttcacactgtgagcctgcaagatctccacgttaacaaaggaaaactcttcctatgaatcttcatgatgataggccatgtctcttcttatttttgttttaaataaacatccaccttatcatg

SEQ ID NO: 15360 - DNA, 516 bp, Homo sapiens
aacagggaaatggcacaatctgaagagatgtggtatatgatcttaaatgatgaacatgagaccgcaaaaattcactcctggagatctccgtagactacaatcaatcaaatcaatagtcagtcttgtaaggaacaaaaattagccatgagccaaaagtatcaataaacggggagtgaagaaacccgttttatacaataaaaccaatgagtgtcaagctaaagtattgcttattcatgagcagttaaaacaaatcacaaaaggaaaactaatgttagctcgtgaaaaaaaatgctgttgaaataaataatgtctgatgttattcttgtatttttctgtgattgtgagaactcccgttcctgtcccacattgtttaacttgtataagacaatgagtctgtttcttgtaatggctgaccagattgaagccctgggttgtgctaaaaataaatgcaatgattgatgcatgcaattttttatacaaataatttatttctaataataaaggaatgttttgcaa

SEQ ID NO: 15361 - DNA, 1512 bp, Homo sapiens
taacttcaagtgatgtacgaaaaggtttggagttcatttttgtggaaagactttaaattggtgttagaaccactaaacatcttcaaatggtactatgaggaaaaaaagaaaaacatttttctaaatattcaactataactgctgttttctgactaaaataaccatctaaccacttgtttctaaggcactgcctattccagcactttcaagtagctgtgatattacatgttgtcatcacagtccatcagctatccacccttgaccttgtgcatttggtcgacagtttctacaaaaatgttacaaattttgttttctaaacaatttgttgattaagtgatcaacaacctgaagaaaatatcaatttttaattgacaaagactttatatcttagtgattttagttttgtttctctttatttggcaacattttcatctgaattgtatagatatatgattttctagtgagtgtatgttaggaacaaaagacaaaatagtatcaacacattataaatatttagcttactaaatatttgtaattatttttacatccatttatttctagcttgttctccagcacttcagtgtttgaaagtttcatcctaaaatatatactacaggaaagctgcagttcattttcatgcatggatcattacatttttcacttgtaaatgtaggtttttatgaaaattaaacattcccctatttttctttaaattttatacaaagcactttaatgatagatgcaaccttatttttcagttcctatttttttaaagaccacacatttactaatgttaatatgaaggtaataaatagcttactgatattttatggatgcagacaatccatgcacaaccacttcttatgatactagtttatttccttaaatattgctacaaaaggaagatgcgggtgtaagccctgatttttttttctcccaagaaaaatcttaaaggaccactttagataatatttgattcctactgtaaaatttagaaaatgatgaattcttgtccatttttgtaatcaagattttaggaaaaacagaagtacatctatctttatgaaattttgggcaggtttttgtgtatcaatattttgtacttttagggaatattttattttttagttatttgtgtcaaattataattataaaaggtacagcagaaaatataccatgtttttatataggttcacacctgtacttaggagggaccctgtccatctatatactttttgtataaaattttaaaatgttaaagatccacaaggtcttaataaaatgattctatagctagaaaaacatttaccttcccagtgctttgcactaaaatatactgtgaaaggaaactagaaagactgtaactattgctggaaatgttctatattgaatgtacatgctcttgttggaaaaatgtactatatgtgatggaaataaaccagaatcgaagttatttcagctaaatgtgcttcagcaaaggtgcattggttgaaacttaaatgttttattatc

SEQ ID NO: 15362 - DNA, 1385 bp, Homo sapiens
tgccattttcatgaattcctggaatttctgtgcctcttttatgtgggaaagggcaggctctggtttctgctgcctcttctcttacattgtcatttatttcttcactgtgttgagctgggaggagtcttcaatgtgggaagggattttctgccaaatgccattaatgctgctttatccttaggccctagagatactgaaagtcctggggcagtatcttctgatggtgtgcatgtgaggagaagatgaggttaggactgagaagtgcagaagttggaacagtggtaaggctgttttaaaataagatgttttgttttaataatatgctcctggcacaaagctaggagtaaatgtgactccaaagggagttcagttaatctctgaaatgcacaaaacctagctattttctccctctcatcacagtctgagtctggtccattgctaccccaattctctggggacataaaaccaggctggaaagggaccaggaagtttgaaatagtgacatatcatccactagtcccaagggctaaggaatagtgagtttattctggaaggaactgggaagcttagtctaattagtgcctggggatgacctatgcaatcacaccgcttatgaccatcctagagagggccctgagcaccagcttgatcttagggatttccaaagtaacctgctttttgcctggatagggttaaaatagacctttcttgcctatccttgccttaacctatctgcctgaggttggcctgagattgtgagtcaacgactttgctatcttttcctcagtgttgaactttcattaagaaataaagtcctagcttcttacagagaggggtccaaatggtgaatgctcatcctgcctggattcaaggaattagctcagagattggcccctagcttttctgcctttgtagggacagcaaaaggggaaaatttgctgcagaaaattccaaaagattgctgtagctctcacagggaagtggtaaagatcagctaaacctgggttggggtgctttctgcccagtgggtcttggcataagtagattaatcctgctcttttaagaaaaggcaacttattcaggcagtctggaaagggggttctcagaaaactcagtttctttattccttcttttctcccaactactgttactggttatagaggtctttggactctaaagaccaatgtttggccactaactggactaatatgtatctttctgtgatttcatcatagaggtctgttttgtgagggtttggggtgcagaaaactttgattaaatcttaatgggaggctgggtgacctggattatctacagtgagcagacttaaatggaacagaagtttatgtgtccaaatgatggaatcattaaacctgagtgacttg

SEQ ID NO: 15363 - DNA, 772 bp, Homo sapiens
ggcaggagtgggaaggagatggcatagagaagatctaataccatcctgcccattgtccttaccgtcctgcccatacagactgtggctccttcctccttcctgtgattgctccctcctgtgtggacgttgcctggccctgcctcgatgcctctctggcgcatcacctgattggaggggctggtaaagcaacacccacccacttctcacactagccttaagaggcctccactcagcagtaataaaagctgtttttattagcagtagttctgttgtccatcatgttttccctatgagcacccctatgcccactctaatattcaacaattatagacaatttgccctatcatttatttacatctatgtatctaccatctaatctatgcatgtatgtaggcaatacatgtatctaaacaatgtatttgtcaatgcatcaatttacctactctatgtatgcatctatatgtgtattatgtatgcgtgcatgcgtgcgcgcacacacacacacacacacacacactgacattatatcatggcattttattcctaaatcttccagcatgcatccccaaaaaacaagaaacttgtcttacataatcacaataatatatccacatctaagaaaatttactgtaacttcttaatctaagaaaattatgtatttttgtcatatgtattttgtcatatgtattttgtatttgcatatgtattttgtatttgcatatgtatttttgtcatagcagcaaacagagtgaaatgccatttttcatattct

SEQ ID NO: 15364 - DNA, 1606 bp, Homo sapiens
ctcccctcccccaaaaaacttataaaatgcaatagaatgcacacaaagacagcaacttttgtacagagtggggagagactttttcttgtatatgcttatatattaagtctatgggctggttaaaaaaaacagattatattaaaatttaaagacaaaaagtcaaaacaaaaatattttctaacttgtaagttctatttaaagggggtgggggggaatcttgggaacgttgtggggtacaagccacaagttaacttgctatgctgccagaagggatttctggtataaggttgaaattgctgagataaaataaactaaaacaacaaacatccttaaagaggtagggtgtgggctgctgagggggcaagagggatagactgaatctgtcattttttagaagatgcttcataggacacaggactatccatttctacagacatctttcttaagccgagagctgtctttgcagaattatcttattaaaaaaaaatacaaaaaaaaagcaccatgaatttgtactgtgccaaaatgatagtggcaataatatttttcttcagaggctaaggggaagatagacctgtacatgtattttaagcaggaaaaccaccaaaattcaaacgaacccttaaaggggctgagtctttgtccatgtgcacaagtcttgggggtctgtgcactggacacacatgtgccttgcctgacagaattgcttagaaaggagcagagaaggacgggagctggcgtagctctcagtctaatgctttcacattgcaccagattcctgcagttgggcttaacccactctgcaaggcatgtgtctattcagggtttcccaggaggaggaggcccctgaaggggtgcggcagcaggggggtgggaagggagggtaaagcagagagaatgtattcacaggaggccataaattagcattgtgccatgtccacctgttgttcctggactctgacacatgattgtagacaatgatggcattttatgatttttaaaaaagattttgtttgttttaaggtggagagggaggagaagcctgaattggggagcttgggagtggaagcttttctcatgcttgtgatttggtgactcttctaaatgctgattcattagggattattacagcggatgtcaactggttgtggtgatggggtgggggcagaacatgagtagcaaagaaaagggagagacgaaaagggtacaggctcacgtaaagtaatgaagcctttcccaaccaggatggttcacaaaaaagctgtgagatccacagttacaagtgacacgcatgcacacatggagttccacatggggtactgttgaatggagcacactgatgggaagcttccctctcccaggccccctcaggagaaggtggaagagaaagggtgggcgtgggtggggaaggcagagatctctgttattctggtccatctaatgatgtaacttctttcagttattattttagctttaaaaggaaataaggggttcagatttgaaagggggtggtatgggtgggggaggggaattgccaacaaaagaacactgattgtaatgtgagaaaagtgtatttttgtattttaataaatattgttgaattttt

SEQ ID NO: 15365 - DNA, 413 bp, Homo sapiens
tgatggcagcaggctgggtaagaagctgggttgtgtactttctggtgacactcctgggctcctccccatcccccgtgtctctcactgagggaaagaaaatccccaagggcactgccactgtgctcggaggtgccctggactgtgtacatctgaactttggtccatcctttgatgtgtggttcgttagccacaaagagaaatatctgaaagtcaacatgatgcttcttgcatattatccagattattgtatgaagttgtgtctataattattaccaatttttattctttatttctcaaatggaaacacctgaaaaagcattctggagtgctgaatttttaagatgtatattttgttaagcatattctctaaatgagatattgtgtggctttttagtaacaacgtcatttctaat

SEQ ID NO: 15366 - DNA, 729 bp, Homo sapiens
ggacagcggtggaggccgaggtggtggaggggatgcaccccagtgtccacttttgggcacagcctccctccataactgagtggtccacagatttgcactacgggttctccagctcctttccaggcagagaggaggggaggtcctgaggggactgctgcccctcactcggcatcccctgcagagtcaggactgctcccggggccaggctgccctgggagcccccctccgagcccagccagccaggctctcaggccctgcgcctgcctcaggtctttcttgctgcagcctgctccagcctggcccccaccccaggggcaggcggcccctcctggcttctcctgtagggcacctccctgcccctagcctcccaggaaatggtgctctcctggccctgcctctggcccttcccgggccgctgcccctcagccatgtggcacttctgagctcctgacctaggccaaggggaggtctctgcccccttccccggccctgggctacccttgggtcctgctcctcaggccgctcccctgtccctggccatgggtaggagactgccctggtcatggccgcctgcctgtcattcctgactcaccaccgtccccaggtgaaccattcctcccttctcctcagctgcagtcgaaggctttaactttgcacacttgggatcacagttgcgtcattgtgtattaaatacttggaataaatcaagcaggtctcaacgcctccact

SEQ ID NO: 15367 - DNA, 47 bp, Homo sapiens
ggacccaatattggcctgtttgcaacagctagaattaaattttactt

SEQ ID NO: 15368 - DNA, 490 bp, Homo sapiens
gaatgtcttttttaattagaagacaggaagaaaacaaaaaccagactgtgtcccacaatcagaaacctccgttgtggcagaggggccttcaccgccaccagggtgtcccgccagacagggagagactccagccttctgaggccatcctgaggagttcctgtttgggggtgtgagggaaaatcagcgcggattttaaaaagatggctgtggcctgcccggcgtggtgggaggggagctggtttcctggtgaactttctaaaaggaaaaataattttaagtaaagaaaaaagaaaaaaaaggaagactaaacagaaaccagaactgaaacattcacctggtagcaaatgacacatgcacgcacacacacatacacgcacaagcgccagtgcgcacgtgtacacagaaaaacaaaaggacaagctttctgtgaaacaaaatatttacttagggataatgtggggattcacatgaattaaatagctgcaattgg

SEQ ID NO: 15369 - DNA, 1782 bp, Homo sapiens
tagaaaaagcacctgcttttcagaaagactattatttcctaaccatgagaagcagactataatattcatatttaaacaaagcaattttttttattactaaacaaggtttttatgaataatagcattgatatatatatattatatatcaccctttagatcttgatttcttggtcatttctcaacctgaggtgcatagcatattcccacattccatttggtagcaatatgcggtctgaatgcatgcattcatgagtccatgtggccaagtcagcctgtgtgctactgaactgtcgaaggaaatagccgctctgataggtagatgtgagtaaaaagaacaggaaaaaattgcttcttttattggtttccaaagaaacaaaccaaaccaaccagctcttggatgtgaagataaaatagtgcttttttgaaatggagaggaaaaacttggggaggaagaggcctgctgtgggggcatcggagccagccatgtaagaatcagagctgctccttcctgtgaatcctaggtggccctatgtcttctgtggagttacagtataaagcagggagctaattaagagtattaaaacttaaaaccattttttgactctgattttaagtacatttttatatgtcagttgctgcccttcacactaccaggccctgcagccacagtgttctgttggagaaacttggggaagtgttttctgaaccagttctttttcttggggtagagcgtgaaatccagacctgtttttgaaaggacagcacaggaggagaaaagtgactgggacgatgcttcctctcatccaaaacacatgcagagtcacatcctcatcctagtgtttggcagtttgagaccgctaccctgaacttaagagctttaaatatgagggttgtgtttctgggggggttatttttttggtgtgtgtgtgtgtgtattgtgcttagaaaggttgcagatttcatcttcacctaccaagaggcggccgcctccttggacaagccgctcatggaccattagacttgagaagacgacccacgtggtgactgcaaagccctgggtacttgccttcatgttctggtttggttttccctttttctgctgctcttggcagcagcctggtcatcatctgcttgtgggagtgggaaatgggtattttagacccaacacaggttctaaatttaaaacaaataataattggaacaaataaaggttcttgtacccagagtgattctacatgggaaaaacaaaccagcttttttcagagagtgaccgaataggaagaagggattcagaaatatgatgtagtagaacatgccctgcaggaagaaaatgttttctctcctgcgtatgttaagaggaaatcagtttaaaatgcctgctaatcaaatgtcgactcagctaaccatatgtccaggttgctgcagagtttctttcaaatctgagtgttgcctgctgaactcggaggggagtttggagaaattttagacagcagctctgtgttctttttttgccgcagccaataagataatagcagaattagccaatcctaaaaccttctaaagacgatttttgagcatcccactgggattatttaatttttctttttgacgtgtgtttttagtttagaagtgctgtattccacaaggtttaagtcagtgaggttggaagataccctatcttttttattcaaaaagcacaatcaatcttttgtttgaaaatctatataaagtacaacttgcttttagcatgattattttcctaaataaaaagacaaagaattt

SEQ ID NO: 15370 - DNA, 378 bp, Homo sapiens
agatactccagcgccttcctggagatagctggaatgagagtgactttttgaaaaattaaggctgagttcctttcggtcagctgacactaagtttttcctgttctgggttaatcataaggagccccctgccatagcaaaggcagtgagtgtcaactatctgcatctggctgagagagacccgtttcctttcagggatgtggacagggtaagggcagcaagcatggttctgttaaaggagtgtgggattaacagactagaaggaagactaaggacctgaccacccatttcagcatcttcaatgtggagcagtgttctgaggactcttctatcctaggactatgacagtgtgtattaataaaatatttgctaagattctca

SEQ ID NO: 15371 - DNA, 1736 bp, Homo sapiens
caagtcatatatttaattctgacatttagactatttcactgaaccagaagtcgaaactaaacatctctgagccactgactcttctgaaataaaatacacatgggtgtatgttacagactctttagatttaacagaaaatgtagctgttatgaaatgtaattgtaaaaatatgtcccgtatcttctatatcgagacattgcctttaattttatatcgcttttcagaaatttcagttgactacaaaactgcaacccttcggatttttattgactcaaaatagtgccattccccttaatgaaatagattttgagtctttttttcattgtaacccccaaatgagaatcatctacctgattcttgtaccaaaaaaaaatttttttcagtcttttttttttttagagagggtctctgtcaacgcagactggagtgcagtggcacgatcttagctcactacaacttctgcctcccaggctcaagcaattctcctgcctcagcctcctgagtagctgggattacaggcatgcaccaccacgcccagctaatttttgtatttttagtagagacagggtttcaccatgttggccaggctggtcccgaactcctgacctcaggtgatccacccacctcggcctcccaaagtgctgggattataggtgcgagccactgcgcccagcctcagttattttatttaacagtgtaagtacttagaaagtaagaaaattgctgatttagtttttttttttttttttttaatgtttccccagcattctgcaagttaggccaaagcccacattcaaagaaatgagattaactcttaagtaatgtattaagtttatgtatattttaaaatattattaaaggaggtttgaaagtattgacatttaaaaagtcaacacttagattaaatttagctggtagttttaatttgggttttagttaagagtgtgaggacatcaggaaaactgtttactactttggttttagcagctcagttttactattccataatgtgttatttttaaagttctctttttaagatcacagtgatatcctatcttcaaattttttaaatatgttcaaaatatctggagggtgagaagttaccaagtttgtatgttttgtttgactcaccatctttattttctgtatatgtagtagctggcaattgcatatattttcttgattaacatattagagactgcttccatcatcttatgtaaacctggaaacagctgaaactagtcttttctgaagaaccgtgtatcagtgttagatgtgcatcccgttttgtcattccctcagactttgaatacagtcattactctctggaagagaaatgtaagtatattttttgttatctgcagtatggtttaacatgtattaataatacacatatgcagactcactaaagtatccccagtaattagtaaattccaaatttaagtcagtacagttctgtatttgtaaattctgtctttcaaaaagttgttcgtgtttttaaaagttgatgtccaaaggaaaggagcttcttttaagtacttttggtgtatgttgaatatttatttgctatgatattctagaagaaaatatcaaacatgttaaatataagaacatgttaaaatttaaatttgctatttcaaaagttactgaagatgtcttggaataacaattgtcatgctgttaaactagttgcatatacttcattaaaagcaccatggagaaacattttaacaatg

SEQ ID NO: 15372 - DNA, 2355 bp, Homo sapiens
agactttgtctcacttaggcaaataaatgttcttcctcttttcagaacccctgagcatttcccaagttgggtcatttccagaaacttctgcagaggaaagaccatgacatatgtatgggataggcctcttccctgtccctgtctccagttcctctcccctcaggaggccacctcaggaaggattttgacaggtgaccataaaaaccagaggtgtgacaggctctagtctcctccctgttgtttacagcatatttaagtcttgtgaaactgtataggaaaaaagtatctacgtttttagtttttttgttttgtttttttttaataaggtccagcttgttgggtctctctgtgttgttttgtaaatacttcagtcacatctgcccgtgtgcctgtccctgccaccttttcattcactgttcttgacttcatgaaggcttctccgggcagtcttggtgtgagaagctgtttccaagggtgcagatgagccttaggttccagccgcctgcagaccccaccccagcaggctcactcagcaaggagctctctgcccagcatattgcaggccctgttttgagtatggaagccagtgcctgtgtactcactgaaattgaagatgaggaaagtagctgtacactcactgaatgctcccccttactagatatttcctggagccagaaaggtatgcatgtgggtgtcttcacaccggggaggagggcctctcatgggaaagccctggccaccacaccggcctgtgccccttgaagcccaccaaagcggccctcacttgtggtcagtatatcagttatgacgcccattgcccagcttcagtccatccatgttagatggacagaaattatggccagttgaaaataccagctttggttggacaactgtggacacacaaggtgaagaggactccgaagtcctttgtcagggctgacaacctcgtaagcccttgcttagaaatacagtattagtctaattgagtaattagtgcaatttcctgcttacttttcattctcatgactgaactgtgattaggaagttgtgattatagattctggttttggccggaattttgaatcagcattaattgaattgctaaatgactgacattcattccatttaattgggggaacaaaaggcctcaggtaaggatgaggaactctgaaatcagatggaaaagagcggtgttaatttttatggtctgtgatcgtagctgtgataagggactgaggaataaattgtgctctttgtcatggcaaccagcttctgaaaagcccactgaaaattgcctgtcctgctggtaactgctacggggtaagatttgccttaacagtactattttctcgccaccaaaaaaaaaaaaaaaaaaaaaaaaaaatgcaccacagtatttctagcatgggggctgtgtttgtatgagaaataaacgtaataaatatctcatagagacatatggaaaaataactttcagattcagcccagttctgttttagagtgtgtttattcttctctacttgatttccaaagtgcaacattttccgatgctttagaaatcaaacaaaccagggacattgttcagatgtcaagccatgcccaattttccacaagattcaagaatcttgtataaaattcagccaacgtacacatagctttaatgaggagcctgtcatgtttccccataaatttattgcctgagaacttagttcagcctttgctaatgccaaaatgctctggctttgtattttctttacagcatagatagaaaaatgcacatttttccacactcagctttcccctagcatggacaagattttcagccatttttgccacatatacatttttaaggaaaaaagatttttctctgtaagaaagttctggttatgctgttttaaaggtgacttgtcaggagttgagacttccctgccggattctattttgaaagtaaatggtcttccctccttgttccgattctgcgttcccatcgtcagacaactttggagtattagaaaccactgtatatatgtggaaagccaggtcagccagacctgttagaattggtgtgcactcacctgagagatctggcaggttggatatatttatgtgtatttctccacagtgcttgctttgccctgttggtaaggattttaaataaccatgctcaaaagagctgttctaatctgcgttttgcatgttaagtgttaatatcaaacattctttacgtgctcgaggtattgcttttaacattctactttgccagtttcttcattagattaattgacatgtattatttaaatgaccagtgatgctttgtgcaattatgaatgttgaagattaaagtacatagttact

SEQ ID NO: 15373 - DNA, 435 bp, Homo sapiens
atgcttactggacaagaggaaactgatgcacactacatggtcagtgggcttttaggctagtggcatcagtttcccagaatcagacttttgaagatgaatgactttggagaagcaaattaaacatttggccctgagccagcagatcaagcaaatgtctatctttgcgcatgggttgtttttttttttttttctttttattctacttggtcagctttgggacgatagtgcagctttgggtgatcttgaaaatcaaatactatcctatactccagctgcttaacttcattttattctttaatgtgtacctgaaagctcctggcaatgctggaaaatttttatcccagaggggtgggggggaggggggaggggaagccagagtccacttttgtcacaattcatttttattaatagaaaataaacacttattccagtttc

SEQ ID NO: 15374 - DNA, 366 bp, Homo sapiens
acacagacccctcagtcctcccgcctcgctctcttgagactgaggggtccgcagaagtcgccacccaaataaaaccacattcctgctgctgcgggcgtgggctcccgggtcgcaagccgggagggtcgagccgaagtctccggcgggccgcaagaggagaagggggcgtggctgcgtcccgggggccgagggcggccggggagggcgggccttggccccgagtgaaggcgcggcggcccaaccggcgtgagagcgcggggccggccttcctgcagcctcttccgctcgccggctgcggcgcctgggacggttgcggtgggtctgggcgctgggaagtcgtccaagatgattaaaaaattcgacaag

SEQ ID NO: 15375 - DNA, 411 bp, Homo sapiens
gacagtcattgctgtcagtcttaccctcaaggatgatcccccaggccgttgtccctgctttctctctgcccatccttctttcccagagtcattacaccaaggcacagactggttcctctgctctgagggtgggtccaggcagacatgtggactctggggaggtactgggggccggaaaatagcgggaattcttgcaacgtgtatatcatcctaaaagtgggggttgcctcaagacagcccccaggaactgataagaagggatgaactcccgtactctccagagtactgaagattctcccctccctggaaccagggatgtgaaactggaattctcagatgcctgaggagctcccagtctcaaaggactctggtgtctcacccatccaccaggcggaccttggagagggtgtc

SEQ ID NO: 15376 - DNA, 4049 bp, Homo sapiens
tccggtctgccggtggcctccagcagcaccacagagctccagaccaaccaccccaagtgccgtttggatggggaagggaaagactggggagggagagtgaactccgaggggtgtcccctcccaatccccccagggccttaatttttcccttttcaacctgaacaaatcacattctgtccagattcctcttgtaaaataacccactagtgcctgagctcagtgctgctggatgatgagggagatcaagaaaaagccacgtaagggactttatagatgaactagtggaatcccttcattctgcagtgagattgccgagacctgaagagggtaagtgacttgcccaaggtcagagccacttggtgacagagccaggatgagaacaaagattccatttgcaccatgccacactgctgtgttcacatgtgccttccgtccagagcagtcccgggcaggggtgaaactccagcaggtggctgggctggaaaggagggcagggctacatcctggctcggtgggatctgacgacctgaaagtccagctcccaagttttccttctcctaccccagcctcgtgtacccatcttcccaccctctatgttcttacccctccctacactcagtgtttgttcccacttactctgtcctggggcctctgggattagcacaggttattcataaccttgaaccccttgttctggattcggattttctcacatttgcttcgtgagatgggggcttaacccacacaggtctccgtgcgtgaaccaggtctgcttaggggacctgcgtgcaggtgaggagagaaggggacactcgagtccaggctggtatctcagggcagctgatgaggggtcagcaggaacactggcccattgcccctggcactccttgcagaggccacccacgatcttctttgggcttccatttccaccagggactaaaatctgctgtagctagtgagagcagcgtgttccttttgttgttcactgctcagctgatgggagtgattccctgagacccagtatgaaagagcagtggctgcaggagaggccttcccggggccccccatcagcgatgtgtcttcagagacaatccattaaagcagccaggaaggacaggctttcccctgtatatcataggaaactcagggacatttcaagttgctgagagttttgttatagttgttttctaacccagccctccactgccaaaggccaaaagctcagacagttggcagacgtccagttagctcatctcactcactctgattctcctgtgccacaggaaaagagggcctggaaagcgcagtgcatgctgggtgcatgaagggcagcctgggggacagactgttgtgggaacgtcccactgtcctggcctggagctaggccttgctgttcctcttctctgtgagcctagtggggctgctgcggttctcttgcagtttctggtggcatctcaggggaacacaaagctatgtctattccccaatataggacttttatgggctcggcagttagctgccatgtagaaggctcctaagcagtgggcatggtgaggtttcatctgattgagaagggggaatcctgtgtggaatgttgaactttcgccatggtctccatcgttctgggcgtaaattccctgggatcaagtaggaaaatgggcagaactgcttaggggaatgaaattgccatttttcgggtgaaacgccacacctccagggtcttaagagtcaggctccggctgtagtagctctgatgaaataggctatccactcgggatggcttactttttaaaagggtagggggaggggctggggaagatctgtcctgcaccatctgcctaattccttcctcacagtctgtagccatctgatatcctaggggaaaaggaaggccaggggttcacatagggccccagcgagtttcccaggagttagagggatgcgaggctaacaagttccaaaaacatctgccccgatgctctagtgtttggaggtgggcaggatggagaacagtgcctgtttgggggaaaacaggaaatcttgttaggcttgagtgaggtgtttgcttccttcttgcccagcgctgggttctctccacccagtaggttttctgttgtggtcccgtgggagaggccagactggattattcctcctttgctgatcctgggtcacacttcaccagccagggcttttgacggagacagcaaataggcctctgcaaatcaatcaaaggctgcaaccctatggcctcttggagacagatgatgactggcaaggactagagagcaggagtgcctggccaggtcggtcctgactctcctgactctccatcgctctgtccaaggagaacccggagaggctctgggctgattcagaggttactgctttatattcgtccaaactgtgttagtctaggcttaggacagcttcagaatctgacaccttgccttgctcttgccaccaggacacctatgtcaacaggccaaacagccatgcatctataaaggtcatcatcttctgccacctttactgggttctaaatgctctctgataattcagagagcattgggtctgggaagaggtaagaggaacactagaagctcagcatgacttaaacaggttgtagcaaagacagtttatcatcagctctttcagtggtaaactgtggtttccccaagctgcacaggaggccagaaaccacaagtatgatgactaggaagcctactgtcatgagagtggggagacaggcagcaaagcttatgaaggaggtacagaatattctttgcgttgtaagacagaatacgggtttaatctagtctaggcaccagatttttttcccgcttgataaggaaagctagcagaaagtttatttaaaccacttcttgagctttatcttttttgacaatatactggagaaactttgaagaacaagttcaaactgatacatatacacatatttttttgataatgtaaatacagtgaccatgttaacctaccctgcactgctttaagtgaacatactttgaaaaagcattatgttagctgagtgatggccaagttttttctctggacaggaatgtaaatgtcttactggaaatgacaagtttttgcttgatttttttttttaaacaaaaaatgaaatataacaagacaaacttatgataaagtatttgtcttgtagatcaggtgttttgttttgtttttttaattttaaaatgcaaccctgccccctccccagcaaagtcacagctccatttcagtaaaggttggagtcaatatgctctggttggcaggcaaccctgtagtcatggagaaaggtatttcaagatctagtccaatctttttctagagaaaaagataatctgaagctcacaaagatgaagtgacttcctcaaaatcacatggttcaggacagaaacaagattaaaacctggatccacagactgtgcgcctcagaaggaataatcggtaaattaagaattgctactcgaaggtgccagaatgacacaaaggacagaattcctttcccagttgttaccctagcaaggctagggagggcatgaacacaaacataagaactggtcttctacactttctctgaatcatttaggtttaagatgtaagtgaacaattctttctttctgccaagaaacaaagttttggatgagcttttatatatggaacttactccaacaggactgagggaccaaggaaacatgatgggggaggcagagagggcaagagtaaaactgtagcatagcttttgtcacggtcactagctgatccctcaggtctgctgcaaacacagcatggaggacacagatgactctttggtgttggtctttttgtctgcagtgaatgttcaacagtttgcccaggaactgggggatcatatatgtcttagtggacaggggtctgaagtacactggaatttactgagaaacttgtttgtaaaaactatagttaataattattgcattttcttacaaaaatatattttggaaaattgtatactgtcaattaaagtgtttttgtgtaaactggttcaa

SEQ ID NO: 15377 - DNA, 53 bp, Homo sapiens
aattactctggaaatttgaatccactttaactaaaaataaatattcatagcac

SEQ ID NO: 15378 - DNA, 775 bp, Homo sapiens
aaactttcagaatgagcaaaacaccatcaacgttaattccagagatggaacattttttttcctagtgagaaaacaacccatttgaagagaagaccactaatgagaagaccactaaagagagacatcaagaatggattcagcagaatcatttcacgttttgaacagcagcagtttgaagggccaaagccttgatcagggatcagtcattaaaggacactcttgagtattagtaaaccctcttatgatgattaaaagagaagggcagccctctccaccttttggtactttctattcaacttgcactgaccataaaatgtttctcttctgaacaagccccatcatttggtgaacctccaccctaacaaagtaggatggggttgggggctaaattaattggagtggggcgaggagagagccagaaaacatagatccgagggcagcagtgctgggtggagagagccagaaaacagatctggaggcagcagtgctggatggaattgtctaggctgtggcatgttggttttgtctttcttttctcctttgattatgtaagagctatttcattataacttattatggtgattatacaggcaagaagacaaaaaggagagaaaatgtacctcttctactggaataatgtttatgattacaagtgagataaggtatttttatcaatatgaaggcaaccttggctgataaaacctctatagtgaatactcacatctttacttcactcactatcaataataaatatattttctgacaaagactggca

SEQ ID NO: 15379 - DNA, 5493 bp, Homo sapiens
ggcctgtctggagtacgtagaccagtgtcgtcgtgagggtgggaccctgtgaaggtctgaccaccgtttcgcttttgttaatgccgagctacccgcagtgctgagccagccgtgcaaaaggaaatcttcaggaggggacttctcacgttgctcagactgacacatgtagactaaatagaaacccctcagccctaaaatagaaaaaagaacagttctggactattgaacagcccattcatttatttctgttttgtttaccgacatattcagtattattcttgttttctgaattctgagtctcctgaacaaaaggcttactatccatggtcttggaaaagattgtcccttctcttgctgttgtaatgcatctctgctacagcagtcattgtcatcctgtgaccttatcccttttgtctcccatcaccttttccttcttcagcagcacctcacagtcagtcagacgctgcaggcaccactatcaccaggagtggccaagtaaaccgagacaccagtaacagcagggctggacttcctccagcgttttgggaaggaaagagatgttcccctgagctgattcccagtgacagtgcagcaagactagtgggactcctctttcccacattttgcttttttttttttctatgcaaaagtcagatgcttctatccattgctttctgtgattagggcggccctgcagcatatctcacagcagacacagtgttcataacaaagaaaggttgtgccgggcacggtggctcacacctgtaatcccagccctttgggaggctgaggtgggtgtatcacttgaggtcaggagttcaagaccaatctggccaacatggtgaaaccccatctctactaaaaatacgaaaattagctgggtgtgatggcgcatgcctgtaatcccagctacttgggaggctgaggcaggagaatcacttgaacccgggagatgaaggttgcagtgagctgaggtcgtgctactgcactcccgcctgggtgacagagtgagactctatctcaaaaaaaaaaaaaaaaaagaaaggttgttatggactggacacccctgaagcccattgcctaggccacagtggtgacggcaggatggccctgctcagcaccgcaagagccatggctgtccctgttggcccagccgggcactcacagggcagaagggtgggtctcaagtgggaggataaggcttcaccaccaggagattcccctctgcccgatgactctgttaagagtcacgacccatcaagggaatgcatagatggagatatatagtgtgtgatgtgtaaatcaggtcaaacctcaacgacaattgaaagttgttattgtcctatgaggtatcttagcattctcgatgggtattgaggatggttggatgtgctttattgtgtgtggaaacatgcctctctttgctaatcatttcagaggtccagttttcctttcactggacaatcttgaataggaggaacgctgttgctgtaatatgcgtagcttctgtgtgctcttgtgtagtctgtgtgtgatcaaagggcacggaagtggctgcactttcacatcccttttctttacttagctggaaccttacataccagtacatgctcctctgtaagcagctgaactcaccggccacttctctgtttgcctatagacaaagactgtgtgtgtgtgtgtgtatgtatgtgtgtgtgtgtggtgcacacattgtgttcttaaactgagacgtggctctgcaggtctcctgggctcattccatggtgtggtatgtttattccactgtccagagctattctctgatggatttgagcaacagcagtggagataaatgtcctagagtcaccaggtcgcttggagaagtcatttaagctgcctcgggtttttgttacttaaaatgtggatattatttctccacctaaatcactgagtttacagagtaataatgtgttgctctggacattgacagctttctagagccagtaatgggctcttctgaaggatgctgaattagaagtgaacctattcataggatcaaaagccacttgctttgaaatatgtagagttcctcagaattgacggtgctagaaatatccaagtgttaaataaccttttaaaagcaacaaaagctacttttttcttaccacttaatagaagaacctgtccctagaggcgacttcattgctatggatctggagtctctgaactcttaataggatgcagcctcacatacataatgtcacccattttatgttgatgaaaacattacaagttttcttcattgggtatgtgttgatgttcacagacagtacttgggcccattaggttttcgcgtctggtcttagagcatgtgtattcatctcagcgtgaatacctcagccagtcttatgaataggaggctatgtatgggcagggaatagattagattagaacactcgcacaagatgaccacatatagaagcagaaagccccaaattccctgggaactgttttttctctagtagctgaatataaggaaatatgtctaatggacaccagttaatactttttaaaactactctttaaaaaaaaaatacgttccccttggttaactgattttttaatccagggtggacattttttcaacctttattaaaaagacaaataaactattttgtagaagatcagactcctacttaactggaagagaaatgtctattaaatgtctctcctctttctctgggtcaagaccatgtaattttatgcttcagagatgaagatactgtttgtttacaaagagtttagtttttaagacatccaaaactctatgctagagcaaaaatcaaatagcaaaggacactagccagaaaatacagtgtgtgtgtgtgcacctgtgtgcctgctgaacaacttgacagtgtaacagataaggtaactgaagatggtggatatttgaattgtattagcttaatgtctacatatctttggccaaaactctattgtcatattagaaacatgttatctttttcatgtttattagtaatttatttttgattctttgttttctttttcgtccaactaaaacaactgtaatgtacttgatacatttatatcaagttctaaagtatttagacaaatccaaatactttgtttttagttttttcctcctttccatcctgttaaccacagtgaaacgctgcagtattttgatttggtcagtgctacggaggaagaccatgaaagctgaattggtctgtgccacccagagtaaacctcttctcttcttctggaaagatggcgtgatgtttttcaaggattctaataaatatcccgcagtcatctcctgagcagctttcctctgtttcacttcagaactccttcccccactttcttcactccagtttcttcacttgcagcgttttctgctaagaaagacttatcatcttgtatctgtttatgcctctcttctttggggcccctggatgtttttgtggatttttacagagtatttatatctgcacagcgtgtattttgttatacattcttacaagcattgatattggggggtacattcataatagtgagaatatctggcagaatgtgtgaatgccatatctgtagatgacgatgaatgtgaagggttaatgtagaaatgtttgtttattctgttacagctcaaaatggaggctgagaatctctaccaccattcccttctctatttgagaatctctaccaccattcccttctctatttgggaaacaatactctcttattttgctatttttaccttcccattaactggcttcactcaacagtgccagatacctatggagaggggaagtaaaacaccttaggtcaggaataataaaccaatgagttagctcagggccggtggacatgttcactggtggaccagttggcattgacctaaacggacagagaaatgcacatggaggagaactacgttgaaatcaagatcctatgtctgttgtattttctctttgcctggagtaaatagcattataagtcattccacccttattagataaccaaagcatattggtctcaatagctttctcctgaaaaatgtgattgaatcttacctgtagcagttcactcttaaggttgaaagaactgtcaatatagataaaatccattccttattattattgattggtgtgacatttgaaaatgtgtctaaacaatatttgtaagtaaaagaaccagtcataagcctcaaatgtgttcagtgtgtaccaagctggaatgggagactggcccctcttggctttaaagtagcatgttgtctttttctagcagcttcttcctagtagacattccagggatgggaggggccagggatcatgtcttactcatttctgtatcgccagcccctggcatagtgtctggcttatgttatgtgaataaatgaatgcttgccaagatctcttcttccctcaagtttctggaaaacctgagggttcgtgatacctgttcccactcctcatcagcgggttggcaagaaagcaaataaggggaaacatttttaacattccaagcaagagaaggaagaacgactattgggaggaggtacaccagagattgctcagtgtgcagcctgctacctcacttttggctctggattgcctggtggtagaagggaagagtattatgtagttagcaccttacatatttgatgctcaggaagaaagtgcaagaagatccctaatagaacattaaagattcttaaaagtttttgaagtaggctgcttggggtgaccagccccacccttacatctccatagttggtacagttagcttgtagcagctgaagctgatgcctggagatcactgtctgttggtctgatctcagtatcatactgagacacctcccctgagccttacctacttaaattggtaaccgtcctaccaaaatttgtcaattttaatcaagtgaggcaagttgcaagggagccagagatacgtgaaaaaagaaaagcagaaatactgatactttctaagaaagaagttgtaataatttctttggcacattgacttactgatatcttttgaaatgcatagatgactcttgtgaaccaaagagagcagtagtggttattccccggcgcaataaaaatgcctttgtgtatcacttgcgattgccagtcatttctgtgccagttgctttcattccagagaatggcctcattctccaaaaaaagatgatgattttagaagtaggatttcctaacaaattatgtggtggggagggacggcggggattttattcatcccgtctgagctcttcatacagtattaccattaggttttaagaacaaagatgggggaggagggagtagaaagctgagagtacgtagaacagctacaagacattagtgggtattcagattttgagctgtgtaaatatcaaacatcggcttccagccttaagagttatttgagcagagagttaaggaggaatgggagattttgtgaataaaatgttttgcc

SEQ ID NO: 15380 - DNA, 373 bp, Homo sapiens
agctgtggttgcctgctcgtccccaagtgacctatacctgtgtttcttgcctcatttttttccttgcaaatgtagtatggcctgtgtcactcagcagtgggacagcaacctgtagagtggccagcgagggcgtgtctagcttgatgttggatctcaagagccctgtcagtagagtagaagtctcttccagtttgctttgcccttctttctaccctgctggggaaagtacaacctgaatacccttttctgaccaaagagaagcaaaatctaccaggtcaaaatagtgccactaacggttgagttttgactgcttggaactggaatcctttcagcaagacttctctttgcctcaaataaaaagtgcttttgtgag

SEQ ID NO: 15381 - DNA, 826 bp, Homo sapiens
ggcataaactgtgcactgaactgtctgccgagagcagctggaggacagctgagcttccactggtgctgctgggccgcccgcctgtgggaatggggctctctgtgctcctacctttgtgccttcttgggcctggcagattcacctcaggccagaagcccctggacactccgggccttggggctgccgttctgagtgtgcggaaggcaggactcaaaatgagatcccatttgactccctctgtatgtactgtgccctctcctggctcttgaggctctggagtcccaattgtctgtgttagtcagtgaccaggttccagggaaaatgatgtcatgtggtggtccaacttactggaaccaaagagacagtactttgcaaagaaaaggatcactgccaggtgcactggaattgctacagtttagtccgcatgatctctcctgaaggaggaagcctgtttcaaaaatagtttccatcatgagtctatcaatgagctcccacctctccagccagcctagaaagcaaacgagctgcccacagttctctgccctgtctgggaggttgaggccacagtgtatagactggtaagccagacaggcctcctcccgcaagctgctaccttgctttcacctgtaccttggtccccgggcagctagctataaagcaagagggacaggagcccagaagagacactgaggacaagagatcacaccagagtacatgtctctgcctctgttttcagtgtggctttggacaggaatatatgaataaatcactgccatacaggttttccaatacacaagtgctagaaaatacacacaattccccaatg

SEQ ID NO: 15382 - DNA, 918 bp, Homo sapiens
tgacttgccccaagggccacccgaggaagcagtattatctgcggtggggggaggagatataggacaggaaaaccacgtgctccactccagctccctgccagtgcagtgactctgcagggaaagactggcaaggaggctcaggtgcttccatctgtggtgactggaatgggacccacgtggagtaggtgacatatgcttcccagagactggtattgtggctgtgccaggagtacatgtgagactatgggaggaaagctccggaagaaggagaaacattgcagtggctactgtgttggcccagtagaaattgacagtattttgtatatatgtgcccatttatctttttcttttttaaaaaaagagaatactcttgtggtcccctgatgtctctttctaggatgtgtgtcactttgcttcagtgacagccctcccacccagcctggctctgctggccctgaactgaacctctccaggctctcctgttgctttgccatggagccaggtcagctctctgtctgttctgctgggtaacaaggtttggcagttcctgtttctctgggcttaagtcaaggccacagaattctttttcttccctgaaagctggcagcttttgttacagaagattctcaggatgaaggcaggggctgaggcctctgctactggctgcccctttccatccagtggctgctgtttcccaagacaggctaagcgtttcttatctgaaatgcttgggacaggagtgttacagattttggattttttcagactttggaatatttgcatatatacataatgaggtatcttggtaggtctcatgtctaaacatgaaattcattcatgttttatatataccttatacatgtagcctgaaggtaactctatacagtattttaaataattttgtacatgaaacaaagt

SEQ ID NO: 15383 - DNA, 1084 bp, Homo sapiens
gcaaagaggagcaaccattagaaaatgcaggatttgtcccactctgttttctccctctcagcccaccacccacagctcccttctcatctcttatgttctgaagaatccagtacctgatcaattttttttctccctaaccccagatgcaatgcgatcacagggtcattaccatctctttattaattgtaaaaatttttgttgatccagcatttgagtgacactgttgaatgtttctaaaaatgcctttttaaggagagaaaaaaaaatcaaagggcagtctcaatacttagaaaattattgtttgtctgttgcgcataataatgacataatctgcttagcagaaaatgacgattaatctataggaaagctcaagtaaatgcattatcaactgcagaagtttgaaaaccaggttcatttacgtgagattgctaaatgcatgggggaaagcagtggtcctagcatccatcttgtattcagcttatcattattgcagggaaaatgcttttaatttaaattaatttttaattcttttggcaagttgatggcaaggacttgattgtgtcattaagcaaaagaatgtattggaagttgatggaaagacaaattcatctgtagtagtaactggccgattgctaaagagttcataaggaggtgagaagtaatttttttaaaggagaaaaattttttggctttagatttaaagtaaattgaaatgttttaaagaaaaaagtattcacagatttaatacctattaataatataagagctgaaatgtaagtcatttcttcagtccttctcctctgtcggaatcttttttgttttaccataaattcacctgacgagggcactctgagatagcactgctctggggccatctgatcaccatcgggagcaaatctctgacctccttgcctgcagcttttacttaaccctgtagtttctggacgtttgtgcagtattgaaaagacaggagaaaagaaaacagaaacctggttataacctgacgctaaaactaaaaacaaggaaatgtacctctttcttcagaattaaaactaaaatcttaaataaaacagaaaacttgatg

SEQ ID NO: 15384 - DNA, 782 bp, Homo sapiens
caacagaactgagaggagaggattagactctggggtgcttgcatgggcaactggatttttgcatgattcctttatgattttgcttttaatgtatacacccagaagagccaatataaacgttcctcatgcctacagctagcgtgttacctcatagttgttgaagtatttcttcattaggcctttaacataatttattagtgtaataattttggcattgtttctcatgagtgatactatttctaactcataaaaataaacttgtagtactaagatcccaggtgagattagctagaattgttgttattttggctctattattgaaaaattatacaaaggtaatggtagtatcttgttttctggtttgtgaaaaaataatatcctaatctcctgaaaaatttgcaaattaacaagataatgtctattgcattctttgaatacttgagaagaaagaatacatataaaacaaaattggtggtgtcatttaatgctcagaaggatattgttggcgattgtttttagttgtctagatttatatcctataatatgcattacatgtgtagaaactgttttgttctctctcttttgcacttttgcactttctttttgaatggttgttaattatgcatagatggttaaaagataattattgtagcctaaatgcaatataatctcttttctaatgcactgcctagtataccaggaaatgcctcaaaaacagaacttcagtttatagttgacttatctgaaacttgaatacggagtaaacattgtatgtgaaaagc

SEQ ID NO: 15385 - DNA, 318 bp, Homo sapiens
cgccaagtgtacaaactggcccaaccacaggagctgccagtatccagcagtatctggaccacaggcaaagaaaaccactaggaccaccaggagcacacaaccccagacccacgccggagggcatccctccaccagaagattccgccacctcaagtgaactgcaggaatcctccaacaaccacaaacacatgcttcgctgttagtgtcttcttcctgccctcagcaccacagctcaagaaaacctaaagtttcaatacaagccataggctcacagaaaaagaaaaagaaaataaaaattaaattaaaaaaaaagaagac

SEQ ID NO: 15386 - DNA, 675 bp, Homo sapiens
gcgtgagccaccgtgcctggcccaggatctaaaaactttctaagtttcctccatcgttggcatcctcacagctatctccaatgtcactcaagagacatcaacagacatttaactgctgcagacttcattgctctgtcacctcaccttgaatctaacaaatcaaagtatttctgcaggtccaatggtctaaaatcaaatgcttgttaaatgactttttacaacaccccttactttcctaatccatttcaatcttattttttttattgtggtaaaaaacacatcaggtaaaatgtaccatcttaaccatttttaagcatatggtacagcagtgttaactccatgcatgttgtgaaacagacccccggaactttctcatcttgtaattctgaagttctatacccaccgaacaactcctcttttccccttccccctgcctgccccagctcttggcaccattattctgctttctgtttttgagagtctgactacttaagatacctcatacaagcgggatctggcttacatttcttgagcattgtattctggaaaagtgtttccttcctctgaaaaatgggtagagttctgaaggagaactactggtcttattgtacacttgctgtacctatttttatttaacaaatattcatctatggtataataaagatgtcatgattg

SEQ ID NO: 15387 - DNA, 3165 bp, Homo sapiens
tggatggatggactgataactccggaagaatgactctcctgtggcctcacactgctgcctgtctgtctgtcactctctatctgccagcttcttcagctaaatactttaagaggggtgaggggagagagaaattcataacaaatccgactaccagaaaaaaaaaattgttttggaggaggggcaaaaggaaccatgatcaggcttttactgggattcctgatcaagtaagcctcttccctttctaataaaatatacaccttatacccaagggagagcaaagacaaaatacaccagtaacatttgaccttttcagctccctagctaatttattagattgtgttgaaggtctgattctacaaaggccaactctacatatttggtagccctaactgtctgagcagtagtggctgctgtgatgtaaacttagggtgctgagataagcaattagctctagccttctgccttaagaatgcactctactggggatttcctggcatagttaagagcgctgcctataaggttggtgaccaaatctttcctcggtgactttaagctttatgtgaaagcttagttaaggtgaggaggggcacactcctaaattgctggatgactgaactttggattttctctcccctttcacatggatttcatgtctctttagataaaactgactagttttatttataaaatcttaagttttggaagtctaaaggagaaaccattccagtatgcatatttttttctcctctagattcatacatttatatagcattgaaacactttcaaactcctgctggtagtaaaaggggatttaaaaatagaatcatagccataagcctgttagtatcatatgaagagagaacagttatcttagtacctatggattttctttatttgctgtttgaatggattgaccttggttatgtgttgagaattaaggaacattctttgaaatgcctctctcagacccatcttggaggctgattacttactgcaccaaagctatcactggggtgagatttactgtttggacaaatttagccccatcccttcaaaaatacacttgtaaccaggtttcccagagttgttgataggcttctgctgaacatatgccaacccacctgcataatatatttttgttgcttttataaatcatgcattacataaagtgtgacaacttcaaaatgtattctctgttcttggaatacagtgccctaaaatggtgttcttatgacctgcagaaaatatttacacatatttccaaatatttatttcatgagcagtacagctaattaaaatatataagcttaaattttatatcttacatttaaaatattaagattcctttgacttgccatccatataagcttgctaaaaatattaagaccaagtcatgcaataattgaatgtacctcaaatttttaggggagggtgggttagggactgatactcagattgtggataataattgaattggtttttaaaggcaacatagcattctacagcagggttaatctattatcaagaacagtcaccctggttaataacaagttttactgatcagttgctggttggttggttggttggcatgtgggtgtgtgggtgtataggtgtgtgtgggtgtgtgtgtgtatttttccccatgagtcctttttttaatcctgtggctttttcacttacaactagcctaaccctgtaattttcctacatccaagaaaacaatcacaaagtagtggtttaaatactttgttgtatttggctaattttgctgtcttaatgcagcctattaagagttgggttaaaaatcagtaatcagtactttattacatcactgaactaaaatatggagacatcctcattgaaaatggagggcactctatcagtctataactatcaacgtagtgcaacagggtgttttgatacctttgttttcacctcttgacataatgctatttaaaggcttgaatttttccctttatataattttcacctttactttcaaagtgttttgttgtagttggctattgcagagagtgcattgtcctatcattcctaaacctggtctgctttctacattcatggtatggaaaccatgtgattctttgtacagtttatcctgatgttgcttgtaatgcagtagaggctatttcgccttcgcttttctttctcgacctttttgtaaaccctataattatgaagcgattgcttgagaaaataacatataaacatagaatagaatagactgaccaagatggttcacagtttctttttttaactaggttatttataatgtatttctgaaccacttggcagacaaattcacaacacttaatgttcatattttgagtaaaggaagctaaaaccatgtttgctttctggtactacatgcattagcgaaaggttaagtaagttttgttctccactgaagtaatacttaacatctcagaaaaaattttgcatgttctgtagttttgtattaaatcagtcatttcatatgcactatatcaagtacaaacaggtagtttacctgtttatagtagtgtactaacaaagtctcccttgcagcttcagactgttatctataggcttatcgttcaaatacagcacttgaatatcccaagtagttcttctacgcatagctcacctttctaaacccagttaagcatggaagagaggtagtaggtaggtgcagtgtgtggaagctgcaaacaagtaggccttttattcattgatatcttttcccaagtactggattttaaatctgtatgtatctgtttgatttttttttctaatatttcagttgagctgctgttttcttccatgcaatattgtatactcaattgtgtatagaagaagctggtgagagtgccctcctacataaataagcaattgcagtgttttgcatgcaaaatataaaaaatttaaattgtcctgattctattttgtaaatggagaaacaatcatatctttctaagcggtaatggaggaagactagtgctttgtgcattttgatatatttgagttcattttttccacaatgtcatacttttgacgcagttgggtttctcataagtatcctagttcatgtacatccgaatgctaaataatactgtgttttaagttttgtgttgcaagaacaaatggaataaacttgaattgtgctac

SEQ ID NO: 15388 - DNA, 670 bp, Homo sapiens
aagatgtcacctgtggaacataaaaaggacatcagcaaacaggatcagttaactattgcatttatatgtaccgtaggctttgtattcaaaaattatctatagctaagtacacaataagcaaaaacaaaaagaaaagaaaatttttgtagtagcgttttttaaatgtatactatagtaccagtaggggcttataataaaggactgtaatcttatttaggaagttgacttatagtacatgataaatgatagacaattgaggtaagttttttgaaattatgtgacattttacattaaattttttttacattttttgggcagcaatttaaatgttatgactatgtaaactacttctcttgttaggtaatttttttcacctagatttttttcccaattgagaaaaatatatactaaacaaaatagcaataaaacataatcactctatttgaagaaaatatcttgttttctgccaatagattttttaaaatgtagtcagcaaaatgggggtggggaagcagagcatgtcctagttcaatgttgactttttttttttttaaagaaaagcattaagacataaaattctttcactttggcagaagcatttgttttcttgatgaaattatttttccatctgaggaaaaaaatactaggaaaataaatcaaggtgatgctg

SEQ ID NO: 15389 - DNA, 1580 bp, Homo sapiens
ccctggtattcgggcaaagaggacatgagcaagcgtatcacatctgccctccctgcaattgggcagctcccctggaagaagctgatggaattcatatatctgtctctctcctgcaagaatctacctgagaccatgccactagcttttaagggctaccaagatgtacaacagaacatgatagcccattgagaaggaggcaggatacctggagatttgtggaatacagtacgagttccacaaaatttgatccttattgcttccagcaagtagcatgaacttctgtgttcacctgtataatttattttaaagattcaaaggatgttcgtataaatggcactgctccatcctccccctatgcattggtttttttccctgtaccatacaattctactgtaactacccatcaacttaaagaaaaatattatctcttctctttacattcagtcttggaagaccacaagattgtctgaaggccttctaaaaccttctgaatgtcctgcagaaatataactgtaaaaccacttccatttctaagactaaatatatcaagactatttagtgactctctctgcatgtccccctcacccgccaaccctccgtttcattatataggagctgggaagtgccacatggataatgtcaacttgtgtgctatatctctgaggaatggtgaggtggcatgggagatgtctgtgcttggaggtacctcagagaggtaacccaggggtcagcccaggctgctgggctgtagccaatagccatgcaggactggttcagcttgggctgtctgtacagctccgtactgcctatgtgtagccatctttgccttttgctgcaatagaagatgagcaaaggattaaacagaggcccacagctagtttgcagaaccactcaattttaagtgctgtttaaattgcagagcaaataatcctgtgtgggaactgtggttacaggaaatggagcactctaacaatgtttacttctaaactttgttgaatgataatagaaagcaccctaattgacttggaaaaaaaaaacagcaaaagcaaaagtagcaacatatgtcaacatatgtcactgaaataggaaacagtcattggaatgttgcacagaggctaataactatagactgttggatacagtggtgagaggagccccattttaggtctttcttttaggtttttggttttcattactccaagtaatccttgacccaagaacaaaggcttgttgtatgagttccactgccagatttatgggatgcctggatcattcagaaggatgcttcaactattatttgtcaggtccaaaggtcgtacttaataaccccattttctatgtatggggtagtctaatatattattttatctactttatttttcccttttcagaaagtccttagtgcaaaccaccattggaatctagccagaaatgtctgtcagatagttagaattgtaacatctaaacctgccacggatcgaatggtacttacaggtacctctcttagggactctgtgatccctaaaatatcagaagaaaatgtctgtctttctgtccaaatatctacttgacttgggggt

SEQ ID NO: 15390 - DNA, 5495 bp, Homo sapiens
agaggctgcctgcaccccctccctttcccttaactctacttttacatccccaaaccacctttgtcatcagcttttcctctttgccactggatcttcatggagacatgggcaagcattagtggcttcagattggagaccagcctgggacttccctgcagtgagagagcatctccccctggtccatgcccctcctgtgcagaagggagcctgcatccctcccttcctttctcttactgccataggaaattattttaggggttggaggtgggacaagcaggcttgtttccaccaatagtgccaaaaagatattgcctaatgtgcacctgtgaggtgtaaccccccgctttggagacgagatggctcttgttcagtcaagaccccagactctggccacaaaaatgccataatgcctgttggtatttggcaaagcactgacccgtgtcctccgttgctcgcactggggtctctggtgtgaacacccccgacagcagccctccgcccactctgccccctgggagccctcgctggatcgtctcgtctcctgcagcagcactggcaggcgagggctctcgttcatattctcaggccgcaagtgcaatgcctgaggggatcaggcttttctactccaggcaaacctgccccatcttgtcgcttttaggacctcccacaacctggttccccacacatccatagttctgcctccccagcttctcctccccagttgtaaatagtatttattagcttgccgaggcttcctgctagcaaccacactgaagagatcgatgcctcctttcaagctagccaagttttctgcgagccttcagagctaggagggcaccctaggctctgggatcccgtgtctttccagacaatgttttgtttcctttcctttgttttttcttttaactggaataattaccattgaaaaagaagttcctttgagcatgtatgtgtctgcctctaggatgagctcagagcgagagatgacacaatgcctcactcaggccccgggctccctggccacaagctttttctatcctgttttcatgacagagaaggggaagccctgttctgacaacagacatttcagacaaccttgctggctttccacacctgcctggccccctcctccctccacacttccactttgtcctcctcgtcccctacctcaacaaagcagggtggggtaggtgacatttgtgtatccacattcttacctttggtagtcaggtttggctactttgcagctcgcccaaagagatacaacctaatccccaacctacttttagtttttttgttttttttttatggttaaaagtaacttttgtagtttaaaaaaatctttcctctttcatataaataagaagtggaaattgcctttttattgtgtaatgtagaaaaccctcaagtgttttttccgagcttgggaaagattttgtgtaggaaatgtgcatagagtttgtattttatttttattagcagctgaaatgcctttggttttggcttctctctctccctctctctctctgtctctccttctctctctccccccaccacccacccccacacacgtcatctgcattgttattggagcctgtacttagagggattaagcccacaccctggcttccattccatatcaggtacaggatttgatgttattaacatttgtcgtcatacctcataagtcggtccctgccttgtctgtctaggcccatttggggctccctgtgagtgattcccctctctctgctatgctggagacggttccagcctggaaagcggccaagttcatcttctcactgtgagtggaagctggatcgggcccccgtagtcctggcagccctgttgtctggagggttcttgttgtccctcccattagccagggcggagactgtctgagctgtgcaggaggagggttgctagtaggttctgcttctgcttctctctgctccactgtctgcagcccagatcctgttgggcctggctggtgtctggtaaccatgggcctccactgacccatccctctcttttaaactgtcaggtcattatcaggcataggcagcctatagggcccaaagaaggcaaaaagataagatttactcaagtagcatttgggcaatgaggaaggaaaggtttcaaatttaggggcagaagtgagagaatgagccaacccatgtacctgctgcaactgaaccagactgggttttcaaggctcccagacgtagagtaggaaacgtgctcttctaaatgaggagggagaagataaaggaaacttctagcccctgtccttagtgctttgaggattttattttctcccttactacgcttgcttgacgtcactctctctcgacctccaaacagcaggactctttctctgggaaaccatccttccaaaacggaatctatgtagacaatgggacgttaggcagagagctcagatggcccttttaagggggctccaagaaccaacatcactgctcttttagataaacctctgccctccactccttgcttgagtgggttaaaggaactaacagttgtccctttaggaggacaaaatggggtcaagaggacacagaagagttgtatagcaccagattggttccaaatagttaatggatgtgtgcacattttctgttcagggattaagaccagaatatcagtggatttgttttccccaccaagtggcctcttagactagtcattaacttatgattagctctaaagatttcaaatagtggcagacagtgtcttctgaatgtaagttttgagaaatacgagtctgtcagagcggccataagccataaagagtcaatctcttaattatatttttcatcatgtaaacaagtttcccatttccctttcttagattgcaccagtgaaggagatgttttgcaaagattcagagaactaatttttcactggataagacctgagtaacccagaccccccaccgtggttcttttcacagccctcgactttgcacttaaaaagggatattgtaaatgaaaggctgcagtgccagttttaagaaagaatttctgtgaagtgtgaggactctggagtctagctcacataaagagagtgttatataaaaatccgacagctgaactaggttgctcttttttggcagggagtggggatgagatttgacaccaatatgggcaaaattagataaccttttggttaatataaatgattttgatttggaggcctaatttgtagattgtgaaagcagcttttagtttaacttattcacagaccccttataattaccatgtttttttttttcttcctaaatctcttggttcagcttgtgaatcttacgtgcccgtaaagttgggatgttgaattggctcttctttgttctggcagtgagtcaagtgtccagcattttttcataagtgttttttaaaattgttctccagcattttatggctcctccctcccatgtcctcagacccagcaaaagcgtagaggcagaattagaggcctctccaggccagctcctctgcccacatgtcatacaaggtgtgaatttgagcacagtccagaaatggagacatcccacccccagttgaataatggcccattcatgccaaccttgccaacacggagagggcagagatgcactagaagaccttcatcctccccttcctctgccccaagtcactacagttggttctattgaagccagtctttaagaaacctgggttaaagacaccagcacttctgcttgctgggctggctggacctgtgaagccatgggcaggtagtgccctcttgagagtcattttatttggccaccttcaggtgagactatccatagacacatgctaggataggccccgctgggagggcagttacaggagagagtaggtggtggtgacgtgagggctgtgaaggatccagagacaagacttagatgtttcgttcattcactcactcattcagttactcctaagacttttcagtttcataaggaagagtgttgcctgaggccctagggaatattggggaatagaagggattgaggaaacattaataatagttattcaaaagacccaaatgcttatacttctctctcccttcttctctctctgacacacacacacacacacacacacacacacacacacacgtgcacattcctcccttacatgctcatttgtgccttaaatgtgccttataggtaaatccaggatgactgaggaatccctcgtcactgggagattttgtatatattcttttattattagattgagttgggtgtggggaaaaatttttttctgaaggctcaaaagtggtttcctaaaagtgagccactatcagatttgcacatcaggagaaaagaaatagggttacgtccattaggaaaatcccagtttgcaggagtgcaatcacatcaaaaaaacaaccagccaggattaaaggtattataaatcctcatagcggaacatttctcagggcaaaggaacctggctcatttgaagattaatgttccatgcctttgtggtcaaagggtcagcacttaacacaggaaaaaactaggtgttgttttgttttgttattttggacaacataaaattcaggaatgttttatttagccttggtttctagaaggaagggaaataatatttcttgagcatttactagggtgttgcgtgctgtgctaagtaaattttaagtctttcagttttatagatacggaaaacaagggtgactctttaccacaggatgaataaagaactaagtaatatgggaaatgcagcaatttctggactagctgagccgattccttcctgtgagcacactgtaagctttcaagttctctgggcaggaattacagcacctgtcccctgcaatggccctgctgtgtgatgctcatcgcttcccttcgtgctggagcagtcccccaggtgtccatctcctatctttttgttccaatcttctgtgagttccagctagcaggctttacatctggggaaaggaaaaccaggggttttagctctgttctctgctcccatccttcgctcaccagctgagtgagaacatgaactttttgcaccatgtacccatggcttacactacttagaaaatcaccttttcagataaaacagtttatgagttcatagagaacaccagcactctttgacaaaactgtgagtgaccctttttaaacaatgctgagcaggccctgagctataatcaacggtgagctttaatgtctatgctgacagttaggttttgctctcttttgtaacaggttacgtagaccagcagtgtttaaatctaaatacgttgtgagtctgttatctgtcctatcgcgttttttaaatgactttttattctttatcatagctaagtaaataccaaaaaaaaaaaaaagctttgtaggacacttgtacttagtttgggaaaaaaaaataaattgaaattgttatgcttttgtatttccatttcttgcaaataaatattttttcttaaatagt

SEQ ID NO: 15391 - DNA, 324 bp, Homo sapiens
agacctgcaaagctatgtctaccagatgagaaaaatgaattctatcttcagaactgcggtgcatttttttaaaacttggttttacttctgtatgctactcggtaattagtaaagtgattttttttttaaaggcatatatgggaatggggtaggtaactgtatattgatctcttccttgaggaacaatatataaagtacttttataaaatataatttaagctttcaaaggggtgtgagagggagatggtgggggggaagatggcttttcttcattgaaatcaagtctgtaaacctttatatgaataaatactaaattttaaactt

SEQ ID NO: 15392 - DNA, 329 bp, Homo sapiens
gctgagggctgcacctcccacggtggtcaccatgccaatgaaggaagttcagtcttgtctttgatatcagcccctgcaaggcgctcaatgggaaggttgttcttggctcacctgaagcatgaaactgtgtattatttggacgtcagcctgtggatttgatacgacttaaccacgtcagaggaaggactttggcaagtgatattgtcttcatgtggggtattaattctcaaataataaagtaattgacaaatgaggggagaatgctaaacagatgtcttcttgcaatattttaaatattgtatttgagaaaataaacatctgagtcattc

SEQ ID NO: 15393 - DNA, 838 bp, Homo sapiens
agaagatggaaaaggagaaaatgtccttttggaagaatacatttgggcatgggtggttggggatggggtgggacattgaacaggcaaagagaggctaaaattgagtgcagatggggctagtccagggcaagtgctgaagatggcagctgctatctgcagctcctaggtgctttcctcaggctgggtagatggagctctgctgacttctgtggtccaccattgtttttctatcaatttatattgtggcaatcctagagtactttgcactcatttttttttttcacttaatattgtctcataagcatctttctatatttgttcacatcgtacataatcatgtttttgcacagatacattaatattatcatagtttgtttaactacttggctttttctaacagtttttttttttgagatggtcttgctctgttgcccaggctggagtgcagtgacgtgatctcggctcactgcagccttgacttcctgggctcaagtgatcatcccacctcagcctcctgagtagctgggactacaggtatgcaccacgaccagctaattttttgtattttttttttgtagagagggtattttgccatgttgcccaggctagtcttgaactcctgggctcaagcgatctgcctgcttcagcctcccagagtgctaggattacaggcatgagccactgcacccagcctcttaacaaattttgaatataactcctgtcttaaaatctgcagaatattgaatttttccagctattttttacttttgcttagcttatagatgctaaaggatactgtcatttgcatttttaaaaatatatgtatgagtgaatagtt

SEQ ID NO: 15394 - DNA, 4072 bp, Homo sapiens
aaccgatgaatacagcgtcagaaggatgccataaccattctgttcctttacagaactaaattgccgcagacaggagttaaagttttatattttcctgctcagttatctaatgtcttagatcagtggtccccaaattttgctacatattagaatcatctgggaggttttaaacaaattctgatgcccaggttgcaccccatgccaatgaaatcatttctgggcgtcagcgccaggcagttgtatttttttttttttttttttttttgagactgaatctcactccatcgtccaggctggagtgcagtggcgcgatctcggctcactgcaacctctgcctcccgggttcaagcaattctcctgcctcagcctcccgagtagctggaactacaggcacacactgccgcgcccagctaattttttgtattttttagtagagacagggtttcactgtgttgcccaggctggtctcaaactcctgagctcaggcaatctgcccgccttggcctcccaaagtgctaggattacaggtatgagccaccatgcccggctggcagttgtattttttaaagcccttctgatgattccaatgtgttggaaagtttaccttgtctcagatgtaactggtaaaggctgatttctaaattttctgtaattgcagcaacctttctctcctgtctacccttttagtttactgtatgccatggttttgttttggttacattgaaagaaagttaatttggaaaatttgggagaaatctaatcatgcctattaaggatgtaagacattacagccttagaagaaagattgtgaaaagctggggagaaaatgcttaaggacatgctaggggaaaaaaaagtaaaattgaagtgctattgcagacatggctgcagtactgtaccttatcattctgatgaaactgatttggagcacccttttctttatcgctacatttatttaggggacaaactccatccaggttgactctctctggaatgcggtaataagagctggcaagtaaggctcagagagaagcaaccaactggagttaattgcccatttgggctctttgtataattatggcaaagtagacatttatgttctaattaatatgattacagagaaggctttttctcaggtcaggcttttcatgaaagtattttgagaacaatgaattgcaataaccagcttcacacaagcataactgataaacgcgagtgctattgtagtcttggcaagtgagccaagaacctaggagcagggccattcctactgaaggacgggccccctacggagatgaaatttgtttcctggtgagcacagaatcagaacaaagaacaatatcccaaagaggccctgtgtctaccaggagcttctttttccaaatgtaatggattatgtggaattgtagtgccatcggtttttacttagagcccttgacgtgcttggaccaatatttccttccttcttatgaaccaggtttttccttctgattttcccttttcaacattccttaccagtcaccaaagtttcctgttataatttcttttagcagacaagttataagtcagatttaattagcatcagagttgattttatattagtcagattttggatcatcacagagatctccacaactccttggcttaaacagctccaccggtaaaaaaaaaaaaaaaaaaaaaaaaaaaaaatagtttttttagagtagagttattttctgggagagttactacaaatgcttattctcattgacttatttctttcatggtaactttcgttttggagtgttcattttctgaacttgaccctcacattgtaggggtgcagtttgtccaactctttccaacagcccattagacaccactagctggatatttcacaggcatctttgattcaatatgtccaaagtggaactctccatctacctccctcacatgaacctgttcctctctcaggatctgtatgtaagtgaaaagcatcaccatctacccattggctcaagcagaaatctggaagtcatctttgactccttcctctccctcctgataaacatctaagcagtttctaagtctagttttacctcttaaatatctctgttcccttctaagttgtttgctgtgttttcttcagagcaagaaggttatattttttaaaatttacttagtaatgcacattcaaaacacacatcaagtcttcaggataaagttcaaaaccgctgtcatggccccatgtgatctctccctcccctacccctctatcatttagtttcttctgcgcaagccactctggcttcctttcagttttgtggttcccatttttagctagttcagtggttttcaatgggcatttctgcctttttttttctaaacgacaaatagaaatacatcttctttattatcctccaaatccaattcagaggtaatatgctccacctacacacaattttagaaataaattaaaaattaaataaaactaatatgaacataaagaggaaataaaaggtacctaacttgggcacagctgtaactgaagacctaatgaagtagtcagatgcttacaactatttataatgcatcaatttgaacttagaaggtaggagatcagatcatatgtgggaaaatgtaaaagcagggatatcagtgggcattagaataaaaactagggatacaataacttctttgcatatgacaatacttatttgtatataagagaaagaacgaaataacctttattgaaataaagatactatgcaagaaaatgtacagttgtcgaagtggagaaaatgaggatatattcttgcagacgagctataggtcatacatgaatgtctagtgagacattcaaaattcgtatagggtgcagagtaatttcttattgtgaggaactgtccaatgtattgcaagatgttctgcatacttggctctcacatactaaatgctagtagcgcccccacccccacgcccagtcacggtgacaaccacaaaccctatcagatctattcacctttttcagagcagatattttgtaacattctctttgctgacctgaaatgactcatagataatacaatctacttacacacatgaatttcttaaaaaaatcaatttaatgccctaactctcttattaaggagaaatagaaaagaagaaatttataatgaaaagaagatgaatttcattatgtaaacgctcaggcatgactacgctgtttgaaacagacagatgtttactcttccttgtaatgagtaggtttggatttaagagccgattagaggctacttcctgtaaacaagtacaggaaaatgaaactagacgggtgggggacactagaatgaaaaccagtgttagggtaaagacaaaacagactatgtacataatctgtatatgggaaaagaaagagcgaaattaccttacttaaggataataggacaagacaaattacagattgtctcagagaaaacaaatgagttactctctcggacaagctgtaggtcctacctaaatgtccagcaggacattagacagtcgtacagggtacagaataattcttcgttgtgtggcactaacccacacactgcaggacatcgttctccctggctgcatccactcagtgctgggagtagtccccagttattatgaaaccaccaataacccactgaccacagtgagaaccactgattttttccactgacctactgaatatctagcatccttagattggctcaactgttactttcctaaggagtccttctacagaataggtcagatcttggcctcccaaaccccttatttttaaaatactttgcgccttgctttgataatttgtattatgtatccaaactgaaattatctgctttctgcattagaatgtaagccccctgagggttgagtcagtctgtcttgtttgctgtgccacgcctgatgcccagcccagcagcatgctttgtacactgatatattgggtaaattttgttgaataaattaagctcaactatttgtatttcaatagttgagttgtattgcttcctgttcttcaagcttaatttgaactgtctaataaaaagaagtaatt

SEQ ID NO: 15395 - DNA, 693 bp, Homo sapiens
gtgttctgaagcagctgtttgctgacagatgcttgagatgttcatgccctgggctcatcaagtcactcgtgaatctggagcctgttttcctgaaaagttcctgtttgcattactctgcagtttccatttgcattatcgatgagtaagatgcttgttaagcagcatggtgtgactgaaaggatactagatcggaaaatgaattttctttctgaaagggaagtctgagcgagtctcctaaatactctgggctttagcttctccagctgtgaagagctggattgatgcagtacacctaaggaataatcatatatactgggtttttgttttgctgtggattcttttttttttttttttttttagagggggtctcactttgttgcccaggctggtcttgaactcctgagctcaagtgatcctcctacctcagtctcccaaagtgctgggattacaggcatgagccaccgtgcctggctttgctgtggattcttttgggtgtcttttgttttcctacacgatttatagaggatgaggggcggagaaagagatagaaaaaagggatgagctagctgttagagcaagggttttggtgagagataatattgattgaagggattttaaaggaaatgttgctgtgggggattcattgtaactctccttgtgaactgctcagtaaactctacattgttcatgaac

SEQ ID NO: 15396 - DNA, 244 bp, Homo sapiens
tctgggctctgcctggtcctcagcctgccaggcagatgcagcaccccctacaggggaggccagttgagagcttgggcagcctcttcctggacccagttatccaggtcttcatgctctgctcaagggggccacatgagcgagcctaggagctggacttcaacccaggaagatgcatccgagggaaaggagattttctatggcctcaggcctgagtgccaatattagtctccagcttctgtggatg

SEQ ID NO: 15397 - DNA, 292 bp, Homo sapiens
acactggaggggagggagggagggagggagggagagaatggcccgagggaggagggagagaaggagggaggcgctcctgggaccgtgggcgctggccttttatactgaagatgccgcacacaaacaatgcaaacggggcaggggcgggggggggggggggggcagagggcagggggacgggtcgggacaccagtgaaacttgaaccgggaagtgggaggacgtagagcagagaagagaacatttttaaaaggaagggattaaagagggtgggaaatctatggtttttatttt

SEQ ID NO: 15398 - DNA, 809 bp, Homo sapiens
gcgcacaggagtgttccaggcctttcacctgctctgccttgaaatggctatttgggcctttccttttctttttaaacagaaacttttaatgaactgttctcttaacattgacctctcaatgaagttatgttcttaatctcttgctaataatgatttttacttttaagtcacttttgggttcactagtggattaaccagaagtgattgtagttgagtccagttttgctttttaataatgtgttgaagttttagtttttactctttgttgactttgctgcttattggcaccagggacagagtttctagatacaattttatggattggttttaatttttatgagtttgtctctgcagtgattcggtttctcagagtctcatggcatcatagtttttccagaatgacacagtagccaccggtggatgacagcccacgggcggcacagtcacttctgcctgttgctctgacaccaacccaggcagctctgctgtggcttctcctgggctctggcattagttggtctgtgtcacattgtcagaacaggtggctgctgtgtggtgccatcgagtccctgctggttccccttgtcctgggagggtcacccattgcccaaggaagtgcatccacctggcaggtgacctggaggagtagcttccccgaggacccccaggcttggcctgtgattgcgcaaacccacatttcctaagcacactggacacccttcgagtgtgggttttaacatccctgtgagattgaatacttgtgccacacatgtcacaaaagagtatggaaataaaagaaaatttatccg

SEQ ID NO: 15399 - DNA, 1457 bp, Homo sapiens
caaccttgcgtggcgtgtgaactggtctgctgacctcagacagcagctgtcccctgtggtggtgtggcagtgcctgtgttctctcctaggcaggcctctcaactccaggtgctgtcctaagaatttttacccagggcctgtcttctcaacccctcacctttccctgaggagtgtgttgttttccctgttgaaaaaagttacaaaaataaatcttaaagttagttttttgtaacacgaatttaactgtcagacagttagtgtaggtgtgttgcgtcatctgttttcaaccagattgcatttatggacttttcacacactcattttgaggaccccaggttcaaaagtaaaagcagtggccctgctttggggtccaagaataggagtgatgggtgaagggacctaagctggccaatagccctctgccccagacatgggatgtggatccttgaggtttctggtgaaatctgcacatctgtgtttttatatctgttccctaccctgtaatccctaccacgtgcacttgttctgtggttttggtctcttgtttaattgcacacaagtaatactactgggtaaccagaatcaggtgtgaatgtgttgagattttttactgttttgcatgataggaaaattgagaaagaatacgtataaaagatagagaggcataacatcaatgcagagttggaagttggctcccaagggctgacatggtgtgagtgtgtgggtgtgtgataagcttctcatccctgcatagatgcagtattcttagccttagtagaaaaacctggtttagtggtttaagccttgtgtggcagatagatcttaaagggcaaagcagtatattggtagttgtcaatatagcagtgctagctctgtctatataaatagagaaatggggttagccatagaggttaaaactacctggttatcccatataataacacaaactgggtcttggatacacagttgtatttaatgttttacgatctagcctttccagtacaggcactttctgagaaacctttgtcctcacttgaggcattttgttgtcgggtttttgtgtttgtttttgtgggtatttgcctcattccacccctgagctttcaggtagacagacgtgattcaaaactctgttctaaggtgtttattgtagtggagtaatgggtttgcagtgataagtcatacttttccaccgaaagggagggcttgggaatccctgagattagctaaagttaagttgttggaagaattccttgattggaaattgtacctttgtgttttgttgctctgtttcctgaaaataactcggggatgctcctggtttgtccatctactgctttgattccttggatcccacccattctttcactttaagaaaaaacaaataattgttgcagaggtctctgtattttgcagctgcccttttgtaagaagcacttttcccaaataaaacaatt

SEQ ID NO: 15400 - DNA, 1658 bp, Homo sapiens
ccggtgcccgcgagacagaaagaacaatgtcagccacatcaggaccgctggggcttcgagtctgccctaatttgggtttgtctaggagctccagcctgatcttggattgtcaggcgtctctcaacactgccagccacctgagatgctgaccagcagtgaaggctgcactagttttctacactacaggaattactgttgatgatttttgctgttgtttcatgaatgtgccgagtgacttctgactctgccagcatctttgacctctgactctgcccgcgtctttgtttggcctattgaggtttagcgttttaaccttaactgttgttttggacttgaactttctctagccttgaaaatggagtgaacaggaggcaaagccacgcgtggtttgtgttggtggtatgttccacaaatggaagagatcattgcattttgctttggtaatgagtttacagagagtgggtcatctttgaagcatcaaatcctgatcaaatgctcaagctggaccgagctgcaagcctgccttggacaaagaatccctctgttcactgtggtgggaaagatcacactacatgcctgttgattggctcagtcactctgtgtctgatctaaacgtcattcagccctagaagcatgaattgcttcaaattattgtcaacttgttctcttccattttcattcaaattaactttgactcctggaagtattgagtcttcctttcaaggaccataaggtacatcagttatcttgaacattctgacgtgtaaaggaccataaggtacatcatttatcttgaacattccgacgtgtaactcacagccgaagcactccatcccagatttgttgtctgggaacttaggatcctctaggaagctaatctgcttagtctatttttagaggattgatctctggcacaagcagcttcctggagttacctcagcagaagactagaattagagaaaagggaaagaccttttcttctagtaagtgtcaagtacagatgctctttgacttatgatggggttatgtcccagtaaacccattggaagtcaaatgcatttaatacccctgactggacaccacagcttagcctcgtccaccctaaatgtactcagaacacttagaattgcccacagttgggcagaatcatctaacacaaactctattttataatcgagtgttgaatatatcatgtaatttattgaatattgtacattatgttgaaattgcaaccatttcacaccattgtaaagtccaaaaatcagaagctgaggactgtctgtacatgacattgaatcacatgaatggattactagggcctgaggggtgtccgttctttagaaaaatgtagagtatatatatcttcagggctgtgaattccatactagttatcaatattttaagatcattctgtatatacatattttaaattatgcaagcaaactaggaggagaatgtgcaattttgagggatacctaatttgcattcggttaggggatatttttcaacctcttgctttatactctgatatggggtgtgtttatgaacttgttaatgttatttaatcatgcagatttccaatcagtgtattgctcatttactgacaaaaagggaaaatacgaaacacagaaagggaaaataaactgacttttataatg

SEQ ID NO: 15401 - DNA, 287 bp, Homo sapiens
ctctcagcctcaagggaaaacttcctcctagtgcagccctatgctttaaaaacagttcctggtggcctttctgaaaggctgggtcccaggttgtcacggtgcggaactggaggccgcggtggcttctggccgaggctgggctcttccctggatgaggacctgggagccgcctgggaggacagccccagaaagggagcccgagaccaggcgtgtcgccgacatgcaaatgggttgttttggtggttgggtttttttttttatcttagatattaaaagtaagaaaaatg

SEQ ID NO: 15402 - DNA, 112 bp, Homo sapiens
aacaaatgagtgagagagttcaggagagtagcaacaaaaggaaaataaatgaacatatgtttgcttatatgttaaattgaataaaatactctctttttttttaaggtgaacc

SEQ ID NO: 15403 - DNA, 268 bp, Homo sapiens
tgttggtccctcaagagggagactttcttcctcagtggcggagagaagaaagtgcatttattgtctttccacctattggaggaatgtcatcttcctaaatgaagtttatttggaggaacacagtcatctccttggtgaaatctaatccggttacattgtggctggtttcttgaacacattctaactgtgcaaaattatcttggccttggccgtgtaatgtgaggtttacctgattctctaatgaaataaatacctaagttattgtttg

SEQ ID NO: 15404 - DNA, 109 bp, Homo sapiens
gaccctacttctccctctgcattccactggctctgccatggactatacaagcagataattttccctctattcaaaataaaatctccaaatgaaaatttgggaatgtagc

SEQ ID NO: 15405 - DNA, 2747 bp, Homo sapiens
tcacagttccctgtgacaagaactatacttgcaactctttttgaatccatacaggtcgtctggccaatgattcttttacttacctatctgtctaccagtagcggtccttgcccatttgggaaactgagcttctttcttctgcactgggggactggatgctagccatctccaggagacaggatcagttttacggaaacaactcagttagtatagagatgaggtccgcttctgtagtactgagcatttctgactgatcaaaaaggcctagtctgttgacagggtttgttttattttagcctcagagtataccatactactagggagtaactgtagagtgagaaattataaacattatttagggattaccatggtggaagagggataaacataggtcctgtgacttcgtctctgttctcaagggaaccccattcacatgcccctcctaactccacaagcgagggtagcagaggctctcctcagtctgaactaaggcttggccttggggagggctcctagtgctgagcttggagcagcacggacagcagcattgtttatgggaatggagagaggtctgggcaggataggaaccttcttggagacccctttgaagaaaaccaggcagccaagggagccaaacacactagatttctgttcttcagcaaagccctgaagagacacttaagctaaaaattcccttgtcatatttctgaaactccattataacatatgtaactcctttgtaaccaaaatttaggtaagcaggcttcctttgctctgaaggttttgagtacctggctgtatttgttgagtatttttaaaattttggatagtctcttaggcaacaataatcacaatatattcatcccttcagttctggagaaagcctgataccaggcacagcctactgaccccaaggagcctggcactgattggcatcacattgatctagaactggtccagccgacgaagagtaggaaaagagaagggctgctcagggaaacattggctgggggcacggaataagcacatagtaaaaagggaacatcagggtcaaatggaaatcacctgagacaggaaacagggagttcatttggccacactggaagaaaggcaagaaagaggaagacaagtcttggagtaccctggctgttctccacactcacaagacatcagctatatactctgcttggtgcataagaaagagaaaagagatgccttttgtgttttgagtaagaataattaaaccataaggaagaccatgtataaaactgatggaaataatagtcaccaaagtacagcacataccattttgtgtctaataacaatgtagcacagtaatgactgtacatgtcattgtatgtataccaaacaagattgttgtaaatcatattttttattacaacactaagttctgcttctgcattcctaggtttcatcatttttggctccttagcatggccacttacaattttttaacatgagataacacatcaggtgtcagaacttgcttgaagggaattaccagaagtaatttgtgtttgagatggggtggaaattggaattatattagtagccggtggagatacaagttctctgactgtgttgggaaaggataagtgctaccgttgagaagggaagaaaggctgagtctaggtggagaaaaatatcaacagaactctagccaaaggcaagccccagaactcagacaacagaaaggaaatcctaatccttctgttttgagaagagagaactgtagttgcttcacttcctatttcatgacagaataactgcaaacttttaagatcaggaaatgtagacatctagtgatttctttagtagacagtttaatttcccccaagattaggagacacttctgtgcaggttctaaaaggagcccaatggcctggggtgggagtggggagtagatagggaatatgtgggatttggtttaagttcatcattggaagagttcctggatccttgcaagcttagataaatgtgatctttattagatagcagtggcatgctttaaaaaaaaaaaaggcaatgaaaatttagcaagccactgaatttgagttttcactttgtttctaatatgctgtgtgaatcagtacagttttcttaccctttcttggtcttaatttccttactgataaaatggggtagtaatacctatctcaaaaaattattgcacatattaaataacattcctctatgtatctcaatggcattagacattaggagaagcattttgtggaggatttgaagttgagatcttcatccaagaagtagcttttcaatttgctagaagcttaatgtaggcaagccacttcatttttcagaacttgtttactcatttataatatgggaataaaaatttgtgcaagtcagagaagggtgccttaaaaatgttgtggccaagccacatgagatcaaagacacacttttcatgacctcaaatgtgggcccagcctaggtcagccaacccccatccaacccttagactcacgaacaaatccacctgagatcagcagagccaccctagatcagctgaaactctaagcacaaaaataaaaacttatcactgtataccactggagttttctggttatctctcgtatagcaaaatctaactgatgcaatctccatctggccttcatccttctccctttattgtcctttcgtgtattgttcatccagcaaccaggatgatcttgttaaaacattaaacagattctgtcactctt

SEQ ID NO: 15406 - DNA, 57 bp, Homo sapiens
gaatggacatgaaatgagctcttcattaatacgcctgtgagtcttcataaatatgcc

SEQ ID NO: 15407 - DNA, 77 bp, Homo sapiens
gctgtggcagttgtggaccatatgacacagcttgtccccatcgttcacctttagaattaaatataaattaactcctc

SEQ ID NO: 15408 - DNA, 500 bp, Homo sapiens
ctgcgtgttctcacttcgcttcctggaacttgctctcattttcctgggtgcatcaaacaaaacaaaaaccaaacacccagaggtctcatctcccaggccccaggggagaaagaggagtagcatgaacgccaaggaatgtacgttgagaatcactgctccaggcctgcattactccttcagctctggggcagaggaagcccagcccaagcacggggctggcagggcgtgaggaactctcctgtggcctgctcatcacccttccgacaggagcactgcatgtcagagcactttaaaaacaggccagcctgcttgggcgctcggtctccaccccagggtcataagtggggagagagcccttcccagggcacccaggcaggtgcagggaagtgcagagcttgtggaaagcgtgtgagtgagggagacaggaacggctctgggggtgggaagtggggctaggtcttgccaactccatcttcaataaagtcgttttcggatccctg

SEQ ID NO: 15409 - DNA, 32 bp, Homo sapiens
ttaacatcgctatcactcttgaccttactccc

SEQ ID NO: 15410 - DNA, 136 bp, Homo sapiens
cttggttaccaaagatgccacagcacagaaatatcgaccaacacctccctggtcacatccatggaatcagagcaagatttcctttctgcttctgttccaaaaataaaagctggcacttggcttccgcttgtctctt

SEQ ID NO: 15411 - DNA, 3149 bp, Homo sapiens
tttcctcccccaatgccctgccttccactcccacctgagggccatggctgtgacccataccctccctccccccagcagtacagctgaaactgggcagacaacattggggaacccaggagcttccagtcctctcctggaaatggaggaccaggatgggattttatccaggcttacactctagaaacccacaggcctgggaactgagacctgggcaactagatggccgtgagcttggtgtggctgtggagaaggacctgggctgtgggcttctgggtctgtgccgacaaagcctccagtgtgtgcaccctgaggacgggggcagcgcagctgtgctcaagactggatctcagttcttcacgccccgatttcgtcttccaggagctgtaactctgctgtctgaatgcctcctttctccatttcactcttgcttttcccaactctgttttctctggctgtggccccagctcatccctactgagagaacagacctcaggggctgttggacatggctggacaggcgcaggggaggctgcctgaagggcacgtccatggggagggtggagaggctgcctcagcaggtcatttggcttctgagatcaggagtcgaggaggaggtggatgtggcagctgagatctacagggggcacggatgtggttctttctatcaaggcctgcccggagacaagagagtcactgaggagactaagaacaaacacagccccttgctctgggatctttaatatcccatggctaaaaggaagatcctaaggatctgggaaaagacccagccagggctggctgctccagctcttgcttccctttcagctttcttccatccctgctccgggagcctgaggagggtgtggggacacccatcttggatacaccaacgcaggatgcaggtgtcgccaacagcagggggagcatgagggctgtctccccttattcacccctgtcctctgaagctgtttacacttttctctttgccttttctacatttttataacttcttgggcactcagggttgagtggagtggagggaggagtccggtgctgtcactccctcagccaggcagggttgcagctgagggccagggtgggcactcggcactttctgccccttcttcagctcctcccaggactcccaaacagcctcacagctgtcctccctgcctccccaggcctcctaccagaggaagagaggaaaatcagcggattcttccttccaggatggtgtatggtgaggcacaagcttgccctcccacacttggcatccatgctggtggggactgagcagcatatgcgccccagcactaccgtgagagcacaggcagaggatgggcggagcaaagcagcggtgctgtggggttggagagcacttggccctgccactgcccaggtagcccctccccagcccttggcacaggcagagttcgggtaggagagagaggcctaagaggctcactgccctatctccttctttcctcacgcccttccaaggctccggctcccaggcctgtgtcctacccacactctgtcaggagtcctaccacttgcatcctctgctggaagggagcactgttgtcctctcctggccctgggcacaaactttgccctcacccccaggccccagaacttattattttggagtgagaaggttgagagttggggtgtttctgtccatctatggtcctgtcccgccatcaagttcatactctcttactcacacttctgggatgcaagcagggcagggggttctgtgtcttccatggaagggggacaatggttatcctgaggttggtttttggaggaaacatgggcgtaggcaaggtgaaccaaggcaggtgcagtcacctaaccgaatgctgcctgtacaggggaagagtcctcttgtgcttgctaacgtgtgctgactccatgtcccaggacctcatttccaggagctctgagaggtggtctagcatgcccgccctggcagctattccccacccgtctcctgctgcaggctctggggttttgcatgttcatgtgaccttccttccatggggtccctggttcctcaccttctccaatgtgtgctattcccacatcacctcttcctgtcgtctcatcctctcagtgcccatatcatacccccagaccacggtggacagctcacctagtgagtgcgttcattcattacagttcgtttttgctcaggcccgggggagttaggaaaggtagaccacagcagctttcgttcctccttccctttcccaaggaagccaaatggtccctgacaaaagatgactaaagatctgaaggactctagcagggttcatacatgaacctgctttccccagggtgctggcatattgctgcagatggaagtcaggtgggggtctgtcttctgcaaggagctcctactcgctctgaagagggagactgaggagctggcctgggaccatcttaggactcttctggtgctgggggcagggtgcatgggggttgcttatcgtctatttcagggggtggggaggggcatgtgcaggaagaggctgtttcggggtgggaaagggttgcttttcctttggggttaaggctgtgcagcacgttttacagcagtcctggaacagggctgtttttatattcttgtgaatgaaactgctcttgctaaatgattttctttttttggagggggggtgcactttcattttcaattgactttattaaatgaaaatccaaatcttccactcctccccctccattgtcccctcccccaccacacaccttccttcttgtccttgtgttgaagagggtatcttggggaatgagtttattatcttctccacgacctcacctatacatcccacacaccatcctccaggtctgggaaatatccatttttctggccagtcttagcatgttttcttaatgtcacattcccacgccaggcccaagagagattctatgacatatattatagagagaattctatatcaatatatataaatattagagattatgtacacaagggcatgggctcaaatgcccactgccagtcccccacccaggcttcagcatctctcttggcctggggaagtgggagggatgtgatgctggagaaggctacaggctgtgttcaatgacactaaacagaatgtggtggc

SEQ ID NO: 15412 - DNA, 344 bp, Homo sapiens
tccctcctctcaccccatgcccaatcagggtgcaaggagcaaggacggggccaaggtcgctcatggtcactccctgcgccccttcccacaacctgccagactaggctatcggtgctgcttctgcccactttcaggagaaccctgctctgcaccccagaaaacctctttgttttaaaagggaggtgggggtagaagtaaaaggatgatcatgggagggagctgaggggttaatatatatacatacatacacatatatatatttttgtaaataaacaggaactgattttctgcctccatcccacccatgagggctgcaggcactacaaaagagctgactactgaga

SEQ ID NO: 15413 - DNA, 1177 bp, Homo sapiens
aattgaagtcaagaaatgcaaaaaggaactgacacatctcagcaaagaaaactgaagggatttggttataagtggagaggatctcagcatatttctggaagatagaaagtggatgaagcatgataatgaaagagtgaagaacctttcagataaaatgtaagctgatctgaacaacataaccccaaagagacttgcgcacctgaaaagcttgtctactgaagaattactccagttgtaagattgagccctctcctactctcccccaactcttatgcacagaacacaggcagtctccactattgataccagttaaaaatttcttgttattgttgctgttgttgtttgtataaaggaattgaacaggctgcttgcagagagataagagttggtgctccagaaaaaaatttctcttctagtggaaataagtgcccctacccccagccggtcagctaattctctactgacagctgagacctcctactcaagtgcctgttgccttcaggtatagaagaggtttcctgaagaaacagacctaactgtacaacagcagaggaaacccatgccaactgttatacaagttaacagttatgttgatttttaaatgggaatggtgagttagaaattcccagacatgggcgatggggagggaagaggaataagaaaagtcacgaggtagaattaggggccttgaaaatatgacaaactctgagggaaacaaagacaatgtggaaagaataacttaattttaattccatctccagagagatttgaggtgtatttaagatgaaaaacaggatactacaaagaaacggaaaactcaggagttcgagaccagcctaggcaagatggcaacatcccgtctctacaaaataatttttaaaaattagccaagcatggtggcatgtgcctgtggtcctagctacttgggaggctgaagtgggaagatcacttgagcccaggagttcaaggcttcagtgagccatgatggtgccactgcactccagcctgggggacagagtgagaccctgtctcttaaaaagcaagaaaagaaagagaagactgagaataagaagatctctttgaaaataaaataagactgctaaaagtatttggtatacagtctggaaaataaagttgagggaatctctccagataaagagcaaaaagaaatagatag

SEQ ID NO: 15414 - DNA, 345 bp, Homo sapiens
tatgtcacagtttcatgtttatccagttcaatgtatttttaaatttttccttgagacttctttgactgatagattattgtgaagtgtgtttttaaatttccaaatgtttagggattttcatatctttcttatgctgatttccaattggattccctacaatgatttctggttttcatctgctctggatgattactatctcttttaaatttgttgtggcgagttttagggcctaggacagctctatcttgccatgtgtttcgtcagcactcaaaaaaaatatgtgtattctgctgttactgtgtggaatattctgtaaatgccaaatagattcttttggttaatggc

SEQ ID NO: 15415 - DNA, 1595 bp, Homo sapiens
cctgttgactggcatccataagtgtgcctctgccttatctcatttctcaacagttcattgctcaacaagaacgattcacctgggtttgcaagaatctaaacctctctaggggaagcccactgggtttaaagatgttagtgtttagataatacaggtaacattataaatgacagatctcaattttatagtagtgggaaagatacatgctaagaaagcaaataagctctattatattcggttggaacctaatgggaatcattccactatacaattcagtactgattattcttcttacattattaatcattccatttatcctagaaaattgtttttaatttgaatcagagaaaactgttgaggttcctcttggagtctagaacatccttaaatgtctaacaacaagggctacctctgagtaccttttagtattagttttctgtatatgatatatattatcttatactgaaaaaaaattcctttcagattggggtgttagaagtgcaccaggtcactctgaccttattactgtctttggtattgtcttaaataaatcaagaatcattgacctaattgttaaatttaaaaataggtagttagcaataggtggaaagagaaatgatgtgaaagataaatgatgattcgtggagccctactcacacattaacccccaaattcaaaagtaagaatgcaaaagtctagagggggtaacagtctgcatcatcatcacaacctaaatggagaaagctgtgcagaggaaacttaagcataaaaattgaattcgtttctgacataccttagactgaaaaactgttggttcatccagaagtgtattcatattaccagaaaatgagtttgtctatggggatacatgaacttcatatactaaggagcctaactccaaagcctgcgttctcatcccagtctgatattcacctaagtttccggacccttttccttagctgtaaaatggaagcggttggactgatggtgtctgaggttctttcccacactgaaattctaaatattgacacttagcagtcatagggctgataatacacacagttactgacttagcctaaacaacctggtgcatcgaaatgtattcacctttcttttgtaaagagaccatcttctatcttctttccacctttctctgttttatgaaaccaactgttgacatacaaaccatgattgaaggagaacctgtccaacatgttttatgtacacaaatccctatgttgctataagaaaagtgaaagtaactgttttcttcttggtgctatgacagtgtgagactcaggttgtctgtagagaatgaaaggagcagtggcccgcgtgattgtggcatttaaggagcagtggcccatgtgactgtggcattttcggcacttttcattactttctgcttgaccggaagttgaggcttagctatgtttccatcttcagtttctgaagactagttatatattccttactagaaatatattcataatatataaaagaaatatatctgtgattttaaaattttgctaccaaagaatgcatgttctgtgtgccctgaaaatgttaccagtgttaataaatggatacttatc

SEQ ID NO: 15416 - DNA, 263 bp, Homo sapiens
catctgctacctcctcccccctcctctgaaacagctgccttagcttcaggaacctcgagtactgtgggcaatttagaaaaagaacatgcagtttgaaattctgaatttgcaaagtactgtaagaataatttatagtaatgagtttaaaaatcaactttttattgccttctcaccagctgcaaagtgttttgtaccagtgaatttttgcaataatgcagtatggtacatttttcaactttgaataaagaatacttgaacttgtc

SEQ ID NO: 15417 - DNA, 730 bp, Homo sapiens
aggcctgaggtctgcggaaggtgggaggaggcagacgccctgcgtggcccatggtcggggcgtccacgccgaggccggcaacaaacgacagtatctcggattcctttttttttttttttaattttttatactttggtgtttcacttcatgctctgaatactgaataaccatgaatgactgaatagtttagtccagatttttacagaggatacatctatttttatcattatttggggtttgaaaaatttttttttacaccttctaatttctttatttctcaaagcagataattcttctgtgtgaaaatgttttctttttttaatttaaggtttaaaattccttttccaaatcatgttgattttgctctttgctttttcgttgtctgagaaattgttggcgtagatttggcttctggtatgtgtttctgattgcttcctgttgagcacaaagtgagagctgccactgagcagccctgccaggggtgctgtttcaggctgggcatcgccaggcggcctccctgcaaaccaagggctgggggcaaaggggcatgatccagggtcccccagggtgggctcagctccagggagaggccacccacgtggcagccccacctcttgagagcccccagtgccggagcagaaaggaccctggacccagaggcagatactgcggggtggtagaaaaggtagagtaggctgtggcaatggaataaaacacgattaaaaacgtt

SEQ ID NO: 15418 - DNA, 935 bp, Homo sapiens
ggcagagtgggacatccaaagcgttgagcaggattggtattgcccaggaatccacagcaacagtagccagacccgctggtagacgggttttaggagcaggtatccttctttgagcaagagtgtcatgcaagttaggaatatgaagaaccacaaaggattttctcttcagaagcatcaccaattatatttctttcttttttttttttttttccaagatggagttttgctctgtcacccaggctggagtgcagtggcgtgatcccagctatattggaaaagacagcattataaaacaaggacataattttatgaaaaaggaggcatctgcaaacgaaaacaatttctacgaggttatatgtgattgttaacatttttaagaaaaggtgcacacagaaatccagataagatgtgattacctttgtgcatttgtataaaaatatatgtgtgtaattataaggaagttctgacattttaaaaagtaattgttataaaagtaaatttaggccaggcacagtggttcatgcctgtaatcccagcacttgggaggccgtggcaggaggatcacgagccaaggagtttgagaccagcttgggcaacatggcaaaaccctgtctctactaaaaatacaaaaattagccaggcatggtggtacacaccagtagtcccagctactcctgaagctgaggtgggaggatcgcctgagcccagggaggtcaaggctgcagtgagcaatgatggtgccactgcactccagtatggatgacatagtatgacactgtctcaaaaaaaaaaaaaaaaaaatttgggccaggggtggtggctcacgcctgtaatcccagcactttgggaggctgaggcgggtggatcacaaggtcaggagatcgagaccatcctggcaaacacagtgaaaccctgtctctactaaaaatacaaaa

SEQ ID NO: 15419 - DNA, 825 bp, Homo sapiens
gtcaggccatgcagcagtcacgcagtcggctttcaggaggtgccagcagctctgttggctcaagttgaggcaggttgaaggattcacagggtaagatcgggcacagtggctcccgcctgtaatcccattactttgggaggcccaggtgggaggatcgcttgagcccagaagtttgagaccagcctaggcaacattgcaagactccatctctacaaaaaatataaaagtcagccaggcgttgtggtgcatgcttgtggtcccagctactttgggaggttgaggcaggaggatcgcttgagcccaggaggcagaggctgcagtgagccatgctcacaccactgcactccagcctgggtgacagagcaagatcttgtctcaaaaaagaaaaaaaatcacaaaatactggctacagacacactggacaggtgtgtggtctgcagaactctatggctccttgacaaaagttccaaataatccatagacagtcaaagagacatctccctcaataatcgtcataggaaagacgtgccagttgtggaggaaacattcacactgatctgctagtccaacgatctcttcagtgtcatccaataatcccttcattaaattcagaaactacagcctgagtgaagaaatgttacagccaggaacatattcctcagtcagcttttccattaccaggccattttacttaaatctgtattaaagtcttcagttttctctcatagtggattttcattttctctcagatggtgagagggcttctgtttcttggaatgtttccatattgctaaaaataaatgtcttccactatctcatttgtta

SEQ ID NO: 15420 - DNA, 407 bp, Homo sapiens
gcgcgcgccccgccgccgccgcccggccaggtgcgcgggccgtgccccccctcggacaccgccaggcccgagcccagcgggcgggggcggggcgccccccagcccctttgccgtgagctccccctctcctctcgtccctcctcccaaggacatgggggcagtgagaccaggtcccttgctgccgcgtttccccgggggccccaggggggagggcgcggacctggggaaccctttcgggctgttaatttccttgacaataaaatggatgaaaccaatcagcacggggggcgtgatttggccgccggccactcagaggggcggtgtagggcccatctagttggggatagaactttataattaccttttggatactgtggttctatttgataataatagagtaattttta

SEQ ID NO: 15421 - DNA, 1589 bp, Homo sapiens
gcgcctccagccccatagcccctgccggccgcacgtgtaaaaagccccgtgtgcaggcagcagggcggcgtggaagcttcaggcagacgcgggacggggagaaccaaatgtccaagttgctgaactgatgatcactggagaaagagaaactatccaccaggacagctgccacctctaaaccaagtagaattctctgtgaaatgggagcgccgtagaattttaagtaatttaattgcaaacctgttttgttttttgttttttgtttttttttaattcttgaggaaaaagctggaaaatagtaatagggctatttaaattttgtaggtacttttggttttcagggcgtgcatttctgtcactatctcactgagtctgatagtgtgttggaaggttggccagttggggacccctggcccactgactcctggggatggggtcctgtgtgtgcccctgctctgcccagttgggctgagtgggcctagcgcaccaagcccctgggcagtgagggccattgggtcccttggagcacacctcagtgcagcaggaaggacccctccgggagtagcggttgcatttcccagcttgcctctcctgaaaaggccccccaaaagtgctggccccaacttttctctattttgggccatctgtggtacccgtcccaagggcacttggtggtgtcccctagtgtgtgactccctggcctcataaggacgagttgtctgaaatcccagcgttaggtctggggagatggagaagctgaaactggggagctgcaccacaaacgtctagctctcagcagagctgggagcaaagcctggccgcccaccccaacctggggctgcctcccactccgtgagatgcttctgtctcctgttcactttgtgtggtagtttcttattttcaaaatgcatctcatttgatcattactgtgaccttgggaagcagcaggacagggatttctttttagaggtgcaaactgctcagaggggacacacctcagcctctcactgtgggtacacgtggcgtgccatgagtggggaagagcaacaggcgagatgcctcattctactggaacatcactgtgggtgaacagagatttccaggttttccctcttaaaatatttgtcccacaccgacaagagtccagtcaccaggcctcaaaggaacttctgcttgtagcagccgcctcccctgtgccccagcctccttaatgtgtgcactctcagagggcacagctcgcgaggctgggtttgggggccaagtggcttgttcattccagcatctaacatcataaaggtgggcccagatttcttgattcgaccacagtgctgttcctaccacacaaatatccattcctgttttgttgaagcagccactggtcctcttgtttcccctgcagacggagggacctggcagtgcccattcattcagccccctcatgcatacttttattaggcgatagactagttaagaaaattgtttctatgtactgtatattttgtacctgtttacacttctaatattgatataactgatattttgaaaaataagagaaaacatcctgttaaaataaaacctaaccagcacca

SEQ ID NO: 15422 - DNA, 2221 bp, Homo sapiens
ctgttgttgcttttaactccatggagagaccgaatggagtgagcccagcagggcatgctgggcaagagaggtcccccgagtcccaaataagaatttcaactagtataaaacgaggcagcgaacccacacgtggaagtctgataccgcttgcagaagggaattgaatagatgtctccctattggtaaggatgtggttttattgacttgaaataacaaagcccgcaagcaacaactgatcatccgcgggatgctgccacaaggaataattgagcactcattcagacacaggggaaaccactgcctctttcagtctttctcccagattccaacagtcagtgttacagcatttcaccttgttcacctccctgagaagacgttgcagctcactcaccccagtgggcactgggagcctctgctcaggtgggagacagatgccccccacatgcacatctggtgtttatgaagcagatactggggcttcataaacacagaaggggcagggaagtagccccagggcatagtgtggggcctcctgactaaaagtagcttgcaaacccctgcctataacagccacttcctggcagtcattgtgccacttaggagccctcctcaccgctcttcctttagttccttcactctgtatagaccctgccagagcagctcagggtggagcagctgcagccatgggacctgctccaggcaaggccctatgctacacagtccctgggggtgaggattccagaggagtcaattccctacccgcccttccaggggatggccgagatgagcgttcccacagggaaagtgaaagttgcaaggctgttgcggaaacaccaggggttccatctaggtcttgctgctcatctcacagaaagccagtcactgagacaagtattgtcagggaagaaggctttatccaggtgctacagacagggtgaacaagagatcagtctcaaatccatcatcatcaactgactaaaattaggggtttatatagcagggaagaaatgtaactacatgtgggaaaacagggattaacgaggggcaaggaagaggagttggccaacaggcagcaggtggtcacctggggaatcatgatgggtgaggggtctggcttctcactttccagatgtggggatctggtaaatttcagtttcttgataccgtctgggaggattgctggctggtttcctgagaaaggaattcagatgacataaatgtaaatttctccttgggtttcaagactgagagggtcaatttctaggtttattcaagaaaaaccataaacatcagttctatgggacaattgggcccatttcaaggctctgaggataagggttaatgaggggacagagtcgcctggagaagttcactggggcctacaagaaactagagaggcttcctggcaaagctctatgctgtctatcctctcttctctccttgcaggaagattccagtataatagacccgaggtgaaaaggcttttgttcaataagtagaaaactgaaggggggtgggaggcacatggatttgaaccagagaccgcttggcctgcaggcaaatgctgtaccttcagttgcacccctcacttgttacagctgtttctgataagcacttgtgcagccccatcagcacctcgatttcttcttggtgagtccatgggaacagccccactgcaaacaacccattcctgctctcctctttcctctaaacctcaacctcctcctacctggcagtccacaggcctacagcttctcctcagtgggaaagacatcagcttggaaaaccacttggaaagccaacgttatcctagaaaagctttttaaatgacccagcaggacaagtctccggatggccttggccaacccggtgcttccctcttttcttggttgtagttctcagaataactagagaatgtactgggagtgttgtcctgagataaggaggaactgtcctaaacctggactctgttcccatcacacctagaacaggatgtcctgcaacgctttagcccaatgatccaagttgcccttggggtataaaacttgacagcagagggcgttcagggtccctcagctgcagtgtgaagtgggacacacaggtgagactccatctgccctgggcaggttcctgagccttgggggaccagttcaccctacatcccaggcttctgttgtcccttgcctgcctgtaaggaataaagttgctttgcttaacttgc

SEQ ID NO: 15423 - DNA, 351 bp, Homo sapiens
gcctagttctcacgaggaccctttcttgcccacagtttcgagaggcccgtgccatgagaccgcctggggtgagcaaggcgacctgggctgctgcccgaaggtttggccgccgcgggacacctgtttccttcccgcagtgtctgcgtccgcacagcatacccagctcggacctcctaggacagagactcagcgaacccttgctgggaaccgctgagctgaagttcttggaaggctcccacccaggtgccccgttggaaagcagatatttcccggacccagcgcggcctcaaccagggcaggaaagagtggttatttatgtacttaaagtttcattaaagttaaaatcggaaa

SEQ ID NO: 15424 - DNA, 110 bp, Homo sapiens
agatgcgtggtgcctccaggaccgctgcgggtggtaaccagtggaagaccccagcccccagggagaggaacccgttctatccccagccatgataataaagctgctctccc

SEQ ID NO: 15425 - DNA, 2341 bp, Homo sapiens
gcctgtgctggacttgagccaaggacaccatcagcctttgcacccccctgtgtccagccctctgtttctctttccatcccatggagtgcttcccagtctccaggtcatgacgtctggtgtaggaagaggggcatggggcttgaggacagggtccagcatgcccagatcacattccagttccttcattccttcttccagaacatctgggtcctccctcctctgtgccccaacagcacgctgtcttcctattggaccttctatctcattgcattgcctttcatgagttacttgtctatactctgatagaaccaaagtttcttgagggcaggcctgtatcttttacttctgtgtaacttccacagcttttgactgcattggagtcatgcagtcacgtttggtgcggcaactccatgcaagctgttgaccagatgacttctcatctctccccacaccatgatggtttaaggtgcctgttgtgtctggtggctggaacatggcagtggtgctgagacatggggagggttggagactgggtggggagggttggagactgggctgggaggagagcaagcaggaacagggatggaggcaggaggagcagcccttttattcactcttgagctgtaacaaacaagccccgttggaacttcctagtgggaatgatgggagaagtttggggcagggtatccaagaagtcagactgtggtcaagtaggtggtcccttgccctggctacagaacatggaagcccctagggatgcaagtggacttgggcagaggaggtcacaccaccccaccaaggtagacttagattagagatgacttgcatctgttacttcccctttttccatgggtttcatggcccctcatgatatttgccttctgctcctagaaggcacagactactttcaacctgcctcgcccttcactgccacccctcccttctcccttgataatgggagcatgtggatggggtgtctgcgtgtgcaaacgggttccctagcaaagtatttgtgggggtccaatgcaaggaggcagggaagaaagggggcctgcaaaggaagcagtagagtgacttaaacatcttgcgaggcagcctgcctggtttatgggagaactctgaagcccatgatgttttcctggaaggctgttcctacagacggggtttataagtactgatactggacaggatgagaagggagtaggatgtcatcctgtctcaggcctcggataggaagctgcctgccagcaagaggagactgatgtgccccgggtgcaccccacctcctttgaggtccaagatgctcctggggagttgaccgacatttgggaagataataggaggcattggggaaactgctccccaatatattcctcttttcctttcttcaagctgcgtagcagggggcctttagctagtttctcccgagaggggcgggaagtacagctggtggagacagtgctgggagatgatcagaaatctcagggcacagcctcaggtctacctggacactcatccactgttggagatgctcaacagctagacacagatgctcacagccgacctgtggcctcttgctctgaagccatcccccatcttccctagacacagcagacatctgagaaagcttcagcatttctcttgctaacagattcagaaaagtgtctcaaagcagagcacagagttatttggtgtttgctgaagacagcctttgtgccacaatcacttattaaataagcgatcaatttcccattgaactgaacatgcaacatttatcatacattcagttctcattcacactccttaagatttggtcagaatttttatttctgttcatgtcttctacttttctactcctgtatgaataaaatattgatttgattacagtggctttgactataatgtgggagccaatttttgcctcagtcttcatttttatatttaccttgttattctcaggcatttttttcttctatgtgagagttaaaatcattctgtaatttccccccaaaatcatattggtattctagttggcaatgtcttacatttatgttaagtttgagggaattggtagttcaagtataagttaattaaggccattttatttctaagtgaacagacttgaaactccagagctactgaagtaaaagttagaatcatttgcattttcattcagataggagataattttgtaaattttgatgctattattttaactctattagcttaagtaatgtcataatagaaaacacaagcatttgaccaaatgagatccattcagcgactaactggcaaggcactcaaaacatgtcattcattaaatgttgtttttatttacctc

SEQ ID NO: 15426 - DNA, 228 bp, Homo sapiens
gctgccaaagaccccacggggtgcccgcatgtccctgtctagggcagcccagggcccccactcctggctcctcacacttgcctcccctatggccgctctccagaccctcctcctttcttctccccacatccgcacctgctgttcccactctggggttctcaagtccatgaacagatattgttgcattttccacaatgctgattaaacataataaacaatccagaaaag

SEQ ID NO: 15427 - DNA, 472 bp, Homo sapiens
gatcaaatctagatcctctagcctgggcagtagaggaagaaatgctagcctggaagctcggcatttggtttcactaagggccatgtggttccctgcagcctcatgcctggccccttgacacatccaaagcaaagggagtcctgccccctccccccacttcctttctaccctgcctgtgcacagtgggtgggttggtgtgtctggacactgaggacttcctccccctttgcctgtccttccctcggccctgtgtgcctcagggcagatatagcaagctctttcgaccatagttgatggtaggacattttagactttgtttctcagctctgtacaaacacaaatacacacccccacaaaactaaaatcaaagtttcactacataacactgggccttactgcatgtggttcattctagcatttctgttctgtgctgtgctaagctatactactgtatgttctttcagtaaaaaaa

SEQ ID NO: 15428 - DNA, 404 bp, Homo sapiens
tggggctgcccagtgtggacacgtggctcacccagggatcaaggcgctgctgggccgctccccttggaggccctgctcaggaggccctgaccgtggaaggggagaggaactcgaaagcacagctcctcccccagcccttgggaccatcttctcctgcagtcccctgggccccagtgagaggggcaggggcagggccggcagtaggtggggcctgtggtccccccactgccctgagggcattagctggtctaactgcccggaggcacccggccctgggccttaggcacctcaaggacttttctgctatttactgctcttattgttaaggataataattaaggatcatatgaataattaatgaagatgctgatgactatgaataataaataattatcctgaggaga

SEQ ID NO: 15429 - DNA, 1173 bp, Homo sapiens
gttaccattgcgccctcagggtctcacaccttggggttgtcaggttcccgggagaaggcggtgaggactcggccaaacaccccgcgctgctgggcgttctgcacctcgtcgcggtagagatggtcaagttgggagcatcggcagccgaacaccaaagtcatgggagtgggctgcagccctgcaagcaaccccgcgcttgggaaggctcttctccggggcacagtgctagtggggcctccccacaggccaccgtcgcccagcctggcagcccagcgttttgggctgaaaccaccattactttggctgtttcatctctaagagagtgtagaatgctttcacagagaccctgcacagccctgatttacagagggaagggaagcgcgggtgaggtggtggcccctggtggagctgcgctagaatgcgcggcttcggactcagaattccatgccctttgcattgtgtgacatcgcagtccccttccccgctcccacttcatattctcccatacttataactctcctcccagtcacagccctcttcttttgattgacagaccaccctgggcaccccatgctcaatatgaacaccttgtagcatccttaggtcttggacagacctcggtcagctctggcacagtcaagaatccaccttgggcagttcttctttgagtcttagccctaatccctttgaaaattctattttcctttgtcctcaatccagtcaacacctactatgtaccaggcaccaggaagccagaagctcagggcccagcccttgcctttggtacctgccctccccttggtctcatgagcgtcttttcagctttgtggactttgtttcctgccctctctttcctatttcctgccttccagccccacccctctgtccctagattgtgtgactcccttcaggcagtcctttagtccccagcctcacctttgctctcaatgtcatgcagccgctcctgccagaatccccggaagggggcaatgccagtgcctggacccaccaggatgcagggcaagctgggatcgggtggcagccggaaggagggagccctggcaggagagacactccatcaggtcccctttgcctttcctgctccaccattctcaccatgcagggtgggtggagcaaggaggacccaagttcttcccatctcaaaaaaaaatt

SEQ ID NO: 15430 - DNA, 197 bp, Homo sapiens
gccccgggacccccggcctccaggctggggcctggcctatttaagccccctcttgagaggggtgagacagtgggggtgcctggtgcgctgtgctccagcagtgctgggcccagccggggtggggtgcctgagcccgaatttctcactccctttgtggactttatttaatttcataaattggctcctttcccacagtc

SEQ ID NO: 15431 - DNA, 104 bp, Homo sapiens
ggggttgatgtggggttcaggatggcccccccatggggggtggatgatttgcactttggttccctgtgttttgatttctcattaaagttcctttccttccccgt

SEQ ID NO: 15432 - DNA, 463 bp, Homo sapiens
tgcctccgcgggcgcttggcagcgtcgccggcccctccggaccttgctccccgcgccgcggcgggagctgctgcctgcccaggcccgcctctccggcctgcctcttcccgccgccctggagcccagccctgcgccgcagaggactcccgggactggcggaggccccgccctgcgaccgccggggctcggggccacctcccggggctgctgaccctcagcccgcactgggagtgggctcctcggggtcgggcatctgctgtcgctgcctcggccccgggcagagccgggccgccccgggggcccgtcttagtgttctgccggaggacccagccgcctccaatccctgacagctccttgggctgagttggggacgccaggtcggtgggaggctggtgaaggggagcggggaggggcagaggagttccccggaacccgtgcagattaaagtaactgtgaagttttc

SEQ ID NO: 15433 - DNA, 269 bp, Homo sapiens
atgtccatggccttttgagagggcctgaaagcagatgccccagcctgcagagggcgcgcctctgcactaactcaggccaggtagccctggcagcaggaggcccagctccgcaggcaggtgtggatgctgcaattcccaatgcagagaagcggaccgacagcggcagccgggtgatgtctgatgaagacacactcctactggggctctcctgaggcccccttctagcctgtgcaaaccctgtatgtgcattaaaaatctccaggtctgtg

SEQ ID NO: 15434 - DNA, 1563 bp, Homo sapiens
gccctctacctgggttcgggtcaggagctccatctgggaactaacagctgctaacctgaccagccgctcaggacaggaccctggggctacactcctgcattgctgcaatactgctcccccagcctctcccctgcccctcaacctgccttagctgcactctcttacctacagctggacagtacctgtctgtttcctgtcctccttccagttacatctgtccatgtctggactcggctggccgttccctccagccccttgctggttatcttactctgagtgtgatgcagtcagaggcacctgcgggttagcccaggggcccaagccctggatttggcctgcggaggagcttaggatcctcgttttctgggttttggtgatgttggaggagtaccccccagcccaccgccccgattcctttttgcttctggtttggagctccggaccaggaccttcgtcctggtcagtttttaaataattatttagcagtgtaacttttagacctgcgtgacatctacaaagcgcccaataaagaaagaggaagccacggtccctaccttccttctcgggtctctggggccttctcctccctgcagtgccaacatgcactgcccacagcaggagctggatccagcgtcagtgtgtcgatgggaactgaagactagtccataggagctggaagaactttgtccctttacttctgatttgaaattgtaccttttctcaggcctgtgattcacagactttaacatgaatcagaatcacctggagggctcatgcaatcagattgccagatctcgcctcagcgtttctggttcaataggttttgggggagaccaagaacgttaacatttctagcaagtttccaggtgatgctgttgttgctggtctagagactattttgagaaccactgtccaggagcgtggttttctgattgtgatctgaggttctgccccaactgcacagcagttgggctgcttgttaaaaatgcaggccaggtgcggtggctcacacctgtaatcccagcgctttgggaggctgaggcaggtggatcacttgagctcaggagttcaagaccagcttgggaaacatggcaaaacccgtctttatgtgcctggaatcccacctgctcaggtggctagggtggatggatcgcttgagcccaggaggtggaggttgcagtgagctgagattgcaccactgcattccagcctggatgacagagcaaaaccctgtctcaaaaaaatgcagactggccaggcacagtggctcacacctgtaatccgactgtaagctcatcaccttgggaggccactgtaggaggatcaattgagcctagaagttcaagaccagcctgggcaaagtagggagaccccttctctacaaatagtaataaaatgaaccgggcatagtagcatgtgcctgcggtcccagctgctctgataagaggaggctcacttgagcccaggaggttgaggctgcagtgagcagagcgtgccgctacactccagcctgatgacagaccgagacactgtctcaaaaaaataaaaaaattcagattgctg

SEQ ID NO: 15435 - DNA, 234 bp, Homo sapiens
gcatcatgaactcgtttgtaaacgacgtgtttgagcagctggcgtgtgaggctgcccggctggcccagtactcgggccggaccaccctgacatcccgagaagtccagacggctgtgcgtctgctgctgcctggggagctggccaagcacgctgtgtctgagggcaccaaggctgtcaccaagtacaccagctccaagtgacccagggcctgacaaaaataaagggtgaactgtt

SEQ ID NO: 15436 - DNA, 129 bp, Homo sapiens
gagcccaaaaataagcagcacgacggaactttcagccgtgtcccgggccccagcattttgccccgggctccagcatcactcctctgccaccttggggtgtggggctggattaaaagtcattcatctgac

SEQ ID NO: 15437 - DNA, 231 bp, Homo sapiens
ggtggctcctgtcctccctccccatccctgacctggcgaaaggcctagtcctggggaccctcccacctcaggggctgcaggcggactgccccagctcccccagccccacgaaactgggcctttcctgctgagaggaagtgactttttacagaagccactgaacctggttattttggcaaatcgtccgtctcgagggccttggggggaactgaaatatacagcctgaacgtt

SEQ ID NO: 15438 - DNA, 77 bp, Homo sapiens
gcctggaaccgattgacatgtaaatgcacctgcaccgtttctgagccgggagagtgtttacttaaaatcatgccctc

SEQ ID NO: 15439 - DNA, 1106 bp, Homo sapiens
ttctgctgcaaagcctgaggacactgggaatatattctacctgaagaagcaaactgcccgttctccttgaagataaactatgcttcttttttcttctgttaacctgaaagatatcatttgggtcagagctcccctcccttcagattatgttaactctgagtctgtccaaatgagttcacttccattttcaaattttaagcaatcatattttcaatttatatattgtatttcttaatattatgaccaagaattttatcggcattaatttttcagtgtagtttgttgtttaaaataatgtaatcatcaaaatgatgcatattgttacactactattaactaggcttcagtatatcagtgtttatttcattgtgttaaatgtatacttgtaaataaaatagctgcaaacctcagtcctttgtgctacttgatgtggctttcaaagaagagaagccttgtcctgagtttctcacttggcttcaggaaggccccaggttggattccagaaaccagtgaagatgtggccacaggaggaggtgtgctgaggtggctgctgaccgtggactccctgcgcagtggcctgcagatgttggggctgggttacagctgattgaagctgagtggccctggggggtctgtgaggggagttcctccccagtgatgaaattctctccttccaccctcaaatccctagaccttgactgaaatgctccgtggtcgggagcctggtcaaggaggaggagctgctgagaggcattgttcgcccttgctcatagcttagctcgatgtccgtgtcagacaggagatgattgagaacagccttgcctgtcactgtcctagaacaccctggagtttagtgttctgtgtcagagtcttgggagcctccttcagacccagatgacgggcctccctctgtccaaggagcagctgtaaaggagaagagggatttcatttgtttggtggctgttaccttgtctgtaagtcaaacttggagttgagcagtgctttttaaacgattcccttttgcagctaaaatttcacagggctatttctaatacgtaagcaaatgttaccattgactttattaataaaatatagttttgctttgc

SEQ ID NO: 15440 - DNA, 1084 bp, Homo sapiens
ccgccgtgaatgtagacgccctaggaggagaacttgaacaaagtctctgggtcacgttttgcctcatgaacactggctgcaagtggttaagaatgtatatcagggtttaacaataggtatttcttccagtgatgttgaaattaagcttaaaaaagaaagattttatgtgcttgaagattcaggcttgcattaaaagactgttttcagacctttgtctgaaggattttaaatgctgtatgtcattaaagtgcactgtgtcctgaagttttcattatttttcatttcaaagaattcactggtatggaacaggtgatgtggcataaggtgagtgcacggtatgttcagatcacagtgccttatgtccgaatacagcaatatgtcaccgccgcagccggggcgcacgcgtgtgaaacaacaccgagcttgaatgtggaagtctttgaaccttttaccaaatcagtttgttttctttagatttgtcaaaaagttgtaatttgaatataaataattactttaaaattgtaatgacacttttacacgtaagtgttttgttctgggctaccgtgtcaacgaggctgctttacaacagctttatttatttttactttcatgcaatttttttacacatcttttggtggagtaaacttcaccacatccatgaataaactctcagttattttgaaatggcaaatttctcattatttaagtttggatctggaaaggacatgacttctgaaatagccgctgctgggttttaaaagctgaggtctctcaaagtgtggaggagacgttgccgtcaggcgggagccaagtgccgggaagatgtctattttttttcttgtgtattgaaatgtaaaatcatgatgtttgttatgactgctgatgcgattgtttttgtaaattttattgtggcatatacagtattgtcatacagttgaagagaaacaatgtttcctaatgtaagtgctctgaaaatgttgacactgtatatatatatatgaggatagtttgttttttttttgttttgggtttttttttttcagattgaaaaattaaaatagatcctactatctaccattttgtt

SEQ ID NO: 15441 - DNA, 1905 bp, Homo sapiens
aatgcattccttgctagctcagcgggcggcttgtccctaggaagaggcgattcaacacaccattggaattttgcagacagaaagagatttttgttttctgttttatgactttttgaaaaagcttctgggagttctgatttcctcagtcctttaggttaaagcagcgccaggaggaagctgacagaagcagcgttcctgaagtggccgaggttaaacggaatcacagaatggtccagcacttttgcttttttttcttttccttttcttttttttttgtttgttttttgttttgtttttcccttgtgggtgggtttcattgttttggttttctagtctcactaaggagaaacttttactggggcaaagagccgatggctgccctgccccgggcaggggccttcctatgaatgtaagactgaaatcaccagcgagggggacagagagtgctggccacggccttattaaaaaggggcaggccctctaacttcaaaatgtttttaaataaagtagacaccactgaacaaggaatgtactgaaatgacttccttagggatagagctaagggataataacttgcactaaatacatttaaatacttgattccatgagtcagtttattgtagtttttgatttctgtaaaataagagaaacttttgtatttattattgaataagtgaatgaagctatttttaaataaagttagaagaaagccaagctgctgctgttacctgcagaactaacaaaccctgttactttgtacagatatgtaaatattttgagaaaaaatacagtataaaaatagttattgaccaaatgctaccaggctctgcagcagctcgggggcttataaaatgttcatagggatgttacaatataattttgtgttataaaatatgccattataattatgtaataaccaaaatttcaacctagagtgttgggggttttttggaaaccgcagtctattagtactcaatggttttatacaccttacttctgacagagcggggcgtatgctacgactacaacttttatagctgttttggtaatttaaactaattttttcatattatattgttgcatccctacttcttcagtcaggtttttttgtgcttacaatttgtgataactgtgaataactgcttaaaaatacacccaaatggaggctgaattttttcttcagcaaaagtagttttgattagaactttgtttcagccacagagaatcatgtaaacgtaataggatcatgtagcagaaacttaaatctaaccctttagccttctatttaacacaaaaatttgaaaaagttaaaaaaaaaaaggagatgtgattatgcttacagctgcaggactctggcaatagggtttttggaagatgtaattttaaaatgtgtttgtatgaactgtttgtttacatttctttaataaaaaaaacactgttttgtgtttgcttgtagaaacttaatcagcattttgaaccaggttagctttttattttgtacttaaaattctggtactgacacttcacaggctaagtataaaatgaagttttgtgtgcacaattcaagtggactgtaaactgttggtatattcagtgatgcagttctgaacttgtatatggcatgatgtatttttatcttacagaataaatcaattgtatatatttttctcttgataaatagctgtatgaaatttgtttcctgaatatttttcttctcttgtacaatatcctgacatcctaccagtatttgtcctaccgggtttttgttgttttctgttctgtataatagtatctaatgttggcaaaaattgaattttttgaagtatacagagtgttatgggttttggaatttgtggacacagatttagaagatcaccatttacaaataaaatattttacatctat

SEQ ID NO: 15442 - DNA, 2138 bp, Homo sapiens
tatacatcataaaatagtcttttgcagggtactacgcaagccttaaaatttttcttaagacagagtcttgctctgtctcccaggctggagtgcagtggcacaatcatggctcactgcagccttgaactcctggcctcaagggatcctcctatgtgtgcctcctagagtgcagggattacaggcgtgagccactgctcgtggccaaaagttttctttttttttttttttctttttgaaacagtcttactctgtctcccaggctgctggagtgcagtggcacaatctcggcccgctgcagcctctgcctcttgggttcaagtgattcttccacctcagcctcccaggtagctgggattacaggcacccaccaccacgcctggctaatttttgtatttttaatagagacggggtttcaccatgttggccaggctggtctcgaactcctgacctcaagtgatccacccacctcggcctcccaaagtgctaggattacaggcccgtgcccagccctaaagttttaaactctaggggaattaacagtatttctttacagaatggatttgttaaactagcacagtaaaagtaaagactattctgtttctaggctgttgaatcaaagtgattttagcaattaaactttgtattaatttaccaccaatatttcttcacaaaggaacttttaaaagattatctcagaaagtaaatctgagaggtaagaagtaataatgagtaaatggtaagtacttgagtaaatctaaagaaatattgatagtaaggcaatcctaagcaaaaagaacaaagctggaggcatcacgctacccagcttcaaactatactacaaggctacagtaaccaaaacagcatagtactggcacaaaaacacacgtagactgatggaacagaatagagaatttagaaatgagaccacacacctataatttttttgatcttcgatgaacctgacaaaaacaagcaatgggcaatggattctctattcaataaatcgtgctgggataactggccagccatatggaaaagattgaaaatggacgccttccttatgccatatacaaaaattaactcaagatggattaaagacttaatgtaaaacccaaaacagtaaaaatcctggaagacaacccaggcagtaccattcaggacataggcacaggcaaagatttcatgacgaagacgccaaaaacaattgcaacagaagcaaaaattcacaaatgggatctaattaaactaaagagctgcacagcaaaagaaactatcaagagagtaaacagacagcttacagaatgggagaaaattgttgcaaactatgcatctgagaaaggtctgaaatccagcatctatacgtaatttaaacaaatttagaagaaaaaaccaccccattaaaaagtgggcaaaggacatgaacagacacttttcaaaagaagacatctgtggccaacaatcctatggaaaaaagcccagcatcactgatcattagagaaatgcaaatcgaaacaacaacgagataccatctcacaccagtccaaatggctattataaaaatgtcagaaaataacagatgctggtgaggttgtggagaaaaagatatgcttatacactgttggtggaaatgtaaattaaattagttcagccattgtggaagacagtgtggggataaagacagagataccattcaacccagcaatctcattactgggtatatacccaaaggaatagaaatcattgttataaagacacatgcacgcgtatgttcgttgcagcactgcccatcagtgacagactggattaaaaaaatgtggtacatacacaccagggaatactatacagccataaaaaggaacaagactgactgggcgtggtggctcatgcctgtgatcctagcactttgcgaggccgaggtgggtggattgcccgcgctcaggaggtcaagaccagcctgggcaacacggtgaaaccccatctctattaaaatacaaaaaattagctgggcatggtggtgcgtgcctgtagtgccagctactcaggaggccgaggcaggagaattgctggaacccaggaggtggaggttgcagtgagctgagatcgcgccattgcactcccgcctgggcgactccatctct

SEQ ID NO: 15443 - DNA, 458 bp, Homo sapiens
tggcgtctaggctgccgtgcatgtcgactcctgcggtgcggggctggctgtctggctggcgaggagctgctgcgcttccttcacatgctcttgttttccagctgctttcctgggggatcagactgtgaagcaggaagacagatataataaatatactgcatctttttaagatgtgcaattttattctgaggaaacataaattatgttttgtattatatgactttaagagcccacattaggttttatgattcatttgccaggtttttaaatgttttcacaaaactgttacgggacttcaactagaaataaaatggtgtaaataaagaccttgctatctctaaattatggatgttaaagatttgaaatgttttgtactttgattatttttatttcttatactctgttttcttttatattgatatcttgcccacattttaaataaatgtacttttgaactt

SEQ ID NO: 15444 - DNA, 36 bp, Homo sapiens
agccggggggccgggggaggggcgcgggagggggcg

SEQ ID NO: 15445 - DNA, 3202 bp, Homo sapiens
gacgcacagacggcgtcttctgccaccaagagacccgagaactccagattcacgacattcctgtcccatgtagaagcatttccattcaaccgtggcccctcttcagaacctagacctatcagtgccatttttttttcataatctacgaagaacttggctatggctgatcttttttaaatttaactttctgatggaccctgtagtttccagttaagtgcagattccttacagacatatagaacagcgcattcttctgtagacatttgctcatgttggtaaatacaatcacccatatgaaaaaattgttttcacctgatatgaaaatgttagaaaaggcaaactccgggacttctaaagatttacttaaatcccattatgtactttattcagaatgtagaagctgacttgaaaggcatccttggtactaagtgaagcttattcagaaaatgcatttttcaaatgcaatggcaactgcttgtagatatcatttttgcagtgtatgttggagctgtaatggttgcaattatgtttcttatttccttaaaagcaaaaagcgtagtttctgatttatgttatagaatgatactgattagactttgagccaaggggaaaatactaaattcttttaaacctggagccttagagagccacaggaatatcttctgttgtacagtctaataagctgtggtaggaagtatcatgtaatcacagtttaatgacagtttatgtatatatataattcagtattccctctgataacatagttgccagtgtttaatacacttgtaacttggatttttaccttataggctatatgtatactcagttttttaaagcatttttttcagagatcacttaattccccatgcttctgcaatgcatataaaaactataaatgccgagtggtagaaactcctctttcttcatagtcctcaggctttggttacatttgcatatgccatttgaagcctccagcttttaccagtttaacatccaaagttcacagcatcagcattcatggtgtaagaacagttttgcagtataacacgatctgataatcattcagttattaaattgtaaataattattgggatggtttcttggctttaagtccactgaataaaaactatgaaattgcactctgtgtcaaccatccactaggatagaataccgaaatctgtgcatgcaaaaataggagatgggcccatttgcacacaattcgtagttatgcagtctgctatataaatatgttcacatgcactgtgtgtatgaaaatagatggtctgtgttcagacaaaagtaaaacatttttttcaaattgttacatttaaaggttttctgggagaaatttatgaaacgcaggctgtgtctatttgacatcagaaatttccactttaaaccaaaataataagaaactttaatctgtatatttacaacctttgttgagtacacttcccccttatttatacgtctgcatttccttccgagcttcacatctttctaaaatgcagcttggttttaaaataaaagaacattcattttgtgattctaaacaagcttcagtaaataccaccagtatagtactggtgaatttctcagcataaaatcgacatacctaaaaagttaataaaattcagctcttttccaatttcattgttatgcctattgaagtattaattgccaggtttgatttttagtgaagcttggagtccatactttgagcagaccaagtgaagggaagaacagaaagaaactcaggagtagagtaatatcacttctcacttacaccactttcaggcacatccaaagagttcctagatacttggaaaatgtctgaaaatttttaagtaaaatactaaacttttcagtgtttagctcaactttttgttcatttggaagtttctctccatccgaggacttaagccagttttggatttgtaagccctgagtacaatacacttcctggaggcatcctcactgctgttgaagcaaaggatatgcatggggtggaaggacggcttcgaacctgggactcatatgccttgagaacaaatagattgttacagccttgggctgctgcgtaatcacggttcctcgaggctcttcctgagcacatgcccaagcatctgcctctggagagactgactccaaatgcaggtgcttccattggagctaggtcggaggctgctttatatgacgaactccagaaatggatgccagaatacggaggccaaacgttctgagtcctggtaaggacagtcgctctgggggtcctcattttactgcagttcctgcacgccagtgaaagagaggagatagaccctggaaggcagagctgcagatgctcatcatcaggtcaattctggagctacagttttgtttctgactggatagggatgcaccagtgactgtcacatcaagcagtccttttattctctctcctttagtatcgattttaaagggcattaggcactatggttccagagtttcttggggaaaacttgcagattcttattaattggttctgcaatacttaaataaattattttacaattataagttttcagattataacatttgtattaatttttactgattttccaagatacttcttagatttactatttacgtagctttatgtacattctctgtaaaaatagacctctaaatatgaggctttacatgaaatttgtacacacatacacactaatgttagctccttaaattgctgcactaaggtgctggttagtagagatggacggagcctctcgcgttttgctctcagatgtgttaaaggcgcacgtgtacctgctctcagcggcagtgcggcctccccatctgctgggtgcccatggccctccctgcagcctcagtgatgacctcgtctgccagggacacaggttttcatcatttacaggctcttatgtgctagttttgttggtagcacgttatttaatgcataaaggcagaattcttacaagtttttttttttaatgtgaacatagatgcagcaccgactttttaaacttgaaaaaactggtataatgttaacttttaaaaataacatttggacacactagtaattgatttttgtttacagattgttttgtttacaaattgttagtctttgtttctatgagatacttttagtgtgactttttaaatgtcttagaaattaaaagttgtacaaaaagtgatttca

SEQ ID NO: 15446 - DNA, 667 bp, Homo sapiens
gagccccgcggcccagcaggtgcggcgcgcacggagcgccccggccggcggcttctcccggaggccccggcgcccgcacccacccggcccggccccgagagcaggctcgaccgccgccccatggacccctcgcccaggccggggctggagggattcggccgcggctccggtcctgggcgcttcccttttaagcaagggcgcctcacctgctcttcaagaaacagcgagagggagacccagggggctgaaacttgaactctggttcttttaaaattaattttggttggtgttgggggaggcgcgagtgcgtgtgagaagaaccgacccaccccgcgcaaggggaagcctcctgtctcccctttccccgcgtccgagaaggcggaaacccacagtgttacctgacttatgaaacttgaaaccgcctctggagccgccattctgcagagtatttggaaaaagaaaaaagggtttatgcttacgtctctggggtcggggggattatgtcacgagcgttcaaactgctggaaatctcaaaactgtactgtctttatttttgtatattgtatttatatataaaaagaaacgtctacgtatgcatgctaaattattatttagcttctcccatcgcccacgatggaatgtaaaataaattggttttgtactggat

SEQ ID NO: 15447 - DNA, 1653 bp, Homo sapiens
gcggcagcctcaggggcctcaggggagcccccaccccacggatgttgtcaggaatcatgatctgactttaattgtgtgtcttctattataactgcatagtaatagggcccttagctctcccgtagtcagcgcagtttagcagttaaaagtgtatttttgtttaatcaaacaataataaagagagatttgtggaaaaatccagttacgggtggaggggaatcggttcatcaattttcacttgcttaaaaaaaatactttttcttaaagcacccgttcaccttcttggttgaagttgtgttaacaatgcagtagccagcacgttcgaggcggtttccaggaagagtgtgcttgtcatctgccactttcgggagggtggatccactgtgcaggagtggccggggaagctggcagcactcagtgaggccgcccggcacacaaggcacgtttggcatttctctttgagagagtttatcattgggagaagccgcagggacagaactgaacgtcctgcagcttcggggcaagtgagacaatcacagctcctcgctgcgtctccatcaacactgcgccgggtaccatggacggccccgtcagccacacctgtcagcccaagcagagtgattcaggggctccccgggggcagacacctgtgcaccccatgagtagtgcccacttgaggctggcactcccctgacctcacctttgcaaagttacagatgcaccccaacattgagatgtgtttttaatgttaaaatattgatttctacgttatgaaaacagatgcccccgtgaatgcttacctgtgagataaccacaaccaggaagaacaaatctgggcattgagcaagctatgagggtccccgggagcacacgaaccctgccaggcccccgctggctcctccaggcacgtcccggacctgtggggccccagagaggggacatttccctcctgggagagaaggagatcagggcaactcggagagggctgcgagcatttccctcccgggagaggagatcagggcgacctgcacgcactgcgtagagcctggaagggaagtgagaaaccagccgaccggccctgcccctcttcccgggatcacttaatgaaccacgtgttttgacatcatgtaaacctaagcacgtagagatgattcggatttgacaaaataacatttgagtatccgattcgccatcaccccctaccccagaaataggacaattcacttcattgaccaagatgatcacatggaaggcggcacagaggcagctgtgtgggctgcagatttcctgtgtggggttcagcgtagaaaacgcacctccatcccgcccttcccacagcattcctccatcttagatagatggtactctccaaaggccctaccagagggaacacggcctactgagcggacagaatgatgccaaaatattgcttatgtctctacatggtattgtaatgaatatctgctttaatatagctatcatttcttttccaaaattacttctctctatctggaatttaattaatcgaaatgaatttatctgaatataggaagcatatgcctacttgtaatttctaactccttatgtttgaagagaaacctccggtgtgagatatacaaatatatttaattgtgtcatattaaacttctgatt

SEQ ID NO: 15448 - DNA, 355 bp, Homo sapiens
ccaagccaacatctccagacatgtaaaaatagggaaaagtgattcaaattgaaatgcctgtgtattttcctattgtttttaatgttaataacccatataatagggaaagggtgggatttttttgtgggaatgtgggaaggtgggggttatggaggagataactcaaaacttcttcaattttgcctagtgcctgcgtaaataatatatttaatataaaggactccaggtatgaatggtgtagaaatccatgattccaagaaaaaacacttttctagcaaacctggttgtttttaaaatgacttttatatatgtaatattgcttggaaactatgagtaataaagcaatgacaacatc

SEQ ID NO: 15449 - DNA, 3209 bp, Homo sapiens
ccgcagcaggcaggaggcgtcctcttcagcgtagctctccacctctacccggaacacaccctctcacagacgtaccaatgttatttttataatttcatggatttagttatacataccttaatagttttataaaattgttgacatttcaggcaaatttggccaatattatcattgaattttctgtgttggatttcctctaggatttcgccagttcctacaacgtgcagtagggcggcggtagctcttgtgtctgtggactctgctcagctgtgtccgtaggagtcggatgtgtctgtgctttattatggccttgtttatatatcactgaggtatactatgccatgtaaatagactattttttataatctttacatgctggtttaaattcagaaggaaatagatcaaggaaatatatatattttcttctaaaacttattaaattcgtgtgacaaataatcattttcatcttggcagcaaaaagttctcagtgacctattttgtggtgtttctttttgaaaagaaaagctgaaatattattaaatgctagtatgtttctgcccattatgaaagatgaaataaagtattcaaaatattaacattttcataaatataaggatgtattattgagaagtaagttgaagggcttataaggaaaaatgttttataactgagtaatatattaagagaattgtcatggttcataaatcacattatgctaatctgaaatttcttacataaaaatgaagtgtcttatgtttattttaattgctgttgtaacttactcatgaaacagtatacagacaccttgtacttttcctcaactgtaagagcagactttcaatgttagcaattaagctgttgtcaaacaatcagtcatgagctttgttaattttcaatgttttcccagcctataaaaaaaggaaggtacacgttgtccttttaaaggttgtgaggtagattggagtgagtagacaggatattgcattaaaaattgaaagctcgatctcattattgtcaggaacccccagtgtgacctcacacataggatgtgggacctttgagccgatgtgcactggccaccaccagggttgggggcgccacagctgcgagcccggcccctgctgttctcagcagccacttcccaggctgcctcactttatgccatgactgaccttaatattgggatattgttatgcaatttttatcctgtttagactgttaaaagcaggtttctgtacttaagagtcccccagacctcctgtgaggtgaggctctgttgcagtgtcgtaggctgtgtgtgtctgtaaagaaagaatgcacatatgtagacgattaagtgtatattataagctatatgctgaaaatggcttccatagccatgagaacatcttaaaactatgtgtaaatatattaaggaaagtatagctttgtaatttaaattggagcttttagcttgtttcatggaactatacaacttgtgggtaactcacatgaccaaacaaaccaaagtgcctgtgacggggcgggtggcgtctacccaccctcccttctagcagattcttattttgtttgaatttataaacaaggctggtggctgtctacccaccctcccttctagcagattttgattttgtttcaatttataacttacactttgaaccatgggtttacttataatggagtctgtagcttcacagcatatttcatgtaatcataaagaccagtatattccctcctgctgaatgacatgcgactgtaaagcctctttataaaccatttccaatgttagtatataggattatttgggaagcgtatcaatacctttatagacaaatacgaacatgtatgcacacaaaacatttaactatggtatttatggaagacaggtaacaacattaaatctagttgctttcccttagtattagatttgttgagggttttttaaaaatcaggtctgttgaaagtcttctgtcataatctataaagcagcagcactcatggaaattgtagcatgccagtaatttttaccaacatcccatacatctgagttctgcagtccagtgtgtaatccgctccatgtgtattttgcttaatggaatgctttatttaagcacttaggcagagtagacacaattaaaggtacaaagcccagaggaagtggtagagcagcaccgtgcctgccctgaggcagtggagtcagtagcgctgtccccagggccttgagtgcctggaggtgcttggcctccagtagctgcctccattctcttttaaaaaaagggggtgattctgaggcactgaagtgcctcccagatgtggaggagtgaagccaccatcgaggccacactcagcactccaggatcccagcgatgtcagacactcttgagttgtcaaaacgttaattttcagttttaaataatcagtttatctaagaaaagggaattttaacttttctaccttgagccaagccaatgaagggaaaattaattaacttagtaaatttgaagtgcagctctgttagctcgtacatgtgggttcttatcctgatcctgtgccttaaagtaggaaggtgtttccaagttcagattaaaatagaagcagctggccgggtgcggtggctcacgcctgtaatcccagcactttgggaggccgaggcgggcggatgacctgaggtcaggagttcaagaccagcctggccaacatggagaaaccccatctttactaaaaatacaaaaattagccgggcgtggtggtggagcgcacgcctgtagtcccagctactcgggaggctgaggcaggagaattgcttgaacccaggaggcggaggttgcagtgagccaagatcgcaccactgcactccagcctgggcaacagagtgagactccgtctcaaaaaataaataaaatagaagcagccttgtaactgtatttaccatgataatatattctgcacggtaagaattccttttacagacattctttatcaagaggtcggcccttctttttcaggcacataagccaaatgcaggcctgtgtgtagctgtgtgttttttctgtggttgccgcatttattccacctccagctggaccccccactgcaaatagagaacagcggtgggggatgggggttaaaaagtagagaacctcctttctgttcaactaatttcacgtgacagtgcatgtatttattcaataaaacctttatgttagctc

SEQ ID NO: 15450 - DNA, 970 bp, Homo sapiens
gaatcatcagctgtagcgttaacactaaatacaccaaggacaaacatactacaggaatattatgtctgtaatcagtgtggaaaagcctttatttatatttaccactttgctcaacctaaatgaattcaaggtagagagaatccagatgtatttaatgtttatggcacaaacttcagactctaggctgaccatatacaacgtgagagaatgaaactatagatcaaaggaatgtggaggagtcttcatccacagctctgttaaataaatgggagaaatcacatcacgaaaattctgtgcctgtcgtcagtgtgaaaatgcctttgctgataatttatcctctaaacaaatgagtaaaatccacaggcaagcaaccatatgtctgtaattgctgtgcactctcattcagctaagcaccaattttggtgtgtgcaagaaaattcattataaggtaactgataaaaacaggaaatatgtgaaaatattttttattaggtggatgaggcctcttgaacaattccagacattcatagtggagaagttattcaatgaaaactcatgagaaatccttttcttaatacagcagcacttctataatagatcagaattcacatggtgtagaactctcaatgacatgaatggagggtagtcctcagtaaattactcattccttagtcaataccagcatttttccagtgagaaaactatcttgacaggatagtggaaaaaccttcaggcagcttttatgtcaaaaaagtgagacagggatgaaaactctaaaaagccattgatgagatgtatagctgggggacaaaacataaagccatcaagcacgtgcttgagaaaaaaattataattttgaataaagactttctacttaaaatatgtgggttgaaatgtacaattctgaaataacctgggaatattgaatgcagaattatgtaagaagtaataagattaaattagtactgtc

SEQ ID NO: 15451 - DNA, 1069 bp, Homo sapiens
gggctgcccctgccatccctattggagattgtgaatcctgctgtctgtgcagggctcatagtgagtgttctgtgaggtgggtggagactcctcggaagcccctgcttccagaaagcctgggaagaactgcccttctgcaaaggggggactgcatggttgcattttcatcactgaaagtcagaggccaaggaaatcatttctacttctttaaaaactccttctaagcatattaaaatgtgaaattttgcgtactctctctctctatatatatagttcaaaaatactttaggtggtcagctccacattctttgttgacgtgacactaacggccaataatatgcttcttaattatcaaattatagtttcccaattgggaaactaattgggggtgggttacaaaacatttgatccttgtaaatacattgtacagaatatttattttttctcaaaatgcattttaactactacattggctgtgcccaaatgagtcctctttgaatagaaagtgaacccagggcaatgacagccattcttgtcttagggattatggatcggggtatgaagtgtgcacacgcagcccaacaacgggcagtggtctctgtgctcctaggcatccagcacaggttctggcagggcacccctgctggggttgggggctggtctgtgcataatcctggactgtgatgggaacagcccagtgcagtctaaacttcaattgtgttgaaactactttaatagacaaagtaataaatcatgtttatctattgatttaaacttcatcagttttgcatcctactgagaaatgttagtgattttgatacttaaatccttaaaagattgcttcgtttttaaaataacgcatgtccattttagaaaattagaaaatcagtcccaccacccaaagattattgtgcatgctgaaaagagtatgaaaaatcccctcagcaggcataggatagaaacgtattgttgtatatttccatttttgaatagggtcaaggagcccaagcaaatcatttctactttttcctttaagcataataataaaagtatacttttatggcgttat

SEQ ID NO: 15452 - DNA, 7068 bp, Homo sapiens
gggcggaggccggcgccttcccctcgtcgcttccgctttcccggacgcttgtgcagcgcggcgccgccctggtggtttctgtctcctcctcccgctgaacacgtcctcgctcccgcgctccccgcgccccggacacagcgggacgcggccggcggcctcagagtccacggagctcgcggcgaggacgacttctgcttttgttgttgttgttgttgttcacgggtggcctggctcacacttggctctgagggacaggtgtggcgagacctgatttctcctgcgtgttctcagaggacggcgagaaatgcctctggagctggaacccagcttacattttgttatttctatttttataaattgtgtgataattagaggtaagaataacaagtaactataaacgggtgcatcccaccactccctggaggcattagacacccaagtggaaggtgctacaacctgaagcgcaggaaagaaaggcccattcccctcgcacagccgagcttttactccctgagcacgggccgctccgctcccctgctcctgtctgtctcggacagaaaacacgaggctccttgtgtcaagcttcctgtgatggaaagcgacctctccaaccaccacactccccgccgtacagttctccagaatcccaggcgatgacaagtctgaacccacgaaaatacccagcgcagcatctacacattcaaaagataagctgagtgttcccaccaggaagtcacgcgcagagaggagagtcttacggagggctgggagcttaaaaggaaaacaatgtccttacttgtaaacagttattgtattttttatttctttctaacttaaaatacgacacccagtattttctttaagtttcaccatttacgctacatgtgatttttttaatgtatgtatatatatatattctcaaattgctctatcagctgacttttcagggtatccttaaaaaaaaacacacacgaaaaacaaaagtttgcttgtttaaaatgacagttgtgatgtaaaaagtttaagaaatatgaatgtgagtggtaagtatatctcagtttaaatggtaaagaagaaatgtagtttacatttgtatttttccagaattcttttgtcctatgcagtattgctaaagtcgagaatatattccttgcctgtgttagacatgaagggaaaaagaggtcacatattgtgatttccagctgtagcattcaaaaaaaaaattggtgttcatgactctgtggtcggtgccagaggaaaataggaacgactctaattaataggctttctgtgtatataattaaatttagctgctgcaaccattgttctgacacgacttctgtttcacagttcagaccggtcttcaaaggaaaagcctgtccgatttttccatgggttccagtttcagagttctcattattactcaaagtaaaagcggactgcgatttaagatgtttccaccccaatacctggtcttccttcccggcttaaggagtaccatgtacttagccacaggcagaatagctttcgatgaccccatagcactttgtttcttcgccttgatttgcactttacaatgtccccagcccctctgcagcccgtggctggcagggcgttcgatgtgcggttggcccccagcgcgccctccagagctgcggtgtctccctgcctcattccccacatcccactgagcatgggaccattgggagcagagctgatattaaagcatgtttagcttcgaagttttacttttttaaagctgagtagttaagaattccctgtaaaaacaaaaccctgtaaattgagcctcatgtctggtatatattttaccaaacagccttaaaatatatttggaagcaaaaatcagtacgaatgtatctccttgaaaaatgcaaaaaaaaaaaaatccctgaaatattcttctataaatgaatcctatttccccagagtgttcaaggcatttttctacctaaatgaatacctaaatcttgagtagtgtacggtaatgacgcttcttcctatatccactcttattatgttaaaacaaatgtatttgcgagtattggcattttagactttaaaaatgctgtatgatttcagatgaactctgctgtttagaagtaaccacagaaaagcaaagtcagtgtacactctgagtgaaaggaaatgtaatgtggataaaggcccgccacctcctcacattggtctatctactggcagctgatacgtttaactcatttccttgagcttatacaaaacatagaaaagcaaactgttaaagtagtcaataattatttgtctcagatcccagattctatgatccctgcttaaaagaaaatgttcactgcatgtaggttgatttcttatgttttgtagactcattgttatttttcaatccccaaaagtcttggcctaaaccatccctaggggagcagattaacctaccactacattgcacagggttggtgactcgacgtggtgaatgtgcacacgccctgcctggtccgccatgttccaaagaagatgatttaatggtagaacggatacctgctgctagacctgatggaatgttacctgtccgtgttacataatcaagtgcaatatactcagttctcatgcaggtgacattctaccatgaaacgcagaagataagccatgtttctgtattgtacatgtaaagaaaaataaaactgtttatgatacttgtgttagtcactcgagctagcttatttcagccacttctagcagatcatgccatggagctcacgacgtgtgaccatttcgtcatatttaaaatataacttcaagaaaagagtaaacatccattggagaacacggctgaaaattattgtgctgttctaggaacatcatcctagagagtgtgatgttcactataaccccatacctacattccctaatgatacagccaatgacaggtgaaacccagacactctccttagagccgacaggttgatcctgctgtgttgaaggctgtggttaataaaacacaagtatgataaacaggacctagcgtttagcccgggaaaggagaatgctgcttgtcacctagagtgctttccttgtgatgcgtctctcgcatcttcacgtgttgttgtgtttgaagtaaaactagttgttatcgatgacaatttttaccatagttttctcagcaaatttatatcaccatcttagaatggtatataaaaaaattgaactgtttatgataccaaaaaaattacagttttgtttaaaaggaaatgttgatgttttcaactccaaatcaattctaaaaacttcaagcacttaatggaaaggtaaatggtcagataaaaatataattacctgtaaggttatctggttttaaaagaaaaaaaaaaagcctacaaactcagtgacctactacgcagagggaatttttccctgctgcttcttatgaaagtggccaggtttattattagaagacacagtggcagagcacacatgtgcacaggttctgattatttctcttggagcatatgtccttgtcttgatttttgccttttcgatgccatattaagcagccaccgtttccacccctttcattagaaggccctgcatccgtaaattcgcgcatctctgtttttgttagatccttgtaagcatcgctacccgagtccaggatggaatttcacaggaaagtgaagggatactgcaggcctgtgtttgcagcgcctgtggtaactgtggaatgagctctgttagggacagttgtctggtttgtgccaaaccttcgaggggcgagtagggagtgggggaggtgggtccaagtctccctcaggaaggccttttctatcggcagcaattccatcaagccaagcctcctgtggtcctgagcatgaaggggccaggggacctcctgggagatgcagcttttgtttccgctgcgtttcatcagtcagccttgcttggaattctggcaggttccccggggtgtttcagtggacaggaggcccccgtgccgtggctgagtcagcctgggtaccccagtcaccagcagggccacccttgatgacagggccccccacgaacctgggaaaggcagcgggaaatgtgtgagagggtgtgcgctggtacggacataaaagcattgtccaaaacagcgctggttcggggagggcccctggatactgcctttggcccacactgaaaactgaaattgccccacctgtgagcacagaaacacgcttctccaacacgggccgaaataactaaactccacatggttcctgcctgctcatttcccagccctcttcttctcaagcctgaacttcatttttttttttagctgcaaatttaacaggctaatttaaaactgcagttttcagacgacagcccctgggaatgttccagggttctcttgttttgatctgcatgtctgtttacacttctctgtaggcgtgggttgaatacaagtttccaaaactttaaaatagaaaaccacgagcttaagaggtgaaaaagatgacccctttctgattaggatctgtaactctgtgggctgggtcaatgcagtgtgcttcattcagggccatgtggcagccatgacacacaccacataaggtcagctcagagcccatggcttccctgcaggagccccatcttgtcgctattagttgggagttgcaatacattgttggccataaacaaagtgctaaaggaaagggtttgcttctacacattcggctgaatgtcccccagtgcagggtggcagcagaatgttctggaaatgaaggagatattgctaggaatctctaggctgttaggcaacctggcttttattcatcctcagccggcaactcatctcaagtttatgtctcagtttttttcctctagaaaggggattacagttcctgtccctgtcttcctccaggacacactgtgaggattaatgacatattggctctaaagtcctttgagctcctgggaacaggtggtgaaagtgtgcgttactgctaaggattagtccctggcctcttctagaatgccgccctcccagctctgcagggcacgctgccagaatccaggctggtcgtaaacatctcagagataatcagggaccaccagaggcagaggccatgagactgtctttggaaaggtttggaaatgcagaaataactacaagggccattctccttagcttctggctttcaactgtttctagatgcttccaagaacaagaacccagcaccaaccagaattaggccacgttttcaccattacttaagctcaatcgcctcttagatgaaatgaggagataaactaaacattaaaatgatgaaggaaaaaaaattatttggaagccgaaaaccgcatgggtggggaaacatcaggaacgaaatcagacacactgactcaaaccacgcaagggtttgagaagcccacccctctaattccaggcgtttgtaatttttctacttcgcacttgagagaaggcagaggtggtccgtgggaaagctccgggaaacagccgtctttcatccttgccacattgaaaaatgtccacaattttatgaattgctgtcctaaccctggcgtttttatccagtgttaaaataaattatttcaagtttcaatgtaaacacttaacagatgacttctttgcagaagaaatgttcgttacctactatcaaactactttttaacagattttgtatatacacacacaagttgacagaggtttacctccctactttcttagattttatgtaactcttttcattggtgcttattcagaacctgaaagccttgggcatccaagctttcacctactcaatggaggagaggtgataatgaatgaaaagattgacaccaggtttcttggacaaatttaagttcaaatttatctctttcaagtagaccatggtctccctagagagtgtgttggcttgtgtctgccagtacgacaaaggacgctcccagcttgatcgtggtaccttatggaagccactcacgcattctctgatttacccccaaaacactaccatgccccagccccactcatttaaataatacaatcatatcactttcaaagggctcagcacgaatgttcccctcactccactttttaactcgtttgctgaactcgacaaggcttccccttacgagcagtgagacctaggctactttcgaacgcttccttccgaacggtaagccacttcgctctcgggcaggacaggtcctccctgcagagagagacaactcatcccccgaccttccatactacagaccaaaatacccaggtgtggcctaaggactatattaaatgcctcctatagaaattcaaggaatgttagaaccaggaaactagctgtttaaagttttaaagaagtatataaatatatatataaatataaatatgaaatcatatcgagtgtgaggatgagcagagtgccaaatattcagcatctgtacaaagtcattcactggaattcaactattttatgtcattctctttctcacgcttttatggttcttttgataaattctatttagtagcatgcaggatacctaatctgaatgtgcaatatgctattcatcaccacgacaatttcttacttcctcttaataacttaccagaatgttggtcattcctttaaggcagttaaggattgctttatttgtgttcttttttcccatgactttttttcactctcagctgactgtaagaaactgtgcaccgtttccgccataaccgtcctgtgacgatgcctccatttgacttctgtatcgctgatgttcacctcctgtaaatagtttggcaattaaattttttgagaaaagtaatgtttacttttttattggagtgaattctcgtgttattttaatctcagaaaaattatatagaccaaagagttttatccgaaaaaaaattacactcttcctccattatatatttcattgttgaaatatcctcaatttctctatattttaagaagtaatggacatttattaaggttacagatttaatatgtatgcaaaatggtatagattaaatgagtttttaattaataaatcctacagtatttagtt

SEQ ID NO: 15453 - DNA, 6003 bp, Homo sapiens
ctgctccagccggggctccggggcggcagcagagctggcacaccgattctgggaagccccgcgaatgatggcttttgaattaatgaggcagtgaatgttttgtgtttacttctaagggaaatactaactttctttcgcattagtattaattttgaagtagctacaaagtatttttaagaaattataattttatgactgtctggcaggctctgtcagtttagccgcgccggaccgtgtcaagcatctaggagaggagtccatggtgtccaggcatcggggcgtcacacctgttgaggagtggggtggctttgaatgctggaaatggcttcatagtgaagtgcctcccacagggcgggtgggtcagcgttgactctttccagctgcacactcatatgccgtgtgtcttattcagaagtcacattcttttcagttggagagaattgggctaagatagaaaataacatgatttgttccttattaaagcttcccagcgtatgaaattctaagctgggtggggtggctcacacccgacgtaatcccagcacgttgggaggccgaggcaggtggatcacttgaggccaggagttcgagaccagcctggtcaagatggtgaaaccccatctctactaaaattacaaaaattagccgggtgtcgtggcacacacctgtaatcccagctatttgggaggccaaggcaggagaattgcctgaacccgggaggcggaggttgcagtgagctgagatcgcaccactgcactccagcactccagcctgggtgacagagcaagactctctctcaaaaaaaaaaaaaaaaaaaaattctagaccgaagtgtacggcagtgccatctggtggcaagtggtacaaagacaacgctgaggggtagtgactcctgtagcagcagagacgccttggagtttaacccccaccaaccagagcgtgggctggtaaagatgaaatcttgcaagttttttttttttttaaatcatggtacctgttttaaaatgagaagttattattcatactgtgttgctcatttgacaaaataaggtaaggatttcataatcaggttgtctgggtttcagagctgtttttaattgactgagttacctacaggcacccaatctagaccctaattctgtggttggtgttcctctgtagatttcaagacaagtagtgatgtcattttctccctgagctgtagggtggacctggacccctcagagatgctcgactgcagggtcctggggtccctagagtggtcctgcagcagcccctggcaatgagctgcctgatgatgagtcccaaggtacattgttctactgttttatacccaggtagaagttacacagcaatttagcaatgttgttaacagacatacagaattgtgtgtgtgtgtgtgtgtgtgtgtgtgagtgttttgatataaacgtgcaattaaaattcaaagtttattttttatcacaagcacctttgaaatgtacgtggaaaacgtcggctgctcgtgagaatcatgtgtgacttacgttccttatgttttatggaactctcggaacagtgttttgtttttgtttagtttttgttttcgtttttttgagacggagcctggctttggctcccaggctggagtccagtggtgtgatctcggctcactgcaacctccacctcccgggttccagggattctcctgcctcaccctttcaagtagctgggattacaggtacctctaccatgcctggctgattttttgtatttttagtagagacagggtttcaccatgttggccaggctggtctctgactcctgactaaaagtgatctgcccacctcggcctcccaaagttctgggattacgggcgtgagccacttcacccggcccggagcggtgtattttgattgctggtgctttaactatattgaccaaggtgtatagtaacctatttatcacattttacgaagcaattttaatcttaaacacatccagcaaatggtgtccctgctgaaacttttaactggaaacctcacacctggcaggcagcactctctgcagccgtgcccttgtggagtcagcaggagctggtgtttttcagccagacagaggcataataaagtgactgatgtttacagaacccaaatgatgtcttcctctctctcaaaataaactaacctattcatattgctgtgaatgctttatcttggagatagaaaatataatgataaattcatcatgtgttcagaattcgatttggagttggaagtggacagcctaatttttatctcacctccactaggactttgaccttcccaggggtccacactttacctcctgtatcttcatacgcgtgtgtggatgcatagagatggaggtgctgtagagaagcacaggctcacccgctccgtccagtgtcacccacacattggtccggggacccctcagtgcagagcctgaagttgggggtttaggggtggaaaaggcttcgtgaaatgttaatgatgcgtacaccttccagatggcacagcactttcccatggtcctcactggcctcagtctccctgaccggcagtgtgaggggatgtagctatagtggagcatggtacaagcgacattcatgagctctgacttcttggtgccaggttggtgtgagcctgggcccggcccactcagcggcccacattggccagcattcagctgcacgtgtgtgctgcgtgcttcacatcctctattgagagttacagcaagtgttaaacgaggtgagttcacataacaggaattctggaactgcttgaaaactaggacgattgggcaatatcggccttaactccacctgatggcaggtgacccggatagaaaatggccctgcgtttagccaggatgtggctctccagcttggcttcagtgtgatcacttgtcagtgcgctttctctttcgatagtgaaatccttctctatacctatgttttgttttgtttcttaagttgggaaacagaatgggccagggaggttgagtgactgaagaccaagggttggtgcagcctcctcgccgcgctgcgggggctgggccgcacaggcttctgcccttctcggtgtccaggctccttgggtgatgctggagttgtcatggccgcagttcagtgtgagattttttaccaggtattgcgcttaagggacatgattttccattttcttcgcccggacaacttgaatgaaatgggcactgttgattccacttctgtcgaggagcttcggggctcagagaggtgatgacgtgcccaaggtgacgcaactcgtgaacagccgtgcctgccttgggcgcagcctccggcgccagagctgggctcttcaacacggcatttagcgcagaaagtcgtggttcaggcagtatgggccgctgtgacaaaacacctaagactgggtagtttataaagaacagacattcaggccaggcacggtgactcacgcctgtaatcccagcactttgggaggccgaggcgggtggatcatttgaggtcaggagtttgaaaccagcctggccaacatggtgaaaccccatctctactaaaaaaacaaaactagctgggggtggtggtgcatgcctgtggtcccagctacttgggaggctaaggtagaagaattgcttgaacctgggaggcagagattgcagtgagccgagatcacgccattgcactccagcctgggtgacacagtgagactccatctcaaaaaaaaaaaaagaacggacatcatttctcacagttctggaggctggaagtccaagataaaggtgtgggctgattagtttctgctgggaacactgcatcctcacgtggtggaggggatggaaggtcaacaggcctcagctagttctccgctgcctttttatgaggcattaagccatttgcaagagtagggggccccacctcttaataccaccgcaatgacaattacaatgtcatgtgaattctggaggggacacggtcacactgcagcatcagcacccggtgaatgtggttctcttcccatgtccgaattttgtgagctccacacgggcagggttgcatctgttttattctctgattgattctaagccccatgtccctggcacaggatggctgcttggcagtagggagtggatgaaccagtagtacccagggctgccaggcagggccctgcaggggacagacccaagggctgatatggggacacctgctgaggggggaatttaccacggtaagggcagggctgggaggctgggcagccagtttcaccctcgcacaggctgcctggcaagaccagcggctggaggtgatgtcctcagtagagaacggtggccactggaaacgtgtggccagaaggggaaacgctcgggcctctggtgggggccagcctggggtggggtcggccagggtcagctgcctttccttcatgctggggaggagatgttgtgtgcatgtgagaaagcatttgatagcatgccaaaagtttcctccattatgtgcgtgtcaagtgtttgaccaggtcagaactcttgttctatgcgaatgtgctcacgcagacagaagcggaggggctccgtcgctctgccctcacgccgctgaaccgcgagggtctcccgctcctcaggcttgcggctcggccgcgaagtgtgtcaggtgtgcatcctgggtgctcctttgtgctctgtcctacggtgacacaggcggcgtggggttagacaggtaccggtcagactacggtgacacaggcggcgtgcggttagacaggtaccggtcagattacggtggcacaggcggcgtggggttagacaggtaccggtcagattacggtggcacaggcggcgtggggttagacaggtaccggtcagattacggtggcacaggcggcgtggggttagacaggtaccggtcagattacggtggcacaggcggcgtggggttagacaggtaccggtcagattacggtggcacaggcagcgtggggttagacaggtaccggtcagattacggtggcacaggcggcgtggggttagacaggtaccggtcagattacggtggcacaggcggcgtggggttagacaggtaccggtcagattacggtgacacaggcggcgtggggttagacaggtaccggtcagattacggtggcacaggctgcgtggggttagacaggtaccggtcagattacggtggcacaggcggcgtggggttagacaggtactggtcagatgcacgggctccctaaacccctgctgtggcttcggcagtaaagacaggacgcacccatgtcacaagaggagcacaggcaggggtgttggtgttggggcagccctcagggtctccagaccccagccccactcacacagcagcctaggaaggaagggcagagtcccaggtgtcagctggtgggtctcccaggagctgcccctccctggaagtcacaggacaggaatgacagatcagggaactgcaggaagctgccacctctggggtcagaatatgcccagcctgcgggggctctctatcggggtcttcgagagccagacagcctgccttgtgctgcatacctggctttgctctgtgcagaacccagcacacgtgattttgtgtgacatgccagcagcctggctcccaggacaggaggcctgccctgggggaggggctgcaggaggagggggggcaggcacccatgagtctgtccagccttgtcacagatgcatcgcccaccctgcggtcctgatttcagctcacctcagagtaaatcagaataaactgcacccagactttcacgaatgcatgttgacgctttcagttcacccctttctttgctaactttcttcctattttcttctaatgcgagagcttattaattccatatttatcattttgaataacttttctcctttttagtaacaaaatgtacttcactcttagtaaaatgtatttactattttagtaacaaaaatatacttgcctaatcatgtttaaaatatagtgatgtgaaaaattca

SEQ ID NO: 15454 - DNA, 1377 bp, Homo sapiens
gcaggacggccgccttctgctgtcagaatttgcaatcaagggtgacttctcagctaatcctacagcctgagtggttaagctgtgtctacactggttgggaataaattaaaaacagtatttgggggagaaacgtgcaatagcgtaatggtggtgtccctgccaattccttccttctcttctgtacagcagaagtaattacaagcacttctcacgaaggcagaagactgatgcaattttcgagtaattgagtgcagttctgggaaaataccacattctttttgactgctgtagtccatatgtgaatactaaatgttaaacttcatcagcgtcagacctattgtatcatattagagaatttgcagactaagaatttatgagaaaatatatgtattcagtagtgcaggcatttattaacaattcttaaaagttttacctgattcagattcacgacttttatttatattctatatttttgaatttcagagtaaaatttgttaacaattttaaaagccaggtaacacctaccagtccagttagcatgatttgctttcagaagtgagctgggttttccaaagtggtataatgtgtgtactgtatattttaacaaagtaatatttttgtattgcatttttctattaaaaaattaacagttaatgtttcagtcaatgtattatctgtagcatttcacaaataatgtttgctttgaaccaaaatgctcagtgcctatcaacatttggactcaagcatcaacaccaaattattcctcccttctcgtataaatagagtgactatccacaggagaaaagtgtgtgctttagtattagaggagataggcagagaagtcttgcttagttccttcgtgcagcttcttgcccctgttgacgtggaatgctgtgtctgctttagcacgcacgctccgaatgactcctggtgctaggccatgctggctgctgtcactgagcgggactcaggccaagaggcgtgacctcgggccagcctgtctgttgtgcagacgcctcctctgcagaacgcatcagtttctattctgcagttgcagagccagccccgcgtgagaacgtgcataatgagtgcacaccatcatgtcaaggtgcatacttagtgagcgccatcctgctgaacgtgtatttcagtgtttcacttactggacggataacaagaaaaaaatcctaacacaggcaggcaccagaaataaatgtctcagcactttacagatgactaaaaatgttaattttatgacttagccaaatatgttctaggttgcatatatcccccatgtgaaagtgatttcttcccaagcttctcaaactgttagctgctgtctgacttcatcaataaagtatttttattttaaaatgc

SEQ ID NO: 15455 - DNA, 3872 bp, Homo sapiens
gccggcggggtcggcgggcgtctccctcggcaggggtttgcggggcccaggtccctttgggcccgcggaggaggacgtggtggggagtcggggccgctggccacgctggtggtttggacacttcgaaggagccccgaggacgctctcagggccgctttcgctttgctttccttttgcttgtctttgcttctgggggtggatgccttgagacccaggaggtgtgcggatgggtcccttgacagacaggacacagagaaggctgtgggatccaaagggtcagcctcagggtacagtgggggttcctgaggcagcctgcagccggccccggggtgtcccgaaccccgcagagcaccgaggctgtgcgcaggagcctgggaccctcaagtaggtcgccgcgaactatcgggggaagcacgcagagagggtcacgccttttatttttggcttgagatttaaaattataactgataagtaaagctctttctgatttagttgaaaatttcgtaccatgtgctcgctttggttggctcaactccaaaaagagtaatttaataagcattaaaggtaaaatctttgattaccagtaaggtttcttgttcaatatgcattggaagtatttccttccccacaccattgctactcaaactcacatgcctagagcagctccgtctcactgttggaccgagggggctttcatattttcagttgaaaggatgttaactgatgtagcgatgatttaccattatttaaattttaagtcttcagtggctaaatgtgaccaaacagcacatcataagtaggaaaaacttaccagggtgcttgtctatctaaaaagcaatctttgatagtccactctgtatgcccagccgctttcataatctggaacgagataaaatattcctaaaaagcggggaaaatcattttgctttgacagttctataaaaaaaagtgtaggcacattttaaacccactgtatatgatgttttcaatgtggatcgtgtagttctgatgagggagattaatttttacaatcagtattctaagtgtggccgagtgacagtgggcatagatttataacaaggaagtgacgtgcttatcaccatagatttgcaagtaaactgcatgtatttaattgtattgaattgagttccaaaataccctaatagaattaacacgaggctcactgcattgacagggtatgaggattaaaaacaaatcagttgggtcgtttctcatttaacattttacttttcaagtgtgtatacagaggacttactattatgactttgaggatgagatccatgctcacaaatagaggcgaacatttgaactccgaatccaacccattttcttactgtaagaggaaaagttactggaacgtaactagttgaaatcctgcctactttaatattatttgtttgttaatccagtaatgggaactgccatctctgtagaaatcagtgggtaattgaaaaataggttatgctttttaaagagtctgtggttatgagaggtctcagttaagtgtgtttagaagtgatcagcttgaaccttatgcatgactcgggggctggaatttatgatctgggttacggtatgttctggggacgtgtctgcttgcccatggttactcatgaactgaggggatagcttggcaacttggttaatcatcttgggaaagaaaaacagacttcatatcgcctgacttgattggccttttataggagtatactggagaaatggttgtagaaacagtatttacagcaaaaggaaacaaataatgttcattttaagcaatgtaccattcacactgtcctgccttttcctctagaattttattaatggtagaaatttttatatgaaatgggaccaggaccaggctaatattttcagtccttaaatatcaaactcatatgctgttatcactgtgattttacttgtgaaatcattcctgtaatgtttattgtttgaaaatgaaatattgaaattaggcttccagagtaacactgtccccggaaaaggatatgagaagtggtggatgttggatgggggtggttgcacagtcctgtgcggttcccatggctttccagcgtttcatttagtgaaggaatgctcacactagatgtagcacagcttcctgtggggcccggcagcaaagccccaggtgctccctgtcacctcacaacaaaatgcactaagaaacgtaaagaataagaggaattaatacccaccattaaaggatgtccggccaacctattgtggaaatttatagaatagtatacaccacagttctgaatagtgatatcacataaaaatacatactagaggacctgccacgccatgagcagtgtttttgctttttgggggccagtccctggggtgtggagccgctagggtttgcacccatgaaacagagaaaagccacaccctccaaggtgtggctttcattttgggactgctgcagggagggcagaggcattgctgagactgcctggcaacggctgatgccccaggtaggaccttttccaattcaaagtggtgttctaagtctgcgtccaacactgtgtaggaaaaaggttggtgcaaaaatattcctggtcatccacccattaaaatagttagatgaggctattgccttgatgacagctgtccacactcctcatgaaattaacccgtatgccggggcatttccaaatgtctgactcgtgaaattaacccatacgcaggggcctttccaaatgtctgaaaaggcagtggtgtcttttggggaaaatgttatgcatggaagcctgaccttttgcttagttgacagcaatcccttctgtattgccaatcaaggttcatttgagatgcagaggaatgagcttgagccttcctccttttccttccggttttattcttcctcttgggaacatccctccactccgcactgcttcctgcagctttgtagagctggatttggaacttcgggatttggtttctgagtctgtggaggcaccgacttctgctgtaagaaaatgaatgttgtggaaattctttggctacttaactaaaactcgtgactgtataagtttggctacaaataagtaagaaattaatcatctgctctgtttctgctaatttctggtgtcacttcagtaattctggtagcagccgttgaatctgtcagtctcttaggtaacttcctgtaaacgatttggaaataggatgttttcaacgttcttttgtcttttgctgaagtcaggatagattcaagacataatctcttgtaagatctaaatagagcaaatgtaaacaaaagtgcatttttgtattcttgttaattttagatgctttcctagcttacaaaaagttctgtttttgggttaaaaatcaatcaactttctgatatttccccttctgcaatgttattgttcataagaaaacacgagctgaaaatggaaatctgcagttgtttcagttgtcttgaatttctttcagtggccacatcatttccacgttttccacatccgggaggaagcctggactgtgcagccttcgggcacccggcacagacactgtgctggcaggagcttcagacacgccaagtggatggatttggattgaacgcatatgaaacaggagacgggttctcatgtgagatcaaagctcctccaaagcctgttcaagctctaagcgattctcaaatgttaccatttattaaaggtaaactacacctgttgaaggccaagttcagggcagctgttgtgatctgtgtagttaatgtatttattaatgcttgacttttaaaatcctgggcataaatagtgcagagcctcgtatgtttgtcagttcatgccgagatgaaataaatcacgcagaaagtgccagtc

SEQ ID NO: 15456 - DNA, 475 bp, Homo sapiens
aggcgttttcctagcctggagatgggaaaatatgcttggcagagacaggaatgctgtgtgcttgttccaaatgagcagctggcatccgagtggtgtcctgtgtgggctgatagttgatcacacattgtgcttttgatttttgcatttggtgatgaatattttatacccgtctaagggagaaagctaatgttttccacaagactgaacaacgtgtatttacacgagggtagacggcagatgcctgacagagagtgggttggcagacaacacactagcattttcacgggtgtgggcacatgggtgtggcacctggacgtgtgcagcatgtggcggtctgtgtgaagccaccgtgcttctctttggggggccgcgagatctagcatctctgaaatcctggctgtcgaggctttgaagcatgtgttacctggttaagcttgttttctcttgctttaggcaaataaaagtttaaaaatca

SEQ ID NO: 15457 - DNA, 5456 bp, Homo sapiens
cagtgacctcactggcctgtggtgactgcacacagctcgcaaaactgtctttggatgttcaaatgagaaacaaaactgtgaagagaaggaactggcgtatacaagatgacttctgatatcatgtttgccatgtgttgtggttcttaagaactcataggtgactttctgatgactgaatgtctgtttcagagacgcttcgggcctttttatttttattttattttttattttttgagacggagtcctgccctgtttcccaggctggagtgcaatggcacaatctcggctcactgcaacctccacctcccaggttcaagcgattctgctgcctcagcctcctgagtagctgggattacagatgtgtgccaccatgcctggctaatttttgtagttttagtagagacagggtttcgccatgttggccaggctggtctcaaacgcctgagctcaggtgatctgtcaggcctcttctatagaattccagtctttgtgtcttagtcatgatcataattgaaaggtcacagaacctttgtcattagagcacagtactgccaaataaagaatggaaattcaatgacattgttttattactgagaacaactagagaactctgcaagtttcttggcttagactcgatctttattaatacattatctattaggtaggaaagacatttgtcagctattaaggtgacttttatctagcggagattcctctcttaaagtaatgaaaggagataggtatggggggtgttatacaggataattggtgacatctgagtgtcttacttctgcaagcctgctttatggtgagcaaagcatcaccagcaagtgatcacaatgtccactggccgctttttgcctgccgtcctcgagatgaaattggcagttggggctgattcacagaaacaccgatttgtggctgagcacggtggctcacacctgtcatcccagccctttgggaggctgaggtggacagatcacttgaggtcaggagttcgagaccagcctgaccaacgcagcaaaacccatctctactaaaaatacaaaaatcagctgggtgtggtggcacacacctgtggtcccagctcctcaggagtctgaggcagaagaatcgcttgaacccaagaggcagaggttgcagtgagccaaggttgcagtgaatcaagattgctccactgcactccagcctgggcaacagagtaactctccttctcaaataaataaataaataaataagaaacactgatgtgtctgtcaccttctaaagaaatgaaatgctaggaagtcctagccagagtgatcaggcaagaataagccataaaaggcatccaaataggaaaagaagtcaaactgtctctcttcactgccgatatgattctatacctagaaaaccctaaagactctgccaaaaggctcctggaaccgataaatgacttaagtaaagtttcaggatagtaaatccatgtacaaaaatcagcatttccaaacacagtaacattcaagctgagcaccaaatcaagaacgcaatcccatttccaatagccacggaatgaaatacctaggaacacgtataaccaaggaggcaaaggatctctacaaggagaaccataaacgagatgctgagtcccagcgaggtcggaggtgccactgagccctcatcgtggtgccgttcccgctctgggttatttatctgttgctcatctcagctgttgttcctacctcaaatttcaagtccctcaacaaatataacagaaccacttctagaatgaacctttgagaagggaggtagcagtgcattgtataggaattggcattctatagaaaaccacagaaactggaaataatgaagggttgtctcttggttttaaaataatgtatacacctaaatcatccccttatgatactcatcctctaacagcaattgaacttcaatacaatgagtcattcctgagttcactcgcttcacattacatatgtttctctataaccacaagcatcctggcttggtagtgctcccacagcaccaaaaatccctgaggaggctgacaaacattgtgctgactcatgctggagacaagccacagagaacttccatcccccaccacatcagccacggagccagcccagcctctgcccacccaggcctcagtccccagtgttaagttctgatccctgatgctggcctgccagtggccagtcaagattctctttctgaaagctagtattttatgaggactgactgttgctagacattacactaagcacattatatgttgtacttcattttaccctttcaacaatcctattagtagcttactgtgggtctgcaaagccttactcaaaacatatagggctagaggttctcaggattctgaattttaaaaaaaatttgtaaaggcttatggctctcaccactgttattcaacgttgcattaaagtttctacccagagaaggcaataaaaggaaattaaagctatacagattggaagtgaagaaataaaagtctttattctcaagaatacaagacactatgtatagaaattgtaaggaatgcaaaaaaaaaaaaaaaaaaaagccctacaagaacttataacaagtttagcaagattgcaatatacaatcttgcaatcttcctaaagattatatacaaacctaacagaattgtatttatatatactgtcaataagcaattcaaaatgaaattaagaccacgattccatttaaaattgcatctaaaaataaacaaaataggaatagacttggcaacagttgtaacatctgtatactgaaacctgtaaaacattgctgaaagaagttaaagacttctttaaatagagacatatacaaagttcatagattagaagatgcaatattgttaagatgatagtcctcaaattgacgtatagattcaatgcaatccattaaaatctcagatggctttttatagaatttgaaaagctgatgctaaatcttttatgaaaatgcaaagaacctctagtagacaaaacaatttttttaagagcaaagttggaggatttatagaacctgattccaaaactgtcagtaaaactacaataattacaaagtatcagccaggtgccgtggctcacatctgtaataccagctctctgggaggctgaggcgggtggatcacttgaagtcgggagtttaagaccagcctggccaacttggtgaaaccttgtctctactagaaatacaaaaaattagccaggcatgatggcacacacctgtaatctcagttactcaggaggctgaagcagaatagcttgaacccaagagagtccagctcaaaaacaacaacaagaacaaaagtatcacattggcataagaatagacatgtaaatcaaataacaaaatagagaattcaggtataaatcttcatatttatggctgattgactttgaacaaaggtgacgaggcaagtcagtatagcagcatattcttttcaacaaatggtgctggcagaagaaaaaaaaagtacttggatccttacctcacaccatgcacaaaaattagctcaacgtggactatatcagggtttctcaacatcagcagtgttggcgtttgctggggtggataattctttcctgtggagagctgtcctgtgcactgtagaatgtttagctgcatcctggcctctgcctattagatgccagtggcatccctcccctgacacacacctagttttgacaatctctgtctccagatattcccaaatgtgccctggagagcaaaactgtttccagttgagaaccattgacctaatgtaaaaaataaaatgtacagaagaaagcatagcaggaaatcattctgacctcaggttaggcaaagctttcttagatatgacactaaaggcataattcattaaaaaaataagttgggctttgtcaaaattttaagttttgctcttctgaagaaaccattaaaaaaaaatgaaaagacaagccacagactatgaaaaaatacttgcaaatcatatatctgataaaggacttgtacccagaccatgtaaagaactcataactcattaataaaaggataaagaaaaagctgaagacaattcatgcaagaagatatacaaatattaagcacattaaaatgctcaatattattagtcactagggaaatacaaattaaaggcccaatgaaatacctattacacacccattagaatgactgtaaacaacaagactgataattccaacatctgaccaagatatggagaaactagaactctcctacattgctggcatgagtgcaaaatgatacagccactttgaaacaccatttggcagttgcttaaaaaattgaacattcaactaccatatgacccagcaatttcactctcaggtatataaccaaaatacatgaaaacatggatctgcacaaggtcttgtatacaaatgttcatagcaacattattcataataaccaaaaattagcccatcaactgaaaagtagataaacaaaatgtatatccacaccatggaacgctactcagcaaacttctaaaaagcaacaaactactaaacacgtgcaacaacatgaatgagcctcagaaacataagtgaaagaggtcagacacaaaagactacaaattgtaagattccatttagataccatttctacaaaccgcaaaactgtagaggcacgaaacagattcatggtctgctgcagctggggatgggagtgggaacagagagcaaacattttgggatgatggaaacattctaaaactggattgtgattttggttacacaactgtatacatttactaaaatcaatgaacagaacacttttaatgggtaagccttaaggcatgtgaattatacaccaataaagctattttttttaaaaaaaagagagagagagaacgagagctacatggcagccccagggcaatagctctcagatctcccttagagaaagaactttctcttccacagcaatgagtgcaggtagctaacactgaccaacctgcatctggtagttcatttaaggtcggccttggctttcaagttaaggccatggtctttctctgcagtccccagccaatacgtgggcacagaaaggcacagggcatggctgattcagcccaacatgaggctccacaccctagaactccctgtggagttggccgatactgcctgtgacctgcaatgtggtctaagctgtcagacctccacagtggccagaaggttttccatacctgagcctgcttctacccacttttatttttcccaggagtcacgcttagtcatctcttgctctttgaactccatgtctgtatcagctacccagaggacccatcagacagaaagtaatatgcagataacagcccaggggaatctgggcagcactgtgaaaccaacatttcttcagtgaaacctagaacaaaagtggaataaataaaaactaactgtctcatttca

SEQ ID NO: 15458 - DNA, 4110 bp, Homo sapiens
acaagtagctgtctccagacagtgggatgtgctacattgtctatttttggcggctgcacatgacatcaaattgtttcctgaatttattaaggagtgtaaataaagccttgttgattgaagattggataatagaatttgtgacgaaagctgatatgcaatggtcttgggcaaacatacctggttgtacaactttagcatcggggctgctggaagggtaaaagctaaatggagtttctcctgctctgtccatttcctatgaactaatgacaacttgagaaggctgggaggattgtgtattttgcaagtcagatggctgcatttttgagcattaatttgcagcgtatttcactttttctgttattttcaatttattacaacttgacagctccaagctcttattactaaagtatttagtatcttgcagctagttaatatttcatcttttgcttatttctacaagtcagtgaaataaattgtatttaggaagtgtcaggatgttcaaaggaaagggtaaaaagtgttcatggggaaaaagctctgtttagcacatgattttattgtattgcgttattagctgattttactcattttatatttgcaaaataaatttctaatatttattgaaattgcttaatttgcacaccctgtacacacagaaaatggtataaaatatgagaacgaagtttaaaattgtgactctgattcattatagcagaactttaaatttcccagctttttgaagatttaagctacactattagtacttccctttgtctgtgccataagtgcttgaaaacgttaaggttttctgttttgttttgtttttttaatatcaaaagagtcggtgtgaaccttggttggaccccaagttcacaagatttttaaggtgatgagagcctgcagacattctgcctagatttactagcgtgtgccttttgcctgcttctctttgatttcacagaatattcattcagaagtcgcgtttctgtagtgtggtggattcccactgggctctggtccttcccttggatcccgtcagtggtgctgctcagcggcttgcacgcagacttgctaggaagaaatgcagagccagcctgtgctgcccactttcagagttgaactctttaagcccttgtgagtgggcttcaccagctactgcagaggcattttgcatttgtctgtgtcaagaagttcaccttctcaagccagtgaaatacagacttaatttgtcatgactgaacgaatttgtttatttcccattaggtttagtggagctacacattaatatgtatcgccttagagcaagagctgtgttccaggaaccagatcacgatttttagccatggaacaatatatcccatgggagaagacctttcagtgtgaactgttctatttttgtgttataatttaaacttcgatttcctcatagtcctttaagttgacatttctgcttactgctactggatttttgctgcagaaatatatcagtggcccacattaaacataccagttggatcatgataagcaaaatgaaagaaataatgattaagggaaaattaagtgactgtgttacactgcttctcccatgccagagaataaactctttcaagcatcatctttgaagagtcgtgtggtgtgaattggtttgtgtacattagaatgtatgcacacatccatggacactcaggatatagttggcctaataatcggggcatgggtaaaacttatgaaaatttcctcatgctgaattgtaattttctcttacctgtaaagtaaaatttagatcaattccatgtctttgttaagtacagggatttaatatattttgaatataatgggtatgttctaaatttgaactttgagaggcaatactgttggaattatgtggattctaactcattttaacaaggtagcctgacctgcataagatcacttgaatgttaggtttcatagaactatactaatcttctcacaaaaggtctataaaatacagtcgttgaaaaaaattttgtatcaaaatgtttggaaaattagaagcttctccttaacctgtattgatactgacttgaattattttctaaaattaagagccgtatacctacctgtaagtcttttcacatatcatttaaacttttgtttgtattattactgatttacagcttagttattaatttttctttataagaatgccgtcgatgtgcatgcttttatgtttttcagaaaagggtgtgtttggatgaaagtaaaaaaaaaaataaaatctttcactgtctctaatggctgtgctgtttaacattttttgaccctaaaattcaccaacagtctcccagtacataaaataggcttaatgactggccctgcattcttcacaatatttttccctaagctttgagcaaagttttaaaaaaatacactaaaataatcaaaactgttaagcagtatattagtttggttatataaattcatctgcaatttataagatgcatggccgatgttaatttgcttggcaattctgtaatcattaagtgatctcagtgaaacatgtcaaatgccttaaattaactaagttggtgaataaaagtgccgatctggctaactcttacaccatacatactgatagtttttcatatgtttcatttccatgtgatttttaaaatttagagtggcaacaattttgcttaatatgggttacataagctttattttttcctttgttcataattatattctttgaataggtctgtgtcaatcaagtgatctaactagactgatcatagatagaaggaaataaggccaagttcaagaccagcctgggcaacatatcgagaacctgtctacaaaaaaattaaaaaaaattagccaggcatggtggcgtacactgagtagtttgtcccagctactcgggagggtgaggtgggaggatcgcttcagcccaggaggttgagattgcagtgagccatggacataccactgcactacagcctaggtaacagcacgagaccccaactcttagaaaatgaaaaggaaatatagaaatataaaatttgcttattatagacacacagtaactcccagatatgtaccacaaaaaatgtgaaaagagagagaaatgtctaccaaagcagtattttgtgtgtataattgcaagcgcatagtaaaataattttaaccttaatttgtttttagtagtgtttagattgaagattgagtgaaatattttcttggcagatattccgtatctggtggaaagctacaatgcaatgtcgttgtagttttgcatggcttgctttataaacaagattttttctccctccttttgggccagttttcattacgagtaactcacactttttgattaaagaacttgaaattacgttatcacttagtataattgacattatatagagactatgtaacatgcaatcattagaatcaaaattagtactttggtcaaaatatttacaacattcacatacttgtcaaatattcatgtaattaactgaatttaaaaccttcaactattatgaagtgctcgtctgtacaatcgctaatttactcagtttagagtagctacaactcttcgatactatcatcaatatttgacatcttttccaatttgtgtatgaaaagtaaatctattcctgtagcaactggggagtcatatatgaggtcaaagacatataccttgttattataatatgtatactataataatagctggttatcctgagcaggggaaaaggttatttttaggaaaaccacttcaaatagaaagctgaagtacttctaatatactgagggaagtataatatgtggaacaaactctcaacaaaatgtttattgatgttgatgaaacagatcagtttttccatccggattattattggttcatgattttatatgtgaatatgtaagatatgttctgcaattttataaatgttcatgtctttttttaaaaaaggtgctattgaaattctgtgtctccagcaggcaagaatacttgactaactctttttgtctctttatggtattttcagaataaagtctgacttgtgtttttgagattattggtgcctcattaattcagcaataaaggaaaatatgcatctc

SEQ ID NO: 15459 - DNA, 88 bp, Homo sapiens
aaactaagcaccagctgcaagaaacaaagaggtgaagattctctggctgcgatatcagtgggataaatctctctggaccatctctctt

SEQ ID NO: 15460 - DNA, 100 bp, Homo sapiens
tgcagaagatttaggtttccagagaagcatacataacctagcttctttttactcttgcctctgctgtaggcagacactttaataaaaataaatgactgtc

SEQ ID NO: 15461 - DNA, 47 bp, Homo sapiens
aacgcagtagtgctggtccctagagtcgctggaagtaggacctcagt

SEQ ID NO: 15462 - DNA, 20 bp, Homo sapiens
aactgatgttgctgatatag

SEQ ID NO: 15463 - DNA, 90 bp, Homo sapiens
aaaccctgaaacatgacgagagtgttgtaaagtgtggaaatgccttcttaaagtttataaaagtaaaatcaaattacatttttttttcaa

SEQ ID NO: 15464 - DNA, 104 bp, Homo sapiens
ggaggccaagaagctgctgtggctgatgcggattcagaaagggctccctcatcagagacgtgcgacatgtaaaccaaattaaactatggtgtccaaagatacgc

SEQ ID NO: 15465 - DNA, 830 bp, Homo sapiens
acgcttgtagagcctggggggcgccgggtggcaaaggactcacccccgcacaggcccgcctggcttcgagttggaacccggacacttgcccctcactggtgtggatggaaatctgcctttcgtgggaccaaacaggactccttggacgattagttcaggttgggtttggttttcttcttaaagagtttagttttcctctccagagggatcagggtcctcttagggagtgacgggcttttcatatatttttgctgaagaatatatggaaagggtggcatttgcgtcacgtggaccagggacagtgctgaaatcagcagtgctcagaaacaatttaacatgttgaaacgacaatattctaaaatactgatgaatcttgcatcaatataattattgggttttttttctttttcctgctgtataactccttgccatgcaaactctcaagaggccaatatattcctggccatgtttgaatgagcctcttaaaataaacttagagccatgcaaatgccagcagcttaatggatttcatggaatgaaataccgtgattaactcatagctacatatcattgcataaatgggatttatcttttttctcacttatttttgcggtgaaagtcgagggcatgcaagagtttctcttccagaagccaagaggagaacaaaggtcctaatgctgtactattccaccctttggacgcctcatccaggacgcagaggactctaggtttaacattttgtacaaaatggaacctgttaatcatattaaagcacatatgtatatatcttttatttataaataaaattttaaaacaatagtttcagtata

SEQ ID NO: 15466 - DNA, 944 bp, Homo sapiens
caacagttttgtgtgtggatcattccaattgaagttgctatgaagaggtagcagatgaatctcattgaattagtcctgtagtgcaaactttaagcaccttaaaacatttaaaatcttattacaggtgatagagatagatacatgtatgtgaacagattttgtaggaaggcatactgaattctttgtcaccagcacttttgatatgaacagtattcgttacatagtaacagttcctgcttacaactgaattttataatttaaggtgttcaagatatattctttttggttttaaaatgcaaaatcttattggctgttctgttgaatgtcatatcttactggtgtttaaatatgtaatgtgtttctttattaacatcactagatgaaaccatatcttaaaatgcagaaatgattggaaggtagatcttatctagcctttggatttcaagaatatcatagtccttttgattttcaaagtttatatgtgaagttcaccatgtatgtggtgaatttcgtaaggtacttggtatacatatctgcctatgtttcttttcaactcataattggaagaattatgatggattatagggtttggttaaaaatccagttactgaaggaattaatgaaaacgtagaagaaagtactaaaaggaatatcataagggctgtagctcaaacttcataatacataaatcactggggtctttttggatttggttgtttgattcgccttccttttttgacatatgtatgccttaattcttaaatctgagggaccatgctttgaaatagactgaaaattaagggtcaccacctaattttactttgtattcagtatcgtaagtgaggttaataaagtcaatactttctaccatatattacgtttttgttattaaaaaacttcattggccactagtgaagttagtcaataaaagacttgtttttctg

SEQ ID NO: 15467 - DNA, 5609 bp, Homo sapiens
tgaatgcctgctggtgaaggccagatcagatttcaacctgggactggattacagaggattgtttctaataacaacatcaatattctagaagtccctgacagcctagaaataagctgtttgtcttctataaagcattgctatagtgatgaatagtatgagtaactgatacatactcaactgctactgttccctttgaggaaatgtttacaggggcggccttttaacatatctcaggctcattttcattgcaattatccatttctaaaacaagattgcttcgatctagacttggaaatggaaaataagaaaaccaatgctttttcaaatgttcacaattcacacactacatttgttttgttatgcatgacgtgtctataacaaatatacacatacgacaggcaacaagcttgtttttgatttgccagacatgcatcattggctattgtttgtttgttttttgtttttttgtgttttttgggttactttgaaaatgagccagagccttcttgaggatattttgcacaaagtcacgctgacaaaatcattagcagtgcaacccaagcttctggctgagcaagattcagtttccactttttaaaatttttttattttgctctgtagctgcacttctcgttatcataaattgagatgaaaaggaaaaaacatcaagttttagtacctttttatgaattggcctatcttacaagagaagggcacaaacaccaacctgacttaggaacgcctaaattcagagaagtcaaagccggtgaaggccacttgctctttccaacacaagcctgccacagaggtcttcgggacagtactggagatgcaggttgacacgggcttgagttccaaggtgaaaaaactggggaggctgtgaaggaagagctgcattaaggagggtgaggagcgtgtggttctgtatcatggcagccccaatggatccaggggatgcctccaaaaaatacatgcttcccttcccttaatctgtactgttgggattgttacccctccaaattagctgccttatttcaaaagtcagtgaaattactgcacttgatgagggtcacaaaaataccacttgattgtttctttagttgagaatgctgggattcagactcgaatagtggatagatacacacaaatgcaaggacttttttgtttactccagatttggggtttattttgagtggcatgcttcaaatagttcataaagatccttgcattaaatttctgaaccatttcttcaaacttcttagtgtgtttagacaaggagaacaaaaattgaaaccaaagccctttctgttattttttcaatgaaggtgagaaagaaataccatacaattttctttgtgaaattactgtttattttcatcaacatttaccaagtgccattgacatttataaaaaaaaatgatcctttatagttcttacacttgcccttttcaccttaactgaatatgaattgagtgcactaacttatttacttgatatactgtgcatctactctgctttgaagcgaaagaaatataaacacgaggaggaataggaaagacagtgtgacacaaacttgccattgcaattcaaagccctgaaaacgatgggtttaatgcaaggtgattaagctgtgacctcctttaatctcctgaagcaaaataaaatggttacatgcaaaacttctagaaatagactcttaaaatatatacattttgctttgattttggcttcaacccagtgctggaactaggcatccagactagtttgaatgtttgtagctgaatttttatgggtcctcaaaattaaatcgagaattagcctcagttgttgcttcttttgaagtttcagtgacccaagctgggtgtttgtgtcttggctacttgtttaatagcactagaattccaggtgaagctttgagagttgatattcattaagagggctttttttccccttctttccttctcttttgctgtaacaaagggttgaagaaattgccatctgtgtagttttcagtagctgtcaagtgtgtcttacttaccttcccccagacgtagtttaaaatggtaaacacagctgtgatttttagttaagtaaaagagttaatatgatatagatatggaaagctttatggcttcattaaaaagataaaccactacctaactgtggttgtatgttgtttccatcatactaactagatgaatggatgcgccagttttcatcttggtccttacacttgagaagttaaactgtggttcagtatttaaactgccagtgttatacgtctcatgctctgtgtgccaggtgaaggtactgtgtaaggaagacatttgcggtgcttcttgtcctataatgattcaagtatatagtagttcttgaaagagtgtgcatatattactcatctgcttaagagagtgggttaatggatatatcagaggagccaaatacatttttttcagaacttgaaaaccaaaggtcatcatgagtgcactcaaaagttaggacaagtttattacatttgggattttcatctgtagccgtatgaagaaccctttccaatataaaagcatggcattaaattaggctgaagtcttttattttttgtatatgtactatatagaaatactagcaagttaggatcatccaatatggcctaccccgaaatggcccctctgtttccctaaccacatggaagaaagaatctgaacgtctccaccggctctacccgagttccaaaactaaagggcttctccagacctgatggttccagtttacctgctgttggcctgctggatacttgactcaggcataaattaagtgccctggtcccgaactttctccctgtatttgacctccttccctctttcctaaattactagtctggaattaaaattagctccagcaatgacctttgactccattcattttctcctcatcttgggtcttaaaaaaggagaccagatacctcctagcttttgtatcacaaccaggaatgggtattaggcctcatgcgctttgctcagaacactgccgctttgttaacaaatgacagcatggaacccagagttttgattcgatgcaaaataacagcagtgcaaccaggattcttgttttccttttccttcttggagtttggaatttctagcttttcaagcagcataagtagaatcaacattaggatgttttcatgaaatagcatccttatacttctttgagcttgatgttagtggctagactgatttccctttgctctcaaaatacaaagtgcattgaagtatacagagaaatgcctgaatatggcaagcaaataatgtagattaacattctattattgtatccgttttacaaaaaataaaattttgatatatgccggagaacggcattagaatgcaataagttgtctaggtttttctgtttcagtgtctctcccaatggcacgaagggttattgggcattgtccccacccccgcctttttaacatgtgcactatctggattcctgtaaatggccttgcaaacagaagtggtgtgtattttcaagcacctttcccccattgtatccgaatccctcttgtgtgatatctgtgacaaatagccttcttcttgtgttttctgttggactaattgtctcacgtaaagctatagaccttactaatttggcaggtattcaaaactgccattaagataggatttcatgtcagatacgtatttaaagagtaaagtcaaatttgtttaatgtcagatcagtgacagaagtgaaaagaaagtaattgtgaaagtgatgtttgagctattgtacacatctagcatatggaaagcaaatgcactcgaaaactactattctagaacatgaggcttcttcagcaacttgtgcactctgccattaataaattaaatttttcccctctagaaagccttaactatggcggaaactttttaaccttttatattttaataaataaaacattgtagtcccatttcttagtgtttgaaaggtgtgtcagtgagtcggccatgtctccatgtgtttcagacctgttcatcttattttatgatggtatatttcataagtaatattcccttacatgcaatggagctgattaaaattaatccatttcaatttctccatattggaacttcctcagctaccagatttctggtttggagaagtgctggaaagatttcaaagcctattcagttgtgtatgtggggatacgacagcaactgtgataccttgtagaatatgagtgatatgcaagctgtgttttttaattgttttaaaatgtaaattatggttatgctaaagtgaaaacctagaggaagctaatgattttatatactttgcacgaccaaatatggtcgtagtatgacgagttttatacattgccagagagttctgcctcctctgaaataacattcgcactgtagattgcatttcggcttttcctcctttcacattcttttttgctttacacttcacgtcttcgcacctgccctacctcccatcctttcaaagaggtttctttcacgttccagaattcagattgttctgtgatttcttttacatcagtctacccatttctgcaggcagccctgaaagcccttgtgttgattcagagtgtttgcagagaaatgcagttgaaccctggtagtggggtgtccctcacacacccgcgcacccctcccaaagttcaggatgaaaggctagaaaacccattcaaagttaggaaagaacacagatctttgaggccgatagcctagacctagaagatgaccttgagtatgtaaacattgtctccgtgacacaaaacactgaaactcttcatgtgcatataacacctgcttctgctcccattgtttcaagctcatcttatctttgtagtagtaatgtttgtctttgatacctacaaactaaaaaggtacttttatcaaggtttctcaaaacatttacaaaaccagctttgagaaaatgttatgttgcctggcaacagcactcggagtagtaattgtgttttctcattgtgatgttggtctgtgtgagcaaccagtgtagtgactctttggttcattattcgtgttgtttttatttttagtctctgtgtgacccaacagtggcaggggttacaaccccctctcctttcttttttgtatttatctatttgtaggattgtcagatcaagtacaagatgcccagttaagtttgaatttcagagaaacaatttcacgttaagaatgtttcatgcaatatttggcatatatttacagtaaaagcattcattatttgtctgaaattcaaatttaactgagcatgctggtttttctcattgtttggtttttctaaatctggcaatcctacagctgtggtcatgggaaatcacctacagcatgttaaagtcctctagtcatcatctcgtcacctgaaatggaagtcctttttccctcaccctccacttctttccaaaggagggcatcaaggaacttaacctgcctgcctggtgggtttctatttaagacatctttgtgattatatttaacctgcaattgtgctttggcttaatgtctagctcactgtacttgtaaatgattaatattcaataaaaccatttttaaagt

SEQ ID NO: 15468 - DNA, 571 bp, Homo sapiens
tttctccccacatggtgggcctttgaggttccagtaaaaatgctttcaacaaattgggcaatgcttgtgtgattcacaatcgtggcatttaaagtgcacaaagtacaaaggaatttatacagattgggtttaccgaagtataatctataggaggcgcgatggcaagttgataaaatgtgacttatctcctaataagttatggtgggagtggagctgtgcagtttcctgtgtcttctggggtctgagtgaagatagcagggatgctgtgttcacccttcttggtagaagctaaggtgtgagctgggaggttgctggacaggatgggggaccccagaagtcctttatctgtgctctctgcccgccagtgccttacaatttgcaaacgtgtatagcctcagtgactcattcgctgaaatccttcgctttaccaaatctagacatacataaggggctttctctcccttttcagccctctctgtgcagagaaaagatgtgagtccgcttgatgaattctaatgctttgcttagagctatgagaaatgtttgttttaataaaaacctacagtccaat

SEQ ID NO: 15469 - DNA, 24 bp, Homo sapiens
taataaaatagaggctattctttc

SEQ ID NO: 15470 - DNA, 5355 bp, Homo sapiens
aaggtctcctcgcacccttcgcaaggaccttcttgggcctgtgtccgccgttctctccttgtgcccttcagttcacttttacacggtagccttgaagtgaaggctttagatgtgggacccccctaatgtaatggatttctcaatactgtatgaataatgaaacttactatcataaaccatgtttcatgtggcctgttagggcctgtcactttgggagccggaaggaggtgctagtcattttatttttacgtgaaatagatgacctatttaatgccatttgtgtttcatgccattttatccaaagctttttctctgtgtccactctccaaacagcattctagagcagtcaaggagacagctaatctctctagggactatttggtggtttaaaaaaagggtcagacttttaaacactctgaccatagaaatgtttttcaaaatggcaacaatggataaaccaaggattttgtgtttaacaatccatttccagtgtcttcgccacataaaatagccattttctttaaaatagttttggactaacgaagctgaaatctattctcattcttgtttgtcaagaaaggaaaatctgttattcaaggtaaattatttctacaagggcaacaggtatggtcctccgatatttacattaagaagagttaaatttattttaacgtagacactaaaagtatgtgcaatatacaattaaagtaggaatttgttactgattgagaattgttactggtgaattggttttcaggttttgagcatacatatacaatgtgtttcaaatgctgcttgtaaaattaaaccatcatctagaatagagttaatttattataatcaagctacaaataggttttcttaaaccagagatgcactgcccttgtctaaagttcttattgcactggtttatatgtgtatgtgtgttttattgtgtgtttttttaatttgtaagtattctaagagtttcctaatactaaggttaaaattttcatgttgacctgagccttttgcaaatttgctttggctctattgatttgtccattatgtgttaggcaaatataacttaagtggagggggaagtttatgaatataatatagctctgtgttttaaacctcagaaacagatttgagtgtttcagtattatagaaacagtgatgactattcatgctctgctagtctatgcctgcaactccaaatgtttgtggttcagtatttcccacctacatttctgtttggtgacattgctcattttaacaaatatgaccgagtctagtttttctttaaaaggatagtttatgagtaatctttaaaaccatttccataccatctgtatataaccatttcggtagagaacacactacactgaaccctgctttagagctgtgtgttgagctaaaaatataattttttaaaaattgactagcaaaatctatggccacactgagaagcctttgaaaatggcaaatacttttcatcaccaattgcccaattcatctttcttctgcttcctcagccttgtagcaaaggctacacagcagcccacagtccacagtctttttgggaaaattggcctgccaccttctttaagctcagtttatttttgacttactttctttgctgtagttatgaaccttggggcattaaaatcccatggcaaggagcataagagatgttctcgtagctctgcgttgtgtgaaatgtccatcttagttttgttaaaaaaaaaaaaaaaaaaaggaaacagcctcacttttttgtgctccctcagaattgcttgctatgtctgttaatacagctgagctttttgttttcttctctttttgtctcaagattgtatatgaaggaggcttttcttctcagctaacaggcatataaggaaaaccatctagagagttttctttagaagtgactcccattagcctggtgtggtggtgtgtgcctatagtcccagccactaggaaagctgaggcagaaggatcccttgagcctaggaggttgaggctgcagtgagctatgatcgcatcagtccactccagcctgagcaacagagcgagaccctgtgtctaagtaaagaaaaagccagaagtgactcccactgcttctgttgatcggccatagggcttccatgggtggaaacttgtgagggagtttgtattaggtctggtcatggagggatgatgtaccatcaaggtagacccatcttcctgatgcacatttgctgtgcgagccagagtacagtcataacacggtattcgcatttcgttttctctgtctcactgagacaacaatctatactgttttggcaagtttgcattttagtattaatttataattagggattgttcaaacttcagatctgtttacaggttgtaaaaataaacttcggtatcagtgcatctacagaagtgttatttggtaatccaaatattagagttttcccaaatccaaaaacggtcagaaataagtccattatcaatataatttgaagaagatttttagtagtactgtgaagttcgtgcttacctggatgagaagaataaatgacacggatacactcctgagaagacactcgttaaacattgcatcggagagctgcctttgataaatgtgctgttaaacacttgaatgaagagaatggtggcagaatgagtgagcaagcagattgccccagaggggccggtaataatcacgtgagggataatcagattcctgcgtattcagcatcttctctattcatgtggagtgaaagctggtttttatacaggagatacgtaaagtaggccccacaaataatatttttaaaatacaaaggatcaccacaatcctctattgaacatataaggatcctcagatttaaataagtactttttttttttttaatcagaagaacattgttgtttgattatatgtttttaaaaacctgaagcttttttggtggcaggacctttcaataaatatttatttggtcaaaattttttattttgattttattaaatgggaagaaagcaagcagaaatagtaaaattcagtaggtttaaaacaatctataaatgtattttatttccaagaaaacttagggtctcaaagcaagattttaaagtgatttttgagaagacttgggggggacaataatagacattcatgtcagatcccatatgggggatttttaaacatttctttgaactttgaggcctgatttaggggtgggattttattgctttttgttttaaaggatgaaattttgtggggttttagtctttgattcagtcagtatttggtttatgttaaataaaaaatcagtatcatggaaaagatatgaccataatttagtctcctcaagtgaaaaacaggagtaatgtttcgttgcactttgaaagatctgcttcaaggcataactcgtgtagttgtctggtttcagggatagctgtttgaattgtcattctaaagtaggtcatcaggttcacttattatccgaccttaatctgggataaaggttttggtatttgcccacttctagatagaatgaatgaaaacaacacaagcgttttatgagcactctttatcagaaaggtatttcctggaccagaaatgggcaatagttacaatagttgatcctctgttctggaagctttgaaatttatcagagaatgaagtcattcagtacatctgataaagttttgttgttgttgttgttgttgttgttttaattgggcaaccctcagaactgaagaggttcagagaactttccaggtttatactatacctcaagaccacatagattagctactgcttattctttcacatgggctaggcctgttctcctcctccagacctagtattctaagttattaccacatagtatttttatgttacccatcatctttaaaaacattataggctgggcatggtggcttacgcctgtaatcccagcactttgggaggccaaggcgggcggatcatgaggtcaggagatcgagaccatcctggctaacacggtgaaaacccatgtctactaaaaatacaaaaaattagccaggtgtggtggcgggcgcctgtagtcccagctactcaggaggctgaggcaggagaatggtgtgaacccgggaggcagagcttgcagtgagccgagatcgcaccactgcactccagcctgggcgaaagggcaagactccatctcaaaaaaaaaaaaaaaaaaagactcatttatccatttacatttattctcagatgataaaatatatactgatactataactttcttatggtatcagttttctttattttcttgaataaaattacttctaccttcatttggtctttataatccactgtccacagcatcttcctttaaaccaatagtcccagaagagaccctctgaaattctaggactggatattaaaatgcctgaacctgttatctaaatcctttttaagaaacttaatgttccagctcttgaactacactgtggaacagtaatttgtgcccaatttagtggaagataatgaggctcactgtaaacactacattgtcctgcaaagtaattctgatgagagtttactgacttctagagccattctctttaaccgtctgcaggtctaaggattaactatatttgtgatttgtaataaaactgagttgtacaacactgcctgtgtttgtctggccaagacatttgcttcacttttaaaatgcacgttatctttggagaggtgaattattctacaaaatgcaccctaaatctcattgtttaaaaccttactgatctaataccatctacacaaaaaaatgttgtagttgcagaacttagtttataaaaacaaagaatgtgtatttcttcaatagccgggtatttggattgttctcttgataatatttgaatgtgactcttggatttaagtgcactattattcatggcttatacaataaaattgcactgtatggcaaatatgtctataatgtatgctttgctgaaacctcaagagtgctgtaaggtacaggtttccatattgtgaacctgtgtacgcacacacacatatacatacagtcttagggaaaaaaaaaagcagaacttttgtaagtctgtgtaacattttaatattgtttgtaatattcactaggtgataatttcccctgtaccctataactgtaatcattcaccttgggttggccggtttgtcaagcttggtttactgaatcaagaaagagtcttgtcgaatgtggtactgttcttagtgtgtaatatttgcgtatggtgttcctctgcctcagaggacagttgcacagatggctagtgttaaatttctatagacgatggtaataaaatctgaatatatttaagtgctaataaatt

SEQ ID NO: 15471 - DNA, 63 bp, Homo sapiens
gatagaacttgggagcccgggggttgggagggacagggataaataaagacaaagactgaagac

SEQ ID NO: 15472 - DNA, 490 bp, Homo sapiens
ccggccgcgcccgcctgcgccccgtgcccacctctgcgcggacgaccccgacttccgtgccatcccagacgggccgcgaaggcggggtgtcgcctgtgcccttttctcagacccggaatccagtgggcagaggcagcttcgcagggggtccccggacggactccttcaccgactgcacccccgggcgagttacgcggcctctctgtgccgcttcatttgtagagggctgtaacagtgacctcgcacggtcatccggagtactaagccccagtaaggtgttcaggactggtaagcgactgtcatcaagtaaggcccccgtgctgggcaccccccgtgctggccgcgtccccgcctctgcgccctgcgtggaccccgccctgccccgctacagaagccagactgggtcccgcggacgccagcaggggcagccccagcctaggctgcgctccagcactgcggggcttttctgcaataaagtcacgagcgttcg

SEQ ID NO: 15473 - DNA, 1525 bp, Homo sapiens
tcttccctcttccctcctcaaattcctgcacggacctgggacttggaggatagcaaagaaggaggccctgggctcccaggggccggcctcctctgcctggtaatgactccagaacaacaactgggaagaaacttgaagtcgacaatctggttaggggaagcgggtgttggattttctcagatgcctttacacgctgatgggactggagggagcccacccttcagcacgagcacactgcatctctcctgtgagttggagacttctttcccaagatgtccttgtcccctgcgttccccactgtggcctagaccgtgggttttgcattgtgtttctagcaccgaggatctgagaacaagcggagggccgggccctgggacccctgctccagcccgaatgacggcatctgtttgccatgtacctggatgcgacgggcccctggggacaggcccttgccccatccatccgcttgaggcatggcaccgccctgcatccctaataccaaatctgactccaaaattgtggggtgtgacatacaagtgactgaacacttcctggggagctacaggggcacttaacccaccacagcacagcctcatcaaaatgcagctggcaacttctcccccaggtgccttccccctgctgccggcctttgctccttcacttccaacatctctcaaaataaaaatccctcttcccgctctgagcgattcagctctgcccgcagcttgtacatgtctctcccctggcaaaacaagagctgggtagtttagccaaacggcaccccctcgagttcactgcagacccttcgttcaccgtgtcacacatagaggggttctgagtaagaacaaaacgttctgctgctcaagccagtctggcaagcactcagcccagcctcgaggtccttctggggagagtgtaagtggacagagtcctggtcagggggcaggagtgtcccaagggctggcccacctgctgtctgtctgctcctcctagcccttggtcagatggcagccagagtccctcaggacctgcagcctcgccccggcagaagtcttttgtccaggaggcaaaaagccagagattctgcaacacgaattcgaagcaaacaaacacaacacaacagaattcctggaaagaagacgactgctaagacacggcaggggggcctggagggagcctccgactctgagctgctccgggatctgccgcgttctcctctgcacattgctgtttctgcccctgatgctggagctcaaggagactccttcctctttctcagcagagctgtagctgactgtggcattactacgcctccccacacgcccagacccctcactccaaaatcctactggctgtagcagagaatacctttgaaccaagattctgttttaatcatcatttacattgttttcttccaaaggccccctcgtataccctccctaacccacaaacctgttaacattgtcttaaggtgaaatggctggaaaatcagtatttaactaataaatttatctgtattcctctt

SEQ ID NO: 15474 - DNA, 1072 bp, Homo sapiens
ggagctggtggtgctcctcacggaaccttgccgcttggggaacctgacgtctaagtgtccagaaaggaggatgtgggcagggacggggtacagaggatagtgtgggtcagaggtgccagtagtataatattcgtctccctggagttatgttgaaggcagagttttcatagggttagattttttttatccttttctagttcagttaattcatcctgttgaattgcaccatcgtgaaagatgggaaaaatcgtgatgatgggtaaggggaaaacttcccggaaggcaatggggcaaggaaaaagaaagcctatgggaaatggctgtgctcccaacatagctttgcagatgatgtgggttttttttttttttttggttgtttgttttgagagagagtcttgctctgtctccctggctagggtgtggtggtgtgatcttggctcacggcagccttgccctccctggctcaagcagtcttcatctcagcctccagagtagctgggactacaggcatgtgatatgatgctcggctgatttttgtttactttttagagagatggggtcttgccatatttgccaggctggtttgaactcctacaactcaagcattcctcccaccttggtctcccaaaatgttgggaccacgggtgtgagccaccgcgcccagctagctcctgtgttttgtttttgttttgtaactttggttgatgttaaggccctccattttggaaagcaggaaaacaggatttttttttttttatcttgttccctggaggatccagggatgaggatagagtggcctgagagcagtgcttggattcagcctcctgctgggtccttctgctggatacaggcaccaagaggcggtcgtggagcagggagctgcgccttcctggggtgcccggtggtgtgtagagaaaagctgcttgtttactccttaagtcaatgtattggtgactgttgatttgttgaacaattcaggaatcaagggctgtggagaaactccctcatgttgttggcaacaggtgaatgaacctagagcggtgacatgaaaataaagctcactgttactcgc

SEQ ID NO: 15475 - DNA, 699 bp, Homo sapiens
tcccaaatttgtccatagctgaagtccaccataaagtggatttactttttttctttaaggatggatgttgtgttctctttatttttttcctactactttaatccctaaaagaacgctgtgtggctgggacctttaggaaagtgaaatgcaggtgagaagaacctaaacatgaaaggaaagggtgcctcatcccagcaacctgtccttgtgggtgatgatcactgtgctgcttgtggctcatggcagagcattcagtgccacggtttaggtgaagtcgctgcatatgtgactgtcatgagatcctacttagtatgatcctggctagaatgataattaaaagtatttaatttgaagcaccatttgaatgttcgtaatagtagaaaatgatgtgaattttctttctgttcggctcctatttttctcatcattttgttttctttaattgggttgaatggagtagatagaaatatttatggtttaggtaacagttagatgtttcctaagaatgcaaactgccttttccacacaaaggctgggaataaaattctgggtattctcgtattctcatttaaaggagtttagctttcagagagaaacagcaggattgcttttgaccttttagaagattggtctccagtaaaggtggacatttttgagatttttataataaagaatttaattgctctgcatttgtcaagt

SEQ ID NO: 15476 - DNA, 7731 bp, Homo sapiens
ttggatccttttagacaactcctccaaaagatgaaccacattctttcctcttggtttgatatggttacctgaatttgcattcagtgttatttgttaatccatttacgctttggtctgcagagactattaattatttggttgttttgttttcatttttgaataagcacagattctggcattgaaagcacttgacaaagggtatttgtgcttaaatgttaatatacaagatctgaagaagcaacagaaagtacccttcagtacacctcagacttttttttaaccccagagagataaaatacatgtatagtgtttttcagtattacacattgatttaaaaagattatgctgttaaataatcttttaaaacggtatttttataaagtgaggggataatttctggttctcaggttataactgagagcagtgtgcaagataataggtaaatttgatccattgcacagatatactttgaaccatgtgatgagttatcttgttgccaaggccttgcttctacttaaagttttcagaaaactgagtgacagtggagagaaacaagaagttttacaaggactttactaaattataagcaaacttgcttcaaaataagttgacatgtgataataaggttttcaatgtagcccaggaggtttttaaaggcactgttaggctgagcatggtggctcatgcctgtaatcccagcactttgggaggccaaggcagaaggatcacttgaacccaggagttcaagaatagcctgggcaacatagcaagaccccatctctataaaaattagcaagatgtggtggtgcatgcctgtcatccaagctactcaagagactgaggcaggaggatcacgtgagcccaggaattcaaggctgcagtgaactatgattgcatcactgcactgcagcctgggcaacatagcaagactctgtctcaaaataataataataataataataaaggcgttgttagcttgtaaggagtggagtatgtaggtagtaggagttatatgcaagtacccaagtggtattcttccaatcttattagaagcatgaatattcaagattgatattactattgcttattagcaagattgttatcaatcatgcttattagaaggatgaatatccaagaccaagattgactaatgatgagtctgcatcaagaactaggcatttcttctgagttgacggactctttaggaaaggagaatctaagtgaagcactgattttagctctgagaacaaacaaattaaggtacagcatagttagccttggtagaggtatgacttggatttgctgtatcctttaaaatagtatctgggcatttattttattgaaggtgactacattttattagttatattaggaatttaggtagaatcaacttctactgattacaggttgaatttctgtcactttgtagagaaacgaatagactggacactgtgtggtcactgtttagatttgcccatgggtctctttaaatctatgtcatggatcctgagacacaaatataattaagacaggtctagagacaggagaagcagaaataagttgacccaggagtacagtctcaagtagttcattaatgagaaaattgacatctgacaagagtctttttactttatgctggatgaaaatccaaatcttgttttattttttccactaaaagtgactaaaataataacgaatttcatttgttcttgggttcttttttcctttaatgattgtgctataacttaaaataatgatgttacttttgaacaaacttaaagaaatatttttaaagcgtatctgaaaacgattgatgtttataactctcttttggcttcaaaataagattgtgttatcaccattttggtagatgaggttgtctggtgaaaatgatgcatatgagttgtactgttcagtgtacatcctgcagtagtggatgattgaaaacatatataagtggagtataaattaaaaattaatttggtttcttctatttcttttttttttttttttttttgagacagagtctcgctctgtcgcccaggctggagtgcactggcgcgatctcggctcactgtaagctccgcctcccgggttcacgccatcctcctgcctcagcctcccaagtagctgggactactggcacccaccacgacgcccggctgtttttttgtatttttaggagagacggggtttcaccgtgttagccaggatggtctcgatctcctgacgtcgtgatccacccgcctcggccccccacagtgctgggattacaggcgtgagccaccgcgcccggcctgttccttttatttcttaattcaggacactaaaccatgactgcaagggatttccttggtaaaaagaaaagattctcagagtcaaaatggtcttacaactcgggcttgacggcctttgaattatgaatggattgttcctctctctgaagcctattgtcacatgggtttttaatcctggccttgctgctagaaatctgtgcttgaagtcctctctttctgctgctagcctaccagttaaaagtcaagacttggtggaactcagtttaccagactctttagcctttgagctaaactgtctgagcaacctcttagatgtgcacacaccactttgtatgaaagggttctctagaacggttctttggagagaaatattttcatgtacgtttgacaggggtgtaaataaagcatgctgactaataagtcttttactcttcatctaatgaacataagaatctatgcatccagatattattttgtatacaaatatttaatttggtgattgataatctctctttggggtagtcacatggaaagctcttttaaatttaacttccgcctttggattttttttaaaaagccattgaagagcaaaactaatgtaaacgtcttgatcatttaaaaagcttgcttgtcctcgaaaggaaacacaggtcatcagtgagtataaacgtagacagttgatttgtgaatgctgtcggcctcaacttgcttgatgatagattctactgacctagctggagtaatctgatcacttacttccttattaatactagatcacacagtgtctttcttattccttcttctttacttactggcatcagcacagagtcccactatctgaaatagaagggagagtttgggggtttattggaggagtcttaaaaacttggttggcagctgggtacgatgactcacacctgtactcccagcacttcaggaagctgaggtgggtggatcagctgaggtcaggagtttgagaccagcctgaccaacatggtgaaaccccgtctttattaaatacaaaaaattagccaggttggtggcgcatgcctgtaatcccagctacttgggaggctgaggcaggagaatcgcttgaacctgggaggcggaggttgcagtgagccgagattgtgccattgcactccaacctgggcaacaagagtgaaactccatctccaacaaaacaaaactttgctggcttcctgatgcctcactgtctatttgaggaattccacagaatcttcaaaggatttgggggaaagcgcattaacatggacaaaggatggaatcaaaataatgttatagtgagaatcattcaagcacctatttaaattttttccaattgccagtatagtgatgatatgacaccagcatatcaaagtaactaacaaactagctacacaaacgtcttggagtttggtttcgttctcttttctcatcatagatctccgtgcagaatagtgctaattcttatttctcgtttgcctttctatttccttccaaattctacatgccagtaattcctctgtcttttaagtgaccatcaattcaataggcaaaaatttggagtaatccagagaaaaaaccatccaaatataaaccagctaggaacatgaatgcccctgattattaatggccaaaaaaaaagcactggtggattttaaattaaattaatacatatatacgagtttggaggagaacagaagttctaactcagtacttgaacttggtgggggagggcacaggttaaatatgagctgtgagcccccagttttggaggaaggaggaaatgggaaccaaccaccagacaagcagctgcagtctaagaaaaacaaattagggcaggcctcagcatctctttcctattacatagaaaatctgaaatgagaatagctgtgaacttttctaaatatgcaacattcaactatcgcaaggacaaaaaaccaaacaccgcatgttctcactcataggtgggaattgaacaatgagaacacatggacacagtaaggggaacatcacacactgggacctgttgtgaccccgctgagggagttcctcttgccctctacccccggggcttgtatatagattataaatatataagggggaaaggggtgggggggaggggttgtgcggctggggcctcacttcccctccttccccttctcctggtcccctgtcccaggggctgtttgttaaaaaagagtaataaaggatttttgtttttaaaaaaagcaacgttcattaatttatatgcagtcctcaccacagccctccaagataactatacttattgttcccattttgcagatgaggaaaactgaggcagaaagaaattaaattgcttaaggttacacacatagtaggtatcacacatttagttagaggcagagctgggattcaaacccaggtctggctcctagtctctgctcttaaccacaacaccatatactcccacccctgggcccagctcatgtgcttggcggagtattagagcctttcaaggtaagtgtgattatcccctttccaaatgagctttggaaaagtttaagcaaagattacacagctagacaataattcaatagtagtctcttacatattttcccttttatctttttttcatttgtaaatctgtttcgatttgatttgaattaaaaaatagttcttggttgcaaaatattctgggaccacttttctccaactcttcaacctttcaacaattatattattgttttcccattttataagtaaggcaactgaggactattcagatatttcattcactccatttgtttactaagccctgctgtgtgctggatacacagtctgctgtgtgctggatacatatgatacaaggtaatgactatctggcatcttgaaggtacccagaatattagaattaactgacccacaggtgccaagctgaaacattcttcgtattccctgtgtgcctattaccaagttatattgtttagtttgaggaaaacaacaaacaaccctcccttagagaatcatgatgcatattagcatatttaaggagtaccctaaagcttggacttaatctagcttaccctagacgtattaacatcctatagcgcacgtgttctgtgggatatatttcagaaaataatatgtcttacagaataaatgcagactcctttggatggcattcaggcccttcataaagtaactctgaattatttttcagtctcatttcctgcagttgcacccgattttttctgttctgcaatctgctattttagacaaagctttcataagaaattacataatgacaagtaattcccacattccctagatatatacttggatttcaaatgccataattgtaatctttctccaaagaaaaatgcacgatacaggcttcattctatcaagaggcatatgaggtaagcgttattatacacccgtccagcagatgggaaaaccacggaagtgggagggaatcaagaagcattaacagaccctccaccaaccgtaatgcttaactcctcttgttccaatcttaactcaaaattatgattattttgattatttaatgattgttttgatagtataaactccatatctgcaacctcagttatctacaacactgaggtgcaaacatttaaaaagatctctcaccaaacaaggattgaaattgtattgcaaatgaaagagctcagcatgagagcacaatcagaaactgaagagagttgatcaaagagaagattctagctgaattgttctatttttaattccccagggatcctacggtctatgacacattaacaggggtgtgaatcatttcagttacatcacatactctgtcctcttgtggtgcgggtcttccccagttgattatacacagataatcaatgactttatttgggagggattggagctatagaataatctatcttaccaatctgatggaccatttgtaagagctgtttgtcaaattggatcttcatttgacaaataaatactagagctgcagaaagtaaagtttactccaacccaattaatcattaatacatccacaggaaaaatacattttctccacatggaatattgatttttctatgaatattacctccacattgaaaaacgagtgagtcactgcagttaagccagtgtaccttgatgttgaattccctgaagaaggtacaattatatttacattcccttagcaagaatttggctaagtgataagcacttttctcttttcttttctttttttttttttttttttgagacagtgtctcactctgtcacccaggctggagggcagtagtgcagtctcagctcattgcaacctctgcctcccaggtttaagcaattctcgtgcctcagcctcctgaatagctgggattacaggaacatgccaccactcctggctaatttttgtatttttttttaagtaaagacaaactttcaccatgttggccaggctggtcttgaactcctgacctcttacgagctaatcataccacttctaactagattttctattaatgtacaaggagggactccactactaaagtttgttttacttctctggttatttacacaaaacgctggcaatacattaaggctcactaatgtggacctaagtgagtatctgagaggctttgaatatgtatgtgcaaactgtcctattttctttatatgctctcttaaatatgtatgtctgtaaatatatatataacacacatatatatatattcctagacatctagtgtttgctgtcattagtgaccaagaaaaagtagttcttttgtgcacgcgtgaatacatcaaattagcaattaccatagaaatgtatttcattgaataaatagcttttgtttgtttgtttgtttgtttcagggaaatttagaacaattattagatgttatagtgcctcttctcgtgttgatacgtgtatttgggtcaaaagtgcaaaaacttttttctacaatgtacagttattttgacttttcccaggggaagctagcaatagttttaaaagcacaaagtgatgtaaaatattttgacttttataataatgcgaagtagttttatttgcattaatcaataatgttcaggatctttttgtagtaagtatattttaaatggtgtaatttgtgtgtttatgatatgtattcaattatttaagttaagtatcagtgtatttttaaaaagtgttcccaggtgaacaaaagtttgcttttcttcaccattctgtacaggacaagcattattcagttcacatagtcagctctcactacacttcaacagaacggggcaagttcgtatttgaattctgttatatttatctaagggaagcaaaattaaccttttaataatagattatctttaatggttattaaaagaatgttattgaccaaaaagacatattttgagattaataaagatgtattagattatccaa

SEQ ID NO: 15477 - DNA, 282 bp, Homo sapiens
ctttttaattaaatgaagccaagtgggatttgcataaagtgaatgtttaccatgaagataaactgttcctgactttatactattttgaattcattcatttcattgtgatcagctagcttattcttgtgtactttttttaaactgtgggttttcctagtaaatttaatttacagaaatcaatggtagcatttagtaatctacaaaggaaatatcaaagtgtttttcaagcctgttatattcagtgtgtgccacaggattgaaataaatgacaatgtaattatg

SEQ ID NO: 15478 - DNA, 2347 bp, Homo sapiens
atactcctaaaacaaagtttaaaggattactatctgtgtgacaaataacaagaagcaacattttgagaatggaagcaggtctgaggtcagaagaagtagagaatgaaggaaaaggtgaatgctatgaaattgatattttttctggaactgaattcttaaacataaaacagataaaatgcatcttgttactacaaatgttatatatataaaatcaagttgagctttgccttgatttgctgaactctctgcactttttcattcccttcagaagtatatagatacttccggtgactacatatgaatgtactttcaatattatttttttatttattcattagaaattttcctcatttcaaaataatttatgactcatggaatgttgatcgcctaaaaatgaacatcgcattttctttgattttggactgtgaacttattttcagagatgaatattgcttgagatttataatacccttagaattaaattcctgttatttgcccagtttttaattacactgagataattttgaaaagaaatagaaattaagctactatataaaacaattgtttacgtgtacttttaacttttaaaagtacttaattaacatatgttgtttgacttgtataaagtttttaaaaattgttgtttatttgccaaagtcaacagaatgtctgttattgttttatgtatacggtaaagaaatttaaagtgtagaattttcctcccccaaaaagtcatgtgttgatagtagaagcagtggtagttgttgtaacagtaatcattgtcattgtcattatcttcttaaacatgaagctgctcctgatcataggtggtacacgttaataacactagtaaaaataacgtcttacactctgtaacttactgcatattgttaatgtatgtctagcatcaaatgagtattgtaaaagactaatataaaatggtttataagactgatgtatatattaagtagaagctaatatttttgtttcttgcaaaaggaccacttgaaaagtgatgctaaacagccagtaataataatttaaatataatttattatttcaaaagaatatgtcttaaaagggaaaataaaaactttctgttgaatcacaacaaaattagatttgtacatagagaaacaatttgataatacttaatagaaatctgttcaattaaaaatgcttagtttatacaaagatactacacaaaaatagaacaattagtctgaattaacgtatttacatattgcatatggaagataagttcatttatcttcctttctaagacatatttaatgtaggttacatacactccaactattactttgcttttgcatatgaaactagaaaacactgactttgtttttataagttattaaatgtgaaattgatctgcatcagcttatttataaaagtaatgttatttccaagaaaatgttactcttagcattgattttgtatgttagactttttacattgtttatctaatattatttatgacagtaattttaaaatatattattcataagttcaaggatcccatatagtataagaatataatttcacttgctttgaaagttgatttaattgactgactaaatgaaaatgcctacccactcatataacatacctcaggtctattttaccttacactgaatgttcttaatatgatttggtacctaaagtaattgaaaaaaatgcagtttcctttaatccttgactataagttatactatgttgcgtacatggcaaatcctgcaaatatagattaaaaattaaattagcccattgaaatcctttataattctgtcattttcccaaggaagaatagcattgtacatatgcaatctttattttattctttattgcttatcagagtgagtggatgaaaacatttgtaaggctgcaacataatattaaaatgtgaataaataaatgttctgataaaatagaaaagaaagtaaattacagtgatttccatcatattatcactcttgaattttatcatctataaaatgagagataaaaatatctcactgaattgttacttatatcaatttaaaatttgctagtggtttgaaaataataatgtactgactacatgtatgctgttattgtcagtgtttccttctataaactgttctttggaaaaattaagttatacataaaattcatattaaactttttacagaaagcatacatgataaacagtttatggtacttctcagaatcatttcataataagcaatttatttagcttaagttccaacttactgttcttattataaattgcaaagcaacctgtcttacattcttacattatcttaaaataaatatttctgcccttgaa

SEQ ID NO: 15479 - DNA, 2477 bp, Homo sapiens
gtatcaatgctgtagatggatggaagaggcttcccacaggaaggtgccaccagtcagttgtgcctatgtccctttggctggaaatgcagaatatgaattgattagttctctccaagccattgcttaaaatataacatgttttggatccaatacacacattgttacaactaacacaaattcctattaaatattaaaagtagttctggtttattaatcaacggggaaaacatcttctccaaaaaacttggaataaatccaaggaccagtttttacccaaatatatgggtagcacagtttatcacatagaaactccattaatcatctgattttccgaatctgaaaattgagactattaagatattaggatttcagagatttcaagtcacattataatgataagcattattcataaaacttgttacctttaagaaggtggaagtggcaaaccatacttcttttttttcctctgatgtgaatccagcctcagactgagtgaactgtaataattatgaattcattacagagtccaggtggcctgcagttgaagatcatcaaccatttttgcctcacttaattccagccttttgttttctgctggaaaataagtgtggacattgaagcttgagctctcaaagcagttggctggaatacttttgtcagaatacggtacatttctattacatcagaaatatattttcatctcttcttgttaaattgggaggaaatttatgatagcaattatgaagattgttttatgacattcttttgtcagtttggctttctaaaaatctctttttagattatttctcctgttgaacatagtaaaactattgaatttctcttaagaattcctaataggtcaatagatttaccctccagtgatatctatattatttctttctcgtctcatcaaaatgatgacaggtaaactatatttttccttaaacacctattacagttaaattatgcaaatcattaaataaaaatcatacaacttttggaaagttagttcaacatgaactaaaatggcatgctatttggaaatttagtttgagataaactaaagtgtgttgatgccagaatgttcagcttcagtaaatataataagctcttgtgccttgtatgcactatttaaaaaaagttttttttatttgagtccagtataattcatgtaaatgttaacaattagaataatactctgtatgcttttttgatactgattttgagaatttaaagcagattaccttttaaaactggaccaactaagtaattggtatttaatcaaagagaaaatggtaataaacttttcaaaatctttgttaaaccaaacattcaacacaaaataaactagaaggccagaggataatggaataaaagatcattgcaattacttatccttcctaaaaatatagttttatattaattgtgcttatggaagaaacaatgtcagccaagtccattttatagtttgagtgcaattctttgaacaatagaaatatctgcagtctttcacagatttgtattatgctgaagagtttcatctgacaatctgcttcaagaaatctcagaaaatatgataacattttaactttcattttagagcacgttttggtcatttttaaaaatacctaaagtgccagaccggaacctatagctactgctagaagtcttaaaaaaaccaacagcagcacaggatgtattaagaattatatgaagtcaggtttgtttttttttttttttttttttcaaagcacagtactgttagctgtttttgtggacaggattcgattaagtattccctcttgtcaaactggaagctaggggaaaaagagggatttttatcctttactcttctagagtactgttaatgcccctttcccacagtcttttatataattaaatatatgtcaatacacattagaatcagatttgaaaaagttaaaacaatttcattgttgtaattgttccctttctgttttcatatagtgaataacctttaaagggttgttttgttttgttttgaattataggagttataatctttggagatgattgcatatctcattagatatgcaatataaatttatctgagtgaacaaagtgctaaataaatagatctacattttgtacatatttatataaaatttacctttaagtatttactttaaaaaatttaatggcttaactcgaacttgaagacacatacttcaactgtccttattgtccattaaactgataattttgatttttcttgcttttatagattttactatataggaatcaagatttaagaaattttgcattaaaaatagtgtaccaatgcttcatatacgttagttatttgctattatgtagggaagaggattgttatttcaaagatatattaaagaacagttgcatctgaatataatcatgatgcattcaatgaagttcatatccatgaattcactcctaatataccctaataaagtggttga

SEQ ID NO: 15480 - DNA, 551 bp, Homo sapiens
attttcctggaaacatgaactgccaagagaggaatgggacacaaaaccaaacactgttttatatttatggtttgcaaactggcatttcatcagtggctaaattcacagatatcctatatagattgtatacagaactgagactgattttgtaccgattagaatgattgctatgatctttgagaaatttttctgcactatttgcactgaaatgtttatttattgttgataaattgtatcatatttaagttccactgctgttcctcttaccttgattaaatgcctatgcatgtacttttagctagtttttaatattttataaaacttcatttaaatttgtatttttaacttgaagttccatttctttatcaaggatggtatttagatttttttcctcttaaccttttttcaaaaactattttcaactgtgaggaaacccttatttttctttctttgtggataaaactttcaaaagcaatttaagatattcatagtgttaggaaacaccaaacctgcctatgtgccatctcacaaaagaaacttttaatacctac

SEQ ID NO: 15481 - DNA, 5423 bp, Homo sapiens
cacttgcaggagcagagctggtcatcgtcttagcatacatatcctacactgagtaaaccgtaacgggatgtcatcagcatgctgggttgtcatgggtttgctgcatacatagttcaccctaatttatacttactcatctggacagcatctcctcagatggtgaattatgtgcacggggaaacctcctgagtggaagtttcattcatcagtgatgaatagcccccaaacagtgggagtgtgtatgtatgtgtgtatgtatgtatctatgtatatgcttgggaacatgagtgttacaagttagctggtgttttactattattgtgttacatttttccagtgtcgtcattaatcggtggcatatactgcacatactgaaatagagggaaatcactgaatgtaaagaggtttcatctatgccccctgcagttggggaaatactagtagctttaccttgtttgacttcattaatgtcagtttaggggatgccaaaaatgcagttactcatcatggtgtctgtcactggttaggggtaagatgaggggataaggaaagagacttttcaataagttgtgaatgccaacagtgggtttaatgcaaattttttttcctgtgaggtatgacagtttgctcaaacttcagccaacaggggtgtctgcttctgctgcactacacaggccaggagtggcattccatgccactagttggcatccttttgaacttttgtctcctttgcaaacagtggtcctaaaatacgaggtcttcacttgctgtgaatgacgtatccccagtcagggacttaagagaggcactgtgatatacttgggaccctttaaattaaaaagtgaagatagtcaccagggccagaaagctcatggagtggccgtaatgagaatatgtttgaagatcaaagagttagaccaatgcttgaataagtagaccccaagcatccttttctaaaaagtgacttaaaataagccaacagactctcccagaccacacaactagtggaatgattcctcctttttccattacttacttaatcacagtttagtttttttcttaacctcgtcaggcccagagttcacttctttgtttctctgtttcttttgtcttgtcttagagatgagggggctacagcagcatcatgcaaagagggaaagatgaagggatagaagaagagaaaatccccctgttctgataggaacggcctgttccattgttaaatggcaaatggcccaatttaagggctttggatctaatttgcctctgatgtttcctttggaaacatttaggaatatttttctccccctaccccataaattgtgtagcactttttattccatttgctttcaaatgactacactaagcctaataatacaagctccagtgttatacaataacccatcagtgattggggaatcaaacattttggtttaaaaaacatgattatttaaaactggaaactaaaaagaatcaaattgaattaaagctatataaacacagttaacccttgtaaatgagtaaacaaatttttacatgtaagattctctaattgtcatattttactttttaggattccctaatagtggactgtttatttgcagtgtatttgcttctcatgaactatttctcgtacaaatcattaaatagttcattggatgaggctgggtgacatttcccaggacagcatggtgaacattaccaggcatgctagctggcccgtgtaatcccaagacaaggaaaacattcgttttcctcatgggtcttccaagaaatgagctattttattgatgccattaaaaagcaagttgcgatggttttgtatagccaggagtttattgtgattaaacatcaaagaaacaggtagaaagcctgggtttctggctgctagcgttatagcatccatgacacagaactcattacggacattccacaacttccagggtgcacatggtaaaatctgaagcccagaattttctctcaagctgcgtggtttactggagagaaggagttggataagcacaggctcgggtattttggtagggactgtaggcatgctcataaatccttgctgttgtcacagtacgctgaaaacccgtttgattctatacccaatcaagaatagacccttcacacaggaaatgtgaacaattgttatatatgaacactcaaatcttttactgtaacgaaaccaagaaacttgtttagaatgtgataggcagctaaaactgttatgcccactgtgctcaatttgaagcagaattcagtgaaaaattatttttccacattgaaacactttgcagacacaaatatctatgaaaagatgctttgtcagccactgtgcctttttttctgtgaagactcaacggatgtgtgtgtttgtatgtttgttaacagttacatatgtttgtatgagtgtatatatatatctgtgtgtgtgtatctctaacgtcagtgtataagtaagttgggtttatggtgggctttgactatgtcattaggtgggtacaaaacccaactgatgtggagaaaaattgatgtttgatgttgatagatatgcttatacctaatttttagtttttaaactattttaaaatatactatgattttatatgtatatttcctatagactctttaagatgtatttataatgtttctaatatgaaatcactaaactctagtacattatagcaggtgctttgtaatctggaatggagaagaggtaggggcatttggggattcctgtttacttgctgctgccacaccttttccgactgatctgtcctggtaggtgtttattagcaaaagtcagtatcaccagctctttggcacctttctgtttctgcttgtgaattcataatgttttcaactaaattttttttttactttctcagaattacctaaatgttttgtagagttttgactagtaatcaatcaaaattatataaagtcttctccagtaattaagaaatacatatgcaaattcttttgtgattgagtaaaagcagcttaaattacttttcttttctacattaagaaatatattctcaacattttcagtgagaatttcttgtaatggcacctcaaattttatactcttaaaaaaaaacaataatttgtgaattaccaccaaaaggcaatggcagtcctacatttaagaatagagctatgcaaactctgttaaaaactatgaggaaaacttatattagaacttttgatatatactaaaatactgattatcttaatcacattttccccagagataaacattgagagaacgaaagccaaagtgtcatttaagagagatatatatgaaaaagtaacattaatatatagaactttaccatcaccagccgtagttgatagaaaatattagtttcagaattaccctcctttaaaaaataagagactatttgttttcttttaatttctatgaataaaagaaatttttaaaaactttaaaattttaaatattagtcaaaatactttttaagtcctgagtgcttacaggtagttgttaaaaaaattttaaggccaggcatggtggctcgctcacacctataatcctaggatcttgggaggtcgaggcaagctgatcgcttgagcccaggagtttaagaccggcctgagtagcatagcaagaccctgtctctacaaaaaaaacaaaaattagctgggcatggtggcatgcacatgtagtcagagctactgggggtgctgaggtgggaggatcgcttgagcccaggagagtgaggctgcagtgagctgagattacgccactgcactctagcctgggcaacggtgagaccctgcctcaaaaaaaataaaaataaaaataaaacactttaattagaatctatttttacctattttctaaatttatttaaatgcttagcaggaagcataaggaaaagccatcggcctccaatacccatgatgacagagggagcacttgagccttgccttccctcctcttaaatcagggtgtgttccgagattacagaacatcacaccttggcgtgatgaaatcatgccaagattctgactctccctttccggtgatactgctcatgatttctcctaatacgcttcaagcaactgttaccacaaaaaatacagtttccgcagggctttaaaggattgagtttagcatgtatatcatgcgttattaaagttcacgtgattcatgtgaaattaactgtcctttttgctagtgccaaaacagtgccttctctgcacactttacttgtttataaagttctcccacatgtccttaaatatcaagggggaaagtatggatattcgcgtagcaataatgccagcaaaggtcattttcattttttagtcatatagatatgaaaataagttcatatagatatgaaattgcttgactttattgttttggggagattttttttccttacatgattatattaaacactttaaaatagccttccggtttctggattttgagaagcctgatctgttattgttgtggttgttggtgtttgtaatattcattattgtttgtatatacacggtttagtcttactgatttcaaatgcattttgttattgctcaacccaactggtaacactgtttgctgggagcattatacttaactttgattcaccatggttgatgccactgccatgatcgctgggtcttaaagagctttccctagccactgacagccccgtggagatcataatcagggccccaggctggttccaggatcaggcagcctatagagtgtgagcatctatgtgtagctacccttgttgggtgggctcttagactgatggggtaggatatgaagtgaaagacttcaaatgcaagtaaggtagtttgggctccttaattccaaacatcccatgagtatatcaagatgaataaggaccaagggacctctgtgactcatagaagggctggctgaatcctgaagtagcatagtgggacctggtctacaatttatgcacatgcactgacagccttgctgtgccacgtgtctcaccaagacccagttgggaaagagcgtcatattgccaacaggttgggtttctctggcctacacctgattaatgggccctttatctttggtgtcccctaggagtgtccagttgttttattgctgtattttgttattgcagtacttaataaaaattgttgatagggcccaaaaccctacagaaattctatgtctgtaaaaaccaacaaaggcattggacttgtgtgaatgtacagggtttttttagtagtaattttaaatttaaatgttttaagtgatcatcagtgttcctttttacttataaagttggattcttttttagaatttgtaataaataaaaactgctgctttaccactgtaaaatatgctttctgatgtggtgtatttttaaaataaattttaatatgtaataata

SEQ ID NO: 15482 - DNA, 313 bp, Homo sapiens
cttggaaaaggaaatgtaatgaacttatggaaagcccatttgtgtacacagtcagctttggggttccttttattagtgctttgccagaggctgatgtcaagcaccacaccccaaccccagcgtctcgtgagtccgacccagacatccaaactaaaaggaagtcatccagtctattcacagaagtgttaacttttctaacagaaagcatgattttgattgcttacctacatacgtgttcctagtttttatacatgtgtaaacaattttatataatcaatcatttctattaaatgagcacgtttttgtaaaaaat

SEQ ID NO: 15483 - DNA, 2286 bp, Homo sapiens
gatgtcttcagaggctcatctaactctgtccttacatactcaatgcatatatgaaaacaatactaaataaacatctgatctgtataaaaatgtaaattagtttgacactgcttttttgataggtgtggtcatttctccccatggtagtttaaaacatcagaaactgaattctggacagatttaagccttgacacactgtgtttttttttttttcccccttcttttttgggtcttcatttttttccccattgtgatgtttggtaacgaatttaaaatgtagttttaaataaagtttggacttatctataaagtatcttttttggaaattatattgaattctatacagcaagtcaatgttttatataactttaggctgctcagagaagagcaatggttaagagttagttagagaaatatattatttgttataaagcccatccattaggccagtcttccaactaatgccagtgttgctgctgttgggtctgatgttcttcttttagatacctgcaggtcctattcctgtgcaagaatagggcagattatcaagatatccaggatacctatgaagttattatagaatatttattaatccattgaaattggataataagtttagaacataggttctcagtatctagaacttacatcattatcatctgtttgttaggatttgaaattctggaaaatatttatctacatcgcctcagactaaaagtaaaaaaaataagctttatataattagggagatttctgcacagagaagtaacattgtggttaattttaaatgaaaaacttaactttttcaagtggggataaataatacaactaaatttctgtaatagtaagattctgtatgccttcagataaacttgcctattgagatggtaatttaaagccaaagcatagcagtttcttttgtgtgtagtgaggttgaagcagatttgcaggtgaagtattgaaagtttatgtgactttaagtcagcttttgaaaagtgattgatttgctttttatcccaaactgtccatatacccagtaaggcttcaaaaaaccagtcaacaatgagtaagtcaatcttatagattcttcttcctcgaataaaatacaaagaattagttccaataagtattttaactttgttaacaactgaaataccccataaaaaaagaacttgttgagagtatttctttaaaatggttacttgctgcccaggcaccatggctcactcctgtaatcccagcaccttgggaggccgaggcgggcagatcacgaggtcaagagattgagaccatcctgcccaacatgggggaaaccccgtctctactaaaaataaaaaaattagctgggagaggtggcacgtgcctgtagtcctagctacttgggaggctaaggcaggagaatagcctgaacccgggaggtggaggttgcaggttgcagtgagccgagatcatgccactgcactccagcctggcaacagagcgagactctgtctcaaaaaaaaaaaaaaaaaaaaaaaaaagttaacttgctgtatacctcagtgtaatgtccattcaaggagtattaaatgaggatttccctgcgaggacatttactgtattgctacttaaattatggaagacaatatatcttcaactttaataaaacctattcagaaaattaccaattcagaattcggagttcttatccaggtgctctaactaacttcagggaaattggaacaataagttatgttacatgcacactcaaattctttattttctccactttaagcaggaaagggtaaaaactgttttggtactcaagcccagccttacatactgtgtttctctctctgtctgcatgcatattaaagtggaaaaattgtatttatatcttagttattaccatagtacctatgaaccttatcaaaattgcttatttgactggtgttacagctgctattaatctaagtctattgtttttctattttagtagataatttagttttaaaatacgtagggtttgagagcagatatatttatttaatctgttttctctagtaactattgctgaagggttaggcattcagtattcctatttgtcctaattttgaagttaaaaattttggttacagatagatagagggagaaaagttcaaaatgagtgagagagaactttatgcaggttgagataatgcctaaaataatgagctggccagactgtggaggtactctttgtattttgtaacattgactttgggtaaatgctttttcactgttaataaatatatatcctgtatacaa

SEQ ID NO: 15484 - DNA, 390 bp, Homo sapiens
aataaggagtaaaacaatcttgtctatttgtcatccagctcaccagttatcaactgacgacctatcatgtatcttctgtacccttaccttattttgaagaaaatcctagacatcaaatcatttcacctataaaaatgtcatcatatataattaaacagctttttaaagaaacataaccacaaaccttttcaaataataataataataataataaaaaatgtattttaaagatggcctgtggttatcttggaaattggtgatttatgctagaaagcttttaatgttggtttattgttgaattcctagaaaagttttattggtagatgagtaaataaaatattgtaaaaaaacttattgtctataaagtatattaaaacattgttggctaat

SEQ ID NO: 15485 - DNA, 337 bp, Homo sapiens
aataaggaacaaaataaacccttgtgtatgtatcacccaactcactaattatcaacttatgtgctatcagatatcctctctaccctcacgttattttgaagaaaatcctaaacatcaaatactttcatccataaaaatgtcagcatttattaaaaaacaataactttttaaagaaacataaggacacattttcaaattaataaaaataaaggcattttaaggatggcctgtgattatcttgggaagcagagtgattcatgctagaaaacatttaatattgatttattgttgaattcatagtaaatttttactggtaaatgaataaagaatattgtgg

SEQ ID NO: 15486 - DNA, 1161 bp, Homo sapiens
cagcctccatcagggtcatcctacagcctccaagcgggctttcccctggacaaatgccactgcaacatttatgtgtgaagccaaaatcaccctgcagcagagccaatactgatcaactgaaagtaaagtatccatggagtcctcattgacacctcttttctgcacaaatactggaattcaatgtcaagagaaaatgacctctgctcaaaagggagaagagtctcaatttcagcaagtacctgtcatgaagggtatgaccttaatgatgtacataaaataaaacaaatgaagaaatggaaaacttttagaaattaaggtgtacttgaaaacgaatatctatcatatgacccctgcactccctctgtatcatctcaggaggtttcaggggcctgttgacatgaagtttcgaagtttcatgttggctttggaatggtagcaaaagcctttcctggctgagatgatgcttaaaacacacctcacttattgtacatgttggaaccaggacatgagagacatagaaaaacagaagtcatgaatgtaaattgaatgagaggcttaacatgcatgaaaatacagatggacctgcaggaaagtgagcaaacatcgctgagtttgttttcttgttcgggagaatggggccggggctggcctggcctcccctggatatactctatagtgcaccaaaaggataaagcatctgtacatgtatttttttattttttatcagaagtgcttagacaagaacagaataagcaggctgtttggatgctacttgtggttgaattgtgttcccccaaaatatatggtgaagtcttaacccccatccccgtgaatgggaccttgtttggaaatagggtctttgcagatatagtcaagatgaggtcacattggattagggtgggccccaaatccaatgactggcatccttaggagaagagagagttttggtaatagacacaaatgcagtgggaagaagaccaggggacaagaggcaagttggagtgatgcagccggaagggaagggacaccaaggatctccggccaccagcagaagccagcagagaggcatgggacaggttccccacaagccttagaaggaagcatggccctgacttcagaattccagactccagaactggaagaataaatgtctgttgtttt

SEQ ID NO: 15487 - DNA, 268 bp, Homo sapiens
gtggagacctttccaccagacacagctcgggcctgtgtaattgtaggagaagacactcagcagtgattgccatggcacagagccgtggtcattgttgctgttacaaagaagaaaaccatctgagttctaactccttggttgcttaaaagtagttcccaagagtctgagaagctatttctatttttaagagtcattttttgtaatttttgtaaaacaaaagtaccaatctgttttgtaaataaaaatcatcctaaaatttgaagttttt

SEQ ID NO: 15488 - DNA, 1949 bp, Homo sapiens
aactgggcgaatctacagaacaaagaacggcatgtgaattctgtgaagaatgaagtggaggaagtaacttttacaaaacatacccagtgtttggggtgtttcaaaagtggattttcctgaatattaatcccagccctacccttgttagttattttaggagacagtctcaagcactaaaaagtggctaattcaatttatggggtatagtggccaaatagcacatcctccaacgttaaaagacagtggatcatgaaaagtgctgttttgtcctttgagaaagaaataattgtttgagcgcagagtaaaataaggctccttcatgtggcgtattgggccatagcctataattggttagaacctcctattttaattggaattctggatctttcggactgaggccttctcaaactttactctaagtctccaagaatacagaaaatgcttttccgcggcacgaatcagactcatctacacagcagtatgaatgatgttttagaatgattccctcttgctattggaatgtggtccagacgtcaaccaggaacatgtaacttggagagggacgaagaaagggtctgataaacacagaggttttaaacagtccctaccattggcctgcatcatgacaaagttacaaattcaaggagatataaaatctagatcaattaattcttaataggctttatcgtttattgcttaatccctctctcccccttcttttttgtctcaagattatattataataatgttctctgggtaggtgttgaaaatgagcctgtaatcctcagctgacacataatttgaatggtgcagaaaaaaaaaaagaaaccgtaattttattattagattctccaaatgattttcatcaatttaaaatcattcaatatctgacagttactcttcagttttaggcttaccttggtcatgcttcagttgtacttccagtgcgtctcttttgttcctggctttgacatgaaaagataggtttgagttcaaattttgcattgtgtgagcttctacagattttagacaaggaccgtttttactaagtaaaagggtggagaggttcctggggtggattcctaagcagtgcttgtaaaccatcgcgtgcaatgagccagatggagtaccatgagggttgctatttgttgtttttaacaactaatcaagagtgagtgaacaactatttataaactagatctcctatttttcagaatgctcttctacgtataaatatgaaatgataaagatgtcaaatatctcagaggctatagctgggaacccgactgtgaaagtatgtgatatctgaacacatactagaaagctctgcatgtgtgttgtccttcagcataattcggaagggaaaacagtcgatcaagggatgtattggaacatgtcggagtagaaattgttcctgatgtgccagaacttcgaccctttctctgagagagatgatcgtgcctataaatagtaggaccaatgttgtgattaacatcatcaggcttggaatgaattctctctaaaaataaaatgatgtatgatttgttgttggcatcccctttattaattcattaaatttctggatttgggttgtgacccagggtgcattaacttaaaagattcactaaagcagcacatagcactgggaactctggctccgaaaaactttgttatatatatcaaggatgttctggctttacattttatttattagctgtaaatacatgtgtggatgtgtaaatggagcttgtacatattggaaaggtcattgtggctatctgcatttataaatgtgtggtgctaactgtatgtgtctttatcagtgatggtctcacagagccaactcactcttatgaaatgggctttaacaaaacaagaaagaaacgtacttaactgtgtgaagaaatggaatcagcttttaataaaattgacaacattttattaccaca

SEQ ID NO: 15489 - DNA, 1292 bp, Homo sapiens
ctgctgcttctgcattgctccgcgctcttgtgaaatactggttctgttttctttattccttttgcactctcggttcccacctttgtgttggagtttaccatgttaccctgtaattaaaaacaaagaataggtaacatattgtgccagtgttgcaacgttttaaactgctaacagaccttaaaatatccccctacctgggtcctcagtgctatgtttaaagtgctgcagggatggagtggcgttttcttattgctgtatgtattgtacatagtggagtagttagttacctgataacagtcttgttatttgggtctcttagaccttacctctcaactccctcaagagtaccagtctctgaagttataatgctttggtctctacattaggggcaagatccagtctgagagaagtctcctttgagaagggccaagaggctctttcctgagtgtttgctttcggtttgttggtatgcctgtattgctgggctgtgctgctgctcgaagcagatggttttgactgtctttttgctctttcctatataatgaatagatgagtgaaaggagttttctttttctctttagtacttacgtattgggattcctgtgtcttacagctctccctctccaaataatacacagaatcctgcaactttttgcacagctggtatctgtctggtagcagtgagaccccttgtcttggtgatccttactgggtttccaagcagaggagtcacatgattacaattgccagtagagttgttgtttggggtacaagatgagaagaaagaaaaacctacagcctttctacattctgacatgctaacagtggtttaagtttctaaagtgtttaccagatgctgaaggcaaggggagggagcagaagcacttatgtttacggatattttaaactctgttagagagcagcctttgaaaatccccaatttggttctgctttttgacctctctctaccttttcagggtaatctttgtggcacaaacgatagcatttccaagctttagagttttctgaattcctgcgccttcctgacgtgagccctgagcgatcttctatgcagttctgccatgcgtcctgttggtctctctgtgttctttgttacttgggtgcaatagcaacttccctaccccgtgcattccatctttcatgttgtgtaaagttcttcacttttttctctgagggctgggggttgggggagtcagcatgattatattttaatgtagaaaatgtgacatctggatataaaatgaaaataaatgttaaattaaatggacctt

SEQ ID NO: 15490 - DNA, 1497 bp, Homo sapiens
cacctccttggactctacctgtacagagcagcgtccctttggtttggcccagaggggcgaacaattgcaagggagagggcctggctgatcctggctcttttctccaggggtgtggggaaaatggcaaaggtcaactagctgcttccccagggaataggggtgtgagtacactcactagggggcagggcgctgctggttcctgggggactgggtgggaagggtggtgggaggagataagagatacaaactgagactccagcctctcctcctggggccacccaagtggggagaacccctagtgtcctgccacaacctgccttgtataaacatgtacattttttcataacattttgaacaaggtttatattgactcaagtttaaaaacaaaaagtgtgactgaaaaatttttacagagtctagtgcaccaatgctgatgtgaggggttgtgtatgcgagtgaagaaaatgtgtattctggtggcctgaagctttactggacaaggatgtgtgagagtgcagagatatatttagtgacacagtagagaggcaaaaaaaaagctaaaattccaaatgtatattttttcgtattgccctgtcctcacccagaaatgatcaattcctgttactgtattaacccttgttattaggaactctaagccatgccagaacaccgtccctccccttggaccgtgtagattctgccctgggtccctagccccttgcagtgataaataactccagctaaaagtgtttggtgttcttatctccaccctctttcctactttgcttaccctcatcctcagacagatgcctcttgcttttaaaagttggatttaacgacgtgttgtagggttcttggtctgtgtgaaggcagagaccagagagaaggaagtgagcccactgctctcctgggagcaatgtgggtgagtccaccagaggccctgctgtgtgtggccaataaattttagtcttccccagccctcgaggcagtgtgtgtggatgtatgcgtgtggatatttatatatgtaccctgcactcatgaatgtatgaactggaggaagttactacagtggaagggttcttaataacaaggtctacctagcatgaagtatttaacattctcccatcccttaaaaaatatacatttttataaaatgaaaaccataataaatgttttgaatattaaaaaaaataataacctacagaggaaaattaatggagacagctatttgccttgtactttttccacaattgttgctgctagttgtacacatctctagttcagctcttgcccacgggacactcatcaattaggttttatttttatttctttcctctacccccagaaacaagcctgttaattttttttccttctcctctggcgactgtgtgatgaatcctttcttgcgtgatcaggttgcggatagacttgtaagggtgtttgctgcatacagtgtaagcattgtgaccgccaataaacttcaatggtttctactga

SEQ ID NO: 15491 - DNA, 214 bp, Homo sapiens
ggagccacgccttggggggcacggtgcaaagtgggccttccctgggctgtgctgcaggcacagggtgcccctgtccagcccctccacctgtgtctgaatgcaacaggggtgttgcgggggcaacatgagagcccctcacccccaactctccactttcaggaggcccccagtgaagagccccacctcggggtcacaataaagttgcctggtcagg

SEQ ID NO: 15492 - DNA, 557 bp, Homo sapiens
tctgggaggcagggggcagcagcccctgggccgcctccccacccctttcccttcttaatccaaggactgggctggggtggcgggaggggagccagatccccgagggaggaccctgagggccgcgaagcatccgagcccccagctgggaaggggcaggccggtgccccaggggcggctggcacagtgcccccttcccggacgggtggcaggccctggagaggaactgagtgtcaccctgatctcaggccaccagcctctgccggcctcccagccgggctcctgaagcccgctgaaaggtcagcgactgaaggccttgcagacaaccgtctggaggtggctgtcctcaaaatctgcttctcggatctccctcagtctgcccccagcccccaaactcctcctggctagactgtaggaagggacttttgtttgtttgtttgtttcaggaaaaaagaaagggagagagaggaaaatagagggttgtccactcctcacattccacgacccaggcctgcaccccacccccaactcccagccccggaataaaaccattttcctgc

SEQ ID NO: 15493 - DNA, 1061 bp, Homo sapiens
tggcccccacctgctccgggacggcccccttacccctgctgcttcagggtttttccccggcgggttgggaggggcaggaggtggggtggaaatagggtgggctcctttcctcaggtagagtggggggccaaaacctctgcagtccccggcagtgagctatggactttcttccccctcacaaggctgggggcctcctgctctcgtccctggccctccctgcacagggcaaagccagtctgggctctggcacacagagttcatgtttgcgccctctccctgcccctcaccccagagggtgaggaggaatgaggggcattggtggttaggccggttggctgtcttgaacagctggagggaagatgcaggggtgggaagcggccaggcagaaagagctccaggctcttgtgtcgcccacccagccctcccatactcactcctgacagctttcctgcactgcagcctcctgctcctctgactctagtgggaacaggccccagctcagcctccggcagggaggtcacccctccacttcagcttgccctgacctccgctcgcaaaccccgagcttccaagccttttgctccagccctgcggcttccccagaagcctgggcttagggtggagatgccgcctacacacgatcctggccctccacctgcctccaggccacgaaatgggaattccagcactaagccaggcaccgggcagaagctgggccttccgcctcccttggatggggtcaagaggccaggcctggcacattttggagtgtcctggctaccagctctcacctacacccacgcacccccccacacactatgctctctcaagaatgtaatttattggggcccccccagctgctttcctcacctgcccctgccctaccttacacccccagcttgacttctttccagtccacgtgtgtatataatgatatctatatttttgcccaggtctgggtattgctcctgcccagaccctgacatccctttccactgtgtgtgtgaccatgctgggggagggggactctgcttggaattaaaaggttgcattgggtccct

SEQ ID NO: 15494 - DNA, 1448 bp, Homo sapiens
gccagcaccagggcggtgggagactcctgtccacacctctgccccagagctgcctcctgcctggcactgccgccacactcccctcctgggatggggcttctgctcccgggctcactcaaggagactgcggcatgttgaccacaccagactgggtttcagggaatgggcatgccaggtgccaaggagccaaacagatggctttccaggcagcaaggtccttggggccttcttggaggagcttgggtgacagccaggtgagcacccagaccccagaccctcatgtgctgtgtgcctggccccttctgtactggccatttgtggccagggccaagcctgtgactcaactccaggggcaagatggggagtgagctgatggctccgagactggtcaggagcccaggccagtgagatggggcctggagccttgtctgtgtcacattaggtaccatgggagctgctgagacctgacattttgtcccctgcctacatggcttggcccatggagaaggagcagtgaatgggatcgtcggggaagcccctcttcctgctctgctcccctggaaactgttgcaaaactcccagccgcctcatggcaaatgcccaaagcatgttccgcacccaggcgggggcccctgctaatgagaaccttggtgcagctgcagccaggaggggagcgggcccaggagccaggctcaggtccagctggttcctctctggcgccttctgaacccgtctcagcaggtccacagcacctgggcagaggtcagagaccaggggaggccgggccttgccctcccttctgcccagggcccagtgttcttgatagaagacccttctggggagccagggagctcaggggacagataagggaaggacgccccctgactccaggcccctgagcctggcgggaagtggctgcggcccaggcagccagtcctggtggtgttctccctgcatgccctccgtggctgggctgccaccccacccggcccgaatctgtcttgacctgcaggaatacacgggcggcgccaggcattacctcacagcgggactacacagttgctggctttgctcctgggcaaggaggagcaggccagagcctcttttgcttccttttcttgcccatgccgcttctagaagccaggcacaggttgccaagaggtgacacgaaacaggaggaaactcagtgacctctgcctctcccacattcctccccgcgggggaggacctcgccgctctgaagagcaccgtgcacatgtgggtgcacaaacgtgggtgttggtgtggacggggcgcagatctccgtggatgaactgcgtctggactcttagattcataaaatattcgagggtttgggagtcacagaccctcccctctcctcagtgcactttggcatttgcacggtgtcttccccggacagcacagcaataaatggtgtgattgcgtgg

SEQ ID NO: 15495 - DNA, 213 bp, Homo sapiens
ggtcagtggaagccccaacgggaaaggaaacgccccgggcaaagggtcttttgcagcttttgcagacgggcaagaagctgcttctgcccacaccgcagggacaagccctggagaaatgggagcttggggagaggatgggagtgggcagaggtggcgcccaggggcccgggaactcctgccacaacagaataaagcagcctgattgaaaagcaa

SEQ ID NO: 15496 - DNA, 596 bp, Homo sapiens
ccactgcctgagcaggggcggggactggagcctgctgcccttggtcgcctagactggatagtgggggtgggcggaaggcaacgcaccatccctctcccccaggccccaggacctgcagggccaatggcctggtgagactgtccataggaggtgggggaactggactccggcataagccacttccccacaaacccccaccagcaaggggctggggccagggagcagagcttccacaagacatttcgaagtcatcattcctctcttagggggccctgcctggtggcaagagggaatgtcagcaggaccccatcgccatccctgtgtctctacacgctgtattgtgtatcaccgggggcattattttcattgtaatgttcatttcccacccctgctccagcctcgatttggttttattttgagcccccattccaccaccccagtttcctggggcacaagtgtctgtgcatgtcccccaggagccaccgtggggagccgatggggaggggatggagaaacaagacagggcttctctcaggcccagtggccggtcagccacaccagggcaccgcagccaataaaccgaaagtgttacagcc

SEQ ID NO: 15497 - DNA, 351 bp, Homo sapiens
aaaagaggccagctctgcagccccctcggggacgcccccaccagctcaaattccgagtgcagaaaagaaaccggaccccccagtgaggcctgccaggcctcccggaccccttgttactcaggaacctcaccttggacggaatgggatgggggcttcggtgcccaccaaccccccacctccactctgccattccggcccacctccctctggccggacagaactggtgctctcttctccccactgtgcccgtccgcggaccggggacccttccccgtgccctaccccctcccattttgatggtgtctgtgacatttcctgttgtgaagtaaaagagggacccctgcgtcctgc

SEQ ID NO: 15498 - DNA, 648 bp, Homo sapiens
aatgagcaggtggaggaggacggcgcctgtgcccacggctgctgcctgctccagacattttgttcttgaatctgtgagacccagaaggggcccactgagcccactcactccagcctttggcaaccattgttccaggtcccccagggcttcctcccacagcagctgtgaatggcacagtgaccttcctgcagcgtggagatggcacatccttgctgctggggacttggccctgctatttatttttgtatttatgtcttaatctcttccactgatgcatcctccaagggtagatggggagggtctgtgtgaaggggccggcttctcttggtgcctgctgggttgcaggggcaggaagcgtgtggactgcagcttctgctggtgctccccccgtcctcctggaggcagtataggagagagagcaaggattgagtctgagacttaagcactcggtcccagcttgccagttcctggttctgtgtccttggacaaactacctaacctttctgagcctcctatacctcatccgacacaaatggggatgatacctacctccagggttggcgtgaggattcatgggctattatagatgaaaactgcacaaggccagaaccagcaggcactcaataaacgttcatgtcctttttctct

SEQ ID NO: 15499 - DNA, 566 bp, Homo sapiens
ctgcacagcttggagatgggctggtgagaagaaaggcggcctcagaactcagctgtgactcttgcagaatcaacagagactgaagtgggcttttgtgttataattttccctttctccaaccctgtagaataagatttctttcttgtcttttaaacctaatatcaccaagaagcaagtttctgagtaacagctgaaaatggccttgttgcctgtgtagagcaagttacggtggtactgccactctgcaggtggagcgggtgactctgggggaccattaagacctccagaccgggtgcggtggttcacacctgtaatccaagcactttgggaggccgaggcgggtggatcatgaggtcaggagatcaagaccatcctggccaacatggtgaaaccccgtctctactaaaatacaaaaaaattagccgggtgtggcggtgcacgcctgtagtcccagctactcaggaggctaaggcaggagaatcgcttgaacccgggaggtggaggttgcagtgagccgagatcacgccactgcactccagcctgttgacaaagcaagactctgtctc

SEQ ID NO: 15500 - DNA, 2987 bp, Homo sapiens
ggctctgccaagagcctgtgggactggaagtcgggccctgggctgcccgatcgccagcccgaggacttaccatccacaatgcaccacggaagaggccgttctatgaaaaactgacacagactgtattcctgcattcaaatgtcagccgtttgtaaaatgctgtatcctaggaataagctgccctggtaaccagtctctagctagtgcctcttgccctctcctcacctccttttctctcagtgactctggaacctgaatgcagcttacaagacaagcctgacttttttctctgattaccttggcctcctcttggaaccagtgctgaaaggttttgaatcctttacccaacaatgcaaaaatagagccaatggttataacttggctagaaatatcaagagttgaatccatagtgtggggcccatgactctagctgggcaccttggacctccagctggccaatagaagagacaggagacaggaagccttcccattttttcaaagtctgtttaattgcctattacttctctcaaagagaacctgaagtcagaacacatgagcagggtgagaggtgaggcaaggttcatcctgaatgggagaggaagtcgaaccactgctgtgtgtcttgtcaggatgctcacttgttcctactgagatgctggatattgattttgtaacagcacctggtgtttcacggctgtccgagtgagctaacgtggcggtgtggctgcctggacctcctctttcaggttaacgctgacagaatggaggctcaggctgtctgcaagaaaacagttggtttggctgtgattttgacctcctcttccccactgccatcttctaagagactttgtagctgcctcctagaagcacattctgagcacatttgagacctctgtgttagaggggagactgcacaaactatcctcccccaggttgagacgtctgcagagtggcaagctgacttgtagaaatggggtgccatttatgctctacttagacaagggtaatcagaaatggaatcagtgcaggcaaaatttaggatttgccgcttccataaatcaaagcatgactaatagggggtctctgaaatgtaagggcacaaacttcacttagggcatcgcagatgtttgcagaatggttggcctaatgattatgctacagatgggttttaaatgacccgtctaggttactgcttccttgcaaaaaaagtcgaatcctgcattgaattgaatatgaatttctctaactctctccagaaaatggatggagataacttgtctttaaaactgtaggccagccttagccactgtggagcccttgcctccgagctctggcttcaaggggagctcttctccaggttcactaggtgaattgatttattattatcatattgataatgtgagattctttagccactttggggagcctgtctctccagaagcctttcttagtggtgcccacagttggagcccaggggccatgtttgcaaactgattcatgtgcatggctgacaggagtactggttcactaccaatgcctgagcttttctcttacatagaaaaactgtccgctctcagtaatcacaagcagcatccgttttgttttctcttcttgggagacatctgtcaaaccaggaatattcttgaaaagaacgtgagcaggaaaaactgctggtgatactttttttaagttttgtttttatcttgcctgttggcttcaatacatttgagaatacgctgaagagggaaaatttcagtgatggagattctagattaaatatcaggactgatttcctggtgggattatggtccagttttaccaaagaaccaattccttgaatgttggaatctaactttttatattgtcattattattgttgtttttaaacggttctttgtcttttctgttttatttttctcaagctgctttcaggagctagcagaaaataactcaaagttgaagactctggaagattttgctttaacctaactcgcattgatgtattaaatttataattttagcattcccaatagatcctatcattccttaaacataataccctttgtcttggagtagaatactaagttagagttagtggatttctagtttaggagaggagctcaaaactataatctttaacaaattgaaaaatgaaatagggtgttttccctttttgtgcacacctatattaccttaagaaatttccttccatagacagctgcctcaaagggaaatcctctttaaaccgtagttggcgcagaggtcagtcctagtcggagcttaggaggggcggagacgctcacatcgtctgacttgagtcgccactgattgtggcaacagctttgcctcatgagtcaaaaattggcaatttcttttgatttttagttgttgaatttgctgtttcaagcatttgtacatattagaagtctaaggagtagcaagtcagtgggaggactttttcacccctggcattagcagcttcgacctcattttccagatgcaccagctcctattaataagttagcaaggaaagtgtatgtcacgtgcaggaacagtgaggcagggacaggggttctgctccttctcacttcaccaccggcacacagcttgcccctgtctttgcccccaaaggtattttgtgtctagtgtcaaattggagctattcttcactggtccttaaccttgggttttaaaaagaaggcttctctgtttgggtagcgtaagagctgagtatagtaagtcctcttccaaagagatggcaatatgctgggcatctactttaaaacaaagttgtctgatttttgcaagagaggttaggattttattgttcttatttccctttacagttctgcagttccatcacagtatttttttaaataactcaggtgtatgagaagaaattagaaaagaaaattaacttatgtggactgtaaatgttttatttgtaagattctataaataaagctatattctgtaattgttgagaa

SEQ ID NO: 15501 - DNA, 320 bp, Homo sapiens
cttagagtcctgccgtggctcaggtggatctaaaactcaagaacaaattctatttatttattattggaaaatgaaaagcaactcaaaacaacttcaacgtggaggtgcatttataattcagtctgcatttattctgtaaaaaggtggctgttttataaattcttttaatttatgttcaatatatataaaaagtgcatctgttttgtttttcccttttttctccataattttaagaaatgaatctgattgttgtcaacacatttgtgaagtcttgtgctataaaggggaacttcccctaataaaagggccttggaaacctc

SEQ ID NO: 15502 - DNA, 767 bp, Homo sapiens
gtggtctccatggcaacttggagccagccaggatggggtggggagcggtggcactcgtgggagggagaggacccccgcccacatcctccttccccaggacctgagctcccagcatctgcagacgacccccgcagcctttccctcggacccccctcgaagccccctggactgattcccacccacgactcacaggcattcctcccacagccctttcatttcctccccaccccactccccaaatacagaggtctgctttgaagcggagaccatttccaggccttattgagaccagaccccaagtcccccacccccatcctgctccagcgtttcctctaacagggaccagctctccgctttgcccccacggggttcctctaaccagaaccagcttcctagcctcgtagagaccaaaggccgcccccgcctgctggggttcctcccagcaccccagcttgctggctgccctctttgccttctggcctccagctgggtgtgggggggcggagcaaggcgggggacagacgcagcaccttcttagcgatctaggcctggcaagagctctggccccaaggcctcctcttcccaggggctgccaagtcctggccctggccctggcatatcaccccgcactgtggggccaggcaccactagcctggctcaaatattccccagggagactgctgtgtgctgcccgcctgcctgctggctctcccccagccccacatcccctctggaagagaatgtaaaataaacctggacacaaggga

SEQ ID NO: 15503 - DNA, 4219 bp, Homo sapiens
acctgaagatgcgcgggcacttctgggtgggtgacgagctgtactgtgagaagcatgcccgccagcgctactccgcacctgccaccctcagctctcgggcctgagcccgccatgccctcagcctgcctcactgctgggccagggtcatgcctatataagttggcatggcagggacaatggtgggcagttgctcttacatgagctaagtttggagacctgaggcccctttgtcctcgctgggtgggccaaggtctgggacctgtcttggactgtgggagactcaccctcaccttgccaggcctctcccctgcaggactggcattgcactagtctgaggtggccactgcctttgatcaacctttgtgtgcgagggtctaagtagggtcgaacacagaagtgggaaggagaggggtgggccaggggctaatggtgtcactgtgtaaagtttttgacatactagctctataaatatatgaatatggacaaaataaagtagatgtcccttccttctttttcctaccgccagccctgggtatgacctgctcccaccactgggtggagggtctttatttatgcaacatacgtttcttcttcttttccctccctcaaatcccacccctgccagttgcctgcacctgacatttcccatggaagggccttgcctcttttaggttgggagtcatgtcattccttaacctttttgtaaagatgcccgttttacaggaggacgcttgtgctatggagggaatgagattgtcactggaagctttggaggggatggtggagggcgccaagcggagggacaggaggaagaccaggagacccatccagccaagctggtgagacaacctctgatcctgaggaccggccgcccaccaagggttgggcccccggggccaggttgatctaccgacaccttccacttctttcctgggagagactgctggcttcattggtgattgatttggaggggggaaaaagggcagggtggctcaggctttaggcccaggtactggggaggcctgaggagccctcctggagctcaggaggccgaggctgccttaagctgtgatcatgccactgcattccagcctgggagagagagaggacctgtctgttgaaaaaaacacaaaaacaaatgaatgcatgtggccagtgccaggtgagctgccctgggggttcactggagttgaggcaggggacagtagtctcccctgccagcctaggattttgggcgtcattcacccactacccctagtgctagtcccagaggatgctgcggagggggcagcctcagctctcttttcagagaagatcaaagctgggcttcccagggtgcctggctggtccctgccggcagctttgtgctctccggctctttgtgaaaggaatcttggcgcagatgtttgtgttgcctcctcaggcacctgtagatataatttacaccatgatatcattgtctcaccttttgcctgggtggctgcctgagaaaggtctttctttttatagaaaagatcaaggctgtctggcgcgggactccatgagccccaggcgctggtcagaaacggggtagtctctttggcgccacctagtgtccagtttggcccatggcggggcccattcacggggcaacactgggcttctgggcacagcgggaatacagaaagatacagcactcctcatgccttcctggaggtagaaggccagtggcagcgactgagctggcatgaatgaataagaggatgtggcactgagcgccaagggctaccttggaacgcaccgaggagcgtcccgtgagttcaaagcagtggccgtgatgcaaaaggagggctgggtcttggagacgtggagaagaggaatgctgagtgatggggtggctgctggggggatgcttagctcagagcagtggctgatggggacactgagataagatcggaggggagctgtcaatgccagaagtggtttgaacttccccttgaggctctagggacattttgttttgagacatggtcttgctctattgcccaggctggagtgcagtggtacaatcttagctcactgcagcctccacctcccaggctcaagagatcctcccacagcctcccaggtagctgggactacaggcgtgcaccaccacacccagctaatttttaagtttttttttttttttaagagatggggtctcactatgttgcccaggctggtctcgaacttcgggccccaagccatcctcccaccttggctttccaaagtgttgggattacaagcgtgagctaaccttgcccagcctctgggaacacttggaaggttttaagcagagaagtgacaggttggaaaagatggtttggattattgatatggacagattcccacctgtatgtagcacgccatgctgggccagcagtgtcataggagtggagggggataagtggggactggggacatgtgaaatgatgggcattccagtgaggcatcgaatgccttctgagggctttgtaggttccagctcaaatccccctctggctcttgttctttggtgtggcagccatctctcctcccaggggtcctgagggtttcagcaccagggttctctgcagccacacaatcagcccggctcgggagcaaactcccctggaagaacggagttatgagttggtcagcagaggaggctggggacaggcagtttttggtcttttacctctgatcttgtccccaacctaagccagctagctgcgtgctcccactccctctgccgcacgccgcccgtctatgttcccggactttgtccagtgcagtgccctcttcccttcctgcactgaggagattaactgaagtgacagattagagttagaagtggcccaaaggagcatctggtacaaccccctttggttagagaagggaaagtgacttttccaaagctgcacagctagacagtcataatggctaagctctgggggtgcttttgatgtgctagggatacttccaatgctttaactcacttaatcctcacaacccgagataggtactgttaccatcctctctgcagacgaggaaaccgaggaccaggaggttcagtaaatggtccaagtactcctagctagtaaggaatggatctacagcctgcctcccaggtttctggcttgtggggggcagagtttgtccctctgtcatcagaggcagccttccaggcacagctctggtcacctctggtcacaactggaggtcaccacagccctccccagcgctctgtaggctctcagctttgtgcttcctcccacgggtactagctccagctgagcttgcaggaaacccacttcctgaagccaggacttccccatgggaagtgcaggggccactgggcagcctgagggctgaccctgctcaggacactgtctgtctcaggaactcatggcagtggtttaccttgtcaggagtgcatggacgggctgcccctcccattccttcaagcatcactcagagagccctggcctggctctaggcttgggactgcggctgccacaggaagggggcatccccctactttgggtgttgggtcagatcctgcccccgtgcccgccagggctcaggttcctctgagctggtcctgggccaggacgcatctgcatggcggtggtggggaggaggggtgcgccatggcctggaggggagtgtgtgttggggtgtgtgtgtggaggttcttttgagtcacacacaaagcattgtgctgagacactgcattcctgctggctgggcttcctgtttccagatgcattcctgtcccagagtcaccacagagactgtttggaatcccgccccacattctccaaattcagggcgcgatctggcaaaggctccctcccccaccctcttactttggagggagtctgggctccctcctacccagggagggctggcagggctctggcacggccggggtgtgattccacacatcttcttggtcttgcataaggcagttcctggagacccagcactctggttctctctctgcctgtgagaagcggaatgggtactgtctaggaggactgggcagggtgggggcaacccagaggacccatggctagcagggaagggcctgggcttgaatgtgactctgttgagacatggccagcaattctggcacttggctgtcattcggctggcctgcgcagagattggctgtgggcctcagtttccccattttataaagttttaaaatctg

SEQ ID NO: 15504 - DNA, 841 bp, Homo sapiens
gacctctcggtgcacctggtgaccctgggtggaggggacttgctgtgaagtcttcctcgccctctgccctcttgctgcttctccacattgccaggaaaagctgctgacgcctgccctcctctcttgagtcgagggctgaatctttctcctctaagcagtctggtcaggaaccttggtttcttgagaggcccccaagatgccgcagctccagggctcttcctcctcaccagaaatccctgggcttccacaatgtgaactcactcattgtcaggtgtccgtggagtgtttttggcatggtgacctgtctgggcccagcatgttgcagatgtgtatttatgcgcaatggtatgcatatctctgtgtgactgtcagtgttgcaagctggctggatccaaccatctcttctgaaataatgcatccaaagggttgatattctgggggaggtcactgcagaaggatggaactgacctttattccccagtgggcagttactgagctttcctcctcagagccatgctggcagccctgggacagagaacggtgtggctttggctgcctctgcatggaatcttgccccggactcctgaagactgcacaaggaatgaggaagatcagggacaacctgggaactgaataactttcaaagccagtgctcagcttctctgctccgtactagcgtttacaggtcttaattcaaaccagatgcctgtactagtttttagaccccaagtcaacctttctgagccacagcttcccgctgggaataatgatgcctgccctatctacctcacagacttgttatgaggataaagtgagattaaactgcctcaaagtgctttgt

SEQ ID NO: 15505 - DNA, 780 bp, Homo sapiens
cggcctcgcacggaactgccatcctgtgagggcagcggtggcgcccggcaaagttggagcccttgcggtaccagaaagcagcgagagcgagacctgggagccagggcaggggtggctgaccccatgctcagcctctaggggacggcaggccatcaggctgggggctgtgctatgtgggatggatgtgtgaggaaccccggttccacttaacaactaaatacaacatcttttgcacccctagaatgtcattttgccctcaaccttggtatttctcctggggcccttttagtcttgtgctgactttctcctgtcctcttccagtttagaataagacaggggagaaaaaggcttttcgagtgtgggacaaggtctgatgtcagtgaacggaactgaagagcaagacatggagcctggctggggctaagcagccccctcctccggatggcacaggctctgctaggttccggacacaggcttctgggggaagggtctcccttggccatcacgggaatggagtccatgctagaaagagctcagtgttgggctgggtttgccagtagaacactgcgttccagtcaccccggtcttgccagaagaaaccagcacctctttcccgtggctcctgtgttcagaatgtggtattggctctggcccagccttctcccctgttacccataattcttgcctctttccataatccgtggtttcagtttgactttgtatataaagttggggttttttttttttttttttggcttgttttttaaataaaccaaagtc

SEQ ID NO: 15506 - DNA, 2726 bp, Homo sapiens
gatgctgccaccctcttctgaccctgctgctgttgtccccatccgccttcacccctctgctcttccgcatcaccccatccaccttacagggaccagggggcccacgtaaccaggacccagagggtggagctcttcttaccagccaccgtggctcagccagagaggagctgagccctgtggagcagaacgggaaccacctgcagaggtccccagacccaaagcaggacgggagacaactgcttggaggagcgaagagccctggcattttatctctgggtttgagagccctagagtcaaagggaaagcctcccagcctccagggcttctctgtgtgtcttggttgctgctctggccagggaggcagccccactcccagcaagcagaagtgatcctcgagggtcctgcccctgttggccatatctttccaccgacggacttgagtgttgcatttgttttgtgggcatttccacacgaagcctactcacaccctcactggagaagtcagggtagaaattgagccttcagagcccaactcaaggcttctacatcctggggtgcagctgcaaaaggccagacgtggaaaggcctgtatcctgccagtgtccctccgtcccagggggctgtgctagcacagacctgagaatggggacacaggtcattcagagctccaggcctggaagcagtgcctcttggtgcaacaagaaacttctccctcaccccctcctttaccctcagatttggagatggtaaccaaaggaagcagctgggacaggtggagaaggaagtaggaatgagtgcacggcgaccccgtgctcctcagggccctcccctgcctctgggtggcactgctttttatagggtggggcaaaattagcaaaaaacaaaaaccaatgacaaccaaactgaaaccgaaacgaaaaatcaacaaacactctgtcctctatccctccaaagaatgaaaatcagaaaaagcccctgcctagctcacatttctataaacagaggcccccatgatgaggaggtgaagatttaggttgcagaatcgactccaatgcctttcaggaaaggactcggcacttctctgactgcggaggccctgaccctgccagctggctccgagggcaacacaggggcctggcctctagagggctggtgattgaggggcccgggctggcggcaaagaggggtttggtctcggggcttaaatggcaccagactcttgcttttgcccatctggagactgcaggctcccttccttaccctcagagagtgcttatggtgggtgtttttgcggggctgcaataggggccaaaagtcagggaaaggggcactgacctgtagtgaaaggccacaggacacagccttattactgctggggtgggataaggggaaggagaagagggagaatggagcaggaggaaaagcagagttggtctagagaggaggagggcggggctggaggaatgtgggggattgaaactagctcccagcccccatggggcagcagctgggccacaattgcccctttccgttttctaaccccgactcagatttcaccacccacactctttttaggtgtaaaagatggagtcccacggaggaggggcagagccaggaggcagtggggctgtgggctcagagctcaggagtcgccttacctgagagagatgttctagctgagagggcctggccctggggtgggctccaggaaaacgctggttaggcctgggattgagctaacctgaaacaaaggtagcaggcaggacctaatgaccagaggttaaatcctcatcaagagagaccaggcggctggaggacaagcggctctaaccctgggggcggccatgttgtccaggcccaggcccctccaggactgtggctgcctcccctccacggcctccagggcggctggctggaaagccacgcgtatgctgccctctacaggctgctcggcctccctgcagctcagcgcagcccagggctccaagtgaggcccagaagcccatgggcagggctggggggacgaagggggaacccggagcacctccacttctagggaagatggacagcgtgggggcacacctgggcctcccggaagctgtggacgaaagggagagcgggtcctccagggcaaggggaacgggaaataggtctcctaggtgcctgaagcgctgagcaacctgggtaccctggtggggatgcagggaaggccggggcagagaaagtgaaggtcgacccagggctgtaggaagccataggagagtgaccacgggattccctgagaaacagggccggccccccaacttcagggacccaccgcccattccccgagagctgtcggaaccagatgcaacccggcagcccagagaactctcctgggaggctgtgggtgagccaggccaacattggtgtccctgtccccagagggaggagcaggcaggagagagaggggaaggaggtatgaatcccagtccccaggaacctagctctttaaactctggggagtcggattcaggaaacacccccaggaggccaagcctgaaaacagaggggagggaggaaggaaggagtcccagcaggagcacagccctggtttcctgtcactcagagctgattcacaggaggaggggaggttggggggcgggagacaaaaaccacacctctttttatataaggtttcatatttaatttggtcatggattcataaatacataagtattttgtac

SEQ ID NO: 15507 - DNA, 404 bp, Homo sapiens
aagacttcactgtggaagaaattccttccttacctgaaaggttcaggtaggcgctggctgagggcggggggcgctggacactctctgccctgcctccctctgctgtgttcccacagacagaaacgcctgcccctgccccaagtcctggtgtctccagcctggctctatcttcctccttgtgatcgtcccatccccacatcccgtgcaccccccaggaccctggtctcatcagtccctctcctggagctgggggtccacacatctcccagccaagtccaagagggcagggccagttcctcccatcttcaggcccagccaggcagggggcagtcggctcctcaactgggtgacaagggtgaggatgagaagtggtcacgggatttattcagccttggtcagagcag

SEQ ID NO: 15508 - DNA, 1393 bp, Homo sapiens
gaccctcaagtgaaggaccctcatgtaaaagagagaccaggcttgctgggtgtgtacatagttatttaaacaagaaactctcagaatgtgtttggaagaggagaaaggagaaccactgattttatctggatgctactacttactacaggacagatagaatttctggaagcgatgctccaaaggcttgctcccagctgtatcatggacctgccttctcatctttatagtgccacgatttatacagtcctgtgtctgacctgtcatttcatagcctgcagttcttgccattggcacacttagatttgtcttcacccaccagcttcgttccagcccatgaaggggaaagatttgcagctttgccaaatctgaatcagttcccactcccccctgcggttttttagaggggtttatcctgtcgctaatgtcagttaaatagcttattcctgtcccacttgatttcactggtaagaatgagaatgaaatacttaaaggttttatttgaggggacttagctgccattttatggaaaaacatgtagtataaaaggtttttctccagggtcatttgacagaattctccaggtgttcagagaaagaggtcgccccaagtggcccagagtcgtgacagtccggaggggctggtgtggccggtgggcgctgcctcttcatctgatggagccaggaggtccgccggtgggggaaaggcttcttccgaggcttctgcactcgcctgggaagaggcccagtcactacaggaccctgagatgtccagaccccttatgcaaagaggcaaaattgttgccttggccccatcatggagtaacttaaaaatacatatctatcttccagaacaagccacacaacaacacacctcccctccttgagcctggcacacagcaccgggctctctgaatttggaaagtgtttcattttgtggcctactgctcggggcaggggggctgagccaggatgtgcaatagaagcaggggttgtcccctctgccagatctgtggggagctgcccaggccacccgtgcacctgtcctgcttcctgcagtccccactccctgcctcctttgagggactgggggacttggggtagggggacagacgggaaagggtctgaatgctctggcaatggcgagaagaagcgatcgccacactgccactctgctgcccagccaccaggatttctgcctggagccctttgccctgtccctgctgcctgaggtggcgtagagcagaggagaagaatttgctccaggccaggagcacaaatcgttgttcaatgaatttctctccaactcgaccttggtaaacggaaatgttgggggtgaagagaaacaatcactatttttttcttttttatctggtaaataattaaaagaaaaaccg

SEQ ID NO: 15509 - DNA, 693 bp, Homo sapiens
aggaagggatcatagaatcttttcttaaagtcattctctgcctgcatccagccccttgccctctcctcacacgtagatcattttttttttgcagggtgctgcctatgggccctctgctccccaatgccttagagagaggaggggacggcacggccgctcaccggaaggctgtgtgcggggacatccgaggtggtggtggacaggaaggacttgggaaggggagcgagaaattgctttttctcttcctccctgggcagaatgtagcttttctgcttcactgtggcagcctcctccctggatccttagatcccagaggagggaagaaaatttgcagtgactgaaaacagtaaaaaaaaaaaaaaaaaaaaaaaaaaaaaaaaaaaaaaaaaaaaatttatgtatataaaagttgcattacacagtacaaaatagatggataatgtttatcctttatttttctatgtagaagtttttgaatttgtgtgtgtgcttgtgcgtgtctacacctagtattacggctgggactctccagctgtttttgttgttgttatgtttttaagagggttgaattcttccatcaggtgaacgaaaaaggcaacaaagtaataaatcagtgaatgtggccggcagctgtgtttagcccctccagatggaagtttcacttgaatgtaaaataataaagtttatattttg

SEQ ID NO: 15510 - DNA, 808 bp, Homo sapiens
agcaacagctaagcaagaactaatggctaaattatcaacttggaaaactggaaaatctggatggcagagaaatatactatctatctcaccagtatttgctctcgactcaagaaggttaacattttctgattcatgttagactttgaagagactaaagaaaattttcaagaggaacatatgcctgagaacctttgcatgaatttaaaatttcaattatccattcttataagaaggaagatgattgtaaagaaatatctccgaagttaaaatctgtaataggaattgattcattctctaatgaaaacaaaacataaaaacatcacactaatcttggaggaataagaaaaattgtacatccattaaatgtacaattgattgcaacatcttgattgttttaaccattaacttgtcaaattacaatcacagttaagaaaatgatgtaaaattctgttttgtggatctctttcctagattagcttctgaaatcattattagctatatcatttgaggttttctacaatttggtataactaagaatttaaaaatgttttatcatatatatttgtataattaattactggcatggttaaagtggttttcactttttaaatggagaaaatttcagttaaattaataggataaaccaggttgcgaactggtgacctgtaggccatgtttgcactgcaaatatatttggtctgaatgatattgatattggacacatagtacttttacatgttttgaatgtattgctaatatttaaaaattgagagatcttgcataaacaatagattcccagctttgtcag

SEQ ID NO: 15511 - DNA, 400 bp, Homo sapiens
cagtgtttaaccatggtcaaaggaccattctgtcctatccttcttagaagctttgaactcaaaatcatggaaaggttttaagatttgaggttggttttagggttgctagatttagcaagtaaaaataaggatggccccgttaaattttaacttaaaattaacaagttttttgttaattttttgttttttgtctcagcatcagtatatcccatgcaatatttgaggtgtgctcatactaaaattatttgtgtatctgaaattcaaattaaactgggtgtctttttcttttcatctggcaaccctactaagatcataaacccttggaaatctgtgtgtgtgcgggtgtgtgtgtgtgtgtgtgtgcaggggtggcagaagtactgtgggatgggacagaaat

SEQ ID NO: 15512 - DNA, 715 bp, Homo sapiens
atccaaaagtctgcttcactgagatgctaccttgccaggacaagaaccaagaactctaactgtcccaggaatcttgtgaattttcacccataatggtctttcacttgtcattctactttctatattgttatcagtccaggaaacaggtaaacagatgtaattagagacattggctctttgtttaggcctaatctttctttttacttttttttttcttttttctttttttttaaagatcatgaatttgtgacttagttctgccctttggagaacaaaagaaagcagtcttccatcaaatcaccttaaaatgcacggctaaactattcagagttaacactccagaattgttaaattacaagtactatgctttaatgcttctttcatcttactagtatggcctataaaaaaaataataccacttgatgggtgaaggctttggcaatagaaagaagaatagaattcaggttttatgttattcctctgtgttcacttcgccttgctcttgaaagtgcagtatttttctacatcatgtcaagaatgattcaatgtaaatatttttcattttatcatgtatatcctatacacacatctccttcatcatcatatatgaagtttattttgagaagtctacattgcttacattttaattgagccagcaaagaaggcttaatgatttattgaaccataatgtcaataaaaacacaacttttgaggc

SEQ ID NO: 15513 - DNA, 214 bp, Homo sapiens
gcttgaagttggatatccaaaatggccgtgcaagcttaggctggggattctggatgcaacgtctttacaaccttacctagatatctgctactcacatttttggtagtgtttcaaacgttctttatccagacagacaatgtttaagagaaacaacttatttctgttaatatttaccggtagaattcacaccctctatcataaacatatgctgcag

SEQ ID NO: 15514 - DNA, 486 bp, Homo sapiens
gatttgagtccattgcaaaaggttaagccatatgacaatttcaaaatgcatgtgattggcagcttcaaaacagaacgggttctcccatgggggctccagacattgtattttactttgtgcaatatgaggggactgcatgcaagctcagggtgctccctcctcagtctttgggggattcaaatgcatgatattgtatgtacctgggaaatttgccgatttcctaagctgttggaagggggtcacttaaggggggatgtcttgagatgtattatgcaaagtaccaactgagccaaaaacaataaacgaaacacagaactcagccttaagaaagctatatatgaataattatgtttacctcactggtgcatttaaaatggacttttgttcatgggagaacctcgttgacatgcacagtttgcaatcttatgttgatcgatgttaaacgtcacagcagtacttgctcaataaaggtcatattggaaacat

SEQ ID NO: 15515 - DNA, 1804 bp, Homo sapiens
ggatcttgccctccctgcaacaccgagtgccttagacagctgctgcctgagaactggcctccagccggtgtcctcattccatggggctccctgctgactgcatttcctgatctgggatgatgtttaccagcccaaaaccagtcatgttcttccaaaagcttctctttgatagaattttgaggccatgccacctcccttccagtccacatggaattccagaatcagtcacagcctctgattttttccaagaagagattgccttcaccattgttaaatgtcagcctgtacggcagagacatggtggtctgcacaagcctggacaagttcttccatattgatggtggagcaacccctgtaatctactccttggaaggattttttgctttgcttatgaaaagctgtgcttgagacttaggtacttttctcacgtggacacactgatcccatcccatattgcatcttggaagagatggatatcaagtacactttggtagctgaaataatcatatctttctgatgtctattgtatctcctttgaggaaaagaacacacatttttaatggagattggctgctttcaggtatgtgtgtctatcattgaaagagcatggactcaaacatcagccctgagttcttgagtccacccaactcccatcttcttgtggcacaggaaagctgccctctccctctcccaccacactcctgactaatggccttcactgcgtcgcagtcactccttccctacggacttctttgaagctcttccttttgcacatacggctttttttttttttttttttttttgtcctattacctcctctgagcgcaaatcactggctacaagggacttaccagtctggattcagcagtttcttttctaaaacccatttgggtgactcagcagccgcatctgctacctgattttatcctggagaatacagtgcaatatttctctttgattatttattcctcttgattgtggaattaatttgattgcttgctaatggtactagtagtactcctttcagaagaaaaaatggagcgatttaggtgaccaaatattacatacataaatagccacatgaagttttagacgtttggacttgaagcctcaaagatcaaccaaccagtccccttatttagtaaataaggaaattgaggctacacacagaaaattgtgctacagattattactaataacccagcttgctaaattaggctatacctaggtaatctctagaagacaactctgacagactctttaatatttacccctggttggaacaatatttgaaatgtcccagatatttctatgctacttagatatttgtggcaaagcagaaagctttttgactgtgaaggcagaggtcagcactgggggaaacttgctggtggtctctcccacaaccttgcccagagtcctttccactaaggaggtgaagagaacagagaaagagatttccatttctgctgccagagctggtatttgcctgcctgattctctgtgtttcctgtttcaccgccaccctttcaggagagaactacaccagttcatcatgagggtcagggaagcaaaagctctcagatgtgtccagggcgttacttaagaaatgagtatgcagattctggaaggggtgtggaaaaggtgatcctttacccccacccaggaaaacctgcattgtgctagcatggaagaatcatgggctttggaattaaacccatttggtggaattaaacccatttggtttcaaatcccagttatgacatctgttaactttgcaaactcacaaaaattatttgaaatt

SEQ ID NO: 15516 - DNA, 716 bp, Homo sapiens
ggttggcattcctagcagaagaacccacttcctgcttagttgagatagttgaatctagcattcgttcctataaaagagagaggtccattgtggcgcccctttccagtgtttgacagtgtgccattcgacaacacattgttatagctacatggagaaagctctgtggattcatcactgtggtgttctccatgtctgctagccatttaggtaagggtagggcacttttaatttaaatgacttcttgcaccatcttgcctaatggactagattggactgtatcaacattgatttactccactttttatgccttccattgtgatgacgtcaaacacagtgaaagccttcagtcatgctatgggatttaattgtgtatcctcattactgtatcatttgtggggtacaccccttccccctttttttaaattaaatacagctcattcttactgtggcttgtagcattcctcctcttctggcctcctggactgctccccttcatctcttacccttgccccctccacccggtcttggtggtggtatattaaaaaaagaaagaatgaaagcacacaaaatgagtcagtttggggtcagtggtataaagggggtatatgttgcaaacaaatgttttagtaacagttggctgtaatcactcctcgccgtgtctggcactgaaaataaggaaaaaaaacctactactgaataaaagtgacaaagaatgg

SEQ ID NO: 15517 - DNA, 171 bp, Homo sapiens
ttgacatttcctgcagagtctgtggcaagagggaaagtaaccatctatgctgaaatgatctgtctagttcccattctctgttcaacctcagtgtttcaaaagttcctaataaataaactcatttgagttgaacctacttttatgtagaaataaataagtttcttcatcatt

SEQ ID NO: 15518 - DNA, 2716 bp, Homo sapiens
gggaaaggaaaagcccctggaaatgcgtgtgacctgtgaagtggtgtattgtcacagtagcttatttgaacttgagaccattgtaagcatgacccaacctaccaccctgtttttacatatccaattccagtaactctcaaattcaatattttattcaaactctgttgaggcattttactaaccttataccctttttggcctgaagacattttagaatttcctaacagagtttactgttgtttagaaatttgcaagggcttcttttccgcaaatgccaccagcagattataattttgtcagcaatgctattatctctaattagtgccaccagactagacctgtatcattcatggtataaattttactcttgcaacataactaccatctctctcttaaaacgagatcaggttagcaaatgatgtaaaagaagctttattgtctagttgttttttttcccccaagacaaaggcaagtttccctaagtttgagttgatagttattaaaaagaaaacaaaacaaaaaaaaaaggcaaggcacaacaaaaaaatatcctgggcaataaaaaaaatattttaaaccagctttggagccacttttttgtctaagcctcctaatagcgtcttttaatttataggaggcaaactgtataaatgataggtatgaaatagaataagaagtaaaatacatcagcagattttcatactagtatgttgtaatgctgtcttttctatggtgtagaatctttctttctgataaggaacgtctcaggcttagaaatatatgaaattgctttttgagatttttgcgtgtgtgtttgatattttttacgataattagctgcatgtgaatttttcatgaccttctttacattttttattttttatttctttatttttttttctctaagaagaggctttggaatgagttccaatttgtgatgttaatacaggcttcttgttttaggaagcatcacctatactctgaagcctttaaactctgaagagaattgtttcagagttattccaagcacttgtgcaacttggaaaaacagacttgggttgtgggaacagttgacagcgttctgaaaagatgccatttgtttccttctgatctctcactgaataatgtttactgtacagtcttcccaaggtgattcctgcgactgcaggcactggtcattttctcatgtagctgtcttttcagttatggtaaactcttaaagttcagaacactcaacagattccttcagtgatatacttgttcgttcatttctaaaatgtgaagctttaggaccaaattgttagaaagcatcaggatgaccagttatctcgagtagattttcttggatttcagaacatctagcatgactctgaaggataccacatgttttatatataaataattactgtttatgatatagacattgatattgactatttagagaaccgttgttaattttaaaactagcaatctataaagtgcaccaggtcaacttgaataaaaacactatgacagacaggtttgccagtttgcagaaactaactcttttctcacatcaacatttgtaaaattgatgtgttatagtggaaaataacatatagattaaacaaaatttttatcttttttcaagaatatagctggctatctttaagaaagatgatatatcctagttttgaaagtaattttcttttttctttctagcatttgatgtctaaataattttggacatctttttcctagaccatgtttctgtcttactcttaaacctggtaacacttgatttgccttctataacctatttatttcaagtgttcatatttgaatttctttgggaagaaagtaaatctgatggctcactgatttttgaaaagcctgaataaaattggaaagactggaaagttaggagaactgactagctaaactgctacagtatgcaatttctattacaattggtattacaggggggaaaagtaaaattacactttacctgaaagtgacttcttacagctagtgcattgtgctctttccaagttcagcagcagttctatcagtggtgccactgaaactgggtatatttatgatttctttcagcgttaaaaagaaacatagtgttgccctttttcttaaagcatcagtgaaattatggaaaattacttaaaacgtgaatacatcatcacagtagaatttattatgagagcatgtagtatgtatctgtagccctaacacatgggatgaacgttttactgctacacccagatttgtgttgaacgaaaacattgtggtttggaaaggagaattcaacaattaatagttgaaattgtgaggttaatgtttaaaaagctttacacctgtttacaatttggggacaaaaaggcaggcttcatttttcatatgtttgatgaaaactggctcaagatgtttgtaaatagaatcaagagcaaaactgcacaaacttgcacattggaaagtgcaacaagttcccgtgattgcagtaaaaatatttactattctaaaaaaatgagaattgaagacttagccagtcagataagttttttcatgaacccgttgtggaaattattggaattaactgagccaaagtgattatgcattcttcatctattttagttagcactttgtatcgttatatacagtttacaatacatgtataacttgtagctataaacattttgtgccattaaagctctcacaaaacttt

SEQ ID NO: 15519 - DNA, 2471 bp, Homo sapiens
agctcctgggctgtgccgtccactggggactggggatgggacacctgaggacattctgagacttctttcttccttcctttttttttttttgtttttttttttaagagcctgtgatagttactgtggagcagccagttcatggggtcccccttggggccccacaccccgtctctcaccaagagttactgattttgctcatccacttccctacacatctatgggtatcacacccaagactacccaccaagctcatacagggaaccacacccaacacttagacatgcgaacaagcagcccccagcgagggtctccttcgccttcaacctcctagtgtctgttagcatcttccttttcatggggggagggaagataaagtgaattgcccagagctgcctttttcttttctttttaaaaattttaagaagttttctttgtggggctggggaggggccggggtcagggagagtcttttttttttttttttttaaatactaaattggaacatttaattccatattaatacaaggggtttgaactggacatcctaatgatgcaattacgtcatcacccagctgattccgggtggttggcaaactcatcgtgtctgtcctgagaggctccacaatgcccacccgcatcgccattctgtagtcttcagggtcagctgttgataaaggggcaggcttgcgttattggcctagattttgctgcagattaaatcctttgaggattctcttctcttttaccatttttctgcgtgctctcactctctctttctctctctagctttttaattcatgaatattttcgtgtctgtctctctctctctctgtgtttcctccagcccttgtctcggagacggtgttttcctcccttgccccattatcttttcacctcccaggtctaccatttcatggtggtcgttgggtccgcctaaaggatttgagcgtttgccattgcaagcatagtgctgtgtcatcctggtccatgtaggactggtgctaaccacctgccatcatgaggatgtgtgctagagtgtgggaccctggccaagtgcaggaatgggccatgccgtctcacccacagtatcacacgtggaaccgcagacagggcccagaagctttagaggtatgaggctgcagaaccggagagattttcctctgtgcagtgctctctggctaaagtcacggtcaaacctaaacaccgagcctcattaacccaagtgaaccaaccaaagtcaccagttcagaagtgctaagctaataggagtctgacccgagggcctgctgcttcctggttaagtatcttttgagattctagaacacatgggagctttttattttcggggaaaaaccgtatttttttcttgtccaattatttctaaagacacactacatagaaagaggccctataaactcaaaaagtcattgggaaacttaaagtctattctactttgcaagaggagaaatgtgttttatgaacgatagatcacatcagaactcctgtggggaggaaaccttataaattaaacacatggcccccttagagaccacaggtgatgtctgtctccatccttccctctccttttctgtcacctttccccctagctggctcctttggacctacccctgtccttgctgacttgtgttgcattgtattccaaacgtgtttacaggttctcttaagcaatgttgtatttgcaggcttttctgaataccaaatctgctttttgtaaagcgtaaaaacatcacaaagtaggtcattccatcaccacccttgtctctctacacattttgcctttggggatctggttggggttttgggttttttgttgttgttgtttatttgttattttaaaggtaaattgcacttttaaaaaaataattggttgacttaatatatttgctttttttctcacctgcacttagaggaaatttgaacaagttggaaaaaaacaatttttgtttcaattctaagaaacacttgcagctctagtattcacttgagtcttcctgtttttcctgtaccgggtcatggtaatttttggttgttttggttgttttcttaaaaaacaagttaaaacctgacgatttctgcaggctgtgtaagcatgtttacctgttggcttgctttgtgtgtctgttaaatgaatgtcatatgtaaatgctaaaataaatcgacagtgtctcagaactgaataactgcagtgacttgatgctctaaaacagtgtaggatttaagaatagatggtttttaatcctggaaattgtgattgtgacccatgagtggaggaactttcagttctaaagctgataaagtgtgtagccagaagagtacttttttttttgtaaccactgtcttgatggcaaaataattatggtaaaaaacaagtctcgtgtttattattccttaagaactctgtgttatattaccatggaacgcctaataaagcaaaatgtggttgtttcagg

SEQ ID NO: 15520 - DNA, 877 bp, Homo sapiens
cggagggtgggggccacctgcctgcgtcttccgcccctgcctgccatgtacctcccctgccttgctgttggtcatgtgggtcttccagggggaaggccaaggggagtcaccttcccttgccactttgcacgacgccctctccccacccctacccctggctgtactgctcaggctgcagctggacagaggggactctgggctatggacacagggtgacggtgacaaagatggctcagagggggactgctgctgcctggccactgctccctaagccagcctggtccatgcagggggctcctgggggtggggaggtgtcacatggtgcccctagctttatatatggacatggcaggccgatttgggaaccaagctattcctttcccttcctcttcggccctcagatgtcccttgatgcacagagaagctggggaggagctttgttttgggggtcaggcagccagtgagatgagggatgggcctggcattcttgtacagtgtatattgaaatttatttaatgtgagtttggtctggactgacagcatgtgccctcctgagggaggacctggggcacagtccaggaacaagctaattgggagtccaggcacaggatgctgtgttgtcaacaaaccaagcatcagggggaagaagcagagagatgcggccaagataggaccttgggccaaatccgctctcttcctgcccctctttctctttcttcctttactttcccttgcttttccctcttttcttactcctcctctttctctccccaacccccattctcatctgcacccttcttttctcatgtgtttgcataaacattcttttaacttctttctatttgacttgtggttgaattaaaattgtcccatttgc

SEQ ID NO: 15521 - DNA, 445 bp, Homo sapiens
aacgcagcgtgtgcccacgctcagcaggtgtgccatccttccacctgctggggcaccattcttagtatacagaggtggccttacacacatcttgcatggatggcagcattgttctgaaggggtttgcagaaaaaaaagattttctttacataaagtgaatcaaatttgacattattttagatcccagagaaatcaggtgtgattagttctccaggcatgaatgcatcgtccctttatctgtaagaacccttagtgtcctgtagggggacagaatggggtggccaggtggtgatttctctttgaccaatgcatagtttggcagaaaaatcagccgttcatttagaagaatcttagcagagattgggatgccttactcaataaagctaagatgactatgctgctggctgtctttgttcttggagaggtggagtgactgttcacggag

SEQ ID NO: 15522 - DNA, 1669 bp, Homo sapiens
ggagggctgtggcagagccactgtcacacagaatgccggaggggcgcagagcagatccaggccccagaaagcctcacctacagacagctgtggtcctctgattccaatgagggggctccccagggctgaccctgcagctttgggctcccccatagtgactgtgccataggaaagcagcccctcctcacacatacatgtgcacatgcacacacatgcatgcacacacatgcacacatacacgcacatgcacacatacacatgcatgcacacatacacaggcatacatgcatgcacacacacatgcacgcacacacacatgcacacatacacgtgcacacatacacaggcacacatgcatgcacacatacacatgcacacacacatgcacacatatatgcacaggcacacacatgtacgcacacacacatgcactgcacacatatccatgcacacaaacacatatatacacatgcacatacacagatttttctgctggccaggtgggccaactgggtttccctggctgggcaggaggagagggcagaggaagaccccctctcctgtgactgagcctgccagggaggcagctacctcgggaggaaggtctcacatctgtctctgggcacccatgctggccagcagtttcccagggctccctggggttgaaaagccccaaggaaacctttgcgggtggggcgttactgccaaaactccagaggcaaagtggacctggcaaccacaagaccctccccataagcaggggaccagcatacccgggagctgtccctgtctgtcacagcacagtggggccacgaggctgacattctctggccttgcacacagtgccccctgagaagttcaacatttatttcttcacgtgtccagaaaattcctcaattcatccttgcctctgcccttcaggagcagcctggaaggaatccaagcaggagtttcatctgcatgggggcactctgcaggccctggaacattgggcctgagtggagatgggagacagaggcaggccagaaggttctctctgcacagctgcctcccttgctctccctgaggctggcctgccccattccccaagggggctcctctggagtggtggggaggattaggctgcagaagggccaaccccttgcaacagggcagctctcgcctcccgcacacggctctcctgatcacagctgcatgccgaccttgtcccaccgggacccacaatggcccgagccctctttgcatgggcagccagctggactaggagtgggaagggcctggacactcacagaggccccctctgtcatcactccttggcacccaccaacttcctgcacacactggcagagaggggcgctgggaaatcaccccacagggtggaggtctcctgttggctacactctaaagctgctttgccttcatgttcaaacagattcaggcaccaccccctccaccgcccgcaaggttagggcatagagttgtctccttcccaacacggacccagagagcagcccttccctgctcaaagcctttccgcaccctcctgactgtcctggatgtgcaactggtttgcactgcacaccccacggccatgtaactctcctgtccacatatgataataccattctgcatagtattactgactcagtaaagagctatttccaggagt

SEQ ID NO: 15523 - DNA, 169 bp, Homo sapiens
tatgaagccagccataaagcccaggatgaccaagaatataatttgaaaatgaatttgtttactatccttaatggtaagcatcaccttaagcacatattatgccttgagacactagccaattgtggtacatgaaaataatttataaataaataaatttacctatattagg

SEQ ID NO: 15524 - DNA, 1467 bp, Homo sapiens
agctgatttcagttataaaggagttactatctggataagttcaaagagctccttattataaaatacaaactatttaatatcaaaataaaaaataccgagactcacactcatacacacacacacacacacgcacacacacatatcacagttttgttccttatgagttgaaaagtcaggaataaatttgttgaaaattatctggggattcaaaggaaaaatctttgggtgattccctgattagcactctgaatgtttaattatgaaactttgtagctataactggaaaattacctgactctttgtaagagtattaaatacaaagtgatttttctctagaaatgtgacctggtcttttataaagcccactcttagaccaggattatctaatgccacatcagaagcaaacaggcaaatttaaacttgggcaagtaatttctgtgcccaatttgtaaagggaattcctgaatttttttttttttttaatagaggcatgggtctcactgtgttgcccaggctggtctgaaacttttgggctcaagcgatcctcccaaaacgctgggattacagtcatgagccaccgtgcccagcctaattcctgacttctctatacagagtcttcacttgataggcactcgtctgtagtaactcagtttgaatatctttagaaaatgtttagaatttatttgtaacaagatggtaaggaataagattatcccatatgcatttctgtagagcagaatttgatagcttagtgttcaatctttttgaaaataaatgtttacctgtcatcagatttaattaaaattatacttagtaattgcactattacttagttaatttttgttgtatggaaatattggtagtactactttgggaacctgttactgacaattgatgtcattaacaaaatgcctagttggattagatgttttcattttctaattttttgcttgtttaaaatgcaccttacttgttctgagatacctggcaaaagtctttacaaaatgtatggtaatagaaccaaggttagtaaatatacataggctggtggatgagagaccatggaactgtgtaaatacacttaaatgttcacacatttttctagtgtaattcttggatactttaaaaagcaaaacattgttcaaattgttttgattctgaaaaatcattcaactgctaactggcaataagactctaggcaagtcgttttccagattgtaattatatgtagaaactattcatctgcattcattttatttgcctgtaagttaacatgtttccaaaatttaaaagcctgggtccccaaaagaatgtggaagtattaaaatgtatgtaattatgcaaacattttaatgctattttctgcacttatttcttttaaatattttatttaaaatttttaattaacattttgtttgcttaatgcttttgttatgaatcaattaaaattctttattttatacaact

SEQ ID NO: 15525 - DNA, 1424 bp, Homo sapiens
tggccacaccagtccactcttctgcagtatcctccctggcagaacacggagaatcaggatttcttaaatactcaacagagaggctgagcagagcaaatggggggcttcaccctcatcccgcagctgcagagactggaaactgccttcaaggccacggctggtcatctgctgaccacaccccagatccgccctctcctgcgtgcaccccaaaaaatcacttgcgtttttgaggcttaaatcatctatccagtttctacattttgcatgaggcctgcaggtggcctattttgactcagacggtgaaaaaagcaaattaactcatttggacaccataactcatgcaataaaactgattgtcattcgaggagcaaacttaagagtagtttatttatataccctggggacagaaagtcaggttgaaacaggaaaaccaccagactctaatctcagccctttaacgacatacgcattggagcgcaagttaggaaaatgagcttttgttttcatggaaatcattctgattacagtgctgatgtttagaaataaatagcagtgtgactgggaaagaggaattgcagttgtgggggtgtgagcctggcagcagccagccagcagcctctcccaggcgggagtctaccatccgagacggcgatgacaaagagcttcattccacattctttgttatctctacttcccaccctcttggcaactacagagcagtgtgggcagccccaagtgtggtccccagagagcgtttggctttcctgtctgtctatcctgagcgggtggagtctcaggttgtgtgcccctaaatcaagatttgcttccacagaagccattacttgcaattttttttttttttctgagaaagtctcgctgtgtcacccaggctggagtgcagtggcgcaatctcactgcatcctccgcctcccgggttcaagcgattctcccgcctcagcctcctgagtagctgggattacaggcacccgccgctgctaatttttgtatttttagtagagatgggggtttcaccatattggtcaggctggtctcgaactcctgacctcaggtgatcaacccaccttggcctccctaaatgccgggattacaggcatgagccaccgctcccagcctttgattttttaaggtggattttggttgttataaatggagaaaggtaagagttcaagttcaacccgtgtgtgaaagcaaaacaatggaaaacaggattggcttcttcaaaggctcctcttgtagaactgcctctttgaaatttcgaggtaatctactttggagactctgcctggagagggtcagttcctaagttaaaagcatcgcttaaccttggctcctgtggcattttacaaaggtttaaaggaattgattcctctgaaagggcctgaaaataaaaagtctttaacata

SEQ ID NO: 15526 - DNA, 408 bp, Homo sapiens
gcgtccaggtgatcccccaaacagcatgtgctcagccccagacctgccgcctgggaatcaggattccttcttccccaaggcactgagcgcctgcagatcccgcaggcttcgtttgcctccagaaccttcccgtctgattgttcctccccagccccctggcatgtttcaccacaaccctgttgctacatcagagtgtatttttgtaattcctctagctaccatttcaatagccccatctctcctgctcacccgcctcttgccccttctaggggcaggtgaaaggaataggaaattgaacctggggttttgacttgccactgccataacttgtttgtaaaagagctgttctttttgactgattgttttaaacaacgatttctccattaaacttctactgagcaaatggtt

SEQ ID NO: 15527 - DNA, 1431 bp, Homo sapiens
tttgtcttgtctaaggtggaaatcttgtgctgtttaaaaagcagattttattctttgccttttgcatgactgatagctgtaactcacagttaacatgctttcagtcaagtacagattgtgtccactggaaaggtaaatgattgcttttttatattgcatcaaacttggaacatcaaggcatccaaaacactaagaattctatcatcacaaaaataattcgtctttctaggttatgaagagataattatttgtctggtaagcatttttataaacccactcattttatatttagaaaaatcctaaatgtgtggtgactgctttgtagtgaactttcatatactataaactagttgtgagataacattctggtagctcagttaataaaacaatttcagaattaaagaaattttctatgcaaggtttacttctcagatgaacagtaggactttgtagttttatttccactaagtgaaaaaagaactgtgtttttaaactgtaggagaatttaataaatcagcaagggtattttagctaatagaataaaagtgcaacagaagaatttgattagtctatgaaaggttctcttaaaattctatcgaaataatcttcatgcagagatattcagggtttggattagcagtggaataaagagatgggcattgtttcccctataattgtgctgtttttataacttttgtaaatattactttttctggctgtgtttttataacttatccatatgcatgatggaaaaattttaatttgtagccatcttttcccatgtaatagtattgattcatagagaacttaatgttcaaaatttgctttgtggaggcatgtaataagataaacatcatacattataaggtaaccacaattacaaaatggcaaaacattttctctgtattcattgttgtatttttctacagtgagatgtgatcttgccaaagccaccagaccttggcttccaggccctcctgtagtgagttgattgtctgcacttgccttgcccaatagccagtaggctacagcttttgccccacacccttattttcagattctggatcattcttgtttacaactgaaatatatataacctcagtccaaagtggtgattgatttgagtatttgaaaattgttgtagctaaatgaagcatgattagtcttagtatgaatatcatttaatctttaaaaaatcaagtaaaaatgtttatctgataatgtttaaataatttacaatataaactgtaaaacttattaggcatgaaatcaatcagaagagaaagaaaaatgctggaacatgcttgatgtattatgtaaaaagcatatttaaacaagggtcctcaaccctgactgcagataagaatcacttgggttacttcagatgcctaacaccttcctctcatacaaataagaattggtagctttctt

SEQ ID NO: 15528 - DNA, 2819 bp, Homo sapiens
gggcagcgcacggtctggggaagaggatgagcagagggaggaagatggctcccaaggttcctaggcattgcaggaccttgggcacatctgctggtgggtggcccagagcctctgctggaaggggcagcaggaggagtggaaggaaaccgctgcctttatcttgaagtcagccacactgggcctggagccctgggcggagtccccggggttccccacacagggcactgactgatagcttacactgaggactgtggcgactctgcagagtcactcacaccgttcgtacgcccaggacagctggttcgtggtttttacattcaataacaactattatgattatttaaaaagagaaagtttcagatttgccattcaaggcttatttatatatatgtgtgtgtatataaatacatgcacacacttgcatacatatatatttttggctgggggagtgtgagttttgcctttctaagggagggaccgcgcaggctcctttgttctgtattctggcggagatgggtcctggccttgtgtcactggcttatccttaaagatcatctcccatcctccccagcgccatctgtgtgcagcaaccagaaagggatgaacttggccctcttgcgggcctggacaaggtctcttccttaccctttctgttgccagtcagcaacctgtaactcacattctcttcccagtgaatccctgggagcgcctgaccctggtgggctgttcagcttcctgctgctggggccagcgatttttgaggatttatctttaggccaggcttgcctccgtacttatccctgctctcccatttctctcttgtttgagagagaatgaggaagcaaagagtgagaaagaataggggctgaagacgccactcccagatggctctttctatcctgctcttctgttgaaacacacgtgctgtgggcctcaggcgtttctgaagtgctctttcttggattggacaggagatcagcagcgtgcacatctgctgtggtctgaagtggtttgcaggtcagcctcctctccctagtgtagagcaagccagtgtccttcgaggaacccacccggctggccgggaagttttacagcaaggcgcctgccttgggataattccttggtgaaattcaccttccccccgcctctgtctggagccccatcctgtgttatctgtggtttttggacccctaatgtcagcttggctgtaggactccccgaggtttggtatgtgctagaacaatgggaggctgtgatttgctgtgtaagctcacatccagccttggaatctaacgggcattcacaacccgagttaccactttccactccctgcttaggattctgttccctgggctgaaactgaaataagctaattttttgggtcacggtggcagtaggggaacctaggagggtgtgagtggcatttgtcagggatttagcccatgacgtgtttcttgaaccctactttctggaagtggagttgactctggaagttttctagcaactgaacaaaagctcaggtttgtcctggtcatgcacatgccttaagccagttccgtcttccctagaccttggcatcctgtgcttctatttcttggaatacgttctcctctgacctgcctgtaccacgtgggtcctcttcaagtactgttttgaagctgggctcttttgtgtagctcccacccacctgtagggctagctcggcttaagggaactctccccattggcaaaccggacccggccgccgccaggactgtgtttccaaaggttccccgcccccaaccccagcatcagcctgtagctcccctgctgaggcagtgtggttatgttcccagcagtgggggtcagacgcccttcctcagaactttctagttgccctctacctgactcctgacttgtattccttttagcagtagccttcttccctcggggagccaaagagtgtggtgtgtggcgctatattgtggctgctatttcatctggtttcttttaatgtgaggaactcacatactgacttcagtgggactcggtgagccggggccgtctgtgtggtgggaccccctttagcgggactcagtgagctggggccgtctgtgtggtggagccagggcctctccctttagtggagccaggttgtcgggccccgaatgtcactggtggatctaagaagggctgagtggtctgacaccaaaacatgccgcagggagggctgtggtgccggtgcttccaacaaggacagccctccttgaccctgaaaggaacactggcttgaaggactgcagacaggctctgaggggcacgccctcctcagcgagaggcagcaaggtggccacagtgtcactggtcaggtgcttctcaccacgggaaagccgccgacctgtgactcgcttgagatgggaaagcggcgccacagaccccgggtctccttggctgtctgtgggccgcccctggccaccttgtcctggctcgcagggtgcaggagcgcctcgttctctgggtggccggcttgctgctccggtttgggctgtcttaccataacaccgtcccagggctctgcaggccactgtgagcgctggctccctgggcagtgctcctccgtgtggactgtgcctcaggccagggctcaccagctggggtcctgtccggaaggatgggatctttctgggagctgcgccggacagagtggggagctcctagtttgtggggggaagctttgatatccatgccacgtccatccaccccaccccttttcgtcacgagcacaatggtcttacattggatttttgtaaaaaaataaaaataaatggagactttaactc

SEQ ID NO: 15529 - DNA, 743 bp, Homo sapiens
tcagggaggttaaacatgacaagttaacttagtttagacgtagcaccttagcagactttcctcggtccttaacatgtgttcttacagtataacttgcagtttcttgtatgtcaggtagctgttagggtcttgttctgtgaagatggcatggtgccctcagcctttgcatatactctctcagtattaactcccagtaaataataaccaaccaaccaaccaaacttccctctcccagcccccgaggctagaaaatcttgctgctccgtcttagcattccaagaaagtgcttccaggtatttagatagccctcagttctcaaatattagactacgtgtaaaatcttgggtacctttagattcttgtaacactagtctgtactcccttttccttccccaagactgataggatgcaagctgaggtcgtggcacaggaatgacagacaccatttggggagtatccacagagtcaaaggaacactagaatccccacctcagcgtgaggataattgatttccagctgcaataagccgtgcctcattatagccacactgtggctagattatacttctttgggtgctgtgctaagaatgtcaatggaaaaagccgatctcagattttgtttgaagttaacatgcctgacacagacatcctttcctctcacaagctgtgtgacttagtagataaaatactgccttctgcctttgggaccatgattaaaaacaaagacaaaaaccaaaagtcatt

SEQ ID NO: 15530 - DNA, 2202 bp, Homo sapiens
aaagaaattactgaactattgtcaaatggacttcctgtcatttgttggccattcacgcacacaggagatggggcagttaatgctgaatggtatagcaagcctcttgggggtattttaggtgctcccttctcacttttattgtaagcatactattttcacagagacttgctgaaggattaaaaggattttctcttttggaaaagcttgactgatttcacacttatctatagtatgctttttgtggtgtcctgctgaatttaaatatttatgtgtttttcctgttaggttgattttttttggaatcaatatgcaatgttaaacacttttttaatgtaatcatttgcattggttaggaattcagaattccgccggctctattactggtcaagtacatcttttctcttaaaattatttagcctccattattacaaaaaattataaaaataagttttcagtcagtcaggatgacatcactcccaatgttatgcagacatacagacggttggcatacgttatagactgtatactcagtgcaaatatagctgcatttatacctcagaggggccaagtgttaatgcccatgccctccgttaagggttgttggttttactggtagacagatgttttgtggattgaaaattattttatggaattgctacagaggagtgcttttcttctcaattgttagaagaatttatgttaaactttaaggtaagggtgtaaaaacatttttgagataaggtttttatttatgtttattattgttagagtgagttgcaatgtgggaagaaatgacattgaaattccagtttttgaatcctgtttctatttataagtgaaatttgtgatctcctatcaacctttcatgttttaccctgttaaaatggacatacatggaaccactactgatgagggacagttgtatgtttgcatcatatatgccagaaaaccttcctctgcttcctccttttgacttatttggtatgttgtatatattacataaaataacttttcaaatatagtttaataacacttagaagtgtttacttacctggaaaataattgctatgccgtacattcagagtgccccctcccctgcaaggccttgccatgattaacaagtaacttgttagtcttacagataattcatgcattaacagtttaagatttagaccatggtaatagtagttcttattctctaaggttatatcatatgtaatttaaaagtatttttaagacaagtttcctgtatacctctgaactgttttgattttgagttcatcatgatagatctgctgtttccttataaaaggcatttgttgtgtgagttaatgcaaagtagccaagtccagctatatagcagcttcagaaacatacctgaccaaaaaattcccagtaaccaggcatgatcaatttatagtggtcgtttacatctaataattatcaggacttttttcaggagtgggttataaaaacattcaagttggtctgacagtattttgttaaggatatttgtttgtatgtttattcagtatacttacataaaaattatttcgccatcagccaaaactcagtaatcatgacagctgtctgttgttttatgaagtttatttctcaagaaaatgggaataaatttgggatttgttcagcttttttactaaagatgcctaaagccacaggttttattgcctaacttaagccatgacttttagatatgagatgacgggaagcaggacgaaatatcggcgtgtggctggagccttcccactggaggctgaaagtggcttgtggtattataatgttcagatttcaagaggaaggtgcaggtacacatgagttagagagctggtgagacagttgggaactctttgtgcttgtgatctactggacttttttttgcaggaagtgcattctctggtccttccctattttctgttctggatgtcagtgcagtgcactgctactgttttatccacttggccacagactttttctaacagctgcgtattatttctatatactaactgcattggcagcattgtgtctttgaccttgtatactagcttgacatagtgctgtctctgatttctaggctagttacttgagatatgaattttccatagaatatgcactgatacaatattaccattcttctatggaaagaaaacttttgatgatgaaacaataaagattttaaatatc

SEQ ID NO: 15531 - DNA, 370 bp, Homo sapiens
gaacagtgtataacatgaagataacattttgtctttgaccactgtcttttgaatgggcccacagtgtttatgtactcttaacaactcacagaataatacatgttcactttattttgtaaaattgggttgagaggaaactaatggagtttcattgtaactgtcctttgtaatttatataaatgtattattttcctatatccttggttcttttctgataatttacagatttagcttttcttttgttatataaactgctagccacaaattttagttatgtaaaaggctacccttgacaagaaaagacatactgtcatgtatttatattctagcatagactaaactgaataaaaatgctgataacaggaccttt

SEQ ID NO: 15532 - DNA, 1581 bp, Homo sapiens
gcttgaaaaacccttgcccagttttgatcccttcaagactttgtcacagcctctatcacacatctgtttttctcgaagaaaaaaatataattaataaaaatgttttactcttttacactgtataattgtaagaaatagcgtattatttgtgaatgcatggtctgaaatttctgtacagtttggagatattttcaaacgaaacgtaagagaagtcaacaataaaaccaagaaaagtgagtatttttataccaaacattttaagtatgctgggatggacgatcttacactggtttggatcacagtttttgttcttgacttttgaatgcttgtaattaaaaatatctatttttttcctctgaagtaagttgcatgtttgaggcatgtttccaaatattatcaaaatatcctgaattgtattgtgaatatatagaaatctgtgcctggccggagtccagggtaaattagtagcatggtgttagatgttagaaacagaactgttatttgcagtgttaggtctaggatcccagttctagtaggacagccctgcaagacaatcaaccagaagcctccaggagcttctacctatggcttattcacaactgggcaagaaaacatcattggtaagaactgctgagtgtgcccttagaaagccctagtagctccagctgtgactatatcaactgtgtgccaagtgtgactttgtacagttttatgtttccactctcctgtatgtgtagccactcgatgcctaacctaccttccacaagccagccccgcatccctgctcccgcagtgtaagtgcagagcctgcctcactggtaagggaaaaccttggcttgggaggccagccctggcccttgaaggggttggctgtgcccagcccacctggctgcagtgggcagctcatgtctgtatctccaaagtgatgtttgtttgcaaaacaccggctgaactgagctggtgttgccaactcttggcagcactgggccaaaccgaccacataccatgagctcccaaatggcgtgtgctcactgtgagacgtcctgccacaccccacaggagacggaggcagtgggcatttggaaccaattctattcagacttcgtcaaagccaaagtcagtctggtgttgtcagttgacacatctccagagttcatgacagctcaacctctccccttgtacagaagccatttttgtaaaaccacactgacctaaattcagctgccaaacacagtctttcctattgatccgctcggcttatgttgaaaatttcaatgtcatgattacctggttggtttgggtttttgttttgttattttccattagaaatataaagatgtcaagaagcttttaaaggtcaacacaaaaaaccaaggccaggagtgaggggctctttcttaccgtaaataaggggaaaaggcagttagctcaaggacttgtgacggatccactttggtgttcaaggacctgcttatgccctcagtgccaatcggctcttggtgagatgactgtactcctaaggaaaatagccacttctgcagtctattatgcttttataactgtttaaaggtacttttctat

SEQ ID NO: 15533 - DNA, 87 bp, Homo sapiens
atttgtttgttagctattttcccccctttcacaaaaactatttcttgacgacctttgagagatttcaataaaaattttaatcagagc

SEQ ID NO: 15534 - DNA, 608 bp, Homo sapiens
gaaagaagggagagctccctgtttgcatgaagtcagttatgctatgaccttctggcacaataaaggcttcactttcaaatcacactataccttgattgagctcatggcagtaaactttgaacattgatatccatgggaataggattagaaaaggattgctttctatatataataatctgtggactgtgccattttacagtgtaccaaatgagaatgaggttgaaatgtatgcagtaaggtactcagtaattaattggtattttttcccagctgacatgatttctcagtgttagaaaacaaacccttagaactttcctttctgcctcttcaatccatcttaccacacaatatttcatgattcaaattcttcaaagtcttatacgcaggaatgtttattctgctgtatttctgtgaaattaaaaacttggaagaagcttcaaagctcttggaggctttaaagttctttctgttgggtgtgcattacagtttacttaactgatgtttgcgatttatataattttgccttgtattaaatgttacaaagttccaaatgaatcagtattttaaaaaataaaactatgaaagcattaaaatataggtgaattttt

SEQ ID NO: 15535 - DNA, 658 bp, Homo sapiens
gctggcaattaccagaacaattatgtttcttgctgtattataagaggatagctatattttatttctgaagagtaaggagtagtattttggcttaaaaatcattctaattacaaagttcactgtttattgaagaactggcatcttaaatcagccttccgcaattcatgtagtttctgggtcttctgggagcctacgtgagtacatcacctaacagaatattaaattagacttcctgtaagattgctttaagaaactgttactgtcctgttttctaatctctttattaaaacagtgtatttggaaaatgttatgtgctctgatttgatatagataacagattagtagttacatggtaattatgtgatataaaatattcatatattatcaaaattctgttttgtaaatgtaagaaagcatagttattttacaaattgtttttactgtcttttgaagaagttcttaaatacgttgttaaatggtattagttgaccagggcagtgaaaatgaaaccgcattttgggtgccattaaatagggaaaaaacatgtaaaaaatgtaaaatggagaccaattgcactaggcaagtgtatattttgtattttatatacaatttctattatttttcaagtaataaaacaatgtttttcatactgaatatt

SEQ ID NO: 15536 - DNA, 534 bp, Homo sapiens
gaaaagaaatcctgtgtgtcgcttatgtctataactccttgtttcagatgattctatgtctcatgatgtattgttgctttttttccaattttgttgcatcatgttgaataatgctgttttatatgtagagtgttttaaaacattcacaccattcgtcatcactcctctgtcatatgcagaattgttttttgctcttttcaatgtgtgtgaggtgttttttgtttttgtttttgttttttgccatgttatttatagtgttgctttccttgtggtttttcttgttgttattcagaaaagatgtgcagatatcacagaggcctataacttttggtatctacttctacatccaatgtatgaattaagctgtaagataatgttgctttcttatcccagtgatcacctgccaaatgaataagacaacaaagagaagcagaagggcagaagattatttactgacatatatctattacacttgggattgtcttactgttgcataactattttttaaacggagtttagttttatattgctagt

SEQ ID NO: 15537 - DNA, 482 bp, Homo sapiens
gagcatgctcagttggtgctgctttcttgttgctgcatctcccctcagattccacctagagctagatgtgtcttaccagatctaatattgactgcctctgcctgtcgcatgagaacattaacaaaagcaattgtattacttcctctgttcgcgactagttggctctgagatactaataggtgtgtgaggctccggatgtttctggaattgatattgaatgatgtgatacaaattgatagtcaatatcaagcagtgaaatatgataataaaggcatttcaaagtctcacttttattgataaaataaaaatcattctactgaacagtccatcttctttatacaatgaccacatcctgaaaagggtgttgctaagctgtaaccgatatgcacttgaaatgatggtaagttaattttgattcagaatgtgttatttgtcacaaataaacataataaaaggagttcagatgtttttcttcattaacc

SEQ ID NO: 15538 - DNA, 808 bp, Homo sapiens
gtatgtgtcagccatgaccaccccggctcgtatgtcacctgtagatttccacacgccaagctcccccaaatcgcccccttcggaaatgtctccacccgtgtccagcatgacggtgtccatgccttccatggcggtcagccccttcatggaagaagagagacctctacttctcgtgacaccaccaaggctgcgggagaagaagtttgaccatcaccctcagcagttcagctccttccaccacaaccccgcgcatgacagtaacagcctccctgctagccccttgaggatagtggaggatgaggagtatgaaacgacccaagagtacgagccagcccaagagcctgttaagaaactcgccaatagccggcgggccaaaagaaccaagcccaatggccacattgctaacagattggaagtggacagcaacacaagctcccagagcagtaactcagagagtgaaacagaagatgaaagagtaggtgaagatacgcctttcctgggcatacagaaccccctggcagccagtcttgaggcaacacctgccttccgcctggctgacagcaggactaacccagcaggccgcttctcgacacaggaagaaatccaggccaggctgtctagtgtaattgctaaccaagaccctattgctgtataaaacctaaataaacacatagattcacctgtaaaactttattttatataataaagtattccaccttaaattaaacaatttattttattttagcagttctgcaaatagaaaacaggaaaaaaacttttataaattaaatatatgtatgtaaaaatg

SEQ ID NO: 15539 - DNA, 2628 bp, Homo sapiens
tttccctttcagcatttatacccaggactgaacatgcagaactgttttttttttttttttatcttaaacacatacacacctccagtttttgctcttttgtgttgtactgaacacaatatttgtgtttttattatttatgccacgtcagtggggcaagaaatctggagtgagtgaagaaagctaagttgtgaacaagagtgtttttatagcatatgtgttgaagtaacagcttgtgcccgagaaacttaacagatgagttcttgaatctgggatgagatgacggatgtaaatatttctaaattttaaatgctacattacttggtgtccttttttctcccaaactttatttagaaatggaaggagttcaattttttcttgttctactttccctattcttatggaggtaaaaggaaaggaaggaaggaaaaagcagctttcacttacaaagtttcgtgtaaaaatatctttttttcttaaataactccattcatacaaattgggatgggaagaaaatcctttcctcttgggaaagtaatacaagtcttaagttccattgtagggtgcgccttcagaaacctgctgcacttttctgatatagttcaccacttttctgtcttcacagctttggggaattttggccaggagaccctgaaacatgaaaccaaacaggctttgatatttttttttttttaattactttccccttttgcttgattcttcttccttggtatcatattcaaaggaggaaagaatggatgacacttagggacaggtcactaagcagaataggtattagttggttttttattatttttaaatttatatagctctcatgtattgaaggtgctactttaaaaactgtgttaatgtacttgcaaatctcctgctggctcatgaaacagcagaattccagccaaggcaaattcagttggatctagggcttgaaaactgcccaagattaaagagctaagatgaaatagtttgaataaactggtaaaataacaattcatactatctctacatatttttaggatatgaatttttttttcctgctgggtagattgtccagtgacttatggcatgaatttcttttcatgctaccttcaatcttcaactaaagatttctaaaaggggtaagaaatgaggcagtagtttattaaatacatagaagtacacagctattatatgctgtggctttgagaagttaacttttgtggaatatgaaaccaaaggaagaatttccatgtagataaattaagaatagggaaaaacatctacctaaaagatggttgtccctaaaaaactggaaacatctgaaatgctctatttatgttattattcctgggagcttatagcccattatttttactttttttttttaattcagaagactagaacagaacttaaattttacaaacttttgatcataatgcttttgcccatactgtctcgtccttagccccagtgacatgtgctgatcctcctgcctttagttctaaatggttctgaatagctttaaaagatgaataagaaaaaagatcaagctcttttgaggctagagggctcatatggagatctaaaaccctccatgttcatttccagacttggtcaggcacatacatagtaaattataatcaatcatgggaattacataaggataatgaggcccaactgaaaccaagtttcagtctgccttacctttacccgtccttgagaacagcggtccaggagaatcaggcagtctgtggcctcctgtagcagggcgctcttaacagactcaggtgtaaggtttggatcccttgctacatcacaaatcagtttcaagagggccttcagtaagaccacaagtctgcaggaaactctggaatcaggaagaaaagctatgttcatactctaaatctggatattaaaattggaagagacttcaaagactgtcaagtggaaagctatcatttcctaaattaaggaacttaggtcaaagttaaatgaaaaagacctaaaaacagaaccaaagacagcctctagatttcttaccctcaagtctcctgttagcatactgcctatacacacagacacaccctctgccacactgctctcttccttccagaagcttggttctactgtaagcaacagctccttcatgggctgagaaggggaaaccaggatctccccaaccaagggcctatacttttatttttcaactctattaactgaactatgcttggagagagccctgaatcctttaactttaatgccatcttaggcctggaagttagagtgagggaaatgagcttggcttctgggactgtgtcaagttgaattttctgtcatttaatttcagatcctagctcatcatcagtgaagtccagcctacttacttgtaactattaacctttctaaaagttttcatcgccttggtaaagctccagaaatggacaatgctagtgactgcacaatattgtgactgtacttaatgccactgaactgtacactttaaaatggaaaatttatatgtatttttaccacaataaacaaaaaaccctaaaaaaactttaatgaaaggtggaaaataatttaacttacaatgtgaaaatacaatgtgaaatgtacaataaatcatatttatgg

SEQ ID NO: 15540 - DNA, 4099 bp, Homo sapiens
tccacttcctcccatgagacagagtgatggccagcttggggacatttgctttaaatgggaaagaggccgctttctgcccagtggcgttgggggaattcagccttcatttataatcagtgagattcccctgttgaagaaactaaattttatataggtaaaacatgttaatagggaagagtacaagctctcttacatataagagggctctactatctccttggaatccacatttgggttaactcctcagatttggagtggcaaggataaaagtgagggcagaagtagctgtgggaaaagatgagctatgataatgctgggaaggcagagattgattaagtgcatgctttgaaataggtttttaatgatgtgccccaaagggccagctgattctggtactagattgtcagagttttctaccaactggcatctgtgatgtcagagatcattgtaaaaatggcttttagacgtgaaacagggttgccaacccatttgtatgacttcaacaacgtcaaggagggcatttagaatttagaatctgagcacatcacaccagcaccagctccctgtctcttctagccacttaatggagacacaatggagaggtaagacagaccacaaactagttcttatagtgtactccaccttttacttttttcctgagacaaatctacccttattctttcttcctcttccttaccccttgcagtagggaggtatcaaggagcataattaaacttgtcaatacggaaagttgttttttctaacacaacaaagtgggaccatctctattcccatctaagccactcaaattgctgagtgctattagaacacagcttattacatggatatggggacaggagagattaaagcaggttcaaaaacacatgaactgcagatgccataggcctcaaatcagctgtaattctaggagacacgtgttgatctagttatctaacattgttgttataagaaaatgagtttactgcatttttcaatccagattcttgaaattgtctaacatgtgggtactgtgtcatcacaaaatctctcagtaaggctatatgtgatcctcattttgcctcttgggaaattagcagatagtctttgctctaaatgatatctgagtaaatagacttgaggaatcctctaccacagtgtccctgaaaccacatgcatcattcaggaagccttcaccctgtgactattcagcctccctgaatatgctttctctatagaaccactaacatatggctattgctctatgatttttttttttacattaggaggcagtgatattgtggaagattgaaatccacagataattcatgaccctcatcttatcactttactccatctttttatcctattaaattatttttgacaagatgtcctggtagactaaaggtgaacagatttgctcttgctcatcttctggtggatattttaacttgctattcacaatcaggacaaccaaagtcaaggacccagatgaaccacaaggcagctagtcagctacttagaggttggttacattcgaataaaaagtagtcagggaatgggggaggtggggagttggggagtacttggcagttgggatatgatccatttttttaaacaagttttttgtagatcccttgtaaaataataataataatgttgtgaatctccatgccaagtgaaaaaggcctaaagatgagttgaatttgtgataccatgggtaaggcatggaagaactcttgaatgtgttggccattttctctaactaacatgtggtatgtatggtcccctatattagatagaagtctttgctacatgtaattcaaaagcatctcgcttttctcaggaaccaaaggcttatgatgtaggacaaagaaatcatcttagaactgtcaagcatattttcacaataccatgtcaagatcaggaaaacacccttttgctagtgtgcttaacttatttatttcttctaggaaacaatagataaacagcatgaaaatgtaaatcatctggcatcactgatagaatttctgaaagagaaagagaagtagatggtcaaccagtcactagttggttggcatgaggtggtgtgcagaggaaagctgcattcactattgagtaaaaacttgtagaaagcacattatagagcttatgttggaatccatcttggaggatttttgttttaaactgtctttagcattttccctcttcccttctaatgggcattataattgtttcatctactctgtgaatctacataggtctttttttttagatgtttgatacattttaagtatttttaaatagatgaaaattctaaatgattttccctcaaatctatctagattattttaagatgagacaagattattgtcaatccctgaatgtctggagttacctcccatggatttttttttcctttggcctgggttttataaacaacttgaacatcatatcatataggataacaaaggaggaagttaacttaattcacctcagacttcagcctaagattcaatcaaattcatccttcagcctgtcttgtttcttctttatgtttcttttacttattgctgctaggatcctacataggatttctatagaaatgtatgaaattctgtggtcactgcatgtcaggattgcacagtatgttacaatacaatttcaaagagaacccacatttgtgagatttacagaccaaggtgtggtggaggaggtagaattgcagatcagataaaaagtgagcttacacttgaacttagttattcactgtgacctaaatttagtcctattgtaatatgtgcctgtcacaacacaaatacccctcttgaaagagatttactcatctatccaagcacttaatttggaaattttattgtcctattgcaaaatgaaacaaaattaaaagtggcctcgagtacttggtaagttacttaaaatttttacaaaaatatcccactcaatgccaaatctttcagtcctcaaaggcatttaagtccaatagtcatgctttaaatatggctttaaattatgccaccaaaatggtgcacttcacagattcaccagactgtagcatcataaagttaatttacagtttttacaacattgcttctacattcttactggtttacattaaaatcctttaagccaaaaggaagcttgctctatggatttaaatgcaaacttcatttaccagtgcaggaagtctcataaaactcagatgtactcccacaaaaattttattggcctttttgtaagagatgaaaaagaattgacacagttctctttaaagagaagaacttttttattattatttttatctccaactgcaggtggtgtcttttgccaaggtctctgtatttttctttcagttgtctttgggaggggatgttaagtcaaatcactaaaacagggttctctttggattaaaagttctggatttattgcaactattttccttgagaaacattctcagcatcaggattgataaacaaatgtagatgattaaaataggataattggttttagataatatcttctactgccaaacttctggcaaatttacctgtgaatttcaaaatgttataaaatctcttgatatgcttttgtttttccttttagccattttctcttcaatttcttagtccctctgccctctgtaaatgtgttgagtgatatagctatcagatgtattgaaggcaaagttctcgcagaggtctctgttccagctctgtaaaggtcacaggaatcgtgaaggagctgagaaatcttcctctccggcccactgtctgtggcccattgtcattgtttcctcatgaaacattgcagagtttgaatcctcagtaactctcattgactggattagaggtgatggccacagcaaatgggagagcaaaatgttggcctacagagaatgacacaattttattcgcctttggtgttagttgccatagtgctgtatttgaaaatcgatgctttagccaaaagctgaatgaccaccgtttccgtagtttccactgttttgtctgcatagaattttcctgaactacaagcaaaaatgtattttgtccaatgtcacaaaagtgaaaatgttactaatctt

SEQ ID NO: 15541 - DNA, 99 bp, Homo sapiens
atccacctggcatggttgctctgctgaactaccgtaaggatggtcagtatgaccccatatatgattttttaaggaatggtttagaaattaaaagatgtt

SEQ ID NO: 15542 - DNA, 204 bp, Homo sapiens
ctacagctcttcctccaccccagccccctcaccctcctccctctccctcctcctccctccccacctgccgtcgccgctgcaacctccactactgcttgaccctgccgggattccccacccagcccttccccaccggactgtgtatttatttactataatgttagcttacaagctgggaatataagtgcattaacggcccacatg

SEQ ID NO: 15543 - DNA, 3686 bp, Homo sapiens
aaaaaacttgatatgactgcaaatgatacttaagcagatctttattttttaagatgaatcagaatgttcctccctccccgactaccttctctgactgtcttccagttactgtggtgaaaaagaagaaatgaacttaaatccactccctttctagggaaaggagggtggggactgatgatggggggttttatttcaggtaagcagtttatatgacttccaataagatttgtaaatcatgggcttgacctttgacctctagacactaattttatcctttgaggctggcttaattagggatgctgtcattaaggagagggagaaatgtagagtgttacctccaactcatttgatttcccttacttgggaaaatgcagtccagtgttctcacctctgcctccaaggtaggagatgtctgtgggtgaggctcagcaactgagcaaatatgtgcctgtgagtttgccagtagagctgtgaagaaacagctgcagagaacatttgaccttcctggcattcttgtctgcatgtgtgtgagttattttagaggtgtgctttcttgagccctcataaggaagtactggtgctaggttttgcaagattttgtatacactttgctccttgccctagggctcagagtggtggtttctgactacatttctagagtcagagcttgatcaccacaactcaattatttcggcatcttttcacctatgctgtgatttgttttttttttttcttctcaaaaattctgttcattggttccactcagcatcaagaagacagggacaaacaactcaagtgtcttaacagctgctggagtgggatccttgttatctcttagccactgcaggacctgcctgacaggttatgtgtgcacctcgagatgaagtgtctttctattattgtagagattctgtagtgaagaggtctgacaccatgtgtggaggaggaggaacgatcagtcaagagatgtcctggtcttaatgcctgtggcttgtgctgggagtgggtctgacttagtgataaaaggactctattcactaagtagcctgtgtttttaaatccagggctgcaggcagcaacgcaagtcaggctgaacattcagtctccagagacagctgtgtggagcaaatcagagttcatgcccaagtccccaggttggaatggctgtgccaaaatccattcaaagggttttctttttcattactaggtcagaacattttgagtcaccttgggagattcaggatggggagagcaaatttgaacaaaaggtttttcttatatcctgagattgaggggtagggggtgtccaacctgtatagcccatgggttgtgtctagaattaagtggagggcagctatctggagttaacttgcaagcatattggtgccctccatgaccacctctggcttaggacttggccctgttatgagctgacccccaccccccaccccccaccccccccccccgccaactcctatacccatcttccctaggtgaatctgtgaatggtcctttctggcagcaatccctgccttctttttgggcccatgcccagacttctggtttaaggaatggtcccagagcttgggccagcttgctcagaagttttgggagcattgagcctgcctagaaagatacagtgttagctccccttacttcaaagttgcccttctctgttctgactcctgggacttctggtcctgggcacactttttgcaggcaacaaaatgtgcctgggagtgatggattttaatgtgctccagagtcctttcagaaggtggtcatttcccttggccgggcgcggtggctcacacctgtaatcccagcactttgggaggccaaggcaggcggatcacctgaggttaggagttcgagaccaccctggccaacatgcgaaaccccatctctacgaaaaatagaaatattagccgggcatggtgtcaggcacctgtaatcccagctacttgggaggctgaggcaggagaattgcttgaactcgggaggcagaggttgcagtgagccaagatcatgccatcccactctagcttgggcaatagagcaaggctccgtctcaagaaaagaaggtcatttcccaagactagcatagggagtatccatttaaaatacattcatcttcctcccatttccgtgctattaatcacttgttagagcaacatgacatgcccagcatcccacttcccgaaaatgtctactccttctactctgagctcttgttgcctagacctcagaaaacaccaattcaccacagtagaaccgggagcagggatagctcagcttctctgaatagcacactttgctcaggtcttaacttgagggcctctccggtactaacatcctgcgatagcttgtcccatgagcacagaagagcctcagtagagtcaagtcctgctgcagctgccccaccccaagtttctatcatttcctctttaaacaaaaaatatgttatcctacacattagtgtcaatccaatggttgtctcttatctgtctaaatagcaaaatcatgaaaatcagctgttttatttgcataggacaactaacctgtctgtgtaactttgtttttattttaactcttactagaaaatctaatcttaaaacatttgaattctaaacatgtaaaatgtgacagcctgcaattttgtagacagtgaagtaatggctgctatttataaatggaacatctatcaaaataagtaactgtttataaaattcagtttttgtagggttttccaaggaaaaatcaccttggttgaatgtttctcactcattaaactttgcagaagtgattcatattcagtactgtttttaatcactttttaaaatataaggaccgaatgcaaggaaaccaaagtttattaataatttttatataactaaaataaaatagatgtggagggatctgtgatcatataaaaagggagggttactgaaagaattttagcaatatattgattcaggaaaaggagctgttttataaatgatcattcactgttcctatggttctatgtatctttcaaaccgatacctttactatttaaagagcgtaaatagtgaaagtaagatggtcatacttactgactttatctatttaagtttgatggagataaactatatcttggctagtggctactgtgtctgtgaatgtaaccagtacttctttaagctctattcagtagggttccagccactgcttttttgttgtttctagccactgttttttttttcttgtttccttataaaacaggtaataaccaatcattttgtgtttgtatttccattcctttttatttctgcctttgtgtagactgatgattaagtaggcaaactacttctactttcaaagagccccaagggcttaatgaccccatttgtaactgagaaatgattcttgttttagtaatcattctataaatgatactgctggattgattgccgtgggttgatagctggaggaattgttttggacaatactaacatgtgaatttatgtcttagttttatttgcagtcttgctaagtaaaatgagtctttgtatctacttttttattaaagtgaaatttagcaatagttaatattaggtgacataaataaaacatcccagactagtgagttaagtacaagatctctctaaaaataaacagatgaaaatctatccccattatcgata

SEQ ID NO: 15544 - DNA, 950 bp, Homo sapiens
aagggaccctgagcaagaacatttttcatagcagacaggaggactcatccacatcgccagcaatcataattaagcaaaccgccttttgcaccatttaagatttaggaaatcatccaaattacttttaatgtttctgcagtagaaaatgaatctaaattcattttatagggtttgtagtcttttatctgttttggattcactgtgcttttaagaaaaagttggtaaatttgccgttgatttttctttttaacctcaaactaatagaattttataaaatattaattttctctagccattgtcttaggacttgtgacattacatgaacatttcaaagcactgaaaaaagacaaaggatccctaatgtccctgaagaggaaattaaaatacaaagttgtttttcattagcaaacttcttactttcttacagctaaacttggtagcttagtgaagtacagctgcttgtatggaggagctggggaaatatatttgctttgaaacttttttatttttacatctcagtcttgctagcaagcactacttggcttagaatctgtcatatccataaaggaggagctcatgtctctagtcctggcccttcaactcagaaggttcttctatactttccttctctcaggactcttatagcccagactttaaacatgaagctgcataattttcatcacttcttactctgccgcatcctctttgcccatgttattaaagtattatctaatactttgaagtttacctgaagaacctctttgtgtgtacttagtaatacaactttttttcctgtcccaacaccttttaatacagttgaatggataaaaacatggatacaaacacatggatatagttatcactgaagcagtgtgacataaaataatacctatgtatacaacactcctctgtaaatagcaaatgtaaagtaaaagatacacaacagatca

SEQ ID NO: 15545 - DNA, 1663 bp, Homo sapiens
gccagggaatactgagagcactaactatgcactaacctagattttcatttcgatattccctgtgtcccagcgcagtcctgctctcctgtgacctgtggagagcactaatgatcacgtgtgttgatggaaaccatctgtgcttagtctctgacataggaagcttgcttcaggcaatggctttggattgagtttgagaaattcaaacatttctgcagaacagataccaaatcaatagctaggaatcatgttcaatattgaattctgcccaggagcatgaactgatccatgaatgccttttccaggttaaaatttggtcactgatgcctataatcgtggaagtcagagggattcccctttttcatctcattttaataggaaaattccttatggttaacatctccctacaaactcctactacgtcgtctaaattgctgctctggaataaggtgatttctgcccccagattcttccctagccggtagatacgtgaagatattcccaactgtggaatggcagtgtaggtagcttcaggaaatggctcaggttaattctcaaaacacaaattgttgctggccaggcatggtgactcatgcctgtaatcccagcaatttgggagacagaggcggaaggatcacctgagcctaggagttcaagaccagcctcagcaacagcaggagccccaccccccgtctctacaaaaaaatttaaaaattaactgggcatggtggctgaggtggaagaatggaagaatcacttgagcccaggagtttgaggctgcagtgagctatgattgcaccactgtactcctgccttaaaaaaaaaaaaaaaatcccaatagtccatgaaggctttgatctcttgggaagttcttcatagatgctgtcacatttcttaaagcaaccttttaatatgcagataataccccccaacttttttagagacagcctgtctcttaaaaaaaaaattaatttggtagtgagagcttgtgtcactgccactctgttttatccctgaaattaaaggataacataaggaggacttgggcctttctgacatcatcctgaagagacaggactttgcgtttttcctctgggacctacagtgatgagaatttaatgattatctcctccactataatcctctttagggtgattttttaaatcaaaacccagtgaatctcattactcctaagaaacgaaagattccttcaaagccttttcaggcacatggtttcaacaaagcctggctttgacattccttgtcctgaggagcactttccaggcatagttacagcttccccactgtatttacaagccagaattgtgcaactcttctggatcattaataaagtagcaagatcctcaaaaaacccaaaaacaccattctctaatagtcatgacaaatggcttcagtatggcttgttttttattttccagatggctttttctcttattttttgaagccccagtctttgattttacaggtaactttcaaaacatcatgatgctgccaaatgtacttttgtaaacttaaacattatgattcctgtattatttcagtgagagctacagtgtgatatttcagagtctattaaataaaaatgtgagtttgaattacaccatctgtgccaattacaaagcaattaaaagatttattttttatg

SEQ ID NO: 15546 - DNA, 1620 bp, Homo sapiens
ggtggggcgggcgacgcggtagacgggctggccacgcggctcgttcccccgctcctcggggccctccaaggtgtctccgtagtcagcaggttggaggcagaggagccgatggctggaggaagcccacaggcggatgttccccacttgcctagagggcatccctctggggtagcgacagacaatcccagaaacacgcataatacatttccgtccagcccggggcagtctgactgtcggtgccctcccaggaacggggaaggcctccgtctgtgtgaaagggcacagcacatcccaggtgcaccctccccaagtactcccaccccgcctactgtccatgcggcctcactgggggccatcagcctcaccagcaaagcagagatgagagcgtgggaactgtgttctttcctccctgccctctactgatttcagcccagcccctgcctagatcctaggtcccttttcctcccgagtttggctggcacgagagctagcccagcacatgaagcaggtgatgttaagtcacaaggtgctgcttttcagatccactatgcaagaggggagggtggggccacgtgaaaggcagctctagacatcaaccagtcctgggggaggggagtgggaaccgggcacaactaggaacaatgccaccattcccacaggagtggtacttaaaccagacagcagggttcagaggtggcacaccgggacaaagctgaggccctgcacctcaacagctgactgccaggtgcctgtgggtgaactgaggggagtagagggagagggcaggtggaactggggcagaatctagtcatgccctaaagctagtcctgtaaacaatggtgccccagaaagctgcaggtggtgtttggagaagcagttacttttcagttacaagacccatctccctagtctcagccttacaacaccacgggactaaggaagagcacttccttgcctccgtaaggccagaggaagaaccatcccaatcatttgatctccagctccacagtagagagaaacctacaaaatgtcaaaccagcttcccgactcccaggagctcaagccaagcccagaggcagtggctggggtccctgcaggtcatgaggggcctatgcctttactccttttaaacaccagcacccgtcttttccccaacctaaaaccaaccaccagcatttcactacaggaccaaatggaaaccgagggaaccctgggtcttgggaagaacaacaggaaaccaaggtctgacctagggttccctcccagtcttcacatcactctggcctcatcaccaaggtgacagaggacacaggggagggggaaaacccacacacactccttggaatgggtcctgttatttatgcttgctgcacagacatattagaagaaaaaaaaaagctttgtattattcttccacatatgctggctgctgtttacacaccctgccaatgccttagcactggagagctttttgcaatatgctggggaaaggggagggagggaatgaaagtgccaaagaaaacatgtttttaagaactcgggttttatacaatagaatgttttctagcagatgcctcttgttttaatatattaaaattttgcaaagccctttgagctact

SEQ ID NO: 15547 - DNA, 429 bp, Homo sapiens
agcaccagccatcgtgtggagcactaccaaggggcccctcagggccttcctgggaggagtcccaccagccaggccttatgaaagtgatcatactgggcaggcgttggcgtggggtcggacaccccagccctttctccctcactcagggcacctgccccctcctcttcgtgaacaccagcagatacctccttgtgcctccactgatgcaggagctgccaccccaaggggagtgacccctgccagcacaccctgcagccaagggccaggaagtggacaagaacgaacccttccttccgaatgatcagcagttccagcccctcgctgctgggggcgcaaccaccccttccttaggttgatgtgcttgggaaagctccctccccctccttccccaagagaggaaataaaagccaccttcgccctagggccaag

SEQ ID NO: 15548 - DNA, 470 bp, Homo sapiens
ccaggtccctcttttctgtcaaggactttctgggaataatactgggggttttgtttttgtttttgaactgtctcaaatgttctcccaaagatgctaaaaacacagcctctccttttagcaagttaaaaggctgggtaggactgcgggagactgcctgcctttcaccattttctccccacttccagtgactgctcttattttgtgtaccataagccaacaaccgctgactccaggattgcataagccccctgtgaaatcggtgctgtactgcataccctgccagctgtgacttgttatcctactatattttctaaggagtgaataatattgtccgagtaactaacttatttaaaagacatttccttctgtgggcattgactgtatcccacctgttttccaaggaaatggtaacctgtttctgagaacacctgaaatcaatggctatacattccaaaccaatctaaacgcta

SEQ ID NO: 15549 - DNA, 526 bp, Homo sapiens
aaggatttagaacaaagtggaagcctgttactaacttgaccaaagaacacttgatttggttaattaccctctttttgaaatgcctgttgatgacaagaagcaatacattccagctttcctttgattttatacttgaaaaactggcaaaggaatggaagaatattttagtcatgagttgttttcagttttcagacgaatgaatgtaataggaaactatggagttaccaatattgccaagtagactcactccttaaaaaatttatggatatctacaagctgcttcttaccagcaggagggaaacacacttcacacaacaggcttatcagaaacctaccagatgaaactggatataatctgagacaaacaggatgtgtttttttaaacatctggatatcttgtcacatttttgtacattgtgactgctttcaacatatacttcatgtgtaattatagcttagactttagccttcttggacttctgttttgttttgttatttgcagtttacaaatatagtattattctct

SEQ ID NO: 15550 - DNA, 869 bp, Homo sapiens
acggacattgagggatccttccccagaaaatccacctgtttgttgctgcaattttcctctcctcagctgcgtcatttcctgcatgttgcctgccacttactcaccactggggtctttggaagataatcttcctctttggaaatgaatggaaaagcaaaaggccctattacttttaaccactggcttcatataaacacttgccatttttttctgcatagctgggggtggtttgtgtctttaattctttgatgatagtttatagttgccacactttattgattagtacttgacagggtgtaaagcctattttgggtttgatttgttttgggtggggtagacatgtttttaaggaacttattgcttatctttagaaaatgttctagtttggaaacagattcttgagattcagaaggcattttggagtacacttatctcttgtttgtgttgaactgaaggctaagtctcagtggacatggaaaagacttttgggtgatttatttttgaacctgcatttctttcttatgtgtagtgtatgaagaaagactagaatgtagctttaaaaaagtgttgtttactctcttagaactgacagacttattgccagaaatcactgatgttcattgtttttgcaactgtttgagctgctgtaagagtctaaagttgacaagttagttcatgttaggtgcatctttataaagcaaagatgttgtatatcctaggcctcccttttatatttgatagaagttatttgctaatagcttctattcttacgttgaaaatagttgtaaaagctgatgaacctgaaattgtgtagcctctacaggctgctgaggttctaaataaaaccttttagtggtgcctttatggtg

SEQ ID NO: 15551 - DNA, 269 bp, Homo sapiens
aggactacttgaggatggagctcactctcttcagcttccggccctcaacagtggcatctgtaaaggacctcccagataagactgtctggcttcagagagcggatcagctgtttagcccgtggggcagtcctttgaggcctggtaaccattccaggtgatgtgggtagtgagaccaagttcagaccacttagaaaaatataattgcaaagtcccatttcctctgtaccattgtcaccccactcaactttgtataaagcccaccccccatc

SEQ ID NO: 15552 - DNA, 5004 bp, Homo sapiens
gacactccccctgttagctcaacagatctgcatttggctgcttctcttgtgaccacaattatcttgccttatccaggaataattgcccctttgcagagaaaaaaaaaaacttaaaaaaagcacatgcctactgctgcctgtcccgctttgctgccaatgcaacagccctggaagaaaccctagagggttgcatagtctagaaaggagtgtgacctgacagtgctggagcctcctagtttccccctatgaaggttcccttaggctgctgagtttgggtttgtgatttatctttagtttgttttaaagtcatctttactttcccaaatgtgttaaatttgtaactcctctttggggtcttctccaccacctgtctgatttttttgtgatctgtttaatcttttaattttttagtatcagtggttttatttaaggagacagtttggcctattgttacttccaatttataatcaagaaggggctctggatccccttttaaattacacacactctcacacacatacatgtatgtttatagatgctgctgctcttttccctgaagcatagtcaagtaagaactgctctacagaaggacatatttccttggatgtgagaccctattttgaaatagagtcctgactcagaacaccaacttaagaatttgggggattaaagatgtgaagaccacagtcttgggttttcatatctggagaagactatttgccatgacgttttgttgccctggtatttggacactcctcagctttaatgggtgtggcccctttagggttagtcctcagactaatgatagtgtctgctttctgcatgaacggcaatatgggactccctccaagctagggtttggcaagtctgccctagagtcatttactctcctctgcctccatttgttaatacagaatcaacatttagtcttcattatctttttttttttttttgagacagagtttcgatctattttaagtatgtgaagaaaatctacttgtaaaaggctcagatcttaattaaaaggtaattgtagcacattaccaattataaggtgaagaaatgtttttttcccaagtgtgatgcattgttcttcagatgttgaaaagaaagcaaaaaataccttctaacttaagacagaatttttaacaaaatgagcagtaaaagtcacatgaaccactccaaaaatcagtgcattttgcatatttttaaacaaagacagcttgttgaatactgagaagaggagtgcaaggagaaggtctgtactaacaaagccaaattcctcaagctcttactggactcagttcagagtggtgggccattaaccccaacatggaatttttccatataaatctcaatgaattccctttcatttgaataggcaaacccaaatccatgcaagtgttttaaagcactgtcctgtcttaatcttacatgctgaaagtcttcatggtgatatgcactatattcagtatacgtatgttttcctacttctcttgtaaaactgttgcatgatccaacttcagcaatgaattgtgcctagtggagaacctctatagatcttaaaaaatgaattattctttagcagtgtattactcacatgggtgcaatctttagccccagggaggtcaataatgtcttttaaagccagaagtcacattttaccaatatgcatttatcataattggtgcttaggctgtatattcaagcctgttgtcttaacattttgtataaaaaagaacaacagaaattatctgtcatttgagaagtggcttgacaatcatttgagctttgaaagcagtcactgtggtgtaatatgaatgctgtcctagtggtcatagtaccaagggcacgtgtctccccttggtataactgatttcctttttagtcctctactgctaaataagttaattttgcattttgcagaaagaaacattgattgctaaatctttttgctgctgtgttttggtgttttcatgtttacttgttttatattgatctgttttaagtatgagaggcttatagtgccctccattgtaaatccatagtcatctttttaagcttattgtgtttaagaaagtagctatgtgttaaacagaggtgatggcagcccttccctagcacactggtggaagagaccccttaagaacctgaccccagtgaatgaagctgatgcacagggagcaccaaaggaccttcgttaagtgataattgtcctggcctctcagccatgaccgttatgaggaaatatcccccattcgaacttaacagatgcctcctctccaaagagaattaaaatcgtagcttgtacagatcaagagaatatactgggcagaatgaagtatgtttgtttatttttctttaaaaataaaggattttggaactctggagagtaagaatatagtatagagtttgcctcaacacatgtgagggccaaataacctgctagctaggcagtaataaactctgttacagaagagaaaaagggccgggcacagtggcttattcctgtaatcccaacactgtggaaggccgaggcaggaggatcacttgagtccaggagtttgaaacctacctaggcaacatggtgaaaccttgtctctaccaaaataaaaattagctgggcatggtggcacgtgcctgtggtcccagctacttgggaggctgaggtgggagcctgggaggtcaaggctgcagtgagccatgatcatgccactgcactccatcctgggtgacagcaagatcttgtctcaaaaaaaaaaaaaaaaaaaaaaaaaccaggagtgaaaaaggaaagtagaaggcagctgctggcctagatgttggtttgggaatattaggtgatcctgttgagattctggatccagagcaatttctttagcttttgactttgccaaagtgtagatagcctttatccagcagtattttaagtggggaatgcaacgtgaggccaactgaacaattccccccgtggctgcccagatagtcacagtcaaggttggagagtctccttccagccagtgacctacccaaaccttttgttctgtaaaactgctctggaaataccgggaagcccagttttctcacgtggtttctagcttcttcagactcagcccaaattaggaagtgcagaagcacatgatggtgaaaaacctaggatttggcagccttccagaatggtatggaatctgagggaagatttatgtttcgttttggaggatagctcaagttgaattttctttccagccagttaccctttcaacctacccatactttgtacaactcttacacaaatacttagatatttattagatagccctgaattcactctaattataaacagggagtgtaaactgcccccagatgttcctgggctgggtaaaagcagctggagtgaagcactcattttccataaaggtaacaaagggcagctcagtggttactcaagctcaaaagggtttttttaagagcaagcattggttaagtctgtgtatactgagttggaagtgatttcagcacattcttttttagtggagtgaaagttctgaagcccccttttaacttcctcttggtttttcattataattggtagccatctcatgaactgtctctgactgttgtctctttgtggtcatgtgattgtgagcttgctttctgacttgcatttctgactttatcctgttgttaggaagatagaaactaggttttgaaagattacatgattcaagcgagggattttaaagtaaagatgtatttattctgaagaatctaaaagataacagattatttgcttatgaaagaacaatatagtctgggaatcccagaatgtcaagccaaaggtctaagaagtcatctccttcaaatactttaataaagaagtatttcgaggagatatctgtccaaaaaggtttgactggcctccagattccagttatttttaaaaagcaacttaccactaaatccttgagtctccatagagtaacagtaaagaaactgatgtaacagactctcctctcaaaggatctcctctggaagagactatcagcggcagcattctccagggaagacccatcccctagtgccagagcttgcatcctggagactaaagattgcacttttttgtagttttttgtccaaatgcaatcccatttctgtgcctcttagcatgcagttagatttggacaaacaagattcctaaggaatgactttattaactataatatggttacagctattatataaatatatattctggttatagttctaatatggagatgttgtgtgcaatgctggcctgtggtggtctgtgtaatgctttaacttgtatggaggaggccaggctcagagctgagatgtggcctgaaccttccctgtatcgatcctttaatttagaactgtcaagatgtcactttctccccctctgccttttagtggtatctgacatatactcaaaacagtaatttcctggtcacatcattaactgctaattctgtatttataaagaattttcagatggacatgtacaaatttgaactcaaaccatccccagtccagatacagggcagcgtgtaggtgaccacaccagagcctcagcctcggtccttctcagccgtcgggataggatccaggcatttcttttaaatctcagaggtagcagtaaacttttcagtattgctgttagcaagtgtgtgtttgccaatagatacccattatactaatgtgccaagtaaatgttcattgcacatctgcttccactgtgttcccacgggtgccatgaagtgtgtgaggagcccctcatctggagggatgagtgctgcgttgactactgctatcaggattgtgttgtgtggaatattcatctacataaattttatatgcacagtaatttccctttttatatgtcaagtaactatttgtaaaagttatactcacaaattattataatgattactaatatattttttccatgtttcattgcctgaataaaaactgtttaccactgtt

SEQ ID NO: 15553 - DNA, 27 bp, Homo sapiens
atatcttgttttaaagtgggattatct

SEQ ID NO: 15554 - DNA, 1652 bp, Homo sapiens
gccacctccaccacaaccgaaagtatcatctcagggaaacttaattcctgcccgtcctgctcctgcacctcctttatatagttccctcacttgatttttttaaccttctttttgcaaatgtcttcagggaactgagctaatactttttttttttcttgatgttttcttgaaaagcctttctgttgcaactatgaatgaaaacaaaacaccacaaaacagacttcactaacacagaaaaacagaaactgagtgtgagagttgtgaaatacaaggaaatgcagtaaagccagggaatttacaataacatttccgtttccatcattgaataagtcttattcagtcatcggtgaggttaatgcactaatcatggattttttgaacatgttattgcagtgattctcaaattaactgtattggtgtaagagttttgtcattaagtgtttaagtgttattctgaattttctaccttagttatcattaatgtagttcctcattgaacatgtgataatctaatacctgtgaaaactgactaatcagctgccaataatatctaatatttttcatcatgcacgaattaataatcatcatactctagaatcttgtctgtcactcactacatgaataagcaaatattgtcttcaaaagaatgcacaagaaccacaattaagatgtcatattattttgaaagtacaaaatatactaaaagagtgtgtgtgtattcacgcagttactcgcttccatttttatgacctttcaactataggtaataactcttagagaaattaatttaatattagaatttctattatgaatcatgtgaaagcatgacattcgttcacaatagcactattttaaataaattataagctttaaggtacgaagtatttaatagatctaatcaaatatgttgattcatggctataataaagcaggagcaattataaaatcttcaatcaattgaacttttacaaaaccacttgagaatttcatgagcactttaaaatctgaactttcaaagcttgctattaaatcatttagaatgtttacatttactaaggtgtgctgggtcatgtaaaatattagacactaatattttcatagaaattaggctggagaaagaaggaagaaatggttttcttaaatacctacaaaaaagttactgtggtatctatgagttatcatcttagctgtgttaaaaatgaatttttactatggcagatatggtatggatcgtaaaattttaagcactaaaaattttttcataacctttcataataaagtttaataataggtttattaactgaatttcattagttttttaaaagtgtttttggtttgtgtatatatacatatacaaatacaacatttacaataaataaaatacttgaaattctcttttgtgtctcctagtagcttcctactcaactatttataatctcattaattaaaaagttataattttagataaaaattctagtcaaatttttacagatattatctcactaattttcagacttttgccaaagtgtgcacaatggctttttgttaataaagaacagattagttttgaagaaggcaaaaatttcagttttctgaagacagcatgttattttaacaatcaagtatacatattaaaaattgtgagcaatctc

SEQ ID NO: 15555 - DNA, 118 bp, Homo sapiens
tgattccttcagaaggcaacggataacatcgagagtctcgctaagaaatgaaaattctgtctttccttccgtggtcacagctgaaagaaacaataaattgagtgtggatcaatttgca

SEQ ID NO: 15556 - DNA, 26 bp, Homo sapiens
tattgcacagaacttccatagcaaat

SEQ ID NO: 15557 - DNA, 243 bp, Homo sapiens
tgtaacccaacaagagcacattttatcatagcagagacatctgtatgcattcctgtcattacccattgtaacagagccacaaactaatactatgcaatgttttaccaataatgcaatacaaaagacctcaaaatacctgtgcatttcttgtaggaaaacaacaaaaggtaattatgtgtaattatactagaagttttgtaatctgtatcttatcattggaataaaatgacattcaataaataa

SEQ ID NO: 15558 - DNA, 789 bp, Homo sapiens
gaggctgccctctccccagcaatgcagagcccccatggagggcaggtgggcctggagaatgagggtcagggttctgcctgggatcatccaggaaggatctcagccctattcatgtttctgctctacagagcactatattctccttgttgagagctgttggcttcacaaaggagagttgatgtggccaagcctttccctccctacctgatcactgcttaacggcatgtataatggatacttcctcatgcagaacccccagaggagtgactgtatgccattctctttgccaagtaatagaaaaccaatctaaatgtcaaaaatcagataaaattgcctggggatacattacttgttgattttcttaaaaaacaaattcacttaacaattcattaagttcatactgagcactgcctccaagattaaaaccaggatttctgtggtcccagaccagccctcttctccctgaatgtgttgagttggtggcaggaggttggaaatgctccagtggagatgggaagatagaggatgctgacaataaggacttggaagtcactagtgtgaaaatgagcagttaatgatatgggaacggatgagactttccacgtggtacctagatttgcaaattctattgtaatgcctttatttttagaagaattattctctcttcttactctgaaaatctgtatttgtaaaatgaatgaatggatcctatataagtaaataagaaaactgggaataagtagtaaatcaatgtgtttagtgtgcaaataaatgtaaatgcttttattg

SEQ ID NO: 15559 - DNA, 1449 bp, Homo sapiens
agagaagaggatggataaggacgttatccaagaatggacattcaaagaccaagtgagtttgtgagattctaacagatgcagcattttgctgctaccttacaagcttctcttctgtcaggactccagaggctggaaagggaccgggactggaaagggaccaggactgaacagactggttacaaagactccaaacaatttcatgccctgtgctgttacagaggagaacaaaatgctttcagcaaggatttgaaaactcttccgtccctgcaggaaaggattgatgctgatagaagagcctggacagatgtaatgagaactaaagaaaacagatggctggagatgacatttatccagggtcactttgtcaggccctaggacttaaatcgaagttgaacttttttttttttttttaaccaaatagataggggaagggaggagggagagggaggacagggagagaaaataccatgcataaattgtttactgaatttttatatctgagtgttcaaaatatttccaagcctgagtattgtctattggtatagatttttagaaatcaataattgattatttatttgcacttattacaatgcctgaaaaagtgcaccacatggatgttaagtagaaattcaagaaagtaagatgtcttcagcaactcagtaaaaccttacgccaccttttggtttgtaaaaggttttttatacatttcaaacaggttgcacaaaagttaaaataatggggtcttttataaatccaaagtactgtgaaaacattttacatattttttaaatcttctgactaatgctaaaacgtaatctaattaaatttcatacagttactgcagtaagcattaggaagtgaatatgatatacaaaatagtttataaagactctatagtttctataatttattttactggcaaatgtcatgcaacaataataaattattgtaaactttgtggcttttggtctgtgatgcttggtctcaaaggaaaaaataagatggtaaatgttgatatttacaaacttttctaaagatgtgtctctaacaataaaagttaattttagagtagttttatattaattaccaaactttttcaaaacaaattcttacgtcaaatatctgggaagtttctctgtcccaatcttaaaatataaaatatagatatagaagttcatagattgactccttggcatttctatttatgtatccattaaggatgagttttaaaaggctttctcttcatacttttgaaaaatttcttctatgattacagtagctatgtacatgtgtacatctatttttcccaagcaatatgttttgggtttagagtctgagtgatgaccaagattctgtgtgttactactgtttgtttaataggaacaaatatagaaataatattatctctttgcttatttcccgttaaaactataataaaatgtttctagg

SEQ ID NO: 15560 - DNA, 1395 bp, Homo sapiens
atcccacttccagccgggcccctcatgtatccactggccgaccgcagagtgtccctacctcctctccagagcatcattcctttctatctgctgccagagccacggtgccatttactccaaggactcactttctaaaattccacacctggagtgacctctagtcgctcagcatccactttgtgtctccaaattgtgtaggactctgtaatcttttgattagtttctgagaaaacacaatgaagcacttcacttttttttattcaaagccatttaataaaacacagttggtcagcccagtgcaaagcttgttatctgccaccagtacataccattggttctcttcattccttgggccagcttctcaggtggctttagacctcaacaagccgtatcttcaccagtgttctatcttgttcccctaaattaataaaatgtttttctccaggattttggtgagggttggctgtggctgtcgttttgcacctcccagatttcaaagaattactggttttaccatgactcaaatcttaagatctgtttctactattcagttcctcaaactgaagcttattgaaaaaaaaatgtataatgttatttgttttattatagcaattatgcctaattaaagcagtatttaatgcaatttccagttatttctttggagaattttatgtcattgttccattaccttgaatgttggaaagatatgatacgtgctgcttgttcatcacaaaaatcagtaagcacaataaagtggatgccaaaccatcagacacataaatgttcccgctgtgtccctggatatggaataagcaggtataaaaaatattttaattatagttttgttataaatataacttatgagaaaaaaatttgataggaataatactgtatattactaatttttaactatccctaaggcaaaccttatgacccacagaattttctcatatacagtattcagtgcacagaaatcttatgattggctcaagtacagtaagttacttctcagtaaaactctcaagtctgagtccatatttgtagctctgcttttggctgtacgttcctaggatcggggctgcttatgcctttcgtttatccttggggtttgagagcgctgtatttgggagagagtttaaaaatacattaggagagagaaaccattaaaagtttcactgtcagatatattgtaggtgctaatactggatttcgtctcagatttaatttcttttatgggtctgttagtcattcaacaaatcccataagtatgtgttaatattttaattgtgtaaaactcatttgttactttacagcctgtaatagtgtgtctgcattttcaacctgttgcaataactttgctgaaatattaacacattaataaaacttttcttaaac

SEQ ID NO: 15561 - DNA, 292 bp, Homo sapiens
aactaggcataaacagccaggcatggtgactcaagcctgtaatcccagcactttgggaggccgaggcgggcggatcatgaggtcaggagttcgagaccaaccgaccaacatggtgaaaccccatctttactaaaaatacaaaataattagccgggtgttggtggtgtgcacctgtaatcccagctactcaggaggccggggcaggagaatcgcttgaacctgggagcaggaggttgcagtgagccgaggtcgtgccattgcactccagcctgggtgacagtgagactttgtc

SEQ ID NO: 15562 - DNA, 294 bp, Homo sapiens
gcctgcctccagctggctggggccaccgtgcggggtgccaacgggctcagagctggagttgccgccgccgcccccactgctgtgtcctttccagactccagggctccccgggctgctctggatcccaggactccggctttcgccgagccgcagcgggatccctgtgcacccggcgcagcctacccttggtggtctaaacggatgctgctgggtgttgcgacccaggacgagatgccttgtttcttttacaataagtcgttggaggaatgccattaaagtgaactccccaccttt

SEQ ID NO: 15563 - DNA, 2122 bp, Homo sapiens
agggagcatttgctgagggaatagtcttgcacattttttcatttcttacttgtctaaaagtaaaaaaaaatatcagcctgtctcctaggtcagtcccctcctggacccacccgctcccttttttccttagccttcagtgccatggaactaatcaagggaggaaaaggtcaccagggagaactggacagaactgaaacacagcaacaccagttctcaaggacaaggtgtgtgatgggggtaggaagcttggtgcttatgtaaccattttaaacgtggtttctataggaaagaccaacatttgtttagcttgcttggctttaattatctaaagccaatgaaagacttctttgttgattttttaagatagaaagattaaaaagaaagaaagatgggaagaaaatgaatgtcagtcaaggaaaggccacttaaggatctgctctatgaaggagaagaaagaggaaaaagaagtaaaggagttaggaggagacacttaaatgaaagattggcaagaaaagcagtcggactctaccttaaggagggatgggaaggaaagagttgagttggtttctttctgattcctctactcatgtagaaaacacttgtacttctggaaatggactggagactttttaaatttgagtccactattgacatggaaaccccagtggaatcagattttccctcaaagaccatgatggtatcggactagttttcagacactgcctgttgctgtccatcagcacttggtctcttatcttcagtgagaaggtgacccgccttcttcccatggtggctgcctaaagtgcttcttttctaacccaaaacagttctactcacttccttttacagaattcaccggccattttcctgttacctgatccttctacaggatttttaaaaagtaagagagtttcagagaagccgatcccataatccccagtgcagccagggtttgtgtgtcatcgtactggagtagagggccgactcttcccatgaaggtgagcacagctgtgagtgagtgagctcatatctccatttgtcagtgctggactggtaccagatcgtaaccttcccgttggtcggaaacttttccatctgtcgccctagaaaaagagaaagcttaccatcgagggtgtggttgatccttgaagctgcttggtaaagttatcatttcctcagtcttttcttttgtactcctatcatgtattcattaatatctaccagtcccttttcattctaagacaaaacatttctcctaaatctctgaataaaatcagtgctgtaggaagatggactgtgttgatcatgggtgtaagcaacccagtttaagaaacatggcaactaaagggatacctcaggctttctttcccagtgggtcatttttgtcctagttcagtgtgtctgttactatttaaatatttatacaaaagggtttttgtttatagcttaaggaatgatactgtgctctgcttggtgcatggagaaaaaggaagacccgtactctccacaccctagagcttttctctaaatattgtgcaaagtttttgctagttttatcttctgactttgggactagtttttgctgcagagttgtgttgctttgtgattttcctctgggatagtgtactgtacacaaccagatgtgttccacactccgtgactccgcagtttgtcctggagtgacatacacatccaccatggaaagggaagcatctctgcctgtggattctcaagtacttggaagcacctctcctgaggaacctacaggattctaaggtttcctaggtcactgaacaactaatcttggtccctgaatatttctaggtttgtaagtgcagcagttttatttcctctagaactcatcctgtttcaagggaagtacctaagaagatatagagtgtttctagggtaagggacctgcaggtgtaagcatagatgaaataactgtcctgtcacatgtgcagcaggccatggagtgtagcgggcatcgctgccgccattcctgcagcatcaccataagcagtgcagggtgtctccatcgagctgtttggttccatgtgtgtttaacatgtgcagaagtagcttctctgtttaagtttaataaagttgagtttcaccagtc

SEQ ID NO: 15564 - DNA, 1468 bp, Homo sapiens
tgtggggggactcgaccccctgacatggggcagcccatagcaggccttgtgcagtggggggactcgaccccctgacatggggctgcctggagcaggccgcgtgacgtggggctgcctggccgcggctctcacatggtggttcctgctgcactgatggcccaggggtctctggtatccagatggagctctcgcttcctcagcagctgtgactttcacccaggacccaggacgcagccctccgtgggcactgccggcgccttgtctgcacactggaggtcctccattacagaggcccagcgcacatcgctggccccacaaacgttcaggggtacagccatggcagctccttcctctgccgtgagaaaagtgcttggagtacggtttgccacacacgtgactggacagtgtccaattcaaatctttcagggcagagtccgagcagcgcttggtgacagcctgtcctctcctgctctccaaaggccctgctccctgtcctctctcactttacagcttgtgtttcttctggattcagcttctcctaaacagacagtttaattatagttgcggcctggccccatcctcacttcctctttttatttcactgctgctaaaattgtgtttttacctactactttggtggttgtcctcttttcggcaaagttggagcgagtgccaagctctccatctgtggtcctttctgccaagagcgactcatagtaaccaggatgggagagcagctgccttattctgaatcccaaaaattacttgggggtgattgtcacagaggagggacagaaagggtatctgctgaccaccagcctgcctacccatgcccatgtctccattcctgctcaagcgtgtgtgctgggccggggagtccctgtctctcacagcatctagcagtattattaaatggattcattttaaaaatagctcctatattttgtaacatgtctcaaacactcatactgggttccacaatccactgttagaatacctatggttagggcttctgaactaaaataatggaaaattttaacaatttgtatagtgcctggatcattactagtgccataaccctgcttcttcaacatttcacagaacttctcttttatataaaggcaagagcacaaaatgagttcagatgatcacaaacaggtgagttttgttggagaagaaagttggagtaggagactttcacaagtggtttccatggagatagaatgaagcattctgtggtcaagtaagtttagggagctattcatgtttcacttgctttgtggagattcacactatgcactgggaaagtatctgaaaagtcttataataaagaaacaggcttaactttgtgtaagaacactgtttatcaatgtcatttggctatagaaacattttctcctgctgattgtgtgtgtgaaacatgtattaacattccaatgaactagcatttaataaagcacaattttgg

SEQ ID NO: 15565 - DNA, 138 bp, Homo sapiens
ggcctgtatcctccctggcagacacaacccaataggagtcttaatttatttcttaacctttgctatgtaagggtctttggtgtttttaaatgattgtttcttcttcatgcttttgcttgcaatgtagtcaataaaacc

SEQ ID NO: 15566 - DNA, 435 bp, Homo sapiens
tgtggtttgaggaaagcatcagatttgtccctggaagtgaagagaaatgaacccactatgttttggccttaaaattcttctgtgaaatttcaaaagtgtgaactttttattcttccaaagaattgtaatcctccccacactgaagtctaggggttgcgaatccctcctgagggagatgcttgaaggcatgcctggaagttgtcatgtttgtgccacgtttcagttcagttctgaagtgttattaaatgtgttcctcagcgacagtgtagcgtcatgttagaggagacgatctgacccaccagtttgtacatcacgtcctgcatgtcccacaccattttttcatgaccttgtaatatactggtctctgtgctatagtggaatctttggttttgcatcatagtaaaataaaataaacccatcacatttggaacataa

SEQ ID NO: 15567 - DNA, 367 bp, Homo sapiens
aacctcagaaaaagagcaacagaagtaattgtttcaagctcctgattctttctactaaatcatgaacagctttaaaaacatttctgtctgcataaaattattttacttgtaacttttccccaattgttctgtgcattgttttgcctttttaaattacatctccaagtggctcaaaaggccttgacacagggaacctgcacatatccaggatatgtgtaaccagcgatggtgacttgaccttgccaagacctgtgattccttcaggatacaatcagtgagaaataaaaacacatcttgggaagtgggaatcctggagtttatgccatttgcaatattaaaaaataaaaatgcaagttattatttcaat

SEQ ID NO: 15568 - DNA, 448 bp, Homo sapiens
gaatttaaaagacataagactaaattacaccttagacctgacatctggctatcacacagacagaatccaaatgcatgtgcttgttctacgaaccccgaatgcgttgtctttgtggaaatggaacatctcctcatgggagaaactctggtaaatgtgctcatttgtggttgccatgagagtgagctgcttttaaagaaagtggagcctcctcagacccctgccttggctttcccagacattcagggagggatcataggtccaggcttgagctcacatgtggccagagtgcacaaaaagctgttgctacttggtggaggaacacctcctagaagcagcaggcctcggtggtgggggaggggggattcacctggaattaaggaagtctcggtgtcgagctatctgtgtgggcagagcctggatctcccaccctgcactggcctccttggtg

SEQ ID NO: 15569 - DNA, 1286 bp, Homo sapiens
agaagttgtgccgctcaatcacagacacctgcacccacaacatacttctgttacacacaagaacatttcaggaaactcagccagcttattttttgtttctcttctatgtcaatacttagtgtttctcattttgaggactttttctctctcctgtatctttgttttagtttctttggtttttattttgtagtcctttcagttatttttaatgtgccaaaaatttgtacatgttcaattaaaaatgttgtataatagtgtaatacttttctttgtatgaaaatgtcctcttcttcaaaggtataggctttgtaatgaattagattttctgccaataattgatatacaatttatattctttattgtgcctgtgtgttaccatgctaagaatgtctttgtttaaagggaattaatctttttatgatgtattaatctgtgttttcaattgttttccaagtacagttcaaataacttgcatatttactatacaaaatggttgacaagtgttctttttgcaaagacttgaatacattggcagaggtgctaatcacatcttccctaaggcacctggaagaattatttgaggaaaaaatgagttttcacattgttttataggaaattaaatttgtccaaagatttggagactatttttaaaacataaatacataaaatttcattatttcctgctatcttgtttgctggcagaagtgaatgtttggtgaggttattttgggataaattacaaaagaaaaaaaattagacactgcattaatttcttgttcttttggaatatcttagtaactgaggatcattttctaacaatgtggttgacataccttcagttgctttccacatctaaaagagttatctttcatatatgtacaagttattggtagtcttatttttgggctgtttgttgacttatgccccatttgttttacttgttctttaatataaacccttccattttttaacaattcctaacacttgatatcttaatatcagtcactaacattagtaacttcttgtatgttatattatggcagatctctttacgttttttctcacatctatctgctagtccaggaatttgttactaaatagattttcttggatatttggttgcctcaaagtgcttacatttgttaacagattgtaaaccacatttatttacattgatgaatgggctgttgaataatcattgtaaagcactttgtatatataaggtgctatataagtgtgaaatatcattcatttataaatgaaatgccttctaactttccatattg

SEQ ID NO: 15570 - DNA, 498 bp, Homo sapiens
caccatccagaagaacttgatggaatgcttttattttttattaagggaccctgcaggagtttcacacgagagtggtccttccctttgcctgtggtgtaaaagtgcatcacacaggtattgctttttaacaagaactgatgctccttgggtgctgctgctactcagactagctctaagtaatgtgattcttctaaagcaaagtcattggatgggaggaggaagaaaaagtcccataaaggaacttttgtagtcttatcaacatataatctaatcccttagcatcagctcctccctcagtggtacatgcgtcaagatttgtagcagtaataactgcaggtcacttgtatgtaatggatgtgaggtagccgaagtttggttcagtaagcagggaatacagtcgttccatcagagctggtctgcacactcacattatcttgctatcactgtaaccaactaatgccaaaagaacggttttgtaataaaattatagctgtatct

SEQ ID NO: 15571 - DNA, 303 bp, Homo sapiens
aaaccagtccagccaatgaaggtgggattgaagggctgaatggaagttacagcattctactctgatggtggagttttttgcctgagtttcgtgttttattgttttttttatggcttagccatgtggttcgttgtccacatccacatgtacgtttgtatgtagtccacattggttgttagatttttttttttttctttgagatgcggtcttgctctgttgctgaggctggagtgcagtgatgtgatcttggctcactgcagcctctgcctcccaggttcaagcaattctcccacctcagcctcc

SEQ ID NO: 15572 - DNA, 235 bp, Homo sapiens
atttctcttagccataaggaagaaaaagaactcttgcatgaaaatagcatgatgcaggaagaaattgccatgctaagaatagaactagacacaataaaacatcagaaccagctaagggaaaagaaatatctggagtacattaaaagtgtgaaagaaaagaatgataatcttctaaaggctatacaattgaatgaggaagcactaacaaaagcagtagttcagtacagtggacagc

SEQ ID NO: 15573 - DNA, 730 bp, Homo sapiens
agccttgtgagcaaggaaggctccctgcatgtcctgcttgctgcacgccacatgggtgtggtctgcatctcagttggccgccatcagtgtaaatagagcttaaagtcatggtttggctgcataaaaattttctaacttgggttcaatatttgtagtgaagtatctgttttcatttttttcacgttataaataaaaatactatgctggccgggcgcggtggctcacacctgtaatcccagcactttgggaggccaatgtgggtggatcatgaggtcaggagttcaagaccagcctagccaagatggtgaaaccccgtctctagtaaagataacaaaaaattagctgggcttgatggcatgcgcctgtaatcccagctactcgggaggttgaggcaggagaatcgcttaaacccaggcggcagaggttgcagtgagccaagatcgcgccactgcactccagcctcagcaatagagtgagactgtctcaaaaaaaaaaaaaaaaaaaaaacctgccaattttcaaacataccgtagagattattttcaggtgccattttatagtatagcagcagggcttttactctgtgtatgcacagatgcagtctggggcatggtttgtgtgctggactttctcatggccatcatcagtatgcttatggatttgatgacaggcatagcctgggcatatcacctcattggtaaagggctagagcctttcttttttatggcac

SEQ ID NO: 15574 - DNA, 1064 bp, Homo sapiens
ttttagtggatctcaaacttgtcttaaatcaacaaccttctactcatgttaatgtcttgattaaatatcacaatgcaaaatacacattaagtaaaagaattccagctggtaaacatgacctggacatttgtaagaatatatttaatatatgtacacccattatgttttcaggtaacaggaggaaaaatgcagcacaattttttttctcttgaaaggcactgtcatttaaacataaacctggagtactcgaaatagaattcaggtttacaagatgaaagcgtgtggagaagtgtcagatggcagtggaagcatgtgtgtttctaaaaagtaaaaatctcaagaaaacagaaatggcatgctttacccatcttacttagtgaaagagagctgcagttgaaattgtttaaaaagtagcaggtacaatgaatattgtcacagatgtgttaatttttgaagcaatgtgggtgctgactactagtagtatcaaaaatatgttcaggattgttttgatacctgtatttataataaaaaatgttggggggagttgatgaattcctgttaaaagctgttcttgtgtgttacatgtaacagacatggtaaatatttgtttacagtctttgtttaacaaaccatgcatttaagtttaagtgaagtcaacaaaaaggaaataggtgtatggatatgtgattttgagattaaagttagtcttaaaatgtaaataaaatgtgaaacgtgtcctcagagactgtgccatttctattatgttgatgtatatgtacagtaccttgccagggaagcaaaaattggaattattgtagcttttcatgtatacacacttttatttaccctattttgtgtacttcttgtgaattataatttgcagactatttcagaaaagaaattatctagtttaatttcttctttggacaaggagtcctaggtattatattttgagtttgatttcaccagaaataataatattaaaaagatctttgcattctggcagttcttttaggattataggttgcaaattatccaaatatatatcccattttttaaagcat

SEQ ID NO: 15575 - DNA, 836 bp, Homo sapiens
ttctgacaatcaagatcctctgcctgctgcagtggtccatacatgaacagctccccttcagcgccccagctattccaggactcttctccattgtaagaagacagaaatgtgtctgagatctcatttatgagacaagatcacagcagccactgatataaaaaaagtttaggcatttttctcaacacaaagactatcgctggaagtggcacttgctacctggtgcatctttgaaaagtgtgcctttagaaacaagacacccttttaaagtaatatgtcttcaaatgttgtgacttacataaagtagctctttcattttttatatcatttttattaaaaaaacttaagttagactctttttctgtctgttgagtgatttatttattatgccttaaaactgacttgtcaatgtttcacataatggtttaaagggcattgaattcgaaattttagaaaataattgtaaaaattcaatttttttaaaagaatgaaggttggaaatagcatatgtatcattaagtatattagagctaatcaattggtcattgtatagactttaaaatttatgactttaaataatatttaataacatggaaaattatattatggcattaaaaattagcataatacaccatatatggtacaatcgtagttgtattaaaaagttacatatgcataaagatagactggaaggaactgtaccaaaatgctgacagggctatttctggagatgggattatgggcgtttttcattctctttttaatatatttttccatatctcccaatttttctaatatgacaagtattgtgcgtaattagaaaataataaatgttaata

SEQ ID NO: 15576 - DNA, 38 bp, Homo sapiens
catactgaactcttcattgacacaccccatgactgtat

SEQ ID NO: 15577 - DNA, 843 bp, Homo sapiens
gatttttcaaatatatttattattaataaaataataaaagaattcatgggctacaactagcacagggaatttagaggttgtagcatcttctgctggagtaatactcaggctattctaataacagatgattccttcaacagactgctatatattcaccatgtaaactgcagccacctttagtgatacttttgaaaaaaaaaaataaagggatatggctgttgtagaaagatagcgtatttgcatttacaataacagtagcatgttgtcagtggccaaggctacacagaaggctccctgctgcccggagcaggtacatccaccagagcaaagggaaccacttttattttgcatgagtttggtaactgattactctcccctcaaagaaaagacattcaggtgtttctcaacgacatcttctgtccagcaagctcggtttgaatacgtcacttaccagtgccattgcaggacccaaattcacagttcataaaagatgtgaccactacatgtaaaaatagcattctacttgatcttacagtatgtatgtatgtatgtatggagacatatgtgtgcgtgtggatgtctacatggttaatggaaagcactgtgctctgaagtggatcagtctcaagtgtctggtaacagcagcagtgcttagaaaattcttttgttgaaaagagttactgttattatcagaatttgccaacctaaagaatgaatttttaaattcataacttggtcatgttcacaacaaaactgtcaaataagcatatttccatttttattactgaaagaaatatgggcattttcattctttaaagaaataaagcacaagaattttatctc

SEQ ID NO: 15578 - DNA, 179 bp, Homo sapiens
attcccgtccaaggaagcagagttgttaaagagtactggaataggggctgaaggatctatattcccttattgcattttccttatgtataattttccagatggtgatgttacttttcagtgtactcatatgtctcattttcatctaaaattaaatggcaggaaacaaggactgcatagag

SEQ ID NO: 15579 - DNA, 901 bp, Homo sapiens
caggtccctgatccgccccagcctgcaggccagaagcagtgttacacacttcctggaggagctaaggaaatcctcagactcctgggtttttgttgttgctgttgttgttttttaaaaggtgtgttggcatataatttatggtaatttattttgtctgccacttgaacagtttgggggggtgaggtttcatttaaaatttgttcagagatttgtttcccatagttggattgtcaaaaccctatttccaagttcaagttaactagctttgaatgtgtcccaaaacagcttcctccatttcctgaaagtttattgatcaaagaaatgttgtcctgggtgtgttttttcaatcttctaaaaaataaaatctggaatcctgcttttttgctctactagtacctctgtcacactagtcttatcaaaaaccagttcttaagatcaatgttaagtttattagttaatgtaaatttctcatcctcgaaaagggtgaacataaatgcctttaaggagtatatctaaaaataaacattaggatatctaagtttgatgtaattgtttcaggaaggaaaaaagaaaagcattctggaatgagcctacttcaagtaatcttagtttctaaaactaacagttaatattttcaattccagtatatcactttaagtagaaggggatgtccaagtaattttggttttctaactgttgaatcataagcttgacctgcccccagaggctttttggatgtttttatctgtgttttgccatctctttacactcctcgacattcagtttaccttaatcttcacatttttacaccttgggaagtggcaagcatcgctgggtttaagataaaggagtcacaaaaactaatcaaaataaaatttgcattatgacaacttttaataca

SEQ ID NO: 15580 - DNA, 481 bp, Homo sapiens
tttcaatatcagcacactcattctttgtcaattcattttttcccatgagatgaagcacatgtgacgaatacggactagataacctctaagaattttccacttcttcaaaatgaacttactctagaaagcttacccttggataaccagtttgactttcataatgtctctgttttttgtttttccaacaattacagactcaggttctcttattttggaagtttctatctggttttgttctgaacttacattttttttttttttggtatctatgattttttttgctcagggcatcaaaatgtgctaaggacaagaattatatcctttttaaaaaatgttgttagcttggtgtaaaatgtatattgactgtattggtgaataaattgaatagacataacctcaaagtacttcacttattctttttaactactgatttgataaaaagtatgattataagatatccacgacaatctcatagtttctt

SEQ ID NO: 15581 - DNA, 1922 bp, Homo sapiens
agcaaaaggagttgcaggacccacaacatccagatgaaggggtgacagcagggctgtggccataatgacacttcatcctagagcagggcagtgagccgtgaagttcctagtgggaccgtcatcaccattatcatttgatcctgtcggctgggggcggctggtctccttccaaagcagctgcacccgagagtctctgactccacctgaaagaatgacgctggcttaataggactctccattgctaccaaactcctcctgcacggtcttgggtgcacccaccagagggtactactattatggaaaaattttgcctccaatcattagggtgtcttgatggcgttaactgatctttccataaaaatagattcagtcatacacacatacacacactaacacacataagttacaccagtcctctgtcaaaaaagcttaggtgacttttcttgatgcaaagctctgattcccacaggaatataaaaacaaagaaagagggaaacatccctcgagaaaaaaaatagtattgcttagaaaagaaaccattttctcatttggaaatccataccatgtgtgaaaatcctatccaacggacagcaaacccaaatgttgtctacacatgtgttagcattgatggagtggttcattttctacacatttcaggatttgttttatattttaaattttcagttgcgaacatcctttttgacagaaatcctatgcagcccatgtacggctttcaacaagaccaaggagctcaataacttcatgatgtaaattaaatagtaatcatgattcagtattcaattgcaaaaatgtaacaggtacacaaagaggaagtggggaaaaaggcaaaatgagagtctgattcccaggcatgtgcagcgcccattgggacataacggcagtgcggcgcgagccagaggaatgggctggaaccggatctgtttccagacgcagaatgagtggctctgtgtgaccataggcagatgctgactctggaagactccgtgccactcctttctagtgccaaacaccatccaaccacaggactgacgtggaagccccaaacaactgagaatgagtggcatgagccccctaaaagcaggcgagagaacgagcaatcaagttctccactgtgtacagacttttcctccccccaatccaaggtcaaagtgatgtgtcttttagaggctttgggacactttttagtaagtatgagcagacaaatgcaatgaatatgctatgaaaaaacccttctgaactgagagagggcttatcactatatccagctaagatttgtatttgaatcatctgtaaagtcgcactcttacaacaagcttctgggttttaaatacctccgtacagcaagtaaacgttccccgctttctgttctcagtgtcctcggtcatggtgcttttcgttgcattaaaagtgccggtcaaactttgatagtatttttttatagttggtgcagagtggaataactcatggattatttcaatatttttgtaataaaaaatatagggtatacacataggcatcatcacattttttatagacctggaatcgtttaaaatactttaagcatcataattacttgggatgtcagaaactggtccacaaattccatcagcctgcctcagcagattgaaaacatttgtctcttgcaagatcaccctactttgcaagttggtgcccccaggaacctggccaggggtgctatcagaatatcaggtgaagagagaatcagcttaaatagaaagggcttgtcaagactggccaatgtttcccaggaaatcaaagatgtaaatgattactttcatccatccattataacaaacctgaccacagtggaagctgtcttaaacttccttccctggttttatattaacccaactgatagattaagtattagtcaaaccact

SEQ ID NO: 15582 - DNA, 743 bp, Homo sapiens
ctatgcagcagtgcgaggacaaaagatcatggagtggtcaaaatattcagatgagacatttggcatgtcttcctttattcactgatattttctacccatggtcttatatcaccgtatgaaatggaaacttacaggacttaaatatcagtgaaatattttgagatctttgaataattcctttagaggaattatacaaaattaatatatatgagtcctttgtaatttatttttttttgagacaggatctcacttttaccgcccaggctggagtgcagtgccatgatcacagctcactgcaggttcagccttctgagttcaagcaatccttctgtctcagtctcctcagtagctggggctttaggtgggcactgccacaccgtactaatttttgtattttttgtagagacgaggtcccaccatgttgcccaggctggtgtcaaactcctgggctcagtcagtccccccatctcaccctccccaagtgctggaattacaggcgtgagctactgtgcccagccttacggacatccttttgaattatctttttcactcatagaatatgaatacatttatttagactttttctagaactttcctgttttcatgtctttgcttcatctggaattggcttaacacccttttataaagtttgtgtttgtaaaatttccattgtgacatcaatacgcaatatattttgtaatataggagtttctatttttttattaaaatggcaatgaaagcaa

SEQ ID NO: 15583 - DNA, 462 bp, Homo sapiens
agcacagggagacccgtccatttggcaggggtggctgcctcatttagagaggaaaagtaaccatcactggttgcacttatgatttcatgtgcggggatcatctgccgtgcctggatcctgaaatagaggctaaattactcaggaagaacaccctctaaatgggaaagtattctgtactcttagatggattctccactcagttgcaacttggacttgtcctcagcagctggtaatcttgctctgcttgacaacatctgagtgcagccgtttgagaagaaaacatctattctctccaaaaatgcacccaactagctctatgtttacaaatggacataggactcaaagtttcagagaccattgcaatgaatccccaataattgcagaactaaactcatttataaagctaaaataaccggatatatacatagcatgacatttctttgtgctttggcttacttgttt

SEQ ID NO: 15584 - DNA, 1285 bp, Homo sapiens
aattctatcgtgatgcagagaagaaagaacggagtgaagccatttatgcctacggcagcagaaagagatgaaatcttgagagcagtgggaaatatgccctattgaatgtttgcattaaaagtgtttatataacttagaagcagatgaatatttctaataaatgattgctgtaatatttaagactgtacacccctcacccagacagaccttaagttcttcaagtggagacagtgaagtcaccccgtgtcctttttgcttgctctcagtgccatgccgatggtatgttgctgttggctgtgttgtggcatgagtttgcatgactttctggaggcatggagttaggtaaggctacatgagaaattgagcttttccactgggttttgaaagaagagtatgatgtgaacaagtaaagactgaatggggctgagatgaaggcaatgtttccaaggaaaggaaatgttatgagcaagagtgtgaggcaagagaagctggaaccacattcagagagtatcctgtagattgctccacctagaatctcaggtgggtggagcagtggtgggagaagactggaaaggtaagttgaaggtaaggaatgtgtggtgggcctcagatcccaggctcattcctcaaatcacttcttacttccctcacttatctttgtttaaataaggttagtacattcactaggggcaaatgggtttttctaaataaatgacataaaaaagaactggttgtctttctttaaagaaagtcttagttacaggattctgtgattaaaatccttaaatattgggttgccttctgcagctgtagtatcagtttttgaaccacagtaatgggaagaaagacaaatggattcccttagaagtaagatttctatttgcaggatgagttgggcagggaaaagggtcagggttcatcaggtgaactcaacactgggatgagactagaacttcactttatgatataaacacaatacgattattcaatgtggtgactggggtagactgtgaagcagccctccttatgcccactgccttttagaatcgtttgttttattcatggtagttttatgaagacatactattattgaatgaaatttaatgtgtacttgaaaacattgcttttgtcccttctcttcatctggtcttgggtcaagaacattgttttaatggctgccgacaatgaactgtctgtctgagtctaaaaccaagctcaggtttctaagccacatgaccttgattgttaaatgtagttatatttgaataaaaaatgaatcatttcc

SEQ ID NO: 15585 - DNA, 2375 bp, Homo sapiens
gacagtgcgtggaaaggagggagcgtgggtctctgtgcttacgcagttgtgaaggttgtgaggtctccttgaagtgttgtgagcttctccactctttgtgttgcttgttgtgcaatgttttcaagttgcatgcttgtcaacatggggactgacctggcttccacgtcaccatcgctacagagcctggctgaacacgcgtcatctgccaaaagtttcaggccagaatctaattagggctttgctcgtaagcaaaactgtttacatgaaaatggtatacaacttcttcgatatttatgtggttcttgtgtttttatatcccgcgctattgtgtcttaattaaaagttttatcaactggcttttaagttgagagcagaatctttttgaaataaaaagccactttgcctacatgtgagactattccagtgggacagtaaatgggatctgctaccaaacagataatgactgaccgaacatagaaccaggctgggttttctgtggaataaagtggtgagcctgacgttaatcgtttacatgttgaaattctcttgccacttagtgaagcagtcattggggtaacaatgctacgttttgtgtccgattcagtgtgtaaacgttggtggttctatgtaatactgaccccaaggaaagacgatcagatacaaagaaagatggttaaatctaggaggttgggtgtttgggggttttgttgatgttgttctgattgggataattcagaaattcctaatattatctttcgacagaatgaccaccctaaaacaaatactgaatgcctttaaaaaaaaaaaaagttgtggttttttgttttttttttttttttttttggtcgagaactactaatttcatgctatttctttctctctccctttgttgttatttgatttgggggaagggagtgaggcttgtgcagatttgagctatctgaagacatgaacagaagtcaaataccagccatatcagtagagccttccattcaaaagtgaacacacttggtagctgaaccatatctgagcagcgtgattctgttgtcttgcatatgttattctctcaggctgtggatctttgttacagctctaggaaactgtagaaatacaatgctatgtagcttttccaccccatggtctctagtgctgcctatcaacttgtccccttttttcccaataacctgtcttccaggtggtacagttagctgtcactcagctgacaccatgatgtggcagcagagagggaaacctacaagtggtttgcctcattgcctttgccacatctgaagttctcagcagcactaccttagacttcatgagctaataggaaactttttatggtgtaaatgctgtaagactttgtacatacttcagttgttatgaaatctttaaagaaaaaaagaaaaagttacgctaataaattgctgtggtgcaggcactaatggtggtggtttctctttgtcctgtattgcacaaaagtttaactttggactatgaaacagaagcagatttttgataggcttgaagaaacattatttcattaagttattttcaccatattccaattactctaaacaccagtgttcttaattgtggctctagcaatgtgcttttgctaaactgattacatcaaggttcctaaaatgtgctgcagcatctcagttcacacttgtgttatttttgtcttttcttaaacatcaggattttttacatcttccacacaactcttcagttataaatattttgagttctcaccttggaggcacacctttgaaatgtatggcttcgtttttatttgtaccagcccaacatccctaccatggcatgtgttcacacactcgctcctccactccttccttcattcctcttcaaaatgtcactgtttgagtgactcatttcaggtatcatggtaggcacgggactgccatagtcaacaacacagtctctgcctcaaggaacttagattttcccctttattttaagagaaataacattactcttagtggacatgctctatctgttatatttggacaatgagtattccatgattatttattgcatcaagttatttgaaatttaatgcttcttacaaaattccatatactatgcaaatgtaaaatgaagccctatttaaaaggtaattttcagaaacaaattatatgattctcagctattactgtttataaatatcttgcttctgaaaagcaaatttgcttccttgactctttcccctggttttgaattctgcctggattttttattcatgttcagtaaaactaaaaccctgcttcccagaagaactgttttggaatgcagctatgagtgggggtgatacaatgtgttcaatataatagaataaaaataagttttct

SEQ ID NO: 15586 - DNA, 1119 bp, Homo sapiens
aattcacggcaccatggaaatgtagctgaacgtctccagtttccttctttggcaacttctgtattatgcacgtgaagccttcccggagccagcgagcatatgctgcatgaggacctttctatcttacattatggctgggaatcttactctttcatctgataccttgttcagatttcaaaatagttgtagccttatcctggttttacagatgtgaaactttcaagagatttactgactttcctagaatagtttctctactggaaacctgatgcttttataagccattgtgattaggatgactgttacaggcttagctttgtgtgaaaaccagtcacctttctcctaggtaatgagtagtgctgttcatattactttagttctatagcatacttgcatctttaacatgctatcatagtacatttagaatgattgcctttgattttttttttaaattctgtgtgtgtgtgtgtaaaatgccaattaagaacactggtttcattccatgtaagcattaaacagtgtatgtaggtttcaagagattgtgatgattcttaaattttaactaccttcacttaatatgcttgaactgtcgccttaactatgttaagcatctagactaaaagccaaaatataattattgctgcctttctaaaaacccaaaatgtagttctctattaacctgaaatgtacactagcccagaacagtttaatggtacttactgagctatagcatagctgcttagttgtttttgagattttttagtcaacacataatggaaacttctttcttctaaaagttgccagtgccacttttaagaagtgaatcactatatgtgatgtaaaagttattacactaaacaggataaacttttgactccccttttgttcatttgtggattaagtggtataatacttaattttggcatttgactcttaagattatgtaacctagctactttgggatggtcttagaatatttttctgataacttgttccttttcctgactcctccttgcaaacaaaatgatagttgacactttatcctgatttttttcttctttttggtttatgtctattctaattaaatatgtataaataaagttacattttagtctgtct

SEQ ID NO: 15587 - DNA, 301 bp, Homo sapiens
gtctgtttttactgtctagctgcccaacggggcctactcacttattctttcaccccctctcctcctgctcagctgagacatgaaactatttgaaatggctttatgtcacagaagactttaatccgtcaaattcttgtataactttgaataaatggttaatgttcacttaaaagacagattttggagattgtattcatatctatttgcatttgatttctaggtcaattgatgtgattatttttgttaaatgttgtcttgtgcccttaactacgaactgaattgtattaaacactacaaagtc

SEQ ID NO: 15588 - DNA, 971 bp, Homo sapiens
ccagtaccagttccagttcaagtgtttaaaacttttgacaagtggtagtcctactgtttacactcacagttaatgttcatacctagttttataagctgttctgtaacatagtgtagcaaaaaaaaaagttcaagtcatgttatacaggtgtgtcaaaaggtatcttggtcattaagtattgtgcagtgcattatttattatccctaggagagatgaaatttgagaggtgatcatgtctttttaaggaaacttacataatgctctgctttttttttttctcttggtaccattggtattataataaagagcaatttgtaactgagtggcactaatggaagaaagtgctgctcaaaggaagtatgaagttatatatttaattttttaattttaatttttaatttttttgctgtgaaggtcaagctgaaatttaccatacatatcatacttgctcatttgtttccctttttgactgtatgggggttcccacactcgtgcatacacacacatccatacactctgacaatctccacgctagtgtgaacgcctctgtcccgaggcgcagcaataataaggcagctgttgaatgtgaagggtccctttggaaaattaacctactgggagggttcttgccagacagaactacagttccattgtctcgtggtcttgtaatgcactggtaaaaacaaaataaatagatgaataaataaagagtgagagaagagagaatcaggtaccttttttaaattaaaggactttgttactttagccacaaagctaaaacagcattacctcagctctaaactagccttgaagtttacagacatgactttgtaaatgtattgtttttctttgttgtgatgtccttttatttttttctttgaaaactgctatcatgtaagataaaatgtaaattgctgccaactgtagtaatgatgcttttaataaaagtgacccatgatatgcagagatgt

SEQ ID NO: 15589 - DNA, 2101 bp, Homo sapiens
accctgagtcaccccaatgctcctgcacactggccttcagtggtatcagccacccaggaagcacatgcacaactgacccatgcagacacgtgtgttctgcttgacacaaggtcctccactcctgaacccctgcagtgactgtcaccagccatcggtctgagcagccaaagttggacaaagacttgagagatgctttttttttcccccagtgaggggactggaggatgatgcaaggcatttatgtaaaaaagattctccctcctttcatatttattgtagtaaattgaaaaaataaagactaaatttgatggacacactgcattaggacaagaatttttctgaggtatcacacagggaccctctccagtttttgaaaattaagtgcatttccaagtaaatgtatcagagttaaactgtacagacaccactgtcaagtttcatgtagtacaaagccctgagacaatagtatctccagtaatttccattcttactgaattatttcctttgacctcatcaccagcatcgaattgttcagcctaagagcatgttctcataggtctgggtatttgcaaagtttgcttattttgatgatatcctgcaaaaaattattttgatgtcacatctcttgtcaggtcactagctgactgtcatgagctgacgttaaaggaagacacatggacgtgaaatacgattatttcatctgagcaatgtgagttaccacaggcagctcaaaagcccattagtgcagcatgtgtctgcagaggagatgtctcatgaaaatcacatgtcagtgattaatgaatccattccagttgcctcaactgggtcactacagcaaagaaaagtgctatcaaaccatttacccttgcccccacaaccctcctgcaaccattaaagatgtggagaaagaccatggttgttgctgagagggtaaatattcaatcatggagcatgacccatatggatggctaaatatgcaagtactgaagtaagagaagactagaaatgcaggatgaaatgtcaaaggtcattttatttacctagtctccttagaaatggagtccccaactactcattcaaaagaaatcagacataaaataaacagacatcatatatgatatccttacttgtgccatgttttccaagaccagtgcatatttttagacatctcttattcgcccagccatctgcatgacatgggtatttattagtattaccagttggtgctcaaagtcaaacaaaaatattttagttaataatgggcagtaaaatatgattttacattattttaaatatttgggagagttaatttgttagctaaataattcaagggaaagagattattcaactggtcataatcacccctgataatattattactaatcttaattatttattacatcatctctttctcaatggatctaatgttttaattttttcccctattggtagagaacaataacagaagtaatttttatattatacacttggagaaataaagttgaaacagaattaaaaatatttctcaaacaactgtatcacaatataaattaaactaattcatttttgtgtagacatacgaaatcacaaaaataataacactgaaataattctaccaatgcagtgatggaaacacttttcttatgtaccaagacatagataggtaagagaaataaagaattgaagtgaattagaaaatccattttattgcttgggtttaaaatagttgtgggatacaagtatttacaatgctattggagtcaattattgacaacactttgcaacagtaataccatttctagcttttcaattggcaatacttagaaccttactgtagtgacctgattttaaataccatattatatttactaagttaagagctagtttttactctcttccataatttcattacatgaatgtaagatgatggctcaaaaatgacgacttatagtttgaatttatgtgtatgcaatatacatatgagaaccaaattcaacaagtgacatgaatgttactacatgaacattgaattgtattgcccttgtcagttatttcctctgttcaataaatactgaaggtcacaaacacctttttacttttc

SEQ ID NO: 15590 - DNA, 840 bp, Homo sapiens
gcaagaattagtaagatattatcaccaaattgtcacatcagtcaagcctcatgtgcttcctaagaactgaggtgatgcattattttagagtgtcattctaaaccccagattcaacatcttcctaatctttctagtgcagtctaatatataaattttatgaaaagcataggtttttttttaaccagcagtgctctttgagaatttacattgattcctaaagattgccattgctttgtataaaatgttataaattatcttagcatcttacctggaatttccactaaattcaccaatttatgatttgtgaaatctgattttactttttgaaaattttcatgtgaatttcccattttcagtgttgtagcacctctctcttcctctaagatcctgcaagctcatcaaaagccatgatcttattataccagcagttttatttattcaatctttcaacaagtagttattgaacttctataatgtgccaggctctggagctcgccttacaccaaacagacacaatcgatccattcgaagtgtcgtaattacacattgagggaccaactagaccttttctcattgtaaacttggagcaaaagtaaattcattaaaataaatttacattatagtgccacaaaaaaatgaacagaaccagaaagcattttttacaaaaattaacagaacagtgtgatagaggggaaaaggatgtgagatcatggtgccctaccttcaatagggtggccagaaaacacctctctgaagaagcagcatttgagctgagacctgaagaacgaggagtcagtgatgcagagaacctcaggagatgccttccaatctgagaaaaga

SEQ ID NO: 15591 - DNA, 3081 bp, Homo sapiens
ccgtatgaagatgtcctgttaaatttacaacactaacgatgtagactctggaaatgcctaataagtcaaagaagacgtattaaagctcttttctgcttaaggtgacatctttgaacactttaacacaaagttgactcttctcgtaatggttttcatcagcgcatctgcccttatactcttcaccaaacacacttgagaactgtaacttcgtcaagcactttctgtcctgaagcttttaccagtatctgctgtcttttgtaattatgcatcctagctaaggcacagaagactgaatgaatgcaaggattcattaactctttgaatttgttaaatactaacagttaaccattagaagtggttcaatgatgtaagagtcacactgcttcaactttttctttgttgtagtttttaaattgtcgatttttagctatttgacagattaaaagcaaaataatcatgccatatttagtcctggagttcaagtctaaatgttgatgtgaaaaattattgtagtaaacttttaatatggcaaagcaaccttaagctctattttagccaaatgaaacataatctgaaattatattagaacatttcccttgtcttcaaactgtttggtgtaacagaatattgatatgcagcttggtggatttcaccagttaatgcacattcttcttccctcctccccccattaatatgtatactgaaaaatgtgcatttgtctgaggaattattttgtttgctaccacttaatgaatctcaaaattttgagtaaatgtacctcagtctaatcagactttttatgacctttataactacatttaaaacccttaattcctatttctgggtgtttgcgagcctgattgctatcatgaagtaaaaatttattactctaggtattcactagctaaataaacatagttcttgtttagcaagcatatgttgttcctcagctcttttctccagcttttgcagtgtcctggcatccttaaaatactttgaaaatatggccttgatccatggattaaatcagtatctaagtgaatgtgttgatgttttattgatcagatctatataagtgggaatacagcatatatctggatattcttatagttatctttttaacatcttatttttttcattaattacatatcaacattaattttgtatcttgaagcaaattgattttgtataattaaatgtgtcaagcatctgtattaattgatttgatggcataaggttatgaaaataatgtactgccccatgtattactgttccaaaaggagaaagctatgtagaaagatacattaagggtgaaaatagcaatacagtagatttgaataccttgatgttttgcattacttcatttatgtttacatcatgtttagaaatgttttcatttactgtggtctttggtcacttcagctcaaagacctagtgatggatatttctttgaggctttcatttatataattttattttgtacaatgttttttttaaatgtgcaaatactgtattcaagtgaaaaaaatacagtatttgtagataaccatagctactacacagttcttcggtagtcccagtgtagttatatcagtgtttactgaagggaacatcaaaatattaatggtatattataaaataaagactttcttaaaggaaaattgcacctattttacctttttaagagtaagccatgaaatcttgtaacatgtctcttaactatttataatgaaaagtggcatttgggtatagtcaccacagcaatgttctacatccctaagattatctaggtaggacatgtcaaagatgactgttgtcattctggaggtcctattagagaatattataaaagggtgaccttgtaggaaggatctgagtcctccccctgaggttctctttttcttggtgctttattagcaactctggatatttttataaaactagttacattataaacggtttcaaacatgtttaatttacattaggtttttatgtaagagtgtcatggaagcactcagcaagcaggctgattgcaatagactcagacatgcgaataaatgtaattgagagtctattcatggtgaggagtacatcccagtgcctttaacctggatttctaatcttaagtgaaatgggtgcagcattcctttggaaaaaaaaatctttttattttcaagtgataattttgtgtttttctcatataagttttctccagagcacccaccttctcttccttcttggtctgtcattatattgcaaaatatttttcctctgaatgaaattatcacaggttgtctcaagcacaaccaactgaatgtctcttaactgtggggaccaaaagggagagagcctggggtctacaagaggagacacatcatcaaatgtttgaatgatcacaaattaagacattatcagcccagtaaatttcttgcttaatgtttttccaagttctggcttgaatatttcttattaaagctatcttatgtgggtattttattttgaaaggtattatagtttgtatatttaacagtaaggaggaaactgtaaccaaaattagtatttctctatacgtattggtacttgaagattcctttcaaaagaaatccagcgttttcctaattttagtacttaatttctctttttaatttaagtgatctttctaattcgaaagctgtgttctttttgaataccgtgcatgggggttaagctgatgttaaaacagtttgcaataaaaaaaaatgaatcagcttaagtcatttaatcatttcaagtgcattctgcatcctttaaaaataagtttaagaaatttaagagaattgtgttttcattaagttttgcatatcttttgttatgccatgtaaattccctttttcgtatgattaaaggaaggttatgataaaatgattagttcatttacattcacttgtagcaattacatgagaatttgaattttgtcgtgtttgggtttgttcattcctgtgaatgatggtacagttaggtgagattttctgttatggtacccaaactcaccatttggtcctctttaatctttgagggtttcaataaaaattgttcactcat

SEQ ID NO: 15592 - DNA, 1692 bp, Homo sapiens
acacacccccgaaaaacacaagaccgacccaaaatctagaggaaagcgaaaagctgctccccaccccctttattttggtcctctcgtagttgtgaaacacttgcagagcaaacaaagcagaggcaagaactgaggagaagtatcagagacaaacgggacttttagccttgacatccccagaatctcggtctttggggtggggagggagggaggagggaggtggagttgggatggagtatggatgtcttttttttctcagaaaagtggcaactttggtggcagcctagaccgcgaggaagtggaatcttccttaaaggtgaaacataagttgagaagtagtgcttggttattaagcctggagagtgtttgaatggcaaaatactaatcctactaataattgtggatttggctagtgctgagggggagaggaggggttaggggttgggtagcatgagagatggaatattcattcagacaaatcagaaagggcacttgaaaataaattttgattctgagccaggagaaaaacttgaaatgttgacttaagtgagggggaaataaaacccagagagagagagagagcgagagagagagacatgttactatgaaagacttgtattttttattgtctctgaactttaatcctgtgaaaatgctcaaagttttggcgagagtgatataaaaaaactgactgtggctgaaagaattgcatttaaaaatatttatgtgcaccttgttactttctactctgcaatgatgtattaacaattcatggtatttatttgttattcttcaatgacccttccacatcaacagtatttatcatgtgttaaagtcatgggtcttatgtgcagatttttttaatgcctctaaaattgttttatagattacttatgctgtgtgccaagtgtttaaaggtttatttgccaacaagtatgaagagaaatattgatgtatctgagctgcttaggtttatgaaaggtcacctggatattttcagttgcatcatccctgtatttaaattgagctttaataaattgcttcagtccaaaaattacaggaaaggtgtattcttaattgatgaatgaattgatctcttttttgaaaggggactcctttacattccaaaagggaaaaacatcacagcaatagttgctatacgtaagaacatgctaagcaaatatttttccaggctgtgctgtgcatttttaaaaggtctaatttaattgcttttaatatatatgtacatatatgttattttaactgtggagaattatttaagttaaaagactggtttgatttgcctatggtgtgaaatcctttgttatttttctaaaaaaataaaatttaaaaagaaagaaaactaaggaagaacaagaagctatttacccaaagtgagctttcagttttagttttgcatggctgtttgactgcctttccgccctatgaaaatcaagaaaatcttttttaaaaatggagtcctgctattttccactccttgcagataatacaaattcagtttgtcaggttggatggtgagttgggagctgtgatggatctgttggcgggttttggatgtgtaaagaatgatatatatattaaataggtcaatcagactatgacagctatgtacgaccatttgtatgtgtatctatgtcagaaagaatctttattaaaatattttgatcaaac

SEQ ID NO: 15593 - DNA, 1506 bp, Homo sapiens
tagacaatgagctgcgaaaagactcctggttcccctgttgatttgtgagggccaagtttgctagtagaaatcgacactgtttagtaaatacctctttagtattcagtggtcttcttttcaggctaattagtggattaagcaataatgaaagcactaagtttggttttgcttttgtgagatggtcagctttggtgctctccacaacatgtgtgttctgacatgtttctaatatgtggccagggcgttcagatttccagttttgaaaacaattgtatagatttcacaacacaaaaaggacatttgtggatgttactgcacattttaaattcttaacactaatttatctgtataagtgttttatatgcatatttttggacataaacagtttatgtaaaattagtaatgaatgatggcaacgagggcactgttatcttcgtttgttttcaatgatcatttagcattcaatgatggaacagctggtataacataagttgttggcatgaaatatttgagattggaaacttcttgccttgaacagaacttatatcttagattctctctcacattttcttggagctggggtttgaataggaaccagatgatgttcactgctgaaattccataatgcttcccattgaagggaagttgagaaccaggaaagctgctttcacgtcattgccatccagtactgacagggaagaaagatgtagttttccagtagtgatgaatcaaattattgaattaaatttcttcttaagaagtaaaaactcagaatgtaccatcttgtttcctttcagtttattaaatggcatcataaagatgactttgctaagttaatagagttaaaaatttttttaatataagccaaaatattaactttaatgaaacattgacttggcaaatgaatttcctataaattatcattggtcagaatgctgttttgtttaataatattacgcaacataaaccataggtgttattagaagtggagaactgcctttttcatctggggcttttaaggacttgctataaatgattattttttaaatgctttataaatcttcatggtttttctatttctgatacactcagctatagttaataccagagtatcctaccaggagtaatatttggaatatttaaatctagtaaaagaagaaagttgtacttcctggctgggagtattaggagatgggagtagagattcacttttaagttcttgaaaatatatgcattctcctaaatattaacaaaaatgatttggggaaatgacatggcttgattgttctgtttaaatttgtactgtggcttatgttacacatgttcatgttcacctctcattcacctgttttatatggtttaaaattctctttaacaaaattcagaaaattcacctgaaacgtattttgacctaaaagaaacatatttttgtatcagtattgaattttggacagtgcccccatataaggaagttactgttttaaaataaagcaaactaactgtttt

SEQ ID NO: 15594 - DNA, 489 bp, Homo sapiens
tattgagccctcagagagtccacagtccctcctctcagttcagtcttgtctccagatggtcgtaggggagcgtgtggggcataaagtgctgtgaacttttccatcttgttgttttatttttgggttaggaaaacatgattgctatataattttctcagtatgcagactttctctctgagtagaatttcttatgaaacacattcaatttgggtgaataaaggcctgaagagttattttaccctccttgcctgatgtaggacagtggaattgtacagcctttatgaacctgccctttatgtgtggcagatctgattcctaactgaccaaagtaatattccagaacaaaagccacttttcttacatttaacacaatattcatatctaccacgaacatgatcatcaaaatatatgagaacttataaagagtttttgtgtgtggagcctcttccgtgtcaatattcaataaagttatagaaatgtttcaagagc

SEQ ID NO: 15595 - DNA, 1000 bp, Homo sapiens
ggctcctcccctccagggacaggctgcagctccagcgagtggcagtggagctgattctgagccagctcgccatatcttctccttttcctggttgaactccctaaatgaatgatattcattccaactgctgcccctctgtctgcctggctgagatgcatgtgggcagcaggaagcccaagtgaaattaatattatgcagatgatgaaagggacctctgaacaggatttctgcaaaaatagccccaaactgcaattccatatgacttatctaacatcttggggggaaagaatattttgagaaaatagttgcagaaagcactggaaataataaacttgatcttatacaaatcttctattgtgtggaaaatgttgtgaagggtgtgtaggtgtggtacatgtgtatgtcactaacaagtggcaaatggtgaaaaaagtggtcactatgcttttgtctctcataggcactgactttttgttattatattatggtagctttcatttcctttactctttaacagtgcaggtggtcagtgaaaatcagtgtcaactcagaagtgactgatttatcaatacatggacaaaaagtaaatcattgaccaaagctatgaaatgtttcacaaagttttcctcttttgcataacagatgtcactggatgtacattcagaaatgttctttgaatttggtgacactttcatggtccagaaagctgaaggcctgggcatctcttgtgacatttttctaatattagttttagattttcacgtattaggcactttagttgaatcttccagcaaaagctgtctactttctcttttattcactgtggcaccaatctggtaaattgtagaacaattgcatgtgtttaaatatatatacaaacatatcacacattaaatatatatatatttaaatcatgctttgttaatatttgtcccaccataatgcctccttcagaacataagtgtaactttatatgaactcttaaataaatgatgttttt

SEQ ID NO: 15596 - DNA, 502 bp, Homo sapiens
tagtttctaactgtcggacccgtctgtaaaccaaggactatgaatactaaatgttaagttctaggcaattatacggggactcagaaggacctggccgctgccttcattgagtttaaagggacaggattgcccttccgtcaagaaagtatgtaagtgttggactgcacaaattaatgtttttcccacaaccgagactttggagattaagaacttatttgaggatttaagaattagggaaataatttggtggaaaccgggaatgagttctattcttaaacagcctttttttttctttttaatgttggatatacggcgaggtagagttggccatatttcagagacttagattgacgtatatgtttctgcattatttttacaacaagtttgtgtatcagagcgggagtgcgggggagggaaagaaaacaaacagtttcagaattgaataggcaagtgactgttttaaagattaagtaataaagatgtcttatctagtgtgactttt

SEQ ID NO: 15597 - DNA, 457 bp, Homo sapiens
ttgtcattttaactgaaagaattaccgctggccattgtagtgctgagagcaagagctgatctagctagggctttgtcttttcatctttgcgcataacttacctgttaccagtataggtgggatatacatttatcttgcaggaaattccccaaagctcagagtccagttccttccataaaacaggctggacaaatgaccactatgttagacccccaggctcgacttcaggggtcagtgttcctgtcccaaaccccacacagaatactctgcctctgtttcatgtagcaaatgagcaaaaactcagtatctatcaaaagtgtaaattatatttcctatgcctagtaattcacttcatgtctaaaaatttatctgatagaaacactagcaccagtacatacagaagcatggcaaggatgtttctggcagcacttttctaataataaaagatttgaaacaa

SEQ ID NO: 15598 - DNA, 2428 bp, Homo sapiens
aggtgaccctcttcaagtgccctgtgttggccaaggttccccggacaagaggaaaaaccttcaggattgaaactgagccacacgcacctctgctagtagctggtccaaacccattatcctccctcactcattgattaccctgggatagggcacaggaaagaaatgtccctcgaaggcaatataaaactgccccttcttagaattgctaaagccattggtctgaaagtgactttgggaggtcataaagtttgtatctctatctttaagcaaaaaattaaactttcccagctcattttaaagacctccaaggaaggaaaaaagcaattcctctgtcttccttgtgagttgctctaaagtgtgtgattttctagtgtaaatggactttgaggcacttgtaaacacaatggttcttactgtttccattactgcatttacttcaccttgacaaggtacaattttcaaggacaaagcactatatataaagttagtagttctaatatccacttgagagtatactcaagattgattttcatggccatttggcatgattgcatgaattctctattcttttatgtgcagtttttctatagaaaaacattaaaagttaaatgttgactgctaatgttttctgaagtggcatagtctagtggaatcaataatcccttgctttggtataataatttgaacttttgaaagtgctttctcatccgttatctcttatcttcacaaaacccctgtggaagaaagcacaattattcccaatctgcagagggggaaatggaggccttcagagattacaggaccagataccaggtagtggaaccagacagcaggtccttaacttctctccagtggactccctgctttgcctactctctagcaactgacttggggaagtttttaaatggtgagagtgtgtctctgggggcaaccattgaaaagaagactctgatatgttggaacaagtaagggatttgaatgaaatacactattatatcttatatgttagcttgaaccagaaaaagttgacatttttgtaggtcaaaaacaattgagcatcaatttcatatggttcaacctcatatatgatactatgcttttcttctatcagtgaaaatgtcatcatcaattccattgtcaacattagtagccttaaaacaataacataataataatgatgataatgatacttatagctatcatctattaaatgcctatgtttcaggcatgatactaggcaatttatatatatcatcctaatctttctaaaaactctattaggtggccctatccacttaatagatgccaattcaaagaggttaaatgattagactaaggcacctaacttatgtgagtgtcaggcttcaatgcctgtgttagagctactccttcacacaaaatagttcagaacatagagaaggaccaaggttaataaatgattttcatcccaaacactaaacatgattgatgggtagaggctgcccgaagtactgtgtaaagatggaatctgagatagaagaatgctgtggtcaattagtaattcttgcccatggagggattagtgacacatgccttgtatatttgtcatctgtggcctaaactctgcccctgaaggtttgttttctaattcagaggtttaaattaatctagcccacttaataaaaccagagatcctatgggaaatttagcctaagacagtgctggaaattgccatatgttgatacaaagaagtgtttggccacattacaggtctcagactcaactgctatgtgtgactgccgctctgtgcctatgtcttgcttttttgctgagttccctatttccatatctccaggtgaatccatgagaagcgagagggtggctgagaggcctgggcctctgggattccaccttgctatctctgctcttcaaccattgttttagactctgaacaccagatcctcatatctgaaagtgatttggagacctgggcatcaagtgctcttttaagaaggggctatcccagaggactgttcaaaagtctcattcaatagagatgttggagtccagaacaaagttagggagcaaaccagtaacctatgctggtcgtaacagaggatcctacaattacgtttgtttttaagacaggattttgctgtgttgcccagactggtctcaaactcctgggttcaagagatccatcctcccacctcagtctcctgaaagctgggatgacaggcacatgccaccacacctagctccttacaaccatttattttaacttatttcatttataactggtatctttcatttgtatgtggcagctagagatttatataggatggaagtaatttatttttaatttaaatatttcatgttgaactgtttgccttgtatggaacattttacttggccaattcaaataaaaataaagtcagctttgtttgtg

SEQ ID NO: 15599 - DNA, 1046 bp, Homo sapiens
acaatatttctcagaggatagcctttcacttattcatctgtccagcatgactcatccccgggagtgttgagtaagtgaaattttgctgtattcatgtttttgtgacttataaaataggatgataaggagagaacatgaactctggagtcagacctgttacctcggacatgatactcttagctttgtcatttagtatttgagtaattttgggcaagctaacatctctggtcgttctcatctgtaaaatgagaataaatgaaacccactaaccagaattggtatgaaaatgaaatgtggcagaaaaaaaatgaaagtgaatagtatcaccactgacacacaagcactaaaggcccttcctgtctccatcaggtatggatttggggcaacatttggccaggtcttgtttatctttctgttcatctattctgtctaattcagtgctttgtttacaacgaatgtcttacaaatgctgactgaacactagcatacctgcatgaacaacaggtaaataaattttagatgtgttttaatgtttattaatctatcctgtcagagaagaactgccagttatagataaatatgatgccaggtcagggctgaagagttgggcaggttgttatctgcatggggtcactaggttccagtggagaggtgggggctaagctctcacccgctctgcagccacctggcacccggtttcagtttcctgaaagggagccttctacttgctgacgactgcctcatctcttctgaggtttcctctgataaacaattttctctgctttttttttttaattatgaaatacttaaaatgtaaaggagataatgtgacacacatttacccataattgagattgccataattgctataactttttcaaaattttgacttaatttcagacttttagaaaaattggccaggtgtgatggctcatgcctgtaatcccagcactttgggaggccaaggtgggtaaattacttgaacccagcagttcgagacttgcctgggcaacatagtgagaccttgtctctactgaaaacaaact

SEQ ID NO: 15600 - DNA, 2439 bp, Homo sapiens
gcagtttgccattcagaaaccattgagcaaaataagtctatagatgggactgaaacttctatttgtgtgaatatattcaaatatgtataactagtgcctcatttttatatgtaatgatgaaaactatgaaaaaatgtattttcttctatgtgcaagaaaaatagggcatttcaaagagctgttttgattaaaatttatattcttgtttaataagcttatttttaaacaatttaaaagctattattcttagcattaacctatttttaaagaaaccttttttgctattgactgttttttccctctaagtttacactaacatctacccaagatagactgttttttaacagtcaatttcagttcagctaacatatattaatacctttgtaactctttgctatggcttttgttatcacaccaaaactatgcaattggtacatggttgtttaagaagaaaccgtatttttccatgataaatcactgtttgaaatatttggttcatggtatgatcgaaatgtaaaagcataattaacacattggctgctagttaacaattggaataactttattctgcagatcatttaagaagtaacaggccgggcgcggtggctcacgcctgtaatcccagcactttgggaggctgaggcgggcagatcacctgaggtcaggagttggagaccagcctgaccaacatggacaaaccccgtctctactaaaaatacaaaattggcagggtgtggtggcacatgcctataatcccagctacttgggaggctaaggcaggagaatcgcttgaacccgggaggcggaggttgcagtgagccgagatcgcaccattgcactcctgcctgggcaacaagagtgaaactccatctccaaaaaaaaaaagaaaaagtaacaaaaggaaattatttgtttttgaaataccagttcaactttgtggattatttttcctctgaaggaaaagaaaaggcttaatggttaggatttttaagtattcccaaagatctgaagggtaataaaatgtactggattttttaaggtggtaccaaaaatgaatgtctgtcatatatttatattacaaatacattatatttatgttctattcatcttttgaatgtttagtatgctattaagtcattctgaatctttgtatttgcttttgcaaataggtatttcaaagctcttttcctaactggttaagtaaaataaaaaattgagctttctagaatatttgcctaattgggaattaaaaagtaaaataataggccaggcatggtggctcatgcctataagcaccctgggaggccgaggcaggcagattatttgagctcaggagtttgagaccatcctgggcaacatggcgaaaccctatctctacaaaaaatacaaaaattagccagacatggtggcacatgcctttagtcccagctactctggaggctgaagttggaggatggcttgagcccacgagatggaagttgcagtgaactgaaattgtgccactgcacttttcagcctgggtgccacagcgagaccctagttaagagaaaaaaaaagtaaaaacaaattgtgggtcaaagtaaatgtatacagttttattacaatgtaacaaaagttgaaaatcaggcagatgtgtattcagtatccaattcaatatatcttagaaaaagcacaggaaacagaccttaaaattgtaacctaccaactaacttacatgcttataaaagtaaaggagaataactggccgggcacggtggctcatgcctataaaattccagcactttgggaggccaaggcaggaggatcacttgagcctatgagttcaagaccagcctaggcaatgtagtgacacctcatttctatttattttaaaaaaaagagagagtaactacagaagaactttaaaaaataaaaaataagcttaccttggattcttggcttagagtagaggttttttttaagttatggaggaaacatttttgtaaaagtttaatgacccactttagatgctccaagaacaagcatcccttccatgtatgtcttgagaaagaaatcacagaagcatttctcaccaatactctttggcttaaaatgttcagcagaattgggcagtgggggtgacttttcttatattaataatatttacatccaatacactgaatcttcctttagaggtaagactttaatatctatactgtaaatatttggtttatttggcactactgtaagttttgtttttcacaaagctcttattatgaagcaaaataaaaattctagtttcttgtatgattttttgtactcattcattcctgttaagctgccaaaaattaaagtgcaatattgtatatttttaagaacaaatttaaaatagaattttgatgtttctcagatcacaagaaatacaaatctatatagtataataaaatcagcaaaaagatc

SEQ ID NO: 15601 - DNA, 427 bp, Homo sapiens
gtattcaattcaagattttaaaatcagcattgagtttcaaatgatatgtttaattaaattgctaatttacctatttcacttgtttctctgcttgattgctagttggttggtttgtaaatggccttgttccaaaaggactaaaggcttcacaattccttttgttatatcatgttacatcattttaatctctaataatttttttactaaactgatttttattggatgccatatgagatatgtctgggaaaagtgcactgatttcaaatgcaaatccttgtttttaaaaatgtggctgttgggcgggcacggtggctcacacctgtaatcccagcactttgggagtccgagagggcagattgcctgaggtcaggagttcaagaccagcctgggcaacacagtaaaaccctgtctctaataaaatacagaa

SEQ ID NO: 15602 - DNA, 666 bp, Homo sapiens
aataaacctgtactggacccagtagtgccttttaaggtgaaaggaatggtaaatctgtacctttaatatgtcctacttttggcccctacctgaaagttactttttttccatcatctgtatataaaattatttttatcatgatgtatattatgtacataaataaaaggccatgattattgatttatataatagaattgtatagattatttttgcacagttttgtcataaattagggtggtaatgaactggattgaactactatatgtgcattatattgaattctgcttgtcattaagataaggtgaataagtgtcttaaacgtcctgtaaaaccggactcccctttgttacatgcacattttccattgttacctcgatgcaaaagaattcatttagtaggtacatctattgtagctgtgattattccagtttctgtgtgatgcaatcaaatgtcctattaattaattattatttcatgtcatttgtagctactgatacagcagaaatgaagggaactgtaattacttgtatttttgtaagccatacgttaaatgtttgttacatcatctttctgcttctatttttatgccaatgaaggcatttgtcttgttactaattacatgatgtaactacttcttgatataaataaatttttattttaattact

SEQ ID NO: 15603 - DNA, 284 bp, Homo sapiens
aaagaactcccaagaaaccaggcaggcagaagctcctgaatgctggactagacaaactacatgctggctaaacattctccactgaagatacatcaatgcttttttttttttttttttctgtaaatctttcttcccattgcaaacaagtagtgatcagtttatactttgatatttatgctggaaatggatagaagttcaatcagacagttcagcttcacgaactgatgtctctctgtattgacattaagtattcacttttagagtaaaatccatccctgggacat

SEQ ID NO: 15604 - DNA, 57 bp, Homo sapiens
ttcttaccctttggaacagttcaggcacccttagacacagtacacagcccttcctag

SEQ ID NO: 15605 - DNA, 775 bp, Homo sapiens
aacagagagaagaagttgcaagtggtccttaaagaaatgcagttattcaaatccttatgtatagttctaattttatttactatgtgtaatcatttagagaatggttatttttataatctcaataataaacaagtactatcgtagccagggggtgcccaagtatgtaatcagagaacactaatcctggcaaaggattgtggggtggtcaggaggccggctgccttttgacatggttagagtcctgggtttagattactttataaatagttattaagattaatatttgatatattaaatattgcctgattcaaataactttgcttaaaatttttctgtattttaacttgtctagggttttctacttcttctatttttataatattttctcattttttagattactaaacattctacttatccacatgtgccaagatgtgccatttaggtctctgcagaaattagctgtttggtatcatcacctgccatacatgttgtgtgcagcagtgagaagtatattctctaccactgctctttctcatgattattttctctattcctattaaaatgaataattgatatgttaattaagtaaagcaaatcaataaggaatgaaatgcatggcccaaaacatagaaaatgaaaatcgtttgaccatttatccaattattgaacccaattaagatgatccattttaaatttaatatatgctcgcttttggaatgtgttatgcattgatgttaagtgaatggatctaagtaaatctattgatatctct

SEQ ID NO: 15606 - DNA, 2377 bp, Homo sapiens
tcagccccgtctcactgcagacatcaactggcaaggcctagaggagctacacagtgtgaatgaaaacatctatgagtacagacaaaactacagacttagtctggtggactggactaattacttgaaggatttagatagagtatttgcactgctgaagagtcactatgagcaaaataaaacaaataagactcaaactgctcaaagtgacgggttcttggttgtctctgctgagcacgctgtgtcaatggagatggcctctgctgactcagatgaagacccaaggcataaggttgggaaaacacctcatttgaccttgccagctgaccttcaaaccctgcatttgaaccgaccaacattaagtccagagagtaaacttgaatggaataacgacattccagaagttaatcatttgaattctgaacactggagaaaaaccgaaaaatggacggggcatgaagagactaatcatctggaaaccgatttcagtggcgatggcatgacagagctagagctcgggcccagccccaggctgcagcccattcgcaggcacccgaaagaacttccccagtatggtggtcctggaaaggacatttttgaagatcaactatatcttcctgtgcattccgatggaatttcagttcatcagatgttcaccatggccaccgcagaacaccgaagtaattccagcatagcggggaagatgttgaccaaggtggagaagaatcacgaaaaggagaagtcacagcacctagaaggcagcgcctcctcttcactctcctctgattagatgaaactgttaccttaccctaaacacagtatttctttttaacttttttatttgtaaactaataaaggtaatcacagccaccaacattccaagctaccctgggtacctttgtgcagtagaagctagtgagcatgtgagcaagcggtgtgcacacggagactcatcgttataatttactatctgccaagagtagaaagaaaggctggggatatttgggttggcttggttttgattttttgcttgtttgtttgttttgtactaaaacagtattatcttttgaatatcgtagggacataagtatatacatgttatccaatcaagatggctagaatggtgcctttctgagtgtctaaaacttgacacccctggtaaatctttcaacacacttccactgcctgcgtaatgaagttttgattcatttttaaccactggaatttttcaatgccgtcattttcagttagatgattttgcactttgagattaaaatgccatgtctatttgattagtcttatttttttatttttacaggcttatcagtctcactgttggctgtcattgtgacaaagtcaaataaacccccaaggacgacacacagtatggatcacatattgtttgacattaagcttttgccagaaaatgttgcatgtgttttacctcgacttgctaaaatcgattagcagaaaggcatggctaataatgttggtggtgaaaataaataaataagtaaacaaaatgaagattgcctgctctctctgtgcctagcctcaaagcgttcatcatacatcatacctttaagattgctatattttgggttattttcttgacaggagaaaaagatctaaagatcttttattttcatcttttttggttttcttggcatgactaagaagcttaaatgttgataaaatatgactagttttgaatttacaccaagaacttctcaataaaagaaaatcatgaatgctccacaatttcaacataccacaagagaagttaatttcttaacattgtgttctatgattatttgtaagaccttcaccaagttctgatatcttttaaagacatagttcaaaattgcttttgaaaatctgtattcttgaaaatatccttgttgtgtattaggtttttaaataccagctaaaggattacctcactgagtcatcagtaccctcctattcagctccccaagatgatgtgtttttgcttaccctaagagaggttttcttcttatttttagataattcaagtgcttagataaattatgttttctttaagtgtttatggtaaactcttttaaagaaaatttaatatgttatagctgaatctttttggtaactttaaatctttatcatagactctgtacatatgttcaaattagctgcttgcctgatgtgtgtatcatcggtgggatgacagaacaaacatatttatgatcatgaataatgtgctttgtaaaaagatttcaagttattaggaagcatactctgttttttaatcatgtataatattccatgatacttttatagaacaattctggcttcaggaaagtctagaagcaatatttcttcaaataaaaggtgtttaaacttt

SEQ ID NO: 15607 - DNA, 1517 bp, Homo sapiens
gctattcatttatgatatatattttcttatattttgtttcattggttagtaaagaaaatgtgtgttatgtgggtgtgttgtctcttatttttgccacctttaatttgaaattagttcagtgaaataggagatacatagtagtattttatttttaaaattaatttctcatttggttttgaagatcttgagtactcagatatctttctactgcctggtagagctgccatcttgagcctgaaatataagaaatggtctggttttcataatgagaaggctggaattgagcttccctcccattttccttgttcctgaactaatactactgtacctgttatggaggactgcaaagggaagagaaaagcagaacactgtattattttttcctttattgtcttcagtgcatatatttgcagttggggacaggttgagtagaggaaaagggaaagaagggaaagcagaaaacaaatttttagcatctgctgtgctttcatccatgaaatctccaattcagtaagtgcaaaagagaattggtgtgcatctgagaggtctgacatttcattatttacttatttcctagcttttctgaattaatgcactcttaacatataattatattaatcctatttgtgctagaatagttgtatctaaatcatattttaaaattatttttatttttaaaaaattatggtaaaaacatataaaatttaccatcttaatcactttgagtgtacagttcatcagtgttaactgtattcaccttgtgcaacagatctcaaggactttttcaccttgtaaaactaagattctctatttattgaacaaatccccatttcctccttccccaagtctctctcaactgaaattataattttttgtttctatgagtttgaatactttagataccttgttgccatggtttgaatgtgccccccagatttcatgtgtgtgaaacttaatctccaaatttgtatgttgatggcatttggaagtggtggggactttgtttatttatttatttttaattttttaattttatattattattattattattatactttaaggtttagggtacatgtgcacaatgtgcaggttagttacatatgtatacatgtgccatgctggtgtgctgcacccattaactcgtcatttatcattaggtatatctcctaaagctatccctcccccctccccccaccccacaacagtccccagagtgtgatgatccccttcctgtgtccatgtgttctcattgttcagttcccacctatgagtgagaatatgcagtgtttggttttttgttcttgcgatagtttactgagaatgatgatttccagcttcatccatgtccctacaaaggacatgaactcatcattttttatggctgcatagtattccatggtgtatatgtgccacattttcttaatccagtctattgttgttggacatttgggttggttccaagtctttgctattgtgaatagtgctgcaataaacatacgtgtgcatgtgtcttt

SEQ ID NO: 15608 - DNA, 256 bp, Homo sapiens
ctagttacaaaagcaataaattgaaacaaaacaaaacaaaacaaaacttgtttcttaaaaatgcggttaataatgcctgtgaactaaaaaaatgggaagccctccccaaaaaaagtgcataaaatgttatttttgcatggcatgaacagtttagcttaagtactgtttaaataatgagtcaagactgcattttgtaacaaaccaacaaaaatgactgaagaacagtgaacaaataaaaagagctctattaggaacc

SEQ ID NO: 15609 - DNA, 1354 bp, Homo sapiens
ttgtgtttgtaaaagcttgatgaaaggacagttaagtattttgatcactgcattttgtttgaaacttgtgtcattgatgtaatttaaaacttttgtttaaagcattacagtatttttctgtgaccatcaattaatgagggtttgtgctaccagagttaaagcatatgctatcattgtattctttaagaaccttattttgataaaatgtaaatttgttgaaccctgccacatttagtatccccacccccaaatcctgttccaatgaaaaaattaaaacctgatacgaaaaaaaaaaaattccagttaacctattttgtgtctgtaggctgacctcaaccctgtaacgtaacccattaaaatgaatttctttttttttaagacagagtttctctctgttgcccaggctggagtgcagtggcgcaatttcagctcactgcaacctctgcctcccaggttcaagtgattctcctgcctcagcctcctgagtagctgggattacaggcacacaccaccacgcccagctaatttttgtatttttagtagaggcggggtttcaccatgctggtcaggatgttctccaactcctgacttcatgatccacccacctcggcctcccaaagtgctgagattacagacgtgagccactgcgtcctgcctaaaatgaattttctagatgattgaataacagtagtcctttgatagaagataatgacttggtttatggccttaatatactacttaattacttaagatgtttattaatagaatgataaatgtacagagtaacctataagcatgacatacttttgctttcagtagtttcatgtaaagaaaaaaacttgaaaatagtaatacctgagtacccatgggaataatagacactggggaggtagggtggggagcgggagcaagagctgaaaaacttacctactggggactgtgctcactacctgggtgacaggatcatacgtaccccaaacctcaacatcacacagtatactcagctaacaaacctgcccatgtgtttcctgaatctaaaataaaaatcgaaataatttttttaaaaaagaaaaagacaatagtattacccatgggacaaaatttgtactattagcaagaatcattttgtgtctcatttagaaacaatttgacttttgttccagtgtttaaactttgacaaaaatggttttgaatagatctttataacctgatgccataaatacaagattctctgataccttcatttaatatatcaatattgggcctaaaacagtattctgtaaagcttaaattggtattaactatgatcatcttgatgtctatgatagataataaacaaggtcatacatacctt

SEQ ID NO: 15610 - DNA, 1520 bp, Homo sapiens
gaatctttttgtatggaatattacttctatcagaagatgatcaagatgtttcagtccagtgcacatcagcattgctgacattttatggattctaaacttgtgttgtttcttttttaaatcaactttttaaaaaaataaagtgtaaattaaccgactagagtacttggaaaatgtgatcagtacaagtgaacttaggttgttgccaacagggtccttttaggcagaacccagaaaccagtcaaatctgtagagaagcagtgtgacatcttcaggttaccattattttttaatgagcaggaagtctagaaatgataactagactgtatgtttcatgtgtgtgatttttcagaattcccagagtttactcattcttgttattaaactctagccagttgacatcttcgcaatttcaaggactgatagtgctgtattttctcacgttttctaagtttccgttttgcaaggcctaggtgactttttcatggtgtttgtatgtttagctcttttgaaaaggaattttgaaatctccatcaactgaagtaaatgatgtctgagtgttacagtaaaggtgaccaagtctctttcttaaagtcacaatgactaaagtattagttgaatttttttttttttttttttgatggagtctcgctctgtcaccaggctggagtgcagtagcacaatcacggctcactgcaatctctgcctcccagtttcaagtgattctgctgtctcagcctcccaagtagctgggactacaggcatgcgccaccacgcccagctaatttttgtatttttagtagagacggggtttcaccatgttggtcaggatggtctccatctcttgacattgtgatccacctgcctcggcctcccaaagtgctgggattacaggcatgagccactgcacccagccttgaatttttaattttatctctgatatacttcattaagtgtctggagacctaattatcctaaaagatcatacattttctacctatgaattttgctgcatacagaaagtgccctttcctcaggaagttgctgtgtttcatttctttggatggactcttatctagaatacatagcagctctgcaaaggaacagtttttaaaaatgggaacttctacattgaaaagtccccatttttgtgccaactatgattagtgagaggaagaaatcttattctatggcatatgtatggaagggtgtaaagattcttttgaaaggtttattcacattgtagaacagcaaatgacatttttacagtatttttttgtaaagcaaactattttgtgccttgaatttggtatatgtgtattagtgaaacattgtaaaggtgaacttctacctctgtatctaaatgtataccatccacttgtaaatgactataaactattatgtgattgcttttttttttagaatgtcttgtttaaatagtggccaatgtttaaggctgttaaaataagccaacttttactaattggggagttttataaatgactgattaaatttaaagaatt

SEQ ID NO: 15611 - DNA, 1155 bp, Homo sapiens
gcctatttgttagtgttcgtgctcaaatgtgatttacgttttaatgtataataataaaattgccttttgcattccgttagtgactgattgttaaaaataatttgaaattatcaaagcttttaatttccagagaatgatgtttgtttataataaaacaagctatgtttgaaaaccaaaatgtagtatctaccattcgtgttttagaaaggtatgtgaataaatatgttcatgctagtataagagttctgtgttactgtggttgactctaaactggggatctgatgtcagtagcaaatgggagagttgctttattctttgtgtatggatttttctaagtgtataaatattttccgacattaaaagacattttctctttgaggaagacacagtcataggtggtgcggagctgtggtccacctgctcctgctcctgactcactgctctttgctgttgcctgaggaccaagtctgtcaggaagctggctaggaagccttgcagcagccatggcttttaaacataccagaaaaacacccgtggagtcagaggtggcaattcaccgaattcatatcactctaacgagttgcaacgtaaaatccctggataaggtgtgtgctgacttgatctgaggagcaaaggaaaagaatcagtgaaaggaccagtttgaatgcctaccaagactttgagaatcactacaagaaaaacttacggtgaaggttctaaggcatgggatcgtttccagatgagaatccacaagcgactcattgacttgcgcagtcctcagatagttaagcagattacttccatcagtattgagccaggagttgagatggaagtcaccattgcaaatgcttaagtcaactgttttcataaattgattaccagttgttaaaaaattttcaaaaaaccgcaaaatttcaagaaattcacaaattatgggagcagttttaagtcttctttggttcagaacacaggtttttgcctaacccctggcatgattgcccataagaacatacatgtacagttgaactggtggttagctatacgggaaatggtaagtagtgttgtcttcagtatcttaatttgtttctgcaactgtgcactcctcccttggtggcaccctatgggtgtaggaaaaccactgttattaaacaggtg

SEQ ID NO: 15612 - DNA, 16 bp, Homo sapiens
aataaattgagtattt

SEQ ID NO: 15613 - DNA, 2731 bp, Homo sapiens
gtttgttgggatcttgtcgtggcagctcatccaagcatttagctagaccctgtgattgcccgtggctctctgagtctgtcttattgagtagttagcagtattttttcctaaaattcagaagtcatctttgttacacaacacaggggttcaggtagcaataggacacaaaattgctttattctacaactgccagctccaggcagaaataggaaggcaaagagataagagaaggaaaaatgagagaatgaagtctgtatagggtagagcaatagaaagtaagcttcgggtgcctccaacgttcatggctgcctgtctcattggtaaacctcacatttagttacttgtggctactgcccacacatacacttctgtaattgagaactcttaggagaggactagggaatcactggggatagtgggctggagagaaccccaggctttatatgtatactttgacctcagtgttaattttaaatgcttatgaatcacacacattgctttagtaagattaagtgcttatatactagaaatttgatgctcattggaacacatctgcctagcatttctgtaaaagtcttaagtgatattaagatgattccttaccatttcagatggtccgcaatttgaattaccaagtggtaatggttccttactgttttagatggtgcctgtgagataccattcctctggatggtcatgtccagtcagtgggaggtagaaagggtggcatctgtagccctcttcatacacataagtggcatttaggtgaatgtcccagctaatcactagcatgtctaggtattggctgggtagtgggtattttgatgatctgggagcaccaaatatgttcattcttcgtttggggaggctggtctgtaaacacaaaaattgttgtccagatctttcatctgtttatgatcatcaacaaagacttgttagaaaggtctagtcttagcacttggcagttaatctagggaagatgaattaaatgggtagatagtgatgcatacctgtattcactgatgtatgtttaagggatttgggggggatacctcagttcatgtggaagggacagtctcggtgtgtcccatgaataaccttggaactgcaacaaatggtttgtgctcagaaaaagtctttcatggtgacaggaagacagtttccctggagctggccatgaaggccttagaagccatttctggtgtctggtgggtagcaggcatagagatgatgtgccgaggtcccagtgaacaacagtagccaaagaatgtactaactttatcattaataggaaagtcatacctaggaaacaatgactttttgatggcaaaatgattttttaattctattttgatgctgtaattccatttcatgacctagttgtattagaaaaccttgatgaactatatgttcccgatttacaaaaaaattaataaaacctccagagtaaactcagtcaaacaataattgagtagcagcttttataacatttaaaatttgcacatgagtgtgttgtcatatggagtgtctgaatctgttgctgggacataccaatccatgtattcattagagccatagaagttattattcattagttcatagtgtttgagttctttatgtcactctgttagaaacaagaactgagtcgtgaagaaataagaattggatttttataaaaacctctgaaggatatttacctatgaaaaagttgttaagaataaaaattagaagtccatggttaacttttccttcaatttatattattcctgaatcatagggaatctttctagaatgtgtttataatttccttgtacagtttctttggaaatacgttaaagatagtggcaatttcatatatttcatggatacttgagtttgtgcttttaaggtgtttgtttagggatacaatgaccactagatgtcgctgtttatccagtagactaagattgagtgttctttttgttcagcaactcttctaaaatgtttcaagcaaagatagtaatgacctcagtttctgaaataagggcatcttcatcagattattcttctgttttaaaaaaaagcttgaggcaaatgtgagtgatttccagtgctttgaaagggattacagtatcacacaatgtcaagctagagttaaacacagtattagctaaataggcacttatgtgtattttctttttcatgattatcggtgactggtcagtgtactcatcaatttccaaaatttgtataaatatcacaattagaaaaatgcctgaggtactaaagttatgttggctttttgtgtcttaacacacataaatactattgttattgcagcagatgccttttgaatccattttccataattgcggatagtcataaattgcttgctcaatttttagtaattattgctgttgacaccagcgttgtagatttttggtgttgttgaatgcagtagagagaccaagacactattctgtaagatcaataaaagtaattggaaaataaatatgaaccctaaaacaaagtactcactttgtaatcttttttggaaaacagatatatttttttcatttaaaatcaaagcatcatgtggtagttaaaagggtaaaataagcagaggttaggtattcaagatacttagctataggatgccatattttcgttataacaaaattgctgactcttgcttcatttaaatatgcacggttaaaatgaatagcggcctaaagaataacactgatctctc

SEQ ID NO: 15614 - DNA, 5774 bp, Homo sapiens
gtttaccttttcctccaggaaatataatgatttctgggaacatgggcatgtatatatatatatggagagagaattttgcacatattatacatattttgtgctaatcttgttttcctcttagtattcctttgtataaattagtgtttgtctagcatgtttgtttaatcctttgaaatatttgaaacatcaatttctattttctgacctctaagcctaaattaagatattgtatatgtaatgatgacatagttgatgcatccaatcctaaaacttacattccaaaggaattatatcattatgttcctaaggagtaaatatatatttgacctgtaagtgtgtgtatgtatacatatacatatgtatgtgtatggatttatatatgcacacaaacatataatatgtgatgtaacatgtagatgataatatgattcagtagtcaacttgagggaaatttttaaaaaactattctcaattatatacgaggtgatgggacttcttaacacacatttctataatacccatgaaatgataatttgtaaaataacacttagtgatatctggaaataataattcaattaagcaaccacgaatttcaccctggagatattttttcttatttgagtccaccaaaggataatgccaacttatataagttctcaaatcatgccttccgcttagtctcattttattcattcagtcgtcatgagttgagtgcttactacatgcaaggcactctgctagttatattctaataatgcagagataattagacatggttcccgccctcaagaagctcacaaaagtattcaggaaataatgcagactagtgattttgctataaaattatttttgaaggaagcagacacagcagtatttacctgtaggtggagcaagtaataagccatgctgtgcaatatatacataaagcttctgcttctcatgggaatttagttacagtgcttggaatgagaaggggaaggaaagaattaacaaatgccaagatttctggagcagattgtacagctgtgactttggaaaacagaaagtaagaccctcagaaaaccaatgaagtctaagagaaataaaatttagtggacaggtatgaaaagtgtaattgcgcctaactaccagatggagagcttcagaatgggctatccttagagtctagtacatcttgaggcctctcagcaggagacaaaggattccaaaaagagatgtggaggtgctgagggcacctctatctctttgttgtttagtctgtcattgaatcaatctacttatcatcttgggtctttgagtattgtatgaaagatccttcgtgcacaccacacacagtcatgattttgttaaagtagccttcttcagatgcttttctaagggctagttaccaactttatttctgtgtttctgtagaagaaacattttcagttcttcattgagtttgattatggaaatccattcaaagtcactatgaaaattttactcatgtagtttggaaatgcaacattttcctatcatgaaatctctttcagagaggagaatacaacatcttagtccagacatttaacatactgcatttcaagtacatgtgtgtgtgttttattcaggttgtgtaatgctcccgtagaattatagaacaattaaatatggttagttccagagtgcaaattacagaaggaagctacttgtttaaaattccatacacgtttgcagtttcttgtacacatttggatactttgaaagatgacagattgttaaatccattcaatggtaaagaaactcaccatctggagattgagtctacttgttaatgaatgactagcccaattatccttataaattgaatatggtgaccaaatgctttgatatcatactactctgcctttgtgggcacatatgtagacactactaaaaataaatatttttggagattaaaatggagaatagaagtaattacattatttaggtcttaatccaacttttttctaatatatctaaacaattgaaagggaagcttattcatggaatattggcttgatttatctagaaagtttttccttcttcaattttactatattcattctacaggaacagcaataagtactattaaacagaagatggctacactaagttccaattttgttgctgaattgcttctgtgagttcacttttcagttctaaggaagaataatatttgctacatatttcacaggggttcttatgaaggtaaatttaccagattaataaaaatttatgaatattaaaattatcattaataatataaaacacttatttgagattaaattaaatttttcatgagcccctctttggcaggaactctgtttaattctttgtatttatcccagcttcttaaatggtggctgtaacataataaatgtttaataaatgcttatatgaatggatttttagaattaactaagaagccaaaaatggcaacaatttacagaaatcccacctttccatgcttaagacaaaaatgtcttaaatataaagctgtgattatatcaaaaatccagataaatcatcaaatatatcagattaagaccagggtttacacacttaggcaatagtcctttccaaaccatgacaaaaactacaagtttatttataatttaacaactcagctgaaaatataacgggtatatttgttattctaactctattttttaaagttaataatataaagtggccatgtaaaatattttattttccaggctaaagcaaatgaaagtttgctggtatcaacacagcctgccatatttttcacagcatgcaacaatggtgctaggatagctatttcttactgtaattgccagaggcagaaatggtctgggtataagctatttcataaaagcagctttaaattgtcagtattaaggttttcatgtggaaaggtgtcattcaaaaaaaaagtaattggcatacatattccacatcatcgatcctctctgtggtgttaatttttttatatgaccagtagaaaaattttaatattctcacaatataggttttggggcttccatatcatcaaaagactgaaaaattataattttagaattaaactgatggatttcattatagaattatctgtgagttgtgtagacacagtcttaatgtttctggttatgacagataagtttgctcaaaaaatgtggatgaagccattattgttattattgttattgcttctgttcagttgtctaagtatcatcccttctgtggcccatcacgcagcagagttgccctacaaatttcatttggcagcgccataacattcatttaaaaagtttatgaaaacattcatttgaaagttccatgcagctttagcacagagttgaccaaacactggcgtaagttcaatttacacagaatatttgaattgaaacaatagaaatttttctcataatatatacctatgtgaaaccaacttatctgcataattaaatctaatacatatttaagccagtttaagtgctttgtgttgatgccatgcttatcaaatacatgcacaagctaaacataatttgaatgggtctatgaaggaaaaataatgcttagactttggtgtaggttcttcctgtgtagccatatacccaggctctgcagtatcgaaggatgcaaatgttgacatagatggaagctcttacctaccaaagtgtttaggaaggataaagttacatttgtcttaatttctaacattatctttgcttttatgtttcataaaaatttgtcattatttatgctggtgaaacgtataatcacatccaattatttgaacacatgcaaaataattttttaaattatgttattgtttaaatttgacttatgggagatcagtcaaaaacttagaaggtttaacacttcactgattaatggtgctgaaaacacgttacaattaccacatatccttgctataagttttgaagtttcttagcaattaaagtttttttattcagtgtgaactgtcagtatctattctggtgctaaatgtatggtgctaaatgaattgttagtgttgatggctttagtaatgctccttttattcattgctaaatttagtgttatccatttgattcctgattcagaaatatcaataaaatcctatgttaaattaatctttaccaaaaacaggcaagttaactctgttgttttaattcaacagtccaacattatttaggtgttacagagtgtaaatatatttctttgggagttattttctttttaaaatctttttatagcttggcaatgtccaaagtcaaatatcacctaaactggttagattacttctacagctaataatattgcaggcactggcgccctctggtggttatgaagacaaattcttaatggctacttgacctacagcaaaagccatttctgtaccataaaaatttgttgtgcaatattagaattatcatatgtttcctacatctgacagcacctaaaatgtttgataatattaacatgtatctaagaggaaaaaagagttaatatattctggcacccactttcctagtaatgttttccatgattttccagttctgaggcacttattaaagtgcttttttttttctgaattaattaggtattggtaaaatatatttttaaatttagttagctttataaacacaattagaattacaattaattaacagaggtataattgtctcactttcagaagtgatcatttatttttatttagcacaggtcataagaaaaatatatagaaaaataatcaatttcatatataaaaggattatttctccacctttaattattggcctatcatttgttagtgttatttggtcatattattgaactaatgtattattccattcaaagtctttctagatttaaaaatgtatgcaaaagcttaggattatatcatgtgtaactattatagataacatcctaaaccttcagtttagatatataattgactgggtgtaatctcttttgtaatctgttttgacagatttcttaaattatgttagcataatcaaggaagatttaccttgaagcactttccaaattgatactttcaaacttattttaaagcagtagaaccttttctatgaactaaatcacatgcaaaactccaacctgtagtatacataaaatggacttacttattcctctcaccttctccagtgcctaggaatattcttctctgagccctaggattgattctatcacacagagcaacattaatctaaatggtttagctccctcttttttctctaaaaacaatcagctaataaaaaaaaaatttgagggcctaaattatttcaatggttgtttgaaatattcagttcagtttgtacctgttagcagtctttcagtttgggggagaattaaatactgtgctaagctggtgcttggatacatattacagcatcttgtgttttatttgacaaacagaattttggtgccataatattttgagaattagagaagattgtgatgcatatatataaacactatttttaaaaaatatctaaatatgtctcacatatttatataatcctcaaatatactgtaccattttagatattttttaaacagattaatttggagaagttttattcattacctaattctgtggcaaaaatggtgcctctgatgttgtgatatagtattgtcagtgtgtacatatataaaacctgtgtaaacctctgtccttatgaaccataacaaatgtagctttttaaagtccattgtattgttttttctttcaataaaagagtataatt

SEQ ID NO: 15615 - DNA, 2314 bp, Homo sapiens
aactgaatacttggaagaggaccataaagactattccaaatgcaatatttctgaattttgtataaaactgtaacattactgtacagagtacatcaactattttcagcccaaaaaggtgccaaatgcatataaatcttgataaacaaagtctataaaataaaacatgggacattagctttgggaaaagtaatgaaaatataatggttttagaaatcctgtgttaaatattgctatattttcttagcagttatttctacagttaattacatagtcatgattgttctacgtttcatatattatatggtgctttgtatatgccactaataaaatgaatctaaacattgaatgtgaatggccctcagaaaatcatctagtgcatttaaaaataatcgactctaaaactgaaagaaaccttatcacattttccccagttcaatgctatgccattaccaactccaaataatctcaaataattttccacttaataactgtaaagtttttttctgttaatttaggcatatagaatattaaattctgatattgcacttcttattttatataaaataatcctttaatatccaaatgaatctgttaaaatgtttgattccttgggaatggccttaaaaataaatgtaataaagtcagagtggtggtatgaaaacattcctagtgatcatgtagtaaatgtagggttaagcatggacagccagagctttctatgtactgttaaaattgaggtcacatattttcttttgtatcctggcaaatactcctgcaggccaggaagtataatagcaaaaagttgaacaaagatgaactaatgtattacattaccattgccactgatttttttttaaatggtaaatgaccttgtatataaatattgccatatcatggtacctataatggtgatatatttgtttctatgaaaaatgtattgtgctttgatactaaaaatctgtaaaatgttagttttggtaattttttttctgctggtggatttacatattaaattttttctgctggtggataaacattaaaattaatcatgtttcaaagttttattttcagttccttttgcatgcctattttgatttagaaatcactttaagataaatgaacaaaattattgtaagtcttctaaacttggtttattgacgttagtataaataacatacaataccagatgtctacaaaatcgacctgattatttaggtatttgtatgtgaaagagaaacacatatttagaaacacagcaagggagattttgaataaagagagagatgaatttataaagtaggaaaaaaagaatctgaaagatacaaagtgattataaaagaattgacaggacaataaatacttcaaatacttttaggaagtaaatgagtaggagtttaggagggataaacgagataaattccatgcaatgatcaaggaaagcaagagagcagataatacaaaagaaaaagaagaaggttcacataaatagcttctggagtgcaaattataaagacatcaacatttttgatcatataataagtactggcttacagctaagtggttccaaatactggtaattaaaacaatgatgtatacgttaaagattgcaaaacttaaaagcagatttttatgggaacttttttcgaaaggatacatgaccaccttcttaaatagtatgactttacatagactctttttctggtccttactgctcctcccacaacagggaagcccgatcagttctgtcagtataaggttttcttctatttgcccttagtttagatctccatcatcaattccacttactattgtaataccttcagctggagcctgtgtctttctccattcctttttaatacattcgtatttcccagccccagaacccttgaaattaactcttccatgagttttcattgctgaagaaaaaccaaacattcttgtaaaaacatttaagaacttccatagtcttgttcatattgtttacctatcttctacacaaggcgtgtccttgggtaagttatttaacttcaatttaccttacctgtaaaatggaacaaataatatctccttaagattgctctacgaattaattgacacattatgtgtgatgtacttaaaggaataataaatgcataatatgaggtcagtggacgccattttctgttataatcatttttgttatctaatttggggaaactattcatctgtcatatactattgatcctttggcacttaaataaatgtgaaatcctccaggaattttcctgtgattctccttgtaagaattaaatgctctctaatatgatatcccttt

SEQ ID NO: 15616 - DNA, 2728 bp, Homo sapiens
aaatgtgtttacttcagaacggcactacataaatgtgaaaagttgttgatcttgaaatatctcaggatagcacttttggcaaactcttagccaaggcttcttcattggtgctgttataagatggtgtcctattttcttgtttatacgttcattctgtttgttattgctactatgtaaaactttcacatgcaaccaatgtatatctgagtttgaagatgtttatatagggtattttttccaactgcccctgcattgtgcctgaaccaattgaatcttatgtatgagtttcatttgttttattaatgttaatttaaatctgtaaataattgctttattgtgatgtgatacagaacaaagtgttcgtttttgactgaaaatagtagatcagaaatctcagtttaatataaaatgagctaagtttttaaaaataaattataaacttggagattagaaaaataaagcagttgctgtagaataggctgtatctttttcaagaagaatctcttatggacagtctgtggtaaagaagcaactctttgctttagagttaaatattcctatcttaagtttagaaaaatacaaaaaaccattccaaggatgactggatactttttgaaatctgactttctttgaagatgtatgttaagcaaaaacatgttgcttttatcagttaggatacagggtgaactgtaacaaagaaacccctaaaacagtgactaaatcaagagaggaatctatttctttctcctgaaacaatttagaaaatagttatccattgactagaaattagtacatgcccacagctggctcccacggtagccaggagaattatctataggtggaaagtctgtgtcagccaaagccatgtcactctgagagaactgattctgaggacaagttagccatctaccacccatgtcccttatttggtcctcacaataacactttaggagagatatcattatcgctgttttataaataagggaaactttagcttgagggtttaaggaacataaccaaagttcacaaacataacgagtgagagaaacacattcaagcccaggtctagttgactttaatgaatctttggtgtggaatgaaaaatgtgaacttcttactcatagtgtggtttttaaatatatgcagttgagtgatgattggatactattcatcatattgcctataatatatatttaccgataagcagtgagtgtaaaattgttgtagcttgaataagaaaccacttttgtagttttaaccagactttctcttaaaaacattagataaaataaaagattcaccggatggattctgatgaaaacgaaaacaaagtaaaatgactggcttagcagattctttgaaatgtagcagcccagggatgtaccaaatgtcgaattctagactgaggagtagagttcattggagtcttaaactctctgatatcacttaaagctggagtttattttaaaacaaatgaagcatgggccacctcatgatgcagtggctcctctctggttgaggagagggaaaattggaaaaactggtcgagtaattatcaataattttttttaaaaagaggatcccaaactgtaaaagattgaaataatctttctcaggattttttaaatgtctaagattatgatgtcatatctcccacttaccttataagtaaaaaggttaatatcaagtaacttattagctcttaaagtaaaattgaacttattaaaagctatctatgatttaatagatttaataaaattccttcacgacctggtacccttgtgaaactgtaaaatatatcatatggggggagttttttaactcttattttttgaaaatttactgtagcttctatttcgtgaataagaatgttttgattttgatcatacaaataacttttgtagatttttgtttacttttgggggggttcccttagaagacattaaaaaaaaatactgccttggtctgtgcaggctgctgtaatgaaatactatgaacttggcagcttataaacaacagaaatttatttctcgctgttctcaatggtgggaagtccaagattaagggatcaacaaattaggcctctggatcatacatggcattttctagctgtgtccttatacataaaaggaaaaaggtagctctctcgagtctctttaataaagatactaattctcatgactgaatcaccctccaaaggccccacctcctaataccatcactctggggactaggtgtcagcatgtgaattttggaaaacacaaaaattcagaacatagcaaatacctttgaagtataaaagataaaattcatttttagtgaaccctgtaatttattcgtgtatatttactaaacagctgtatctttgaaattgttagtaatgattctgcttcaataactatggtcagggaatttataatattatatttttatatactgaactgccatagatgctggaaaaaaggaactgatgttttcagcatattttcaaaatattgataagggaagttattacttttatatagtattcaacttttttcaggtaatagaagtgaataatttattgtgaaataattcattttataaatgtataattatttttataaattttattgttggaaatcaaaaattagtagattttttaccatgttaaattatagtgagattaaagtattactaaactgtgatgctatgtttgtttcactaaactttctaaataaaaactgag

SEQ ID NO: 15617 - DNA, 2720 bp, Homo sapiens
gagtgaagacaggatcccgtgcttaaaaaaataaaaaataaaaaaataaaaaaaaaataagactttaactgcagttccaaagcttctctaacccaaaaattacagtaccaaatgattgactcaggattgtttttcccatattgatatgctggcaatataggatggtatgtaatggacagaactgatgcagatggttgaatgcgcttgtactatatgctaaaatatggaaaaggaaaaaaaaatctcacaagttcttttggaacttgtttcaagccaaaaactctcaagaaagcaaattgcacctcagctggattgatttccaaatgctagcatgtactgtatgggaggatgatccagatgtttcaaagagaatttctcttagtttagttaggtgtaattcagtagctttaaattctcaggtcagaacataacatttctcatttgttaaaagcagcaagaagcctggtaaaactgtgacttttccccaaacgtcaatctttattagaaagcattttctaggtgtgtttagtgtacaaagagactttataacccttactggacaacacacagatccttgagctcacgctgcaggatagtacagttttaccgcagagggaatctggaacagtggaatcatgtgtctgccctgtgtattgcagtttgtattgccacaagctatatttataccagtgtcacccttttcttgtagaatatactaataatctgtgccaactctaccttctcacttttacctctgacgtcattctttttttctgaaagaggtaataattctagttttgatagactctgaggattatgtgaacaggacatttttcatttgtgaatttaatgctatactgtcaaggtacttgcttgtgtctgaactctagtgcacttatgattttgtagaccatgtgaaatttaataagataccttttttttcctttctttgtgtgtagtgcagcaacagtttggtctgcatttgttagaagtttaactcctaacaacccaaagacctatttaacaattggtgcataaatgaaagtagtactgtatacttgaaactgtttaagtacaagttgaacaaaaattatgaaaaggtatatttgcttctcgggaaagcaaagaagctgctttaaaaaataaaaaggggactaaaaatttgttttgtataaagaggttagccctgcgcacgtaggactgaattcagtgatatccctatacactgccatttagtggataggttattgtacttccattcatactctgggcacttgtgttgtattgttctgttacatactttttttaacctgttttgttttatcatatatgcattaaaagtattatctttatcaacatttgctgctactgtgttaacatttttgttttgcttgccatgaatttcaacttccaccacccagtgaattgatttataaattgctatgctttgctgtttttctgttgctgtggaacttaaagaatgtgaaagctgtcaaagggtattttacgaatcacttttgtgtttgatatagtaaaacaatgtgattcattccaaagtaacagaaggttatttgtaagaaagttaaaggcttgtgaacaaagaaagctaagctgttgtacatatttgtagttggctgtgcatggtacaaatttattaatatgaagaaatgcaaaatgtattgcttttgatatttctcttccgagatgaacaagtagcatgtaatgcaactgtttgacagtttaactcaagtcatgcttcaaactgttttaatgatcaaatcaagacacatttcattttacattttattattgtacagtttttgtttcggatgatgatcacagcaatctttattctatacattttatgtgaacttttttaatgtctttaatttggattttttttttttttagtattttaacatttattttaatcctgaagacacttttttgattgtgtttcgtaagagacaacatggcctcctaaggtgcaatcctgccgctatagtgagctaatgtcctgaatccaaaggcttcagaaaattgcttttgcctttttcatgaatgttaagcagcagcattgtgagatcgatctgtcctggcagttaacacgatgtgcaacagtgtgttagcatggaacagaacgcttttcacaaaacaaaggactgttttacaaatgattattccgacagtgtgtcgacataaacttttacaactgcacagcagccaaaaaaagaaaaaaaaaagaaaaaaaactttaactggatggacgttgttagggtgagaaataaaaggacagcctccaaaggttgagaatgagaattgttttttcctggatatcaaagggattatcacagcgcaatcattgtctacacaacatgtactctcaacgcctgggttacataggaaatgcaccctgaggttttaataaaagcccctatggctataactttaaataaactaaaccaaaaatgttattgatgttttatatatagagagtagtctcattagtttttgttactgtaatgtttgaagtctcaaatgcaccgtattacggtaaataacatggttttgaaaacttttttttattttgtcacagacctgttgtcatagttgaaatgatgtttattgtagatggtatttgaacttattcttctggaaatagttcatcaagtatgtttgttgctcattgtgatacattaaaaactgtatctacatattta

SEQ ID NO: 15618 - DNA, 1428 bp, Homo sapiens
caccccactttgaccctcgaccacacctgaaaatgtctcaaatctccaggagtatctggaatgcatttgtttccatgagtgaaaagaggaaaaagaaaatggctgtgctgcattgcaggaacctgctcattatcatgttaaaaatgagggcagaggctgtggctgcaggcagacttttccctacctctgtcattagcaatggttgaaatcatgtggcttgtgtttgggcgtcatttttgtatggatcctttcacttgatcatatgacgaaatgcttatagagagtagctccgacctagatgatgattcttcctgtagcatctggcccctcacaatgtcagaggatttaattgtgtctaattgcgaagggttgattgaaccccagagtttaaatatctctggctcaagtgttcacccagtaaaagaaagatccagaaagcactgtttttagcattacgtatctgtgtgttactgctgtgttatttacactgttttgtattgtacaatatatatgctcagcactgcccccttctctgattgcttatgaaaaacaaaatgatgtacattactgtgaatttttataccactcatttttaaaagggctgtcttttcattttagttttccatactgtggtggtgtacacaggatagaacacccttttttaaaacacagtctttccccttgctcattgtatgttgatgagttgattaagtctaacagattcatcaagactccattgctttattatagagacatttgaaaatatccattaatgtgaatatcacctgaattcagtctgtttggtgtctgcacagactggaattcaatctgtcaaatttgttttattctcaagtggagaacttctcccacataatatatatatatatatatattttaatttatgagaattttggacaattggaaaggtagaaaagaaaagccaagatcatactaaggactggaaatattttgttctatggaatcaaatttctcacaatgctgtatgatactatttaaatttggaggacaacttatcttcactaagctgaatcaggtggagaaagtaatctccttgcaatcatgtggacaccaatcacaaaagtaaagccctggtgttgtgttttcatgtcttttttcagccctctcagatccaaatgttattatgcactttttaatgtttgtaaacttttactaataattagtgtgaattgcattctgatacaataatgattatcattagaagctaacaaaattctcattaatactgtgtttgatggcctctgctgtgttttaacatcgtgcttcttatatggaaagtttttgtgagctgtgtaatccctctggtcagtattatgaaatcatttgtcagtggtaataaataaggaaccagtaatatgccaatggttcatgaattactggacaaatagc

SEQ ID NO: 15619 - DNA, 206 bp, Homo sapiens
atagaatctcaaaaaaaaaaaaaagccaagttcagagtttatgattattgctgcttggacagctagagcacatcctctagttagtttgtgctaaaaatactcgaaataccatttccagttaattttgaagtgtaatcttttggctatataatgtgtgtatgtttatatgtgtacatatactgtatataataaatatctgatacccc

SEQ ID NO: 15620 - DNA, 115 bp, Homo sapiens
agcaagggagggtctggcacgccccaccaatagtaaatccccctgcctatattataatggatcatgcgatatcaggatggggaatgtatgacatggtttaaaaagaactcattat

SEQ ID NO: 15621 - DNA, 1004 bp, Homo sapiens
ctgacctactatactcctcaaggatgctgcatttggacctaatatgaatcgacaatttggattgttgaacttgaaggcttgcaaaatatggtacatgctggatagtagttatgttgctgtgaaaactgtagggtcaaagccttatagcaaaaaaaatttttttttatatttgcacaggactatacagcaaacaaccatgtggttggattacatggagtccccacatactcagtcagttatcaaagtaaaatattttttatttataggatatacagtaactatttgggtcctatgaaaatagtccttaaagagcttacattcatgtgctactttaacatgaatggagaaaatccgtttatggaagtacagtgacaattgacccaatcactctgtccatcaaaccactcaggctagtttgtactagtagagttttgtttctatttttatttttattaattttattttttttaatacagattttcagtgaggggctttttcaaccccattggttctattttcttgtatttttccatttaatttgcttcataacttaaaccaagtctcttctagtcttaggtattatttctcgattttgtgctgatgggcatgtttataagaactggagaggtaatttattggaatgaactaactgacttcctccattcccctcttcctttttgacatgaattttactacttcacaaatgaagaatgatgttatgaagttaccgtggcgaagttgacaaataccactaaaatgattatgatttagaagtaactttcttctgctgctctaatctgataaatggttactatatgatattttctgacatggtatttggttttgggtatctgttactttggcactattcttgtttgcctctttatttttgccagtgtactatacctcagtcctatttgaaagacctaattgaaagaaaaatcatagaaataagtaaaatgatttgttttataatttatccaccatgtccagtttggttagct

SEQ ID NO: 15622 - DNA, 206 bp, Homo sapiens
aaattccatcatcactttggacaggagttaattaagagaatgaccaagctcagttcaatgagcaaatctccatactgtttctttcttttttttttcattactgtgttcaattatctttatcataaacattttacatgcagctatttcaaagtgtgttggattaattaggatcatccctttggttaataaataaatgtgtttgtgct

SEQ ID NO: 15623 - DNA, 967 bp, Homo sapiens
actaaaacacatttttgatacctaaattaatgagctatagataaaatataaaaaatgtttttaccaagttcagaagttaacaaagactctgctttataattatattgaatgaataattgtgttttaagcctcctaagtaaaagtaaaaaaggagtcatgtgcatacatagaatcagtgatggaggccaggcacggtatctcatgcctataatcccagcactttgggaggctgaggcagttgagaccaggagttcgagtccagcctgaccaacatgaagaaaccctgtctgtactaaaaatacaaaaattagccggacatggtggcaggcacctgtaatcccagctacttgggaggctgagtcaggagaatcgcttgagcccaggagatggaggttgcagtgagccaagatcatgccactgcactccagactgggcaacagagggagactccgtctcaaaaactaaaaaaaaaaaatacatttagtatagcggggggtgggggggagaaataatgttatttcctatgcgaatgacgtgtatccctgtacccatggtaaatgtaaatatactgtgtctcttttgggagagccttttagtagaggagtcttatatgagtctctacataagtagtttcacttgagttttgcagtttgaaatcttaaaggagctttaattgacatttattataccaattaagcttggaatggggcaatggatgcatttcccaaaacgtgtgaaagcactaacagcttatattgctgaatgagaatctcctgggtgtaatttagccacttagggaactgcgtgaacactcccaggccattatgatgctgttacagcttcagtgtataaatgcatgagtattctttctgttctgttttgtgctctcttgtacatttatttaccctttacagaatatttcttgtaaatacataaaaatattggcaattaaaagtacatcttgaat

SEQ ID NO: 15624 - DNA, 932 bp, Homo sapiens
tctgaaataacgcatgatgccacaaagcagaaaagagaaactgtgacaacccccagaaatgtgaaaggaggtttcttactggacagcagcatctttggttcaatttatataaaaacccaaataaataaaatggacagtattgctcagttttagaaattccatttcttctatgttttaagctgtacaattgtcaggtttttatggtttaaattgtaaatgtgttttcccctttgctaattatgttttttttttcagtcttaaaatgtgaaaggcatttatgaatggtaagggaaacactatatacaaatgtatatttgtaaaagctatttttatgattagcatgtttcactgttgatcatatataaagtcaggtgatattgcaattctgtatttaaagcttatttccaacaatgtcatgtaagaaaagatgcatcttatgctagtttttataatttatttataatttatagtttaaagtacttcagatcataatgataaaatacttgaaaaagttatatttctgccctgtataagcaccctttttattaataaagaatgcagatatttcagatgtgatataatagttaaagaactgttggtttgatctgtgattaagttgagcatgctccgctctactgaactaaatgatccaattattacttcagtctgggtatgagattccatggacaagtaaggactagattgccaaggaaaagactgtcttgcccttggatccaaaagtttaaattagtgcatacatcatgtcatttcacctcctgttcctaggaactctccattcccaagcattgccagtgttttccagataatcttagctgttgtcttgtgctgtggaaatggaagaaaccatcttcacagaccgtaggagaattcaacatataatttcttaataaatactgtttcttttaaaacaa

SEQ ID NO: 15625 - DNA, 566 bp, Homo sapiens
tggttctgagaatgaatttaattgaaatagaccagcagacctattgtaaaaatgattaaatattgtaatagtagtaactgctatgactttgaaatgtctctttctatacatttcattatgaatatatttttaaagacttttgatcaagtatttattaattgtataggttttttataataaattgttgacaattttgtctattagaaaaaactatcataactagacttacaatatttttcttgtttctgtactatacattgtttggtaattacacatttgcctacaaatttgtgaatgaaaagattagtattttcaccatatgaggtaaaacattttaatcattgttatcttattgtgatgatgaagaactaattatatttgttatttaattgatgtagctcaattcttttaaagtacttatgtagccaaaaagcatttgaaatctgtatgataaaagatgtggcattcttaagaaagtatatgtagccatctccacatcactcattatgaccccttcttttataatgcttatatcttttcattaaagattacatttaaggttttat

SEQ ID NO: 15626 - DNA, 657 bp, Homo sapiens
attccatggaaacttgggactgttatctacctctaactgtgtaacattttagacttcttaataacctaaatatttaaaataatgaatgtaacaccttttttagttcactgattctgaagtgttcttccctaatactttctttacttcacaaaacttcaaccataaaaacaaagggctctgattgctttaggggataagtgatttaatatccacaaacgtccccactcccaaaagtaactatattctggatttcaacttttcttctaattgtgaatccttctgttttttcttcttaaggaggaaagttaaaggacactacaggtcatcaaaaacaagttggccaaggactcattacttgtcttatatttttactgccactaaactgcctgtatttctgtatgtccttctatccaaacagacgttcactgccacttgtaaagtgaaggatgtaaacgaggatatataactgtttcagtgaacagattttgtgaagtgccttctgttttagcactttaagtttatcacattttgttgacttctgacattccactttcctaggttataggaaagatctgtttatgtagtttgtttttaaaatgtgccaatgcctgtacattaacaagatttttaaaaataaaattgtataaaacattcaat

SEQ ID NO: 15627 - DNA, 2724 bp, Homo sapiens
aaattgtcaccaatgaactcccccaaacatggctgtggagagacaacaaaacaaaacaaagcacaaaagtctctgccaacaactcttttgtggaattctaatttataggaaacattttagtatgagcttcagtgtcacaaagaaaaccagatctctctctcttttttttttattttttttagtgatagagtctcactctgtcacccaggctggagggcagtggtacagtcttggctaattgcagcctccaactcctggactcaagtgatcctcccacctcagcctccagagtaagtaggaccacaggcatgcacaagcatgcctggctaatttttaaattttttttttttaagaaatagggtcttgctatgttgcccaggctggtctcaagctcctgccctaaagtaggcctcctgcctttgcctctcaaagtgctgggatttcaggcatgggtcatcaagcccagctgacccagagctctttactaacttatctgtctcttatttgcactcatggatattcacagtaagcattgtttgacatatattaaaacccatgaaatatgtctacttcaacctgtgtgaaaatatagttaacattgcaaactttagaatgtattaaaaattttaccttgccatagagactgaattagtcacagctctcagtgatgttagatggaaacttatatctcaaatgataggattgtgatgctttttttgtaacaagtgattctgcttaatattttgttattccagttcataaaaagtagattacgttttcctataaggataatttttgcagtgattatattgctaactctcattgcatgatacctttaataaaatgaacaatataagagttaagggcaatgggataaagctacttaatgtgtctcctccactgatcaaaaatattccatatagtcttggtgaggaattccccaggatataaatggctatttacactgtaatgaattataccatatatgatattcactcagtaatgttaataatgaactggctaataattgacaagatgcagtgcctgccagtttatgacattaacttggtttgaaactaacatatgacatagtaccagtgcagtcagagctgcccttaggcatgatgaacatgtggcccgtttttgcctggtgttttggcagcaaagcaggaagcaattttgtgtgggtcattgttctgtcaatttgtggaaaaaattacttcagtctcatataaatatagaatgggtccataaacccttcaactcatttccatggcaaaactcacttttctttttatacatgtccttcagtctcttaattttgtcaggtggagcttgatcttaattttaacctattatcttttatttttgtttgtttttggtgaaggataagagtggtgtttcttttgccctttctggtacaaacagagggacactaagcattaacttaataatcacatttaagacttgaacacatgctacccttttgtcatcttctgacataagtttacctgagtttccttgatttggaagatttgtttcttttatctctcttcctctggatgtagtttttttttgttttttttttgtttttggacggagtcttagtctgtcactgaggctggagtacagtggcacgatcttggctcactgcaacctccatctcccgggttcaaatgattctcctgcctcagcctcttgagtggctgggattacaggcacatgccaccacacccggctaatttttgtatttttagtagagatgggttttgcaatgttggccaggctggtctcaaactcctgacctcaagtgatctgcctgcctcggcctctcaaattgctggaattacagttgtgagccaccacacctggcttgaatgtagattttaataattgaatttattctgccgtgttgatagaataactgaatatcagtaaattgtgtaacagtggtggatactgttgcataagatgagctcctgaagagtgaagctaattctttggtcaatgttcttttcccctcagtgtctagtttaaggcttttagaagattgatctgtagcaattatttaatgaattgaatatttaaaaaattttttatttgctgtctttggtaattatctctctgcttgaaattaaatgcactataagttaatataacaagtaaaatacattgtcttttgaaaatagtttctttttaaaggaatactaattaattgtaacttgtaaaaccaaaagttctaatggtttttaaaaaccagtgttgagtggaaaagtgtttctttagtttggaaagacctgtgaagtatcctagtcagggaaagaacctgttttctggaagaatgtaagttgctatatgtggaggggcatgtaggacaggggttctaattactgtctgtgagagttactactttgtaacttatggtttctgcttcagtattgtgttggttctgtattataaattgcaccttaatagaccaaaaatatctatacagcactgatttccttgaatattgtgtgttaattgatatatcttctagaggcaaaaggtttaaatgtgttaaaatggttatattgcctcctttttaaacaaattaaagagttgtaaatactagtgtagatctcttttgtttaccacagcaaatactgattttatgattgttaagcatttcatattttaatttaaattggattcaaccacaataaagaaaatgagaaaagcttt

SEQ ID NO: 15628 - DNA, 892 bp, Homo sapiens
ggctgctggatcttgccctcttcaggaaaggaaacctaccattggagagcttggttccttgcctccttctggtgctccttactccaagtctatttcatttttccacactgagcaatgaatgtgagagatgtggtcaccaagatctaagttacttgttgaaagaaagttactttcgacaagatctaatatgaaagcatagatttcacatttgatctctgtaataatcatctttcctataaaagtagcatttttggtaaagtttcaaagaagaagaaacagagatggaagagtaaagatatttttaaaatggctagctattgggcaccagtttttctgttatctaaaatttcacacaacttcattgtttttatttttatattatgagttgtccatcttaaagaaatatgagtaattctacatgtagtagaggtgtatgaagatcatataacaattaaacataagccagaaattaaaatgactatagacagcaagaattgagctaataatatgttttaactcttaacaccagcaagaagtcagtcatttattgaagttttagctactaagattacttggttttgattaccagtgaaaagaaaacacaatacaatcaggagttttcaaatttttgattcagtatttgaatttcttcttcataaatgtagttgaatttatcctagtatttttctttacctgaaggagggccatttatttttaatttcactacatttttctttgcatgattattaaaataaaaactgcctctgttgtgtttctcactggaggctggaatgaatgatcactagaacacaaaagagtgaatgatgacacttgaagtcaaagcagttgtactgatcaccagaaccaataaagacataaatggaaaacgttg

SEQ ID NO: 15629 - DNA, 703 bp, Homo sapiens
gatggtcccatagtctgtatccaaataatgaatcttcgggtgtttccctttagctaagcacagatctaccttggtgatttggaccctggttgctttgtgtctagttttctagacccttcatctcttacttgatagacttactaataaaatgtgaagactagaccaattgtcatgcttgacacaactgctgtggctggttggtgctttgtttatggtagtagtttttctgtaacacagaatataggataagaaataagaataaagtaccttgactttgttcacagcatgtagggtgatgagcactcacaattgttgactaaaatgctgcttttaaaacataggaaagtagaatggttgagtgcaaatccatagcacaagataaattgagctagttaaggcaaatcaggtaaaatagtcatgattctatgtaatgtaaaccagaaaaaataaatgttcatgatttcaagatgttatattaaagaaaaactttaaaaattattatatatttatagcaaagttatcttaaatatgaattctgttgtaatttaatgacttttgaattacagagatataaatgaagtattatctgtaaaaattgttataattagagttgtgatacagagtatatttccattcagacaatatatcataacttaataaatattgtattttagatatattctctaataaaattcagaattct

SEQ ID NO: 15630 - DNA, 1248 bp, Homo sapiens
cccaagtaaggttctcaaatgtagaaaattataaatgttaaaaggaagttattgaagaaaataaaagaaattatgttatattatctagactacacaaaagtaagccacactatatcttcatgagttgcaaatccatggaaacacagtaaaccagccctgaaacaaagcatttccttgttttcagtggtattagatcttgtttccacatgtctgtctcattcttcactgggccttacaggttagttttaattaactctatggtatttttcttattcttgtttgatcatgttaaaaattggacctaataaaagtattttattcttgcttttccatgcttctctacaggtccaaatactgaatgtctcctttactttttctcttttaaatttttttctagacagggtctcactctgtcacctaggctacagtgcagtggtgtgatcacagctcactgcagcctcgacttcccaggctcaagtgatcctcccagctctcagcctccaaagtagctggcactacaagtgtacacccccacacaaggctaagttttgtattttttgtagagacagggtttcaacatattatccaggctggtgtcgaattcctgggctccagggatccacagtcccccttggcctcccaaagtgttgggattacatgcatgagccactgtgctgggcttcatttacattttaactgtctgttccttgcctagattcacagaaatccaaagctgtatgtagtcaacatggttcacaagtgttggaaaatgtgttttttgttttgttttgttttgtttcgttttgttttgagacagagtttccctctgtcgcccaggctagagtgcaatggcgtgatctcggctcactgcaacctccacctcccagattcaagcaactctctgcctcagcctcccgagtagctgggattacaagcacccaccactacactcagctaattttttgtatttttagtagagccggggtttcaccatcttggccaggctgatcttgaactcctgagctcatgatccacccgcctcagcctcccaaagtgctgggattacaggccccttgttcagccactgcacctggccccttattttgtttttgttttctaatatactttgatgtaatcagcttgagaaagcaacacaatttcaaatcctatcttctagatgcaagcagtgttaaatttgttaataaatttgcttttcacacctttctttaaataaaaggtatatctctc

SEQ ID NO: 15631 - DNA, 1054 bp, Homo sapiens
atgtggcttcttattttggaggagctcttgcatttaaataccccagccaagaaaaattgcacagatagtgtatataagctgttcattctgtacagtgaattttccgaacctctcaaagtatgttttccgttcttccacagaaatatgcaaaacagttcatccttttctactttatttattgttcccttgaaatgactgaccaggaaaaagatcatccttaaattttgaagcaagtgagagactttattaaaaatacatatatatctatataaacatatatgatagtggctctagttttatagagctccaagtgtattaaacatgacagccattcattcataaagatctggatttgctttaccttgttaatattatctaggggaaaaagtgcaaattgctccatgttcttctctcccttatgtaacatctcctgagggtgtttagttgcatggctgttcagaaaggtattaagggcttaggccaaatcttactttgagtatgttaaaaaaaaaaaaatgctgctggcttttctgaagacaggtgcttgaacttgtcagtttgttttaaataaatacaatagttgaaaatttttctctgttacatcagtaatattgttaaagtaatggatagaaccataacttacacatgaaagtcatatactagatccaatactatttagtttattatcgaaattggaaggattcattgagcagcatagaagtttgtttacatgttactttgagatgctaggtatttgtggaattaaaaagaatcaggctcttttgtactttgtttttaaatctgtgatgcttttcaaatttaattcataataaattgatgcaatttcatacttaggaacatacaaaaggtaatgtaaactctgccacttttttgtgttcaaaattttggtttttatgaagccagatggattgaagagttacataagcatttgaatgctctaatataaggctaatgattttctgttagtgtttgaatatcttcattcctctcaaattcataacagttctatttaactgaattaaataaccatatg

SEQ ID NO: 15632 - DNA, 3088 bp, Homo sapiens
ccacttcaacagaattcttttgtgttatgtggagcaatgccatctctcaccccaaatcgtgtatctgtcattctacgtactttttacccccagcatttatgatgtaaatctctttctctatggattatatctgtttaaagcattctttctaggttattttggggggacagtgccaagtccatctttgcccagtcaattcagtgattgatagcaatttacattaattgcagtaaagctctttggattagaaattagtgtggggaaagcttattctgttgttgtttttgtttactttcatatgatgaaaatgctgtgtttaagtgtttgtcaataggaagaatggaaaactgttgggatgatgtggtttgcaggttgctgtgcctgattcacagtgtatgttgtataagccaatgtccatacctgattatgagagcttcttaaattatatgatatcaaatttgttcctgtaactctgtatacagtgcttttctgcaaggtaaaaataacctgtctatgcatctgatttttgctacagtttagacactgtggtttacaaaacagcatgcactcaacttgggactttatgaaaagtactgaatgagcaggaaaaggcacatactcagttttttaaatgtacaatcaacaagtaaaaataacctcatgtaagtaagccatttttatttgcctttctagatattttattttattgtggaaaactgtaaacatggtcagatttggctttttttttcattaactgagcaagactttcaggatattgtagatgcacagatggtaggttgtcctgaattctacattattagattactttaattgagatttgttaaaacggttaggactgttttgtccaggaaagataagaggaccaaacatataaggtgaaattcagaattccgtttccttctaactaatgaaaaactgcttactaaaaaaaaattttatactttccttgctaaggtcccatatattgatttgtacagatccacttagtcattttctcctttttttaagaaccattttcatctgatttttaaactcacgataccagttatctgttaatcaaaattgcattttacaatttaataatgtgatatttcctatgtctacagcataccttattaggtataaaacctactgcaacttagaaaaaggaaagaaaaaagaaaacttttccaactgctgcattaagatagggtggattttatgtgctttttttttttaagagttgaatttcttttcctgacttttaccttttacagcgtattacttagtgaacattacattttcagaatagatcctaatattttattgagggcctatgtgctaaaaactatgcatatctatatattggccaattatctttaataatttaccttttgaaattgcatgtttatcatatatccttaagtggacacatacagtgccatgttgatgtgcctctcagttttattgaaaagctgccccacagcccatgtctcttgttctctgcaatgcctcaagggagtgagctctcaaccacagatagctgtggcttctcagaagcagctcattgccaaggccaggctgagaggggacctgcttgctgtggtggttgcctagcccagatgagcatttacctaccaccttcccacttggctagctgtcctttggatatgtgctgttaactggggaaggcatctaactagtagcctgctactccatagtatggctcaatagatgacacatcattttgacattatcaataggagaaaagaaaactaacccttcttctgattgtttggagccatagttgtctcagatgttctaattctctttgtatgcttggaaacagcatagatatgttgctgtggttttcagaattttctcttttaatcacaagaagccttttaaaaaatgacttacacatattctcaatgtacagtaaaacagacagaagtgagcttatctgtttgatgctgtggcagggtcccagtcactgggcatatcctccttctccttaaccagctccacagcagcccctgagtcacctgcacaaggtgcttgggaactgctggttatgagcattcctggttttcttcagccaaataacaggtaatcactgtcaattggatttggtcttcattattttatattctgattttatcagaattattctattttaaaattgttttaaaatttaaaacatttaattcatgatcatgttcatcagtagatgctattattcataagaactgtgattccagcaaactagggtaattggtgcctttttacagttttgaataaaagcatttacaatttctaaattatcagttttcacagtttcagcactcaacctcatcatacgctgatttaatattgttttacattaaaatagtccttttccctgttgtgccaccattcatttaagtgctgtttgttcttaaaatgcatttaaagaaaaattacccatattgactttcacacctcatataatcagatctattacaaatatatatcggagtgacggtgcccaggatagatgtaatatttcttacagatgctggcacagaggaaataatataccagctaatctagtcacctaaccttgtggttagaattgcaattttaagaccagaaaaatttgaagtctgatcagagatttacaactgttcattatagtggtgccttaggcaatctttccaaagtaaattcagggccccattgctacttatgccatatttggacatactttttttttcttcaattttgtaaacttcctggaaagctgtcttcactaagtatcccctagtctctatatatgtggttagtagtcatggaaatgacacataaagtacgccagaagtttgatggaacgtgttagaaactgttttgtgcttttatggatgtcatacttgacaatacatgtgtaagttactaatatatgaattgatgctaaatatatcttacatttgaattccttttggataaagttatttcttgatgtgacagagtagtgtgttttcatttttattctttacatgtgaccaaaacaatagaaaagttaaaaataaaatatagtgttttaggtggc

SEQ ID NO: 15633 - DNA, 100 bp, Homo sapiens
atctagaaacaacctcagtgaacattaattaagaaagtattgactaaataatggaataattgcattctggaatactatcaaactaccagcaatgaatttg

SEQ ID NO: 15634 - DNA, 647 bp, Homo sapiens
gtgactgtttttcaagaagaaatgtgtttcataaaaggatatttatatctctgttgctttgactttttttatataaaatccgtgagtattaaagctttattgaaggttctttgggtaaatattagtctccctccatgacactgcagtattttttttaattaatacaagtaaaaagtttgaattttgctacatagttcaatttttatgtctcttttgttaacagaaaccacttttaaaggatagtaattattcttgtttataacagtgccttaaggtatgatgtatttctgatggaagccattttcacattcatgttcttcatggattatttgttacttgtctaagatgcaatttgattttatgaagtatataccctttacccaccagagacagtacagaatccctgccctaaaatcccaggcttaattgccctacaaagggttattaatttaaaactccattattaggattacattttaaagttttatttatgaattccctttaaaaatgatatttcaaaggtaaaacaatacaatataaagaaaaaaataaatatattaataccggcttcctgtccccatttttaacctcagccttccctactgtcaccaacaaccaagctaaataaagtcaacagcctgatgtgt

SEQ ID NO: 15635 - DNA, 2333 bp, Homo sapiens
agcaagtttacaagtaattaaaatggacagtttgccattaaagatttttaatagtggttttgcagtgtactggcttgaattttctggacttgagttaactgaaggagagcctcaaactatagtaacttcatttttaaaagttactagaatttggtatcctgatttatattgcagtgtttcaaaggtgtcactgtcagacaaatagaaacactgccaacttggtgtaacttaagctttcatttaactaaaacattcttttcttgcaaaacttatttttcatgatcatttttggttatttattatacttgattccaaaatagtacagccttgaatctataaaactgtgcagtcattatgccagaaattatcttaaatatataatgggtcaccttgctgttcaaagggtggtgcaaggtcctgcagcatcttacatctgtagcttgttagaaatgtaaactctcaggccccacaacttacttcctgcattttaacaagatccccaagggatatgtatgctcataaaaatttgagacactggtttaaatgaaaatggatataaggtatgtataactgggggtggggtgagggtaggaggcatttacaactcagattttatttattttgaaattatcaattgtataaatctaatttattaccaaatagggtcttttaaaaaatatttttatcgttgaaaccttgacaggtacttcatattcttctaataatttaaacagtccaataatgtggtatacactttgacatccaagaactcaccaagatgtttttcagagatttattctcgatttaactatcatagcatttaatgaatctgatttgtagttcaataaattgtgggttgaactacttatccctgtgtgaacattgaattactttctgtcactgaaactgaggtatttgggtgtggtaagtacttcgaaaattgtaatactgtttgggcattgtctaaattattaaaggttaaaatagaaaataaagtcagaatttttcttttccattccaaaggtgtacttagagatctctattagtattcattcgagatgacatagcagctcatatcatggttgtttattggatttatctgttctaattatataagtgtgtttactgtctgtgttttcacacaaactgctagaatttttaatgttaagacgaaaacatctgaagttctccatggcaaattgaatttttcagtcattttcttttctttttttggtacaattacttcatctggaatgtcttcattgaactcgttattctatttttcttagaattaaaagtggattaatgtgggtttttctgttcattttattgcagtattaaatgcttaagcttattaggaccataattcactttaaatataattgtatagaatatatttgcgtcgatcaaataattgcttcagatgaattcttagactcttgataatatcacacctaatttaacttgattttacaagctgtacaatccagttttagttttctattgtgataataacttttttcaaaccagtttcacatcttaatgaaataacattctctgactgcacttgcttcagtactctcttgcctgcctgtttttgacctctgcatgagttggattagatgtttttcttactgtcacttctaaatagaaaatgacagtgttataaaaaagggaaggataaaacctttgacatccccttgtgtctcaaaagtccacagttattcaaacaatggctttttttgtgatgagagtatttgttaaaaaaaaaaaaagacttcaagaaaaataaaagttcagtggagctgcaaataaatctggtgaataatttcatctttggtaatctcccatttcctgagttcttcctcaatccaagctgtcctgtgtagtatataacatttgggcattttctctgatatactatactctcatgttctataaatttctgtcccgtaattctaacactttacattttttctttgctatcagctatagctattcatggaagggaagaatcactaaatacttgtctagttatagcatgatgtgagcatctcctccttatccctcgatgcctggcttggtgtctggcaaacagtccataattagcagatgttgaaagaccgtttacaaagcagaatttggggatttaaagtgcaatgatacaacaaaaagatttaattacagcttccagtgttttgactatgtgaaccatatccaactacttttttgaaaatctagttctatgtaatatatttctgtggcatcaaattttagttgattgtattagtcaataggaagtggtggaaaatttctaaataaattcaactatt

SEQ ID NO: 15636 - DNA, 102 bp, Homo sapiens
gaccactttggccttcatcttggttacagaaaagggaatagaaatgaaacaaattatctctcatcttttgactatttcaagtctaataaattcttaattaac

SEQ ID NO: 15637 - DNA, 3890 bp, Homo sapiens
atgttcctagacattttctttatggttccaagtgcaaaacaggtgttcttatctaaaacgtcaattagaaaattatctgcggttgttaatctactgtatatttttgtttggtatatttactaagtgcactctttcaaaacttattctataactttatcaattcatgtgaattttagctcaattttcaaagttcactaatattctcaatatttaatgctaaatgctttgctacattgtaactcacctaaaaccttttagtgacaaaatcctaatatgtggaaaaaagcatatgcataaaggaataatattgtgaaaatgaatctgttatgataaagaaaaaataaagtggaaacttttagagtattacttcatagggcagattttgtaaactgtcgtatactgtaaagggttaaatcagcgttttgtgatttttaagtaactgtgagtgaagtttattcttcaacaatgtctactccatccccaacccaactcacagccctatgactactatctttgcattagttaaaaagttagtatataggcatcaaacaaccttggctgtaacctatagaatctctatccacgtatcaggttatagactggtttttcaaaagtgaacaatcctgtgataagttggagtaccatttagtaatacagcaacattgtgtcatttattagcatcataattctttgttatgtaagttaaatatatcaagaaagaagagactgtttggaaaaatgtggttcaagttttatgctatatagttttggtatgcgatacagacagctaacttttcttatgaaaaatacatatttgcatgtaaacaatgatttcaaaatacttgaaaaataaaattttaacccaaatgaataactaagaaatataaaacaagcacaaaatcttagggaagtcataaaatagtagtgaaagtattagacagaagacatctgttttcgaatttcaacactagaatgactaaaactatctacctatagaactatctgtagatagtatactatctacactctgctcaacaagctcagaaattaaatatttttaataataaaaatctgttctggttataaaccttgctaatgaaaatacaatacatataaaaatgtatagccatgttattttctagtataaattcctttgaaactataagtctttgaggaaaattataaggtaaaattttcctgtttttccccctttgaaaaactcaggaaaaaaggaagattgaactaataaaattttatttcttaaatataaatttgacctaaaatattttctcaaactaattcatgaaacagcaacttttaccaatacctttgtatactctcagttctcattcagtataaataaaattttaaaatcctttcatagttctattagaaataagtagtaaattttgatatattgtacatacacacgtgtgtgtgtgtgtgtgtgtgtgtgtgtgtgtgtgtgtgtgtatttgtgtgcctctggtcaactctaaggatgacagacactgtgtaacaacacctgggtcaactcttttaatttatatacaaagcaaagaacaacattaatggagatgcacaatgattattcaaacaagctatatatatgtacaaaggcaaacagacacataacagtctctgcagactgattgtatatagtaagaaaagatcaaaagactttaaaacctaaatgacttttgacatacaaactcttcttgagaatgtttgttgtaaatggtttcaaaaatacaaattatagccaatcaaaacattgctttggttggtgcatttaagtatccaactcaaaaagcatatcaaatattttgggtactaggcagtttccaaagtagcatggtagtattacttgttaaaagggttctgttttcattaacagtactaagtggaagggatctgcagattccaaactggaataagctctatcatattctgaaacaagaattagaatgacttgagaacgggcaaataacaaagcaaaccaatataattatatggtcattctgaccccagctcttatacaaattatacatgtatttttgtgtatgtttgtgagagttgtatgtatgtgaatgtgtgtgagtgtgtattcacatacacatatatactggaacctatagtagaaaaggaaactagtagggccaaaaaaaaaaagaaaaagaaaaagaaaaaagaaaaaaaaagaaaaaactgggacctaagtataaatatctcatcctaaagtaaacaataagtttatagttaacgaagatttttttctatttaaaaccccattttcctaaagaacaaagtagtaaaataaaaaaaaatttaaaaaattaaaaaataaaaaaaagaggtcactaaaagaccaagatgggaaacgtaacatggaatacaagcttgaatctgggaaacaagctcaaaaaacagtgaaaaaaaaagtactggtttaggagttcaaaattcagtgaaacaaactttttgccaatagacctagggatctaagaaatagaattagggagagtttacacttacttacctatatatcagcagatttttctggaagaaaccctttttttttttttttttaaacagtaacatccagagtgacaaattgcaggagatttaatgtataaaatttctaggaattaaaagcttaaacccaaaaattgttcatccatatataagaaattatcgaattaaaacttaatgtatgtcaattattttcaaatgtctaaattcctttggaaataaaaatatcagttttactttgaaattgctcaacttctgctattcatatggtctgattagtgacataagtagcagccgtttttcaacttcagtttcattcactaccattgtttccaaattatcaatctctgctagtaattatgaatttaagaccatattattatcaaaaacctagagaccaatcatatatctgaaaagaaatacccattaaaaattctgcctcctgtttattgagaactatgcattgaacattctgaatcattctaagcctctggagagactgtaatgatccattcatgagctggtatgaaatcagtgggaagcagaacaacagaaggaactttaaaagcaacaagcaattatgtaccatatatacactgtagcaaatattttatatttgagagtctttacagcttacatttccattccattattacaagtgatgaaaaacaaaaaattgcaagtagtatgcaaattataaatatacagtcttcccacttcactaaccaaattcctactttccagtgttacttcccaatttatgcaggaaacctcctgcaaagctgaaactgattagaaaattctttatattttaaaatagctctttctcatttttagagaagtcaaatagccaaccatcaaaattaagaataaattgaattgtcacagtccattacagttattgttgctagatccacctcatttgcagatgtccaaacttaaattcatctgttcttaaaatgctacttaaaactttggttgttttcctgtaatataaaagaaaaagttaatttatcaattgattgaatacagtttttactaattagtttatcaaaccaaatactgtgaacgtaccaggtgtttacagatttaaatgcatgttaccatagaaactattaaagtaactagaactgtcaaataacaaaacggctcatgtttttaaaatatatgtaactcattttaaaatatattaaattgtattccaaacctgttcttctgtttctgtggcacctaggtttaaaatatgtattaatgtgtaaatcacaagtaaaatgaattctaatgtacaagtttgttttaaaaagtgtatgtcaagcttttatttacacaataaaatgttattaaagatggaaagtcta

SEQ ID NO: 15638 - DNA, 2223 bp, Homo sapiens
tttatacaatgttgtacaattatgttttaatacagtgtgctgaactgagtatttctaccaagtgttgggttgttctaaatgctactgaaaaacacaactaccttatatcagttttatggcaaagctactaacaggtgtttttagaaatatgtcagagataaactttaaccagtgtcttcttagtggaattttaaaaatttgttaagttcattgtagagaacaccattcatagaccaagatggtcccctattagctgatattttcatttatgtaagatcctggacattctgttttgtgttggaacaaattttcaatgtttttaattctcccttttctgcctgttcctaaaaactttcaaaataaccatttcaatgtaatttgtcttgaagaagtttacccaatatctttgtcattgcaataatgtagtatggtgatggtcaatttaattattgcttataaaatgaacttgattgcagtaaccatggtatcgatgagactaatgcagtgaagctttattactaatatatatagccttatcaaagcaagctaagaagcttgctttaataattaataatttaaaaatatttatttagatgggattcagttgtttaaagaagtgagataaattcaaaggtaaataggtattctctgtcaaatttaaatctctaaagaattagagattagttttttatttgtgtataatttaaaaaagacctaataggttactgtctttttaatgcatttgttattctttcgtattttttaagcatcggactggagttagtaccatcatctcttgagtctttcataactacacatttttatatttccttttgtgttttctactttgctttccttgaaggaacaagcattttgtggcctttaccttgtgcaattttagggagtagcagtgtaaaaggtccaagaccacatttacttgaaattcttcctcttttctgatttgtcttaccagatatttcccttcttgcctcattctctaggatttgaataaaacctttgccacttattttattagccttattaatgtcacctttccttcaactcaaatatttgagaaattttatgttacatatatgaatgaagttgaaagctactgtttggaagctaagacttgtatagagtagttttgtatatgaatggttgttctagctcagatttcaggttactcacaacagtattctttctaagaggatatatacaaatgtctctcataatttatgtaaggaaatattatgaaaatgagacttttttagtttgatgtgtgtttcccaaactagagataaaactagtaagatttagtatcgtttataacatttgaatttttgctccatgagtacaactaatttttataagtaaatattgggtttatatgaaaaatggggtgtcagtcttttcacacgcccagcaggtaacaatgtgggaagctggcagggtcattgatagcaagtaagtacttcctgaaggctttccagttcaaaagattacaagccattctgcctgccaaacaaattatattctgaagatgcctgttttgtaacccttgatgtgaattttttggtgtctgaaatttacaaaagaatgaaattgaaattgtaaaacactaaatgctttgggtttattttgaagtaatctgttactttaaaatgtcaacattaggaagccataaaacaagatattatgaaacccagtattataaatgttatctacatctaaagtattttaaaataacttattggcagctttattctttttttccttacaagatttagaatctttttggttatatgtctatttttcaattttgttatatttttaatttaagtggccaatgtggttatgaacaagatttgtatggtcagcttctgttctttcctaaaacttcagataaatatcattttagctataacctaaaaaagtgtttaaataaaatgacagatgttaatttaaaagcagcatatgctaatttactttttcatatgatgatggtctaatggaagttacatatgctttcttttgtcctaactctgaaaagtatatgtcagagttctggaatatgtctttagccaagaattttattcacttaaatttgtttacaacttgtataaagcaaaaaagaatgtgtgtaactatagtgaacgcatagttttgcttatattatgtgatgtttgccaaaaaaagaataaaaaatgaatgaattaaatc

SEQ ID NO: 15639 - DNA, 3876 bp, Homo sapiens
ggattgggtggttgcctatcatttgcaaactgcttacttgtacaacaaatgcttcttccaggatctactgtcctggggacttgaatccacctttctcaaatataaaaactctaaatatggccttttaagttttttctgctctgatatcttgcctctaagcttatattgccatctttggaaatactatttgtagaatctagtgctcacatgatctgaagtgtcaaagttattttacaaatgctgggcttatggtttagttttacaactgttcttagagctttaatttcctgcaatttttccttgagttttgaattgttttgcctttcctcacccctagaataacatttggtgcctcgcagagtcatccctattgtatacaatcagaacagtatgtatttacaaaataataataacactattattattaaatctaacatatattgagtgccctcattatattccaggaatattctaaaagctttactatgttgtttaactgaatttgccatgaccttatgaggtagatatgataatttaacccatttttagaaacaaggaaactgaccagggaaattacaccatctgtaagtggtagagctggttgcagagtcagcagtttgagtttggacctggagctttgaactgctctactctgatgcctcataaaaggttcattttctttggcttagctggacagcttgcttcagttactactgttcttttactttggtaccaatttaagagttgagtaaatagcacatacttacttcttcctctggtatttcagaatttgagcaaactcagtgaccacagtgaagtctgagacccttttgtcacagtacagctcttgtctttaccaactgcctgaagaggccatatgctggcattttgcacaactttttggttgtttagatcctacagatgacctctgctacaataagtacgatgtgacttagtaactgcatagcagttggaaagaactgccaacttttttttctcatttttgttagtaagaagattcgcttagttattttatgtaaaaatcagtatgtgtttagttttagtgtactgaagggtaaacatggttttattttattttaccatattattttgtgttgttttatttctattgtgctgtaagttgatgtttaaaattgagaaatacttttgtcataggtaatttggaacatttacaagccatttgtaaaattttaagataatctgtaactaatacataaaaacaacttagcaaatgtgccattttcacacaacttctctctgtataggcctctgaaatatcaataaggctaaatattactttacacagtaagatgtgaaattcacaaaaagtaaaccaaacaaaacgaatgaaaaactggaaataattcgtttccatatctttccatacatccatttctgaagtattcaggaatgttttcataatcgaaagaaacgggtatccaaataaaaccaagttcttgacattggtctgttttgctgtgaatattggaaatgcttaggatcttcagacccaatagctctaattttaacatttctacccaataagaggctctgttttccactgaagctttgttggagaaagagaatatgaaaattacacattttataatttttagatgagaaaataccactagcagaatagctttgtgctattccagtataagatgaactgtaataatttttgacttccctatttcagagatagtcaatataatatgtttatctatatccatatggatggataggtaggtagatcttcatagatttttttttcttttgttagaggagagcttgatgtgattatcttcaaacccaccaaaccaacaggataattgacaaataaacgccataggctaggctgaactgtatgttactgttttcatgcttatacatatattttcaatcacatacaagtacatagaatttcacattttaatttagcaaattgatttacctaggaaaaaattatcaccttcaaagataggcatagacacataattatgcttaagcttttaacagcattttaaccgctctaaaaattaccagagtaagaaaaagctaggtactttaaagtgagtttgagaaacaagttgaaactaaaattaaaataccagccatttaggtgctttctctggcatctataaaagtaaattctagtgcctgccaagtgatggattataatggtctctagcaaatgtgtggtaaacattcatatggccattaattttaacattaaatcgtaggtagggcaatgtagtaaaatgaaagagaattaagaaaggttttgaattcttataacatatccagccatttcaattttgattgaaatgaactacaaagaatagtgtttgtccctatggtagcctcagtctctttatcactaacttggattgaaatgagtgaggccaactcacattcccatcaaacactcttccaaggaaaagcagaagtaataattggaggtaaagtttccttagagaaaataattttattctgctttgtccaattaaattattccaatggcggatggtaatattcaccatctctaattcattggtcactggtaggtaagcatgagttaaggaaagtcaaaaatgaaaatatattttgctgtgtataaattgatattttgctatgcaactcctgtaattgaatttgtataatgcaggcactttctaatttattagagattatggatcagttctgacattaaaatcatagttaattgatggatggtttttatagtttgttgataaagtggacacagtattgtctgagcagttatattttaatgcatttcagtgtttatagtagaagtttagtggataaaactttaagtccaataacttgggggtcaaatgctaatgttttattcaatgtaaaggaagaccaaaccatgtaccttatgaagacctttgttttaagacttccacacaccaaggctacaatgactgttaacctggaggaagtctctggtatggagttctgagagcttaagagctaaacatgagtttagacacacaagattctaaaatgcaaatgtttattttgaagcaggcattgacaacacaaaaactgtgtagtggtcttgatgctggattgtttctagagtcacaatgaattatttttatgagattaccttatttttatatatgacaaactacttctataatgcttattatggtaaaataaaattggaaaaaattaaaactgacctataagagtgttaaggacctaatagagtgacatatataaattaagcataaaatatgtaaccaggaaaagactgttaacattacatttatgcaaattaaatgcccttaaatttcaccatttgtctttcattttaaaggttatttgctcccgattatatgattcaagtgttataagttttagcttgaactactttgcagtaatttatttgacagatctctattctataaatgtgtaatgtgatgaagaaagagatctttcttttttaatgaaaacattaatgtgttaataccctgtatggataatgcttgacatttagtggtttccaaaatatattagtatattgttgaacatacattatgccttagaaatgcacattctgtattttgtgggatgataatctaattcagtatagaatatgctgtttggcaatgagtttgtggccagatttcaaatagggagttaagtggtactttcacaatccaaagatttttagttaaaaatcatgtagtctaatatgctgcagttatttttttatatttttcaatgcatttaattatcttttttataattctttgtactaactcagcatgtaacaaccaatttacatggaaataaatcgaaatatgataactattatgc

SEQ ID NO: 15640 - DNA, 466 bp, Homo sapiens
cttcctgaataaataacttaaagactcagtataatcatggccaaaaaaaagtcatgatatcaggttagtttgccatattttttaaaacttataatgcagactattctgtttttgttttttatttgcagaaagatttatttttataacttgggaatatataacctgatataatagaaaatactgttttcccattgtgtgtagtatttaatgcagtaaataataaattaatactgacagtgaggccaaaaaaaatctaaatgttgctttcagcataatactttttaatgctaattaaaacagtccccatcatttgtctctgtagattattttataaactgagagctgcctgaatcttctcacattgacaaagtaatttgattccaagtttaagactagttttcagtttgatattttcatgttttgtgtgcttatggttaaataaatgttgaaagatattttcaagttt

SEQ ID NO: 15641 - DNA, 2393 bp, Homo sapiens
tgagtggctctttcactggcaattctcaaatgatatacatttaaagggcagattttttaaaaagatactactataataaacatttccagttggtcattctaagcatttacccttttgatactctagctagtcaggtactccaaattgactttgcagcagggtggcagggtcaggagagtctggtcctgcctagctcagatttcatggcacctgcacttgaagcaagtcacttctttatcacaggtgtcttgaaacattagcttcttttaccaacctgagaaaattaggatgacctggcaaataagatcttgaataggccaaaagcaagtatcttgctgtgtgtagtctcttggttaaagtgaagaaacagtactgttcacacctttcttcactgagattccagtgtacatgagaacatatatttattgcatgattttctagatacacagtctatgcattattcatatacatttattttagcctaaagtggttttcaaatccagttcttcaagccataaatgaccaagatccaagcaatctgaatttgtttttgtgattatttgactggaatgcttcttaagtggaataactatactccgttatccacccgatttcctaatgtaattgaaagattttctattttgccacacacttggagacaataagggtttttagttttatctactcttctattgaagttaaagaaagaaaaaaagatttttttatttgtattaatgaaaagctttagtttaaaataaggagatccagaataaaaagaagagactgatctcttcaattattgtcatctgtagccaccagcacatcactcttatgtaatccccaaaggcttggcatgccgtaagtgtgtggtgggtagactgctgccggggaatcgtacttcttatttagtaatgataagacttttcattatttttggaattttaaagatgacataaataagtttaaatatcaatttggggagtaaggtttaatattgccatcgggtattgagacaggaggaagtttctgtttttctccatttagacataggtcaattaaaatatttgggtttaaaatgactaaatgctttaaacatattgtagcttaagatatatgtgttaagatatatacatgagaaactttaaaaggtaactactgtgcatgcctgatgcttaatagaatacttagtggcatcaaatgtttgcagcagtctccataattatattcagtcccttctaatactgtatcaatgtaaatgaaataaatatattcaaattggctttttgatatgcatcaagtggcattttgttcctgtgtttaatagtgatctgtatacagctgtgcacatattgtcatcacttattctagcatcactgttaaggctgtgattatgtttgatattcacctggattttaatacaagccaatatcagcttcccattgtgtaataacttgggtgtttaggagtcttttcacattttttggggatatgaactagatgttcaagaactccttctggactgtggatactgaatcagtgtactattggctgcagaatttgtttcaattgaaaatagactcaggaagattgctgctcagaatatcatataatgtttattttttgaggtgtttttgtttttatttgtgtgtttttttttttttaagtcagcttggaacttttttcctgggtagtatttgggagagggaaaggctgtactatatatttatttctaaatgttttgactgggcatttttcttttaatgaaatatgtggactgctctagcaaaccctattttcagctactatttgaatattcttgaacaccaccactgaagagtttcatatacaccaaataatgtctcatctctatagtacagggaatataaaattggtttcctgtggtcatgatcaagatagtagtattattacacaagaaacttggtctgcagtctggaagcttgtctgctctatagaaatgaaaatgcagcatgaagttgacattgtggaaatgaaagtaattgggtattagaaatctgaaagtactgtcatctaaaagcaattgtgattttattgtaattggttgtcactgttgtacggtgtctagaattaaagaatacatgtaaactttcatggtatttagcctttcttaaatttttttaaaatttaaactttctaacctatgtattcaacttctgtatttatatttaatcagtggttcatgttatataatacacccttaactagttaaatggaatgttggtatggtacagagtaccatattgctaagaaaactgtcttataaaagatgtatatgtgtgaagacatgaaagtttaatgtacagaatggttggagaaatgcctatggtgaattaaagcttcatatctgctttctg

SEQ ID NO: 15642 - DNA, 1540 bp, Homo sapiens
tgtttgaaagatgtatggtgatcttgaaacctccagacacaagaaaacttctagcaaattcaggggaagtttgtctacactcaggctgcagtattttcagcaaacttgattggacaaacgggcctgtgccttatcttttggtggagtgaaaaaatttgagctagtgaagccaaatcgtaacttacagcaagcagcatgcagcatacctggctctttgctgattgcaaataggcatttaaaatgtgaatttggaatcagatgtctccattacttccagttaaagtggcatcataggtgtttcctaagttttaagtcttggataaaaactccaccagtgtctaccatctccaccatgaactctgttaaggaagcttcatttttgtatattcccgctcttttctcttcatttccctgtcttctgcataatcatgccttcttgctaagtaattcaagcataagatcttggaataataaaatcacaatcttaggagaaagaataaaattgttattttcccagtctcttggccatgatgatatcttatgattaaaaacaaattaaattttaaaacacctgaagataaattagaagaaattgtgcaccctccacaaaacatacaaagtttaaaagtttggatctttttctcagcaggtatcagttgtaaataatgaattaggggccaaaatgcaaaacgaaaaatgaagcagctacatgtagttagtaatttctagtttgaactgtaattgaatattgtggcttcatatgtattattttatattgtacttttttcattattgatggtttggactttaataagagaaattccatagtttttaatatcccagaagtgagacaatttgaacagtgtattctagaaaacaatacactaactgaacagaagtgaatgcttatatatattatgatagccttaaacctttttcctctaatgccttaactgtcaaataattataaccttttaaagcataggactatagtcagcatgctagactgagaggtaaacactgatgcaattagaacaggtactgatgctgtcagtgtttaacactatgtttagctgtgtttatgctataaaagtgcaatattagacactagctagtactgctgcctcatgtaactccaaagaaaacaggatttcattaagtgcattgaatgtggatatttctctaagttactcatattgtcctttgcttgaatgcaatgccgtgcagatttatgaggctgctatttttattttctgtgcattactttaacaccttaaagggagaagcaaacatttccttcttcagctgactggcaatggccctttaactgcaataggaagaaaaaaaaaaaggtttgtgtgaaaattggtgataactggcacttaagatcgaaaagaaatttctgtatacttgatgccttaagatgcccaaagctgcccaaagctctgaaagactttaagataggcagtaatgcttactacaatactactgagtttttgtagagttaacatttgataataaaacttgcctgtttaatctc

SEQ ID NO: 15643 - DNA, 1924 bp, Homo sapiens
aaaataacagagccttcatttcaaagactacctgaagtaaaatgcagttttcttctacctactcggtgtcttttgcagatcagagtatggacatttgaaatattgctgcttctttcccccttctgctgttaactggatccagagttctgtgggaaatagaagatcaagcattactgtcctttgattaaatgtgatatctaccactctgcaatattccagacaggtgtcttccttaccgttacatggtctttaacacttttactgattgcaatattttccccataaaatcttcattctattataatattgatcttgaatttgaatatgtgcaaggtcagatacatttctcaaacataacatttaataaataatgtgatataattatttaatagaaagaataattccgaccttcaagcaagtttctgaaggtattttatgatgtataacaactgaagttttacaataaaaactaatttaaatgttagctgaagatatgtggcatttaaattaaaatggaaattatataaaggaaagtgatttttaaggatatacataaagatatatttagaattttcatgatactgttctcctcatctactgcttatgttaagtgagaactttcttagtaatacataatgcatgatgttactgcattttctaaatgactagtaagtgattagttttttcacttatgcctattaatttgataccaatttaatcatgataaaacaataaccgttaacatatattttgttaaatggacatttaaaagaatgttgttcaggttttttttttaaatactgatatggggcatacaatctattcacatgttttctactgaagtactaagtaaaaaaattaaatcattatcagaataaaaatatgtgttctaaaattagcaacaatttctggggatacatgcagatgttgttaaacgtacctctgcatacagatatattataaaacacaagcaatgttatttatgaaactgtgatgcagtcttcaacatcaagaaaaaatgacaactataataaaatttacaacacagtttcacagtctaaatgctatgttcctttaagtattttcatatttttaatcatttattaagagaaaattgtgaaaagttaatttggccttatagagagattcaggatagatgtagcctatagatgtgtcattttaataagttgggatacatgtttagtttttccttatattcctgttcagtgaacagattttcataattctcacttgttaaagtgctgcaaaaattgcattttcagtactctaaattactacattagaagagagcatttctccattgtctttattttctgttatatatgtgttgtaaaagtacactacattagaagggagcttttccgttgtctttattttctgttatacatgtgttgttaaagtacatgcattcttagactaactctcagatgctttgctcttttggagctgaagaattgtttgatggtgatgtcatatatctgatagattagtttcagtggttctcatttcacttttatacgtaatttcttaactatattaagatagttgcaggcagtgtacctcaggttgactctgtacatctgaatagtgagtcactagtattttgcttcaagccttctgaaaatataaccatagttacctaagcacacagtgaatagtcacatggtagtacttgtgattagagcatgtaaaacaatgtaattgaaaagtcagcttccatattttgtaggggaaatagaacaccctactttttatctagtgtgaaatatttaatcgaatttttgttgatttatattatgttacctgtgctgaattaggtttggtacttgtgttttgtttgacatattagtaagttgcttttgcttctttctgtcaacttattttttaaataaaattgatctgg

SEQ ID NO: 15644 - DNA, 258 bp, Homo sapiens
gcagttaaatttttttaacttttattttttaaacaatgggctaaaaataaacagtattaaaaggttaagtttatataatacatatgtacacaattagtggtgttttcttttcagacaaaatactgaaacaaatattagtttaaaaacaaactatacagaagacttcataccgtaacaataaatgtatagtttcttcaaagggagaagagattcacatatctgataacaaaataaactagcaatctagttttctaatct

SEQ ID NO: 15645 - DNA, 773 bp, Homo sapiens
aataatttcatggcattgatgttaattctagtctattagttttataaaagttaggattcttatttaggaacaacaggaaatgactgttaaggagaaaatgaatttattgaatgggatgtcaagtagctcacaaaattgagaagttgccgtgggactagggtgccaagactgctgagattctggcagaggcactgccattggcacccctggcccagacagtgtctgctgtgctgtccctggaagctggagctccaacagggaatattggtgtagctgtgcataggccataagccacacttgagccagtgggcagggagaaggaatgtcattctcccttcaccactggggaaggaaaggggaaagggctcaagttatcataggggcttacatgctgagcagctataacctaggtgttcagaacacctggaagatgcatttatttaggggtcacaaatagtgaaattaatatttgaggaatatcagtcacgtgttgtgggcttttatccttaacgtttaatttttacaatcttgtgtaaaaatttatccatgataataacataacttctttaaggttggagtggctggcaagagcagagccttaatttgactttagctctggctggtctggaagcttttacttttttgttaatcccacttcctcactctgtcattcagcattatcatgatcgtgaacaaaattgtactgagaaagtttgtataagtgatatgaacggtattgtattgaacatccattaaagggttgctacacttta

SEQ ID NO: 15646 - DNA, 1889 bp, Homo sapiens
ggacacatttgggagtatttaatcaggtgtggctatctgagaaatcaactttgggggaaatgtaagattctgagctctctctctgttttgttctagccatgaatttgcctgagaaacttgtaacctatgtgcctcaatatattccatagaaagtaggtccccctgccttctcccactcctcacactcttctacagggataggcttttgcaaatatatcagataaattttttgtttcttgtttatttttaggttattttcttggaaggttgggaaaagatgtttgttttaacaggtcatgtactacgttgttgttttcatttctgttataagtaaaactaaaagcacagaatggtgggaaaggggctataatgtggttcattaataatgttagcagcttttttctaaccatcctgtctaatggttaagacaccagtaacaaaaacacatgatttggaaatactttggctttttcatatacctagtggtgccttatcataatagcactgttacatgaaataagcccctaccttcttactttctggtttgttgaaaaaatacactggtgctctttgaagtgataaaatgagtgtttatgaatgggtgtaattaggaaatacttctcatctgacagctacaaataactaagtttggaggtattttcactctatatgaataaatatttttccataaaatagttgtgattatatttttgttttatataggtcccaaattataattgtcaaatatatattttaaattaataaaagttgtcattcttaggaatttggtttgaaatttatcagttatacagaattgtcatactgcattagcttctacctttagtaagacatattttttaggtataaattcttatgctttaacattatttctggattgaaaatcttataaaacccttgaaaataaacagtctcttttttacaaagcctgtgttagagcacagatttacctaggcttgaagatttggaagaaataatatgtaagaatggcctcaaggcagaccactttaagtttggctagacttcatatcgtggaagtattgtctatttcagtgtgaaactatcttgaatttgcaaatatagtgttatattttataaagttttgtaaaatcccaaacaatatttctatttttgtaaaacaattgtatgtataatctgtatttgaaatcattttgcaatctatggaaatagagtagcaattgctatttctaaattgtgaactttaagtcaatctagatttattttgagaagtaattgttcactctttacttttgaggcagccattaggttgaaagtatatatttatcatataaaacttgatgcgttttgcactactctttccatttatatgctgcaaacaactacagtctttgaaatatggaaaatcagcagtctaaagtttgttttaaattctaaatttaaaaaatcttcaaatctgaatataccgcaaatgtcatgagaagtttgattcagtaacttgtgatggaggattctttggtatcttactgtttggttaaggcactaattttacttacctattagattttgaaagtatctgagatatacaaatctccctgtaggaaatgtgaaagaaaagcacaacaaaactagggttttttgttcatttgcttgcttttatgattttttttggtttgttttaatatcaggtggatttttgtttctaagcaatatatacataaaatcaaccaacatatctgaaaaggatcatgaaacctgagaaatgctaatggagatttgctggtacataggaatctagcaaattcaggaaccaaggggaaatgttgtgagataacatttacattgtcaacctttattgactttgtttttacaataaaaaatattttacaact

SEQ ID NO: 15647 - DNA, 980 bp, Homo sapiens
aaaaccctggttaatcaaagatgttccagagtgcctagaactgagagggaaatggaactcatttggaactccccgtgaggaggtcgaggcgcacagggcaagcaggaagaggcgagggcacttgggggtcattatttgagatcgtaagtcttgtttcccacagacctggccgcgtcaggcagatcatcgcctggggggcctttgccaacgtggggtctcttctaacttcagcacttgacatgcggtcaccggtggcagcgcggtgtgttgaagggaaacggtagctattcattcacagttgccaagagcagctccgcgcctgctggatcgtggatgcagcgtaaacatcttccttcagacgaggcattaaccccatggttaatggactggtcaccagtttttattttatttttatgaatctacctttccattgattgatttaagttcaggccacttttctgtcttttatttggttactgttgttatttgtttttaagttaggatgctttttaacagcctttagaagccgctgctgaaattgatactgggggaagggttccccttccttctagagcagaaaagggagagaggtgttgtattcctgtttggtaacctcagtctcctgtaagacctcctaccacatggcgagtatacaccaatcaggagagggtagctgcctgcataggagcctcgcttccgattattcccttcccaatattattcatccagacttagccacagtgcacaaaagcaaacctgctagagaggcagtgaacaccacagcttctccccagctaggtgccttttacatcgggtttgttctccttccatggtgtgttgctgacattgtcactgagtcccatgtgaggtgctggtgagtattacctttcatctgtgccatgctctagaaccttgaccttgatagttcaccacctctgatggatccctgttttaaataaaaacgattcactttaaagcct

SEQ ID NO: 15648 - DNA, 2261 bp, Homo sapiens
aactccaacttagtgtctctatttatgagatcactgaacttttcaaaataaagcttttgcatagaataatgaagatctttgttttttgttttcattaaagagccattctggcactttaatgataaaatcccattgtatttaaaacatttcatgtatttctttagaacaacataaaattaaaatttaacatctgcagtgttctgtgaatagcagtggcaaaatattatgttatgaaaaccctcgatgttcatggaattggtttaaacttttatgcgcaaatacaaaatgattgtctttttcctatgactcaaagatgaaagctgtttcatttgtgtcagcatgtctcagattgaccttaccaagttggtcttactttgttaatttatctgttgtccccttcctctcctctgccctcccttcttgtgcccttaaaaccaaaccctatgccttttgtagctgtcatggtgcaatttgtctttggaaaattcagataatggtaatttagtgtatatgtgattttcaaatatgtaaactttaacttccactttgtataaatttttaagtgtcagactatccattttacacttgctttatttttcattacctgtagctttgggcagatttgcaacagcaaattaatgtgtaaaattggattattactacaaaaccgtttagtcatatctatctaatcagatcttcttttgggaggatttgatgtaagttactgacaagcctcagcaaacccaaagatgttaacagtattttaagaagttgctgcagattcctttggccactgtatttgttaatttcttgcaatttgaaggtacgagtagaggtttaaagaaaaatcagtttttgttcttaaaaatgcatttaagttgtaaacgtctttttaagcctttgaagtgcctctgattctatgtaacttgttgcagactggtgttaatgagtatatgtaacagtttaaaaaaaaagttggtattttataagcacagacaattctaatggtaacttttgtagtcttatgaatagacataaattgtaatttgggaacataaaaactactgaataaatcatgtggcctaatattgaaaatgtcactgttataaattttgtacatttttgatcaaatgtacatctcccctttgctaacggccgtctgctctcaaggatgacgtgggtttgatttctaagtgtttcacagtgtctgtaaatcaagaccaaagagcctgtcgatgagactgtttattaccagattcacttctgaattggccagaggaaatctgaatgtattatcctgtgtgtgtctaggtagagatattggaaggctgccaggggatttcgaagtttgcaacctttataggataactgatggcaatattaagacagacgcctgcttttgcaaataacttacaagactgtaaattccaaagatctgaatggggctttcctgatgttggtatctaaggcttaggcctatagattgatttacctttggaattgtgctccaaatgtctactgaagcttaaccgaagaactaataaatggactacagtagctcacgttacagggaaggagggtaggcagggaggctctgtgtgttaaaatgagggtctcactgctttaggattgaagtggctggaaagagtgatgcctggggaaggagatggagttatgagggtactgtggctggtactttctgtactaaacatttcctttttctattttaccactaattttgttttaaactgtgagccgtccaagtcagaagaagacagcaaaaaaagcaacttttccaacatacaatttacttttaataaagtatgaatatttcattttgagaacattccctggaattgccacataattcattaaaaacatttttttaagcaacacttggaacagtgtttactttaaatccttaatggccttaattaattctcagattcctgccccatcacttacagaaccaattcactttagagtgactaaaaggaaacgatagcctagctttctaaagccacgctgtgtccctcaattacagagggtaggaatgggtatacctctaactgtgcaaagcagagtgaaattcaattcatagaataacaactgctgggaatatccgtgccaggaaaagaaaaatttctggcaaatattttgtcactgctgtaaagcaaaatatttgtgaaagtgccaaaataaagtctgtcatgccaaaagtaaatcattgtatagactgacatccagttttcttcaactgt

SEQ ID NO: 15649 - DNA, 310 bp, Homo sapiens
aaacagtaagaaagaaacgttttcatgcttctggccaggaatcctgggtctgcaactttggaaaactcctcttcacataacaatttcatccaattcatcttcaaagcacaactctatttcatgctttctgttattatctttcttgatactttccaaattctctgattctagaaaaaggaatcattctcccctccctcccaccacatagaatcaacatatggtagggattacagtgggggcatttctttatatcacctcttaaaaacattgtttccactttaaaagtaaacacttaataaatttttggaag

SEQ ID NO: 15650 - DNA, 1637 bp, Homo sapiens
aattttttttcctgaattggacatgtgtttgcaaacacttgtcttgaagattatgctgtttatgcaataatttgtgaacatgtacagagttttatataaatttaaaccaatttttaaaacaaaactgcggacaccaccataaaaatggaatcaaaagaaagttaatttatgaaattaagaggtcagcagaatatactcagtgatggaagacacttgggaaagtctttttaatagaacaagaacgatcttaatttaagaatattatcctggtttaacaacagtgccctgtttacaacagattgtgccctatctcatctgcagccgaggaataaaggattctgattagaaagagggttgcctacagattagtaagcaattccttggatcttatgcacagaacttgtaccatttgaatctgttttatgcttaaatcaaagtgctttgatcaaatgcataacctgccatatctttacatatttgttggtagcaatttgtattaaagaaatcacaagtgcaaataaaaagtcatttatcatttgtttaactaaactgtcatggtttagtttacaatttttaaaaagttcttaaaatactgaaaatgcagttgacacttgtgtatggcttatgaagttatttttgatagtcttacattacttgaattgttcaaagtacagtatattttaaattaagaaaagtgaactatatgtatttgttttatacatttaaggcttagactcataaataatgctattgtttatgatttgaaaactttcaggcaaaatccaatttacatttttcccttccctagcaattacttttttccagcttcaactcttcttagttactaatactttgttgactttaaaaatgaaatcattcacaaacttttggtatatgatggagaatgaaaaactagagtcagacagctttaattgacattgtcaacacctccagttatcaggaatacatttttttactgccttaacctgtagtgcgtagaatatgcatcaatttcttgaaggagattcatgtttttataagaattttcatgtaattattgcaattgtggtcaaataaggaacgtttcctgcttgaaattatattgatttaaatgatgtgtgagatgtttcaccattttcaggcactgtgtaattctattgtaataaactggcaggtatctttgtaactataaatagtgcatgctcagccatgtacactgtaaatagcctttaccaaacgtgtttgacaaggaccataattaacatcacttagtgaattgtgataaagaaaaaaaagccatgatttattcgatgtgattggcttgtttttatgtggcgccaagaacgaacctgtttaacagctgtaaccaatggtactgatctatccatccaatgttgtcattatatttgactgtggttcaacagtattgcgttgtcagactaggaaagctaaacgaacaaaatggttttagttttgctgaagactggccttattaatggacagctttcctaacaagagattattaacttttatcaggtgttaacatctgtttcaggaacatggcagtatgtttacatgtcagaagttttgtttaattctatggtatttctaaattgacttgtttaaataaattcagc

SEQ ID NO: 15651 - DNA, 1127 bp, Homo sapiens
gccttcaagtgggcggagctgagggcagcagcttgactttgcagacatctgagcaatagttctgttatttcacttttgccatgagcctctctgagcttgtttgttgctgaaatgctactttttaaaatttagatgttagattgaaaactgtagttttcaacatatgctttgctggaacactgtgatagattaactgtagaattcttcctgtacgattggggatataatgggcttcactaaccttccctaggcattgaaacttcccccaaatctgatggacctagaagtctgcttttgtacctgctgggccccaaagttgggcatttttctctctgttccctctcttttgaaaatgtaaaataaaaccaaaaatagacaactttttcttcagccattccagcatagagaacaaaaccttatggaaacaggaatgtcaattgtgtaatcattgttctaattaggtaaatagaagtccttatgtatgtgttacaagaatttcccccacaacatcctttatgactgaagttcaatgacagtttgtgtttggtggtaaaggattttctccatggcctgaattaagaccattagaaagcaccaggccgtgggagcagtgaccatctgctgactgttcttgtggatcttgtgtccagggacatggggtgacatgcctcgtatgtgttagagggtggaatggatgtgtttggcgctgcatgggatctggtgcccctcttctcctggattcacatccccacccagggcccgcttttactaagtgttctgccctagattggttcaaggaggtcatccaactgactttatcaagtggaattgggatatatttgatatacttctgcctaacaacatggaaaagggttttcttttccctgcaagctacatcctactgctttgaacttccaagtatgtctagtcaccttttaaaatgtaaacattttcagaaaaatgaggattgccttccttgtatgcgctttttaccttgactacctgaattgcaagggatttttatatattcatatgttacaaagtcagcaactctcctgttggttcattattgaatgtgctgtaaattaagttgtttgcaattaaaacaaggtttgcccacatccaag

SEQ ID NO: 15652 - DNA, 1004 bp, Homo sapiens
agattagaaatcgcgacacatttgtagtcattgtatcacggattacaatgaacgcagtgcagagccccaaagctcaggctattgttaaatcaataatgttgtgaagtaaaacaatcagtactgagaaacctggtttgccacagaacaaagacaagaagtatacactaacttgtataaatttatctaggaaaaaaatccttcagaattctaagatgaatttaccaggtgagaatgaataagctatgcaaggtattttgtaatatactgtggacacaacttgcttctgcctcatcctgccttagtgtgcaatctcatttgactatacgataaagtttgcacagtcttacttctgtagaacactggccataggaaatgctgtttttttgtactggactttaccttgatatatgtatatggatgtatgcataaaatcataggacatatgtacttgtggaacaagttggattttttatacaatattaaaattcaccacttcagagaatggtattcagtgcaaaaattcttagtttaactttaaatggaagatatgtatgtatgagaaatggccaacatgcctatgaaaaaaatgctgaatctcatcagtaatcaggaaaatgcaggttaaaacaataccatttttcacccatcagcttagcaaaaatgagtatattttttaacaagtgttggtaaggatgtggaaatgtgaggttcttgtagtaagaatgcaaatggcactctttgtagagtaagtctgttgacatctcataaaactgaaaatgcacacaaccctgtaaatctagcaactgcactcagttgatttcagcccatacatacaaagagacctgcataagaatgttactaggctttgtaaaagcaaaaaataaggaacaacttaaacatcatcagaaggggaactgataaactctggtgtaatccataccacagaaatacaacaccgcatgtacaggaatgtgctacatctatacaaataaatggtcaaactc

SEQ ID NO: 15653 - DNA, 277 bp, Homo sapiens
atagaagagtgaaccgacacagtgtgttatcatagaggagacaaaaatggtagtgaagcttgtggttatgtatcttatctttctacatttacatgttttctgtaaggagtgtggttatagagagactgttggaaccatgagaaggatgtttctgtgttcttgattatattgttctgcaaaactgctaagccatgaacagttttcttagctacttagaatggttatacatttaaaagtataaaaaccaaagccaataaaaatgatgtgattatttaag

SEQ ID NO: 15654 - DNA, 138 bp, Homo sapiens
atgcgtgcttgtatcccagcagggcatagataatacgttattattgtctgccaagttctacatgtggagaatctgcttctgctttaaaatatcatgtgaaactccctggaaacaagaataaaaaattatgtattatgc

SEQ ID NO: 15655 - DNA, 1380 bp, Homo sapiens
ccgggaggacttgtcaccctccaccccacattgctgagctgcctcttgtgcctctggcacagcccaggcaccttatggttatggtgtaaggagtatgcccagcccctgaggggagagatgcatgggatatgcacccaggtttcttttacagtttttagaatcgtttttagagggtggtgtgtctgacaccatgcctttgcacctttccatgaaatgacactcactggtctttgcatcgtgggcataaaatgttcacctttttgccagatgagtacacccagaatgctaatttttctgtccatcgtgtacgctattctagtgcttgtggcccagtactgtctatgagttgtcgtgctcctgtttctgaggttgtcgtgtgagttctgtacaaaaagcccccacaagtcgtccagtagaaatgcatctatgaggtcagcaaggatatgatgagattttgctcacagtcatgtgaaaacaaaatctcagctctttatccattgctttcacttagttttagtaccaaaacaaagagaatgcaaagttaagcagacttgaccaatgcaagtctctaagttgtttttataaatgatctgtagttccgtggcttgcatgggtgcaccaatcatctttagaacgatgtacactgatgttcatctcataaatgtcactctttagagaatgttacttagttaaacatgcagtgaagatcgaatttttttcccaagaacagatgtgttagggagaggggcttcagctaaatagtccaaaccctagggtgcttaaagccaagttagtgcaggctgagccccttggttcacagtcaagcctccttgtttcctagggtgactgtagagaaatgtatttccggatgaggtttctgatctaggccatttgaccaaactttgctgtgtctaagatattagcatgtttttgaaatatttattttttaagatgtttaggagtaaggtcgtgttgtcttcctcaactaaaaagaagtttactgttgtatcgtctccctgaggtgaacgttgttgggttgctagcaagggcagtagcttaaatacttttgttgcctactctgaaagctcatcaaatgagagcccttttatttccaagcagaatttagtcagataattttgcttctaggatatagtatgttgtatatgatgctgtgattgccctggagttcctgccatgacatggaaacctggtggtatggaagcatgtactcaaaatatagacgtgcacgatggtggtgtggcttacccaggatggaaacactgcagttcttacttgcattcccactgcctttcatggggggtgactgggtagaggccaggagaaaggaaagagttgtaaaataaaaaactgctagttcat

SEQ ID NO: 15656 - DNA, 421 bp, Homo sapiens
ctcacaccccgcggcaggacttctagagaagcccaggatctgtcccgtgccgccgctgctcccctccccagacacctctccacgtctcctacccagggggtcgcatccctagcccttcactgaccccagctcttcccttgctgcagccgcacctgcagctccagggagttaactcttcttctgggggactgagaactgtagaaagccacacactactacatcccttcacaaagagtatatgctagtttcttgtagatattcacagctcattttagagctctgtacataatgttgtgggtctttgttttgttgttttgtttgctttgggatcttgttggatgcacttagatatggaaaatggaagccaaattttatctttaaagactgtattttcaaaataaaactttttcttgtttgtttc

SEQ ID NO: 15657 - DNA, 1913 bp, Homo sapiens
gtcccctctgaggtgtttattcctgcttgtgtgatttagtttttgggtttctttgagacagggtctcactgcattgcccttgctgacctcaaattctggggttcaagcaatcctcccacctcaacccacaagtagctacgactgcaagcacctgccaccataaagggctgcattttgccaccataaagggctgcatttttttaaaaagcctaggcagctctaacatcatctgatatggacacaaggccaacagtttccttatttacatccttacctctaaaagatacttcaaagtgacaaaaacgtgttccttccccacttagagacaatgattaacagggccctatatgttcttaccacatacagaggatgcatttatttttgctctatgacacttgcaaaaatctctactgtaattaatttgggtctattattaactctctgttccatcatagaatgtggccaggccttacaatggagagccagagttaaaacttcaagttgcatctgtttttgggctgagtcaccacctttgcctcatgctcctttgtctgcaaaggcctaggattctttctttaaatgaaatgcttaggactttgtggcttgttacatttgtcatttaactgcagtgctattctttgaaagctgctatgtgtattttctctgaagtctgcattttactaaaatttacaacagtctgatgattgattgattactgtccaggtacattttagaaaaagtgttcttcttccagtttgttttactaagcaaactttgagtaaatcctttgtcctatattgaatccagtcccaaagtgttcaggtgagtttctctagttccataaacaaaacatacatagtgggaactccctggtatgccatagagcacacaagaaccccaatattaatgctaacaattataccagtccattttgtttattctgtggaattgacttgacaaagcatgaagatattcccagtgtctgtctgataatattttgcatctaagaatgggtttgactcaagatcttgggttaccaagatgtcttaaatgttcagtaaatatctttcttacagtccagtagcttagagcatgtttgctgattgatattacatttaaacttggggctacagcttgttacctagaattttgagatactaagagaatgcaattttaaatgcccactggttttatttgttttggagagagggtctcattctgtcacccaggctagagtacagtgggaacagtcatggctcactgcagcttaagctcactgcctgggctcaagtgatcttactccagcctcccaagcagctgggactacaccaccacaggtatgcaccaccatacctggctgatttttaaaattttttctagagatgaggtctcactatgttgcccagctggtctcatactcctcagttcacgcattcctcccacctccacctcccaaactgctgggattacaggtgtgagccaccatgcccaacacccactgatctttaactctcacatgttgggcataagaagtcactatataattgttactggaaagcaagacttaacgaacaattctgactatgaaaaatgtctctttcagtttgttctgtaaatatttagaaaagtgacagctgtcaacctcagagtaactatttctaaaaatgtaaatatgtattaatccttgtatcttttatggtaattttgcatattgatatgaattatataaaattgtttaaaataaaaggtgtccttgaattactgaccacccatagatgtctactgttaccaggttttacaatgcaaattttcactaatacctgggtttaatacagctcacatcactgaatgttacacatgagtttaaatgggtaatatacaggttttgttataataaagttactgattaaatt

SEQ ID NO: 15658 - DNA, 272 bp, Homo sapiens
tgcttaaatttggattgttagtacaattctagctttattcaagtttgctttgcattcagtagatgtgagatagagtctaacagttcttacttcataaaattacatggctcctccacttgaaatctttgaattctgatcccttcctgtcttcttagggcattctccacatttcttttttattagcttcatggatagttttttgccctattgaatcattcagttggtgtacaaacatgccttaatattgtcattaaaaaagaaaggaacagcaa

SEQ ID NO: 15659 - DNA, 117 bp, Homo sapiens
agtgccgggattggaggcccaagccactgtgcctggccctttataaattatgttataatttcatgtaatacataattgtatagtcaaaatggctcacatattaaatattctttatac

SEQ ID NO: 15660 - DNA, 685 bp, Homo sapiens
atgctgggaattcagaggaatgtcttcacttatacttggatttgctctcttcccatttctgattgttgtatagctttcgattttgcttacagtagttcccccttatcttcgggagatacattccaaggcccccagtgaactcctgaaacctcaaacagtaccaaacctttatacactgttttttccatatatatatacctatgataaagtataatgtataaattaagcatagcaagagattaataataatgtaatagaacaatgataacatactataataaaagttatgtgaatgtggttggtctctcttgctttcaaaatatcttcttgtacagtactcacctattttagaatgtggttgactacaggtaaccaaaaccacagaaagggaaactttggatgaggggggcactactgtacttaggaatacaactatatacatatgattttatttttaagaccatattatatttgggtatctactaatattttgtataaagcaattttttgttccattacgtgactttttgttttattgtatatgtaatttaacacacaataaagggtaaagttgcttccccaaaccacacttttaatcaaaacctagaatcatctgcagtccttgttaaaaatgcaggtttctagaaccctctgaagttctgattaaataaatttattgcaaacc

SEQ ID NO: 15661 - DNA, 880 bp, Homo sapiens
atcaagataattgttagatttcttccatgcatgtatgtgttccaggaatgttaatgagatggtattgtaaaagagttgcatggataaaacttggcctagaaaagtttggtctgcactataaaacattttacttattttcctacatagaacatgtatattctacaatctgctttttattagttgtaaatattttcttatgtaccagaaccaaataagtatatttagaacttgttaaaaatacattttaatttatgatatacatattattttaattacttgttaaaattttgagttaagttgcatttctttgggctatgaaggagtcctcttaagtttgatagaaatgaatttcttgtaacattcttttttaaaagtggaagtcattaacagtgattattatatcacttatatcctgctaagatacacataaatcccattttgtactagtacctgtggattacagtcagttaaaatgaaatgcaacactgaagtctataacatgaaatgattattaaattgtttattaatttagagctataagaggaacttattttttctaatacggaagcattgcctaataattaagaacaaaaattgccaaaaatttctaccactttttactagattttaaaaagctactttcttttatattgcctatataagcaaaaaaccaaccactgtattaaagcaaactaagcctgcatttatatctgaattattacctccatattttaccaaacatttgaatgtcccccttcccccttttttgttttctgcttttatgactgtatttattcctttactgtaaaagaatatgaagaactcatacatgttgaaagctcctttgttgactgggtcaaagtgaaggaatttcaatctc

SEQ ID NO: 15662 - DNA, 2888 bp, Homo sapiens
ccctgggtttggcatccgctttggctggagctctcagtgcgttcctccctgagagagacagaagccccagccccagaacctggagacccatctcccccatctcacaactgctgttacaagaccgtgctggggagtggggcaagggacaggccccactgtcggtgtgcttggcccatccactggcacctaccacggagctgaagcctgagcccctcaggaaggtgccttaggcctgttggattcctatttattgcccaccttttcctggagcccaggtccaggcccgccaggactctgcaggtcactgctagctccagatgagaccgtccagcgttcccccttcaagagaaacactcatcccgaacagcctaaaaaattcccatcccttctctctcacccctccatatctatctcccgagtggctggacaaaatgagctacgtctgggtgcagtagttataggtggggcaagaggtggatgcccactttctggtcagacacctttaggttgctctggggaaggctgtcttgctaaatacctccagggttcccagcaagtggccaccaggccttgtacaggaagacattcagtcaccgtgtaattagtaacacagaaagtctgcctgtctgcattgtacatagtgtttataatattgtaataatatattttacctgtggtatgtgggcatgtttactgccactggcctagaggagacacagacctggagaccgttttaatgggggtttttgcctctgtgcctgttcaagagacttgcagggctaggtagagggcctttgggatgttaaggtgactgcagctgatgccaagatggactctgcaatgggcatacctgggggctcgttccctgtccccagaggaagccccctctccttctccatgggcatgactctccttcgaggccaccacgtttatctcacaatgatgtgttttgcttgactttccctttgcgctgtctcgtgggaaaggtcattctgtctgagaccccagctccttctccagctttggctgcgggcatggcctgagctttctggagagcctctgcagggggtttgccatcagggccctgtggctgggtctgctgcagagctccttggctatcaggagaatcctggacactgtactgtgcctcccagtttacaaacacgcccttcatctcaagtggccctttaaaaggcctgctgccatgtgagagctgtgaacagctcagctctgagtcggcaggctggggcttcctcctgggccaccagatggaaagggggtattgtttgcctcactcctggatgctgcgttttaaggaagtgagtgagaaagaatgtgccaagatacctggctcctgtgaaaccagcctcaggagggaaactgggagagagaagctgtggtctcctgctacatgccctgggagctggaagagaaaaacactcccctaaacaatcgcaaaatgatgaaccatcatgggccactgttctctttgaggggacaggtttaggggtttgcgttcgcccttgtgggctgaagcactagctttttggtagctagacacatcctgcacccaaaggttctctacaaaggcccagatttgtttgtaaagcactttgactcttacctggaggcccgctctctaagggcttcctgcgctcccacctcatctgtccctgagatgcagagcaggatggagggtctgcttctagctcagctgtttctccttgaggttgcggaggaattgaattgaatgggacagagggcaggtgctgtggccaagaagatctccgagcagcagtgacggggcaccttgctgtgtgtcctctgggcatgttaacccttctgtggggccaaaggtttgcatcgtggatccagctgtgctccagtctgtcccctcctcctccactctgactgccacgccccggaccagcagcttggggaccctccagggtactaatggggctctgttctgagatggacaaattcagtgttggaaatacatgttgtactatgcacttcccatgctcctagggttaggaatagtttcaaacatgattggcagacataacaacggcaaatactcggactggggcataggactccagagtaggaaaaagacaaaagatttggcagcctgacacaggcaacctacccctctctctccagcctctttatgaaactgtttgtttgccagtcctgccctaaggcagaagatgaattgaagatgctgtgcatgtttcctaagtccttgagcaatcatggtggtgacaattgccacaagggatatgaggccagtgccaccagagggtggtgccaagtgccacatcccttccgatccattcccctctgcatcctcggagcaccccagtttgcctttgatgtgtccgctgtgtatgttagctgaactttgatgagcaaaatttcctgagcgaaacactccaaagagataggaaaacttgccgcctcttcttttttgtcccttaatcaaactcaaataagcttaaaaaaaatccatggaagatcatggacatgtgaaatgagcatttttttcttttttttttttaacaaagtctgaactgaacagaacaagactttttcctcatacatctccaaattgtttaaacttactttatgagtgtttgtttagaagttcggaccaacagaaaaatgcagtcagatgtcatcttggaattggtttctaaaagagtaaggcatgtccctgcccagaaacttaggaagcatgaaataaatcaaatgtttattttccttcttatttaaaatcatgcaaatgcaacagaaatagagggtttgtgccaaatgctatgaacggccctttcttaaagacaagcaagggagattgatatatgtacaatttgctctcatgtttt

SEQ ID NO: 15663 - DNA, 134 bp, Homo sapiens
agtgcgcataggaacccattacttaatagaagtcagttactccagccaggcagctctcccaatgtttctcctctccttcccatggcccctgttgttgaagtacgtaggaaactgaatacataactgcaatctgc

SEQ ID NO: 15664 - DNA, 4310 bp, Homo sapiens
aaatgggctcctcccccgacaatcctgtccttgtgtttgtgtgtgctaacagaaataagttgcagtatggtcgtacttttaactctagtatcctttgcttgcttcttacgccctttcctaggtgaattctcccacagtggtctgtatctcaacattttctttttaaaggaaaaaatatatatatatagtttctttttattgatcaggtctgtaaatgtgtactaaaaaaatcagagtttatttataaacaaaatagtttatttaaagagaaggtctcttccttattgatatcatggtatgcattaattccatttgttactattgtgcacaaaagccctgttcacaggggaatggtgtaaacatttatactgttttgttcactgtatttagtagacataactgttgaatagttactgaatcatgatgtaaagaatatgtgaccatcttcaggtatgggatttctgaacgtttcaaatttcaatcaatgagcactgtcaacacccacaggagagaataaaattacctgtgcaaaggtgtattgtggtgtgtgtaacttaagattacagttctgtttgagagttaaatgatgtcatagctcacttgctatgctgcttccaggattttgttatatgctgaggtgtaaccatttgtgttgtctgactttcgtatgatttaattgagccaaatttgggtcagaacacaaatttgaagatgacttttcagtatatgatgggtatttacatttgaacactagaattttaggtctctcaaataattaagaatagagccagttttgaataaagtctagcagaactatgcagctttagtcatttgttttgtctaagtctgtattttatgtgttgtcttcttaagatctataattttggcatttatgtcatttgtgacatagtctgaaaatagagacattgttggcctttaaaatctcagaaatgaatgacttaatttagtgtcctgaaagagcttttaaaagaggattttgtggcaatgtttctcttactacgtactcacaggtttgcaaatgggaaaaaagtttacatttcagtttaggggcatatctaagctatgctattccctttagaaaattagcctccaaaatcttttgtttcaaaatattatattatttcataaataatttcaagcaaatacagacatccacaatgtagaacatgagagaccccctccctcaatttccacctcccaagggaagtttatgtatttttctaggcccttttctatgtctttacatctctgtctcacacacacacacgtatacacacacacagtttatttttaataaaataggattataccacacacatcctgtcacttgcttttttgcttaagagtatatctaagagaatcctttgtgtcagtgaagctggagctacctcattcttttaactggctgcgtggcgttccattgagtgtctgtcatcatgtgtttagccgagtggatggatagtctgcttgtttttagtttttgctcttaacaaacactgctgcagtcagcatccttgcacagatttctttgtatacttgtattagtatttctgtaagatctgagaagtggaatttgtagggtcataggttatgtacacttaagtttttgacactcactgccaagtcatctgtcagaattctaaactaaagacatgtttggagtgtggatttatcttcagtttttctttggacaagaggaagctgtgaaagattttgctatcagaaaattttggttctttgtcttttgcacatgttctttgagtcttagtatctgtaacgtggcgctactctctctatcatgggggggcatgttttgacattaaattgacttttaagaaaaacatgtcactaacctgaagctcagccacacagtgacttttaaggttttatttagactttactgttgttctcatgagagtaggtacagactgcataaggtttagaatcccagcatatgtctgaaacgacgggactttcactgtgatttccaccagagaaattatagcagagtggctgagcatgtgctctgaggccaggccccagctctgctgctgacgagctgtgtggtcctgggcagagtggtctccgagttccagtccctcctctgtaaaatgggcatgattagagtgcccaccgcattagggatgttggggtgagtcagtgtgaccccacgtgcacagaaagtgctgcgagtggtgcatggtgagaggttgatgcaggtacttagcccttggggaacacaggtagttccttttcactgtgtttaatttgggaaaatccagatccacatcattgtagagtctgagggttagaaggaagtcattgtgtctaacataacaacagagcagtttgtgtcactgagctccagtctgtgctggattattgatattgttggtggcggtcaccattcctggaaagggactgtcccaagccacttaccttcccgaggagtctgctggttctccttgaggatagtgcttagataacagactcattaaacatttactgagtgtctgtcagggatcattcacatccacatcatcctcccggcccctccccgtgttgttcatggagggagtactggcggtccccattttcatgtatggagacttcaggtgaaagaagttaagtgaattctttgttgagtcacaaatcttgagccagtcagaatttgaacctaagatttttgactgctggttgtcacacttcccgccccacactcaactgttgtgtgaatgagccagacacattgcttaacctgagtccgagatggacaatggtataggaaagatattcggtatggagaatcagatgttaacttgtgttgctatttttgttttgttttgttttgttttgtttttgagacaaggtcttgctctgtcacccaggctagagtgcagtggcatgatcagggcttactgcagcctcaccctcgatttcctgggctcaagcaatcctcccacctcagcccccaagtagctgggcctacaggtgcgtgctaccacgcctggccaattttttaaattttagcacagatgaggtctcactatgttgcccgggctggtctcgaactcctgagctcaagggatcctcccgcctcagcctcccaaagtgctggtgttacaggcataagccaccacgcctggcctgtgttgctattatatttggcaggaacccagagtccagaacatttcatctatgatgggttagataatgtgtctagttgtttgcatgccaatttcagtagcctcagttattcaacctaggagatttttctacctctttactaccctgctgaagttgctcttcagcagaaaatctttgtggaacacattccacactttgaaatcttcgtggaacaaaagatatttgtggaaccaatctttgtggaacatattccagctttttgaatgagtgcatatccagtagtacctttaaagtaacactttgtacataacaaatactcagcaaatgtgaaactttatttgctcttacttcaaaattagtccaaaatgttggaaataaaatataagacattgatctagatatgaggtttttctccttcattctcagctgtcgaagaaatcaaagtagcatatgcacaaggttaaaaaccacatatacaaatactatagaacagcttataatgaaaaccttgcctgcctttataaaaaatgtgattatcttcttctgttaatgtcaataaaagatggtttgtcctagaaggtctataaatggtattatgttctggaggaaacctagcaaaaactttgctagtttagtacttgtctctaaattgatgttcacccatttcaatattgcacttattaatggtctttatttttctagcatagataacaattgattctttagattcatatatggaggtaattcttgctttctaaagaaaggaatatggcacattggaaccattttattcaccagtggatttacccttagagtatttttagatctgagctgatgacttgtgagagaaaaagggaacagagtaaagccatggaagccatgaacagtaagagactgccgcctggcatggtttcttcttctgcagaagatgaaactgaggagaaacaagacaacatccttcataccaggaatggtcaagataatgcaagaagaaaaaagctttcaaacaaatcagaaggcagtcaacaaacagaaagggggacattccttccctggcagttactcaaaactgaaattgcttattgtgtacaccggggcttgtacttggggaatttaataaaaatgctcattaccaagctcca

SEQ ID NO: 15665 - DNA, 2309 bp, Homo sapiens
aagagatgctaagagaatgcctgcaaaagaagtcaccattaatgtaacagatagcatccaacagatggacagaagtcgaagaatcacaaagaactgtgtcaactagcagagagtccaagcagaagggcagatggacttcttcagtgtccttcacggcactggatcccatcaaagaaccttgaagaagtggctgccccttgctggacctgaattctactgagtccctggcaagactgtcttacctggcagcaaactgctgcctgatttgttgggaccttctgagccttctacttatcatgtaaatgtattggcacagtgcttacatatgttaataaactgcaaatgtgcagttcagtttgtctctttgcaactcctgtaatacggtctggtgtaaaagtagtgagttaaagctacaggtcagtttatgaaacagaaaagtaggaatgcattttctgggtgaaagagtcacaccttagtgctataactctcctgcccatgatagtgtattctgtttcaggcaagcttattctttccttctttcattttaaatattgtcattacaaatcttaccaggttcacttaaaagctggctttcatccaactctaaacccacatattgaaaaaatcaaggtacaggaaaactccttgttatccttgtttccttagcttggtatgagacagatcggatccagtttcccatgcaccaacccactgcccatggcatgtctttgggaggtgtctgtgaagcagtcatacctgctcctcatctgcctggaaagtcctcctattccagtgtccatgttggcctccagtccttaatgtcaccatgcttgtggccaatgcatccaaataaggatacccctcagggctcagctagacattgcaattttgcatagctttccagttccctttgcttgtcttcttgactgtcttccctctctatcggggtcacttgcaattgttaatcaaagattgaacactgcgtaggagagggagatgatccagagacatgtggcagcaggcatggcttccccttggcctctctgtacactgccccaggactgtcattttggcatctgcaaaggaatcactttagaaagccagcacctggttgatgtgtattcatactgacattagattgatgtgcactgcattagaaatgaggtagctgacacagaaaaaggatgttttgataggaataattttctagtatgtcttgaaacatgttcatctggaagtattttcctccaaagtaatgtagcatgatttttcaaggattgttaacatgcctgggattgggaaagataggactaaagttgtgccaaactatatcaataaattccatgtttagcagaaataggcagcctattggtgttatgtttatgtaacatagtccagagaactgacatgcaggtcaaaagtcagatacgcaacctccttatctgctaactctgttattcttcaaacacaagtgggtagtgtcatttttccttccttccttccattggcagattgtatatttattcacaaaacattaaatgtccatcctgtgccaggtactatgcagatgttgagggatttggggtctggttagtcgtgactatctatcctgaatctaacagtgacttcataactaggagactgaattagacccttaaggtatagtgtgtgttgcaaatcactctgcaatggaaacttttatattcagggtaggtttgtgtcttaaactaggtgttctaatcaatgtacaagactttaccatacacgcaactatagtttttctaaaccttcatcattttgtgattctttgagaaagggcttttaggaactttatgttctaaaaaatgtttttaacaataataagataaaagaaaaacctgtgattcatatgtccccactggcattactcagcaggagcccccagctgccaaaggttggcagtgatcctgcaagttcaagggctctttctccctggggatgtgctttgtggcttctctttacagctttgtttctgcatcagttcactgctgcatgttgtttggaatttatcaccttaagaaagtgtctctgttttatatagaaacactttctcacttacaggggagaaggaaatgcagggcacatgatctggccctccccagaacaatctggatttcacggagacagcaaccagaagttaaaccatgtgactaaaaatgcatctggctactttttcatgtatgtatgagacagaaactaatccttactatcctattaggataccacttttcattgcaaagtttgtgtcaataaagtcattaattttaaac

SEQ ID NO: 15666 - DNA, 1355 bp, Homo sapiens
agaacattttctctcgttactcagaagcaaatttgtgttacactggaagtgacctatgcactgttttgtaagaatcactgttacattcttcttttgcacttaaagttgcattgcctactgttatactggaaaaaatagagttcaagaataatatgactcatttcacacaaaggttaatgacaacaatatacctgaaaacagaaaatgtgcaggttaataatatttttttaatagtgtgggaggacagagttagaggaatcttccttttctatttatgaagattctactcttggtaagagtattttaagatgtactatgctattttacttttttgatataaaatcaagatatttctttgctgaagtatttaaatcttatccttgtatctttttatacatatttgaaaataagcttatatgtatttgaacttttttgaaatcctattcaagtatttttatcatgctattgtgatattttagcactttggtagcttttacactgaatttctaagaaaattgtaaaatagtcttcttttatactgtaaaaaaagatataccaaaaagtcttataataggaatttaactttaaaaacccacttattgataccttaccatctaaaatgtgtgatttttatagtctcgttttaggaatttcacagatctaaattatgtaactgaaataaggtgcttactcaaagagtgtccactattgattgtattatgctgctcactgatccttctgcatatttaaaataaaatgtcctaaagggttagtagacaaaatgttagtcttttgtatattaggccaagtgcaattgacttcccttttttaatgtttcatgaccacccattgattgtattataaccacttacagttgcttatattttttgttttaacttttgttttttaacatttagaatattacattttgtattatacagtacctttctcagacattttgtagaattcatttcggcagctcactaggattttgctgaacattaaaaagtgtgatagcgatattagtgccaatcaaatggaaaaaaggtagttttaataaacaagacacaacgtttttatacaacatactttaaaatattaaggagttttcttaattttgtttcctattaagtattattctttgggcaagattttctgatgcttttgattttctctcaatttagcatttgcttttggtttttttctctatttagcattctgttaaggcacaaaaactatgtactgtatgggaaatgttgtaaatattaccttttccacattttaaacagacaactttgaatacaaaaactttgttttgtgtgatcttttcattaataaaattatctttgtataag

SEQ ID NO: 15667 - DNA, 387 bp, Homo sapiens
atgctttaattttcatttgctacctctttttttattatgccttggaatggttcacttaaatgacattttaaataagtttatgtatacatctgaatgaaaagcaaagctaaatatgtttacagaccaaagtgtgatttcacactgtttttaaatctagcattattcattttgcttcaatcaaaagtggtttcaatattttttttagttggttagaatactttcttcatagtcacattctctcaacctataatttggaatattgttgtggtcttttgttttttctcttagtatagcatttttaaaaaaatataaaagctaccaatctttgtacaatttgtaaatgttaagaattttttttatatctgttaaataaaaattatttccaac

SEQ ID NO: 15668 - DNA, 90 bp, Homo sapiens
ttggtattcctaacaatcctgatgtataattatttgttacttttgatttgagaactctacaaataaaagtgctgggactagattaattgc

SEQ ID NO: 15669 - DNA, 1403 bp, Homo sapiens
cagctgtaaaaaaattgttgtcacagcaaccagcgttacaaaaaaaaaaaaaaaaatcacaggttgcaaaccctggtaacactgcatgcttaatgttgtgtcttctgagcctgtttctagggatacaaagcaatcctgtgttctcagaggaagttgcacacattgtgccctaaagaaggccctcaggtgaaagagcagagctgtgaagaactatcagatttggaattcaatgacactcgagttctggtccaatctgaagccatggattaatctcaaagaatcagtcagtttcatgcaacagaagcccttttcaatggcacctttatatttttatcattcctttttcttcatttatctaaccccaaagccctgatatgccacagaaatggagctatacagccatgaagcggtgttacaggtgaggagtgtaatcctaggaagcatcaggtgaaaagcaggagaccaaagaagtggtcaggaacaatcatcagccctcctctgggcgggaatcagagcagtcagtccagcaggaagagtggcagactttgtagctccatgggcacgtcaattactaatgctaagatgtgttggactctgaaaaacaaaattctgtggctacactgtactgaatgaaattaaagaaactttttttgcatggacacagattagctgaatacttaaattattttcttggggctgcaacttgcaaaaaaaaaaaaaagaataaaaatcagccattttcaacaatttatattatttttaaaaataaatttcactagtgcatggttttaaaaaggagagagaatgcaacagggtgatacaaagatacaccatgtttattctttaatcatagtctgtgttttggcagacattacaaatggaaatactttctagaagatacttaaaattctctttatgtgacaaataagtataatatattcaatttatttccatgttaaatatacaaatcttatgaagttcaatatgtgcaaatttttcacatctttctccttctctcactttacctcttctccctcttttaaacttttctttctccctgccagagtgaaccttatactaaaaaattacaagttttgatctgatcctctctcataccccatgtttgattcagagctgtagatgcctctgaatttgcgaatttctcaagggaaaattaactttaagagctttctttatttcaagcatgttgaaaaggattttgcaacatgacttgggagtacattaaagtaagtcagcatgtatttgacgaagaagatatttgaacttttgcagtttattgtacagtgcatggtaattttttcacctttaaaattcagtttacaggaaaattctaaaatcatgttgccattgtgatgtccaataaatttgtttttagcaccagc

SEQ ID NO: 15670 - DNA, 490 bp, Homo sapiens
gagaccccgactactcctcagccacatcgcaccaacaattctcttcaggtctaggatggcagtcactattcatgccggataatagagaactatgtgacgcagtcctctcaggagtctgagtttacagagccaacttgcagcacctggttatgcctcctttcatctcaaagccaaagagctgccaggtaaatggttatgtggtctatgttccaaacaaaccacatgatcttgcctgtgtcacaatgtaacaagactctagctgggtcccctggtgatgagtttcagcatagaataatgttcaaggaaaagaaaacgaaaacagtttaaatctctaccacagcctcacaagcaaatgctaaggggaacatacatgtaaaaagccagcaaactatcttcaaactcttccgtccttaatgtcttccatggctattgcccccacaatggtctcttttctccctgctcccttattaaagaactctttctgaaaccc

SEQ ID NO: 15671 - DNA, 999 bp, Homo sapiens
actaactaaacatcagtcacctttggtatcagtgtttagtatgttgttctaaccagtccagaaaaaaaaataagctgtttgaattacatctgggcaatcaggagataattcattatggctgagttgaagacttaaggtgtaatttcattacagtccattagtaaagtgtattattggtgccattttcaaaaaaattaatttattttaccagcagtattcatagctgtggttatgttattttttatttaaaaactttatattaaagtcatttgtaatgttattgtatagttattgtgtagcacatatggtttgcactgtatagtagcttttaaagaaaatagtcacaatacagaaaagcattttagaaatagcttcaaaagcacttgtgtatcttgattttttcttatatgctgttgcagatatatgtatatgctaaaatataacttgcaaagatgttctaaatacacatgctataagttcgccttaagatttcaattcttggataatcaggctctgtttgcactttatattttagcagatacagtctcttagtcactaggctttgcatttgtatgtagctgtatgtttccgtccattttcttaatcctgaacctgtatgttaaatgaagatggcaatttttttcttgtatagtacttgtattttctttcgctgatgcagctctgtctcaatttttaaacctttgctgttaaatgcaatactttataaagaatgaacaaaattactggaagcagtattgtaagtaatgaggtagtattaatcagttttatcttttgaaaggcacagtctaaatcgaaaccctaaactcaatgctgcaagtatgaatttaattcatatataagatctatttaaatataagagtagcaatactgcacctggtgatcacaaagataatgttctacttctgatagaaataatttctcaacaaatgttgttactatgcatgtatatggatggaataaaattccagattgttggag

SEQ ID NO: 15672 - DNA, 1752 bp, Homo sapiens
ataaaatgctctctgtcttagcaggagaatggcccaaacctgacatggacaagcattgtttggaaagttcaagaagcaatacagtgtaacatgtcacttgtgctttaaaattagtctgtatcaccatttattacagttataattttggagtttatttttcaaatcatgttcttgtcccagagttctttaggttaacactagggactgcgtccatgtactagtataacagcttgggtttgttagaatttgggcaacattttgattataatgacaacttcattttcacatgttactcagttccctaataggatggtgctcttttgttgaacctgtattgatttttttttttttaactatattgattcgtttactagaacagtctaattggggcattgaggaaatgaagactggatacttctgtatctgtgaagttggcacaggtaacatttggacatgttcatcttattcttaggaaggaaaaaatcacttgccaaaataatacatacttcatagaccactgagttctagtttttattcacactacaacattctctttaacgatgttgcaggtattctcaatttccttttaagaaaaatgaaatgtgaggagaattctggttgtaatagatgacagtacatatgatctgcaggtttgggcatatgctttcatcattaaattatctgataaagttacaagtcacaaaggagaatgagaacttaatgattctattggatttaatatattagcaagaaaacatactatttacatatgtgtagcttagtaaggcattaacataagtacaaaaactatgaaacagatgcatatttcctcaacatactgtgtcaggtatactgttttataatttggttgttttagccttattgcacaccaactcccaaaatataggttactcttgttcaaaaggaaaaaaaaaattgtgattttctttgagtggtatatgttattaattaccattagcatttgctcttataaagggcaatgattatagtagacaatattgtaactcagtagacttgttgaatatgcaaacttactgtcaagtgacctcaaaaaaaaaatgaaaagatagaatacactagtagttcttatcctcttttgtaggaaaccaataatagccattgtggcaataattcatcagttgattttaaagcttcatgttatgcaaaaaagaatcctgctgttatacatgtgacagtgactttgtgctgaaatttcagctattccagataaacattgtatatcttgtaaattaatgtttaaaggtgtagttttgttcttacagaaagtgttgattgccaggttgcttatagcactttaagttattctaaaaatgaaattataagccaaatatttggcttaagtagatttagttgtatagcacttacatatttagttcttttgaaagtttagataattatttaaagaaagcataatgctaatggaaaagaaaatctgatgttctattataatatgctattgctgaatatgaatagaaatacagggcatcatttccttgtctcattataagttagtaacaatatatagattaaatgtttacaatatagggaattgtaaataaatatatcagtttttttccccttcggtcttccacagcagtattattgtctttgtggagttgactaatgataatttaaaaatcctgtaatggatttctactaaaataaggtcatagtggcatataccaaataaaatcaaatacagaaatacaa

SEQ ID NO: 15673 - DNA, 309 bp, Homo sapiens
ggtttcaaaaactctttgacattagatttcacaactgcacaattgaacttattggcctgtaacttatttactaaatgctcagtgctatttatatactacagtaattttctgttaagaaggcagttgtaaagaatgtgtttatataaacctaaaaatgccttttactgctaagtggggagatgggggaaatccatggaagagagatttaagacttattgattgtacatcagtctcttcatatcacatatacatgtatatatataaaactctaatgtagtataaccttgttaaataaaccatgatgattta

SEQ ID NO: 15674 - DNA, 128 bp, Homo sapiens
ttcatgaattagaagaaaatggatgacaaagaaaatgagaatctgtgcagtcatcaacaaaagggagaacatggccaatagtcatatgtgaagacagagcagatcagtctttgtcaatgctctaacaa

SEQ ID NO: 15675 - DNA, 200 bp, Homo sapiens
gattgaattagattgtgttgttgtggttttatttctgaaagtaaaacttgccataaattagaaaacaatttcccaaaataaaatccttttttgtatgatggtatacagttttcagtaatgatgtatacattgtattgatttttttccctaaatgtgttattttaataaatatctcatgaatgagtttgaagtttgcttgg

SEQ ID NO: 15676 - DNA, 1181 bp, Homo sapiens
agtgctgttccgaagaataggctgaaacaaaaatataagaattattagctactttgttgggcaataggcaaaagtctatagcattttcatgaaaatatactaaaaatatttttatgatatataaaatgtactaattagctttaaacactaaaatcagatttcttcaaaatataaatttgttttgattctttatatttatatgtttttatttcatttcaataaacttccagaaatttgtcatttggaagtagatatgacacctctaagttattgtaccaacaaatcatagaatcctttaaataatggaaagagcttgtctagttccgacttaagctctttacatcagattggaagcattttaagtattctttttaatacttgagggggggggttcttattttctctatccatttacaaggttttgatttccaataatctaagccattctagtttctaaggattttggagagacgagattgtcttcacacaatctgagatgacaatctcatctcagatttttcacactgagttcctgtctttcagattcacagtaatcccaggaattctagactgtcctgtatttctggatctgcccaactctggccaatattgggaaaagttttcttgtccttggaatgaacttttggaacaagtccaaactccttctctgcctacccctccttcccactcaaaactgccactactaagagcaggactcccctcaaccccgggcatgagttgagggttgaggggttcccttaactggtggatgcttattcactgtttactggatgaatgaagtataaagtgtgggaagtcaacaacagaacagaacttattttcaagaagataaattagagaatgcaaaaaagctacagactaaggtagctaagttaaccgaactctctaacagtattgaaaatagcaattctttactcagaaaattctaaagggaatacttaatttgacagaactcctaataaagacattgtagccagatccagagccttccagcaagtgacactcagcaaacatttgggacagctgagagaattcaacaaagcccataccgttgtctcttgtataacatctcctagtacattcacctcagatcattgttagtcttacttagcagaaaatgtataaacacttaccaggtagtaaaatcaaatatcttggta

SEQ ID NO: 15677 - DNA, 601 bp, Homo sapiens
cacatgttcaaattttatcatgccagtaggagaaatctcagctccacaacccaagcaacatttgtatggatttaagagtattttaagaagacatactgcttgattttaatacattgatcaggccatccaggacaccacgattctcccaaagtaccttgaactcttagtgattgagactcaaaaaaacaaaaaagacttgagacaatgttttcttcaacatgctccaaatataagacatttgtttgctgtacagaaagtatcacaaatggaatatatcagtacctctcaagctagtgtttctagctaaataaatgggtgtatataattttatggtggaaaagaactgtactgtctgttatgatttccttcaatgtgcataatgataaaataaataattttaatattcttttgtttccatggttacctgacctaaattagataaattgtagggctttagctttcttatttttgtcaaaagttggtgttgacatacattccctctaatttgaactggtattgtttacgtttgatacaacattaaggaatttgatgattttcatttcatgaaaatgacattaaatgcaataattttacttatcat

SEQ ID NO: 15678 - DNA, 114 bp, Homo sapiens
atcctttggatactttcaaggacattcaaatgtgaaaatgaattttttacaactagaagtatttataataaaagaccaaacttatttttgtaaatgaacccatatgctttagct

SEQ ID NO: 15679 - DNA, 282 bp, Homo sapiens
agaaatgcacacgcaagggctgggcgcggtggctcacgcctgtaatcccagcactttgggaggccgaggcgggcggatcaagacgtcaggagattgagaccatcctggctaacactgtgaaaccctgcctctactaaaaatacaaaaaattagccagacgtggtggcaggcacctgtagtccctgctactcaggagtctgaggcaggagaatggcgtgaacccaggagacagagcttgcagtgagccgaaatcctgccactgcactccagcctgggtgacag

SEQ ID NO: 15680 - DNA, 4032 bp, Homo sapiens
ctcagtcacaccgtcagtttcccaaatttgacaggccaccttcaaacatgctgctatgcagtttctgcatcatagaaaataaggaaccaaaggaagaaattcatgtcatggtgcaatgcacattttatctatttatttagttccattcaccatgaaggaagaggcactgagatccatcaatcaattggattatatactgatcagtagctgtgttcaattgcaggaatgtgtatatagattattcctgagtggagccgaagtaacagctgtttgtaactatcggcaataccaaattcatctcccttccaataatgcatcttgagaacacataggtaaatttgaactcaggaaagtcttactagaaatcagtggaagggacaaatagtcacaaaattttaccaaaacattagaaacaaaaaataaggagagccaagtcaggaataaaagtgactctgtatgctaacgccacattagaacttggttctctcaccaagctgtaatgtgatttttttttctactctgaattggaaatatgtatgaatatacagagaagtgcttacaactaatttttatttacttgtcacattttggcaataaatccctcttatttctaaattctaacttgtttatttcaaaactttatataatcactgttcaaaaggaaatattttcacctaccagagtgcttaaacactggcaccagccaaagaatgtggttgtagagacccagaagtcttcaagaacagccgacaaaaacattcgagttgaccccaccaagttgttgccacagataatttagatatttacctgcaagaaggaataaagcagatgcaaccaattcattcagtccacgagcatgatgtgagcactgctttgtgctagacattgggcttagcattgaaactataaagaggaatcagacgcagcaagtgcttctgtgttctggtagcaactcaacactatctgtggagagtaaactgaagatgtgcaggccaacattctggaaatcctatgtcaatgggtttggtttggaacctggacttctgcatttttaaaagttacccagagatgcttctaaagatgagccatagtctagaagattgtcaaccacaggagttcattgagtgggacagctagacacatacattggcagctacaatagtatcatgaattgcaatgatgtagtggggtataaaaggaaagcgatggatattgccggatgggcatggccagtgatgtttcacgtcattgaggtgacagctctgctggactttgaattacatatggaggctctccaggaagacgaagaagagaaggacattctaggcaaaaagaagactaggcacaaggcacacttatgtttgtctgttagcttttagttgaaaaagcaaaatacatgatgcaaagaaacctctccacgctgtgatttttaaaactacatactttttgcaactttatggttatgagtattgtagagaacaggagataggtcttagatgatttttatgttgttgtcagactctagcaaggtactagaaacctagcaggcattaataattgttgaggcaatgactctgaggctatatctgggccttgtcattatttatcatttatatttgtatttttttctgaaatttgagggccaagaaaacattgactttgactgaggaggtcacatctgtgccatctctgcaaatcaatcagcaccactgaaataactacttagcattctgctgagctttccctgctcagtagagacaaatatactcatcccccacctcagtgagcttgtttaggcaaccaggattagagctgctcaggttcccaacgtctcctgccacatcgggttctcaaaatggaaagaatggtttatgccaaatcacttttcctgtctgaaggaccactgaatggttttgtttttccatattttgcataggacgccctaaagactaggtgacttggcaaacacacaagtgttagtataattctttgcttctgcttctttttgaaaatcatgtttagatttgattttaagtcagaaattcactgaatgtcaggtaatcattatggagggagatttgtgtgtcaaccaaagtaattgtcccatggccccagggtatttctgttgtttccctgaaattctgcttttttagtcagctagattgaaaactctgaacagtagatgtttatatggcaaaatgcaagacaatctacaagggagattttaaggattttgagatgaaaaaacagatgctactcaggggctttatgaaccatccatcaattctgaagttctgactctcccattaccctttccctggtgtggtcagaactccaggtcactggaagttagtggaatcatgtagttgaattctttacttcaagacattgtattctctccagctatcaaaacattaatgatcttttatgtcttttttttgttattgttatactttaagttctggggtacatgtgcggaacatgtaggtttgttacataggtatacatgtgccatggtggtttgctgcactcatcaacctgtcatctacattcttttatgtctgtctttcaaagcaacactctgttcttctgagtagtgaaatcaggtcaactttaccaccagcctccatttttaatatgcttcaccatcatccagcacctacttaagatttatctagggctctgtggtgatgttaggacccataaaagaaatttatgccttccatatgtttggttacagatgggaaatgggaatgttgaaggacatgaaagaaaggatgtttacacattaagcatcagttctgaagctagattgtctgagtttgaatcttagctcttccctttattagctctgtgacctcgagctagttacttaaatgctctgatcctctatttcctgatcagtgaaacctccctattcaaatgtgtgagagtttaataaattaggacacttaaaaatgttggagcagtgcatagcatgtagtgttcagtacatgttaaatgttgttttttattatgtacaaacatgagtgggcacagaattttaaatcatctcaacttttgagaaattttgagttatcaacaccgttcccacaagacagtggcaaaattattggtgagaattaaacagctgtttctcagaggaagcaatggaggcttgctgggataaaggcatttactgagaggctgttacctagtgagagtgatgaattaattaaaatagtcgaatccctttctgactgtctctgaaagcttccgcttttatctttgaagagcagaattgtcactccaaggacatttattaataaaaagaacaactgtccagtgcaatgaaggcaaagtcataggtctcccaagtcttaccccattcctgtgaaatatcaagttcttggcttttctctgtcatgtagcctcaactttctctgaccgggtgcatttctttctctggtttctaaattgccagtggcaaatttggatcacttacttaatatctgttaaattttgtgacccaacaaagtcttttagcactgtggtgtcaaaaagaaaaacacctcccaggcatatacattttatagattcctggagaatgttgctctccagctccatccccacccaatgaaatatgatccagagagtcttgcaaagagacaagcctcattttccacaattagctctaaagtgcctccaggaaatgattttctcagctcatctctctgtattccctgttttggatcacagggcaatctgtttaaatgactaattacagaaatcattaaaggcaccaagcaaatgtcatctctgaatacacacatcccaagctttacaaatcctgcctggcttgacagtgatgaggccacttaacagtccagcgcaggcggatgttaaaaaaaataaaaaggtgaccatctgcggtttagttttttaactttctgatttcacacttaacgtctgtcattctgttactgggcacctgtttaaattctattttaaaatgttaatgtgtgttgtttaaaataaaatcaagaaagagag

SEQ ID NO: 15681 - DNA, 282 bp, Homo sapiens
gctgatatttaaatttcctgctttacacatgttataccattgttttttccctcaagtattttttccctgtgaagaagattatttatctgcttttattttagtcactaaaactaaagtttttatttttacattgtgatttttacattaaaatattaactttttttaatgctattttatgaaagattattgtaataaactttgatggggtttgtattttggttaatcttcatgaattgaataattgtttttttaaagcaaaataaagttttttaaataaatgtt

SEQ ID NO: 15682 - DNA, 765 bp, Homo sapiens
cttccctcatcctacgtatttgctattttcctgtgaccgtcattacagttattgttatccatcctttttttcctgattgtactacatttgatctgagtcaacatagctagaaaatgctaaactgaggtatggagcctccatcatcatgctcttttgtgatgattttcatattttcacacatggtatattattgacccaataactcgccaggttacatgggtcttgagagagaattttaattactaattgtgcacgagatagttggttgtctatatgtcaaatgagttgttctcttggtatttgctctaccatctctccctagagcactctgtgtctatcccagtggataatttcccagtttactggtgatgattaggaaggttgttgatggttaggctaacctgccctggcccaaagccagacatgtacaagggctttctgtgagcaatgataagatctttgaatccaagatgcccagatcttttaccagtcacaccctatggccatggctatacttggaagttctccttgttggcacagacatagaaatgctttaaccccaaacctttatatgggggacttctagctttgtgtcttgtttcagaccatgtggaatgataaatactctttttgtgcttctgatctatcgatttcactaacatataccaagtaggtgctttgaacccctttctgtaggctcacaccttaatctcaggcccctatatagtcacactttgatttaagaaaaatggagctcttgaaatc

SEQ ID NO: 15683 - DNA, 2183 bp, Homo sapiens
cactccttagaaactggcagtcgtatgttagtttcacttgtctactttatatgtctgatcaatttggataccattttgtccagatgcaaaaacattccaaaagtaatgtgtttagtagagagagactctaagctcaagttctggtttatttcatggatggaatgttaattttattatgatattaaagaaatggccttttattttacatctctcccctttttccctttccccctttattttcctccttttctttctgaaagtttccttttatgtccataaaatacaaatatattgttcataaaaaattagtatcccttttgtttggttgctgagtcacctgaaccttaattttaattggtaattacagcccctaaaaaaaacacatttcaaataggcttcccactaaactctatattttagtgtaaaccaggaattggcacactttttttagaatgggccagatggtaaatatttatgcttcacggtccatacagtctctgtcacaactattcagttctgctagtatagcgtgaaagcagctatacacaatacagaaatgaatgagtgtggttatgttctaataaaacttatttataaaaacaaggggaggctgggtttagcctgtgggccatagtttgtcaaccactggtgtaaaaccttagttatatatgatctgcattttcttgaactgatcattgaaaacttataaacctaacagaaaagccacataatatttagtgtcattatgcaataatcacattgcctttgtgttaatagtcaaatacttacctttggagaatacttacctttggaggaatgtataaaatttctcaggcagagtcctggatataggaaaaagtaatttatgaagtaaacttcagttgcttaatcaaactaatgatagtctaacaactgagcaagatcctcatctgagagtgcttaaaatgggatccccagagaccattaaccaatactggaactggtatctagctactgatgtcttactttgagtttatttatgcttcagaatacagttgtttgccctgtgcatgaatatacccatatttgtgtgtggatatgtgaagcttttccaaatagagctctcagaagaattaagtttttacttctaattattttgcattactttgagttaaatttgaatagagtattaaatataaagttgtagattcttatgtgtttttgtattagcccagacatctgtaatgtttttgcactggtgacagacaaaatctgttttaaaatcatatccagcacaaaaactatttctggctgaatagcacagaaaagtattttaacctacctgtagagatcctcgtcatggaaaggtgccaaactgttttgaatggaaggacaagtaagagtgaggccacagttcccaccacacgagggcttttgtattgttctactttttcagccctttactttctggctgaagcatccccttggagtgccatgtataagttgggctattagagttcatggaacatagaacaaccatgaatgagtggcatgatccgtgcttaatgatcaagtgttacttatctaataatcctctagaaagaaccctgttagatcttggtttgtgataaaaatataaagacagaagacatgaggaaaaacaaaaggtttgaggaaatcaggcatatgactttatacttaacatcagatcttttctataatatcctactactttggttttcctagctccataccacacacctaaacctgtattatgaattacatattacaaagtcataaatgtgccatatggatatacagtacattctagttggaatcgtttactctgctagaatttaggtgtgagattttttgtttcccaggtatagcaggcttatgtttggtggcattaaattggtttctttaaaatgctttggtggcacttttgtaaacagattgcttctagattgttacaaaccaagcctaagacacatctgtgaatacttagatttgtagcttaatcacattctagacttgtgagttgaatgacaaagcagttgaacaaaaattatggcatttaagaatttaacatgtcttagctgtaaaaatgagaaagtgttggttggttttaaaatctggtaactccatgatgaaaagaaatttattttatacgtgttatgtctctaataaagtattcatttgat

SEQ ID NO: 15684 - DNA, 1223 bp, Homo sapiens
cctgtcactcaagaagcacacctacagagcacctgtagctgctgcgccacccaccatcaaaggaatataagaaaagtaatgaagaatcacgatttcatccttgaatcctatgtattttcctaatgtgatcatatgaggacctttatatctgtcttttatttaacaaaaaatgtaattaactgtaaacttggaatcaaggtaagctcaggatatggcttaggaatgacttactttcctgtggttttattacaaatgcaaatttctataaatttaagaaaacaagtatataatttactttgtagactgtttcacattgcactcatcatattttgttgtgcactagtgcaattccaagaaaatatcactgtaatgagtcagtgaagtctagaatcatacttaacatttcattgtacaagtattacaaccatatattgaggttcattgggaagattctctattggctccctttttgggtaaaccagctctgaacttccaagctccaaatccaaggaaacatgcagctcttcaacatgacatccagagatgactattacttttctgtttagttttacactaggaaacgtgttgtatctacagtaatgaaatgtttactaagtggactggtgtcataaactttctccatttaagacacattgactcctttccaatagaaagaaactaaacagaaaactcccaatacaaagatgactggtccctcatagccctcagacatttatatattggaagctgctgaggcccccaagttttttaattaagcagaaacagcatattagcagggattctctcatctaactgatgagtaaactgaggcccaaagcacttgcttacatcctctgatagctgtttcaaatgtgcattttgtggaattttgagaaaaatagagcaaaatcaacatgactggtggtgagagaccacacattttatgagagtttggaattattgtagacatgcccaaaacttatccttgggccataattatgaaaactcatgatcaagatatatgtgtatacatacatgtatctggtttgtcaggctacaaggtaggctgcaaaattaaatctagacattcttttaatgccaccacacgtgttccgcttctctcttttaaagtatttataaaaatataaattgtacattttgtaaaatattatgtttgatttctctacttgtcatatcactaaataaacacgattttattgctg

SEQ ID NO: 15685 - DNA, 813 bp, Homo sapiens
gctcctgggcctcccagccctccagtggcctgtgggtgagggaagccagaatgacacaaagcaatgcaaagacaagattgccatgcaaatggatggttttggacatacgagtcttctccgcacatacatgtctaaagttgagttttatacactgaatgtggaagaaccgggtatcatatcttttttaaaaaatgtcagtgtagaaaacatttgggaaaccattttcctacatgatagaactgccttactagatttctatttgtagctctcattcattgttttttatcttagtttgcagaaaggtgttgaaatgcttctctagcccaaacagcgacatgctaaagtccccttcttcagagtcaatagagtagttgttaaaggttttaaattgtactttctccaaaattagcatgcagctatttaatagggaatctagatttcaccaagattcaaatcaaagcaacatttaaaggaataagacctgttcactagcattttcaagggggttctaaagcattcaagtgcttaaaagccataaaaaatgacttcttaattcctgcctttagtgtcaacttttaagttaatacaggtttcaattgtggcattaggaaaaaaaaaaaccttgtgatgctatggttgggggtagttagggagagactacatgaaattgtgtgcccctattttctttctgatcctaaatcattttgttttataaatcagctatagcatctttctagaattaatcctgaatatgttgaatgttaaaatagagaagtttgtatatacacataattaaaaatcaacccttctggc

SEQ ID NO: 15686 - DNA, 796 bp, Homo sapiens
tagcctcaggagaaatttgaagaccaactgcaagaactcttaaggaatcttgtttgagaaaatgttgttatgtggtttgtatgctacttttggggggcagggctcatttcagcagcctaaatctcctccttggataatgttaatattattattattattaacaaaaaatatatatttttaaaaagttcccttaatctatgacatggtagcaatgatttccctttggtgtcttaatggcatgtcagataatttgtttttccagagaagagagctcaaagaggaattgggaaaaataaattgaactctggaatcttctctctcaagtcctaaaatgaacaaacagatatgattgtgtttgagggaaatatgtccctagcaggaaaagaattcaaagaggttcaaagaatatgtcacttactcctacttgctgtaggaataaccttgctgataagaaaaaaagggacaatattggagaaactacctcttgtttaattgatctgtccaactctgagatcacttggtaactggtttcatgtgtatccaaaaatcagcatttggatttaagctttctgaatttggtagtttaagaaacagatttagtttttcagtggttttaactcatgtgaaataatgattttccaccagctctgatgcaaagagatataattttaatgaacgatttatccagcagtgtgttccaggggttgcctctccttatctacggggattactttgtacatgcagataagttttcgcaaacctatttccattttcttttgtaagcaaataaaacttt

SEQ ID NO: 15687 - DNA, 299 bp, Homo sapiens
tacataatcattctctttaagacaattataaattggatggagctattattcactacttcttttcttagtttgaaaattataaacaaattttaagctttattcaaagaatagatgttatatttctaaagaatttcatgaatatatattctatatttgtatagtttgagggatgctatgttaatgtatttttaattagatacatattttgtaaagtgttactatattttaaagttatttttatatgttttaaaatgtttactcttatttaattattacaataaacagaatttttttttttt

SEQ ID NO: 15688 - DNA, 1274 bp, Homo sapiens
ggaagtctgttagaactgctgtgctgatcaacgggacgctccgtctttgaagaaagaagagatggtctctccccagccatgggccacccttgccagtgactccaagtggaactacttagctcgcgtgtgcctggagggtgcgggaagtccagcgactctcagacgcacctcccagaggaccggtgggaattgttcatagtgccaaagtcctactactgcgttttcaatgggtccttgtacatagtttgctcctctgccctagccctcacctcttgctatactggaaccgatttgtacaatgtgggaattttgttacctttttaatcaagggcaacttccttttccagcactaccattgtaaggtttttttcaggagggagggctaaccaccttgcttttctcttttctctttttcttttttttatttttgttttattaatttggggaaaggggtgttagcattagtgccatgatatctactggattttaagtagggagactttatttttaaaggtaggttgaaatttgggagatttctcggcaggaagggctgaaatccaggcccctgtctcaacttggagagaggtgacagacggcagatcttccaaatcaaattcctttccagttcttcccctggctgcctttttgggggtccctgccttagccccacacaaggctttctgaactgccaagaggggatctggcttctcaactgctcggcctcttgggccaggctgtgcccagccagccctgggagaactgggtagcaggtggctgacttctttaagcacctttctaaataccagcagaagaggctcccgcctctgttagcatgatcagtactattgtgacattaaaacaacaacaataagatcttcctatctggagggtacagaggtgaatggctttggttttcatttctcttcttcactgccttttctcggtgtggtatttgacaagattttagctcaaagcctcaccatgaattgattttttttgtttgtgtgtgtgtttgttttgggacaattttagatacctgagtgcactttttcagttagtcctaacttttaaaagaaggaaaaccaagagacatatctggtgtacgtgttgcagtatgaactctggttgcaatccctccccgtcccacactgccccccatttgagtacaccgcacaagtcaaacgctaggaagtttgaataaaaccaatttttctaacttgttgctcatttgttgtaactcaataaagcaaagactaaacatttttataaccttt

SEQ ID NO: 15689 - DNA, 211 bp, Homo sapiens
aatgcatgtcaccttgagacggtcgagagagagacctattttgcaatcagtgacattgatttttagattatttatttaaaattcctataaagatcagccctttgtacagaaaaatgtgtctataaaaattatgtgttatttaattctgatactttttggcttgtaaatggcttcttgaactttttacaataaaaatgttttagaaactgtt

SEQ ID NO: 15690 - DNA, 1277 bp, Homo sapiens
aggtcccatcccctgctgccctccgcaggcccagggctgggcactccctgagacccaaagacccacctcaacgacgagtggcgttgagccacttccctttgaaaagacactcaaaatcactgccatggttcaatgttcccaggccccaggccatccacttgccggcccccaccagttcttgggttccccgctctagtttgacctgtgcagcacattccagaaggttccagggaggttgtggggcagctagaggacaaaatcatgaaaacagagtccctgtcttccagagatcatccggggctttaatattaatggcccccaaaactccgtaagaagcaggaaatgcagcccaagttttacaaatgggtaaacagaggcactgagagatagatggtagtttggtacttctggttcccagtgcccaggaatggtccactcccaagaaattcaggaaagaaagactgaggagaaggtgtgggaacattctggatgtttcgggagagttggggaaactcctcctcttaggaaaggctaatactagggtatccttgggcccaatgaattaggggtgaggccccagaacccgttatctatgagttgtatgggggagccatctgaagctgtagccaccagggatgcagctagctgaggagtttggggtgttgggttggacaaggcaggttagtagactcagattcttgcttcaaagagccttgggctggcctggaggtccctggagtctagactggacctaggagcttgagttgtcaggggccaggactggccccactgcagtgcccaggccagtcttgagcagcagggagggctcagctgtccccagatccaggtgcctctgaccagcctggtcacctcctgaggaataaatgctgaacctcacaagccccatcattcatttcttctcaattcacagtgcccctctttgtttctggggtggaactaggtcctgagggcacagcctagctgagtgcaaagaaatataggatgcttagaaagcatacaggaggggccaggcgtggtggctcatgcctgtaatcccagaactttgggatgccaaggtggttggattacctgagatcaggtggattacctggtctcgagaccagcctgaccaatatggtgaaaccccgtctctactaaaaatacaaaaattaggctgagacaggagaattgcttgaacccaggaagcagaggttgcaatgagctgagattgcatcactgcactccagcatgggcaacaaagcaagactccgtcacag

SEQ ID NO: 15691 - DNA, 581 bp, Homo sapiens
acccagccctgaccttgttgtttcacagctgacggctgagatgaggttagaatgactgggcccggctgaacattccaaattggatttcaccatctgctgagaaagtttaaggaaggcaaagcttgccaggtcacagaagctcccaagcccagctttccaaaggcctcagcctgtgcctgtgtcgagctcagtcctgggagataggggagaacctgcaggcaggaacaagcccccctactcctgaccaccctccatcagcagtctcccctccgtggtcgtctttgttgacaaaggtgcagtttctcctctcctgggcacctgtaacatgtgatgcgctgcctgctgggaggttaggtcggggctgccccggcgagtggagcatgagcagaaccgccgagggtcacttctgggcagaagctttgagagcctgggtccaggttgccacatagaagcagctctccagttgaaaccctcctctgccagcctggggtcctaagcgatgagcagaatcccccactcccaccccaccaacccacaatggatatgtagtgagcaagaaataaacctttgttgtttaagcc

SEQ ID NO: 15692 - DNA, 605 bp, Homo sapiens
acttggtctcaagatgtggaactgtggagaaattctaggacatgaacaagctatcctttcatcgaggacagcaaacattatggtacagttggcttggaattatgtctttctcttttaatttgattgagtggaaatctgagtgaatacaaatataaatgaacaacataaaaacttttgttttgacatgtcaaattgaaacttgataaagtgcgtacttgctaagatattcctgtggctcatgcgttacaacacgaggacttaagccagtaatcgtttttgttcagatagaggtgtggaggtagagccagcccctcatgtctgttttggatgttttgtgtctctccagctacattgtaagttccttgagggcagggccatggcccattgctctgtgaatctcaaatgcccataaaaggtgcccataaaatgttttcttgaacatttgaatgtgctgttgtctggaaaggggtaatattgtgagctgaatcagcaataagtattagtctttttggactatggtattgttaaaaagactgcagccctctcagacttgagcgttaattggcttatttatttatggctttaaataaaatcgatttaacgtt

SEQ ID NO: 15693 - DNA, 2744 bp, Homo sapiens
tttggttacaccatttgttgctcacactttctgccttttttctttcttaacgttagctttatagtgtcagccactaaaaagcatcctgctgctgcagtgcaattcttgcttaactaatattaaaagttggggaacatattcatgttttctgaagttttgctcattattgcacatcttattgcgacaaagtgctttttagcagccagcactgtattttttaccttgagacaatctgcatttcttttataaaactaagtatatactttataggctttatgatgactgttatgtttataagcagtcactatgaaaattgcaatggtaattttatatgttagtttatcaaacataaatcttgtttaattttatattttgttacctatactttgggggatcaagggaagagatggaactcttcctctgaaaaggcttcttggtacttaaagtagtaaaactataaaacaataaacatccagtattgagagatgatatgatagggcattatgaattcctatgggtgtctgtaaattatgtatgtcagttggacattgtagaaggtatgtaaatcagcatagttgtgtataacttaaccttgatttataaggtcttaagattatgactattcattgacatctcatgagaagctttagaagactttctatttttaaacaccatttatatgtggacttctgttgtcactgactttgggctttatattttcatagagtctttatggaaaaaatagaatttattttccactcttgtagctatagctgctgcacactttcaccctgatttatttttttgtttcttagctttgatgttttcaaaccaaggattgtgattttaggttagaattacatattagaagcattaagactatgtctttggatcagaatgctttagtgataaacctactttgaagacatactcttaagcaatctggatcttaaatttatgtgaatacttttttagaaaatgataaagaaaaatggaattacttcaaagtgtttcttgagtcattgattcttttagcatctcaaatgttaattagaataattggaatcactttttagacttttcaagttaccttccttgggaagtttgtgcagtgttatagtttagtttagctcctcttacagggtaatggtttgctagtttaaaactgtaaccaaacgaactggtcagacaacatatatctaaaacacttaaaatgttaggaagtttgggaatgttataacctaaacgtttttgctggtaactttttgttatttatagatatttgtgtatttaacatacatacttcaggaaatatatgcctttcctaaaacttaaccatgcattcaataccatggcctatctatagaattgaatattttggaccatgttatctgtggcacagtcagtgctgtgtttgaggtaaatgcagtaacggttagttttctactttgtcttatagaaggtagaaaccatgtgtatgttatgtttgtctataaaagaaaaaatactaatattaaataatttcttacgactctgagtcactcacttatttttccaataattgatattgtacattcctagtgccattaggtatgtatgtatgtaacttttacagtttttcagctgaaagttgtaagtattttttttttttgatcggggctctttaatctcattttaatttcctttgtttgaactgtagttattttatttattcctatattaaccatctaaaccaactgtaatgacatgtacactaatacagaattgaacatttgtagttgttggcagtgaacccagttgttggtgaatttaaagcttaaaatatgggaatgatttgctgctatatttcctttgagagagaaaggaggaagaaatagaacctaatagtgatcatgaattttagggaaagtaccgaagaaccatggggtcccctctggtttcttgtgttgaatgaggcaagggtaatcatctgattccgagctgaagacctctggtcctcttaaggagggagagtgcatttttagagcttttagcaaaatgtgaaaagctgatgtttgcgccttgctttgtgaatttggctttgttttacttatacattaactcatgtaatctcttaaatcttacaagcattgatccatttcaacaaaaaggtaaatttaaaatgcagactttgttatttgccaaagaagattcatgaaaaatttacgtccaattattttgcaaatagttaatttcatttggctttttaccatgttccttcctttctttttcccgcttccttaatgtaatttaaaccctggcaaacattctttagaaaccaagaggaaagaaagaacaaatatcaaaaaagacatagaatttaatattgatacaatttcacctctaaaatggatttgaagaaatgcaactttatatcaaaaaatgtcatctgatttcctttgtttcttttttaaattatgtaatcagatgattttatgtttttttttcaggggagcggaatattggtttcttttacttgttgttttcagttttctctgccattcatgtttcttttttgtgttcagtgtttcaaatacaatttgtatttaaggattttaaaataccaaactgtaactgagtacagtggatcgttttctgttaggatgttaatattatacaatgaaatctataaagtgttgtcaatttgattattgacacatataacatgtttacaaataaactgtggtattgatcaagttactatg

SEQ ID NO: 15694 - DNA, 580 bp, Homo sapiens
aggaggtagatcctgggacacatgggatccacgtgcgagtggcccttaaatgtatcagttcagtccaggttgtcatcccttttgtcccctggtgatcagtttttttcatattttatagccctgaaagcaggctctagatcaattcaaattatttcatttgtctttcattgataacagaaaatgaaatacctgtttgggagaagcagcatggcccattgaaatgaggctcatctgtgcaattatgaattccaaattctgacctcagttctggaattgaagtttcagtatgttttggcctcgggtttcgttatttgcaaaatgagagtttctttgaactgtctcacgtgactattaagcaactatacacaggacatcggttattttagagtgaaagacacagtgctttttccaaattgctctggctaccatatagaaaattgactgaaggagggccaagatggaaacagagagaccagtgaggaggcttctgtggttgtccaggtctgaggtgatggtaacttggactcggatggtggtaatgggaggtagattgatatgataaataaaattgacagaccaa

SEQ ID NO: 15695 - DNA, 973 bp, Homo sapiens
tgaaaatagcatttattaatgattgaggtatttgtttaaaattcagttcatccaaaatggagtaatatccttcaccttcagtgtgtaaccaagcacaaaaacagtatcaatgttgaatctgtgaatggttttccgtttactgtgatgtgctactgtaaatatacctctttaattacttctggtctctttggtgacctgtttaaatttgtgtacattattgtacatagaataaaatgttttcacatttttatgacaaaatttgaacaaatagctttttaatagatgtaatgatcatatggtgcgtcacctgtgccaaatattcttcaatgaaattatataatgtaactttggacctcagtttttctttagaaatgggtgggagaatgaaaatgcaaatcaggaaaccacattaaagtcaaggaaataaaataatttgaccagaggataaaggacatgagagagtattttaaaactaaagaaaaaattagctgccagaagcaactgaggaccttttttgaaacttgagtagcagtgtaattgagctgagtttgaaagtcctgattcagagagagactgagggttgacaaataaactgtatcaactaaactttgatataaaccagaatgtgctaaatgttttttatgtaaaattgtatatttgttagccattctgtgtctgcagtattgtcataaaattgtcctttcattcttttgaagatattacaaaacaaaaatagttttttttaaattgttttaaactaagatactcaatgatataaaaacatcctgatctgattttacgagaaaaagaaggggaatggtggggaatggtgtgtaccgatatatagtatttctttagacaacttgcagataatttctttattgaaactatcaggaagttttactatgaaattttacatacatgatggaaagtggaagacatataccaattatattccaggaaaaaatacttt

SEQ ID NO: 15696 - DNA, 94 bp, Homo sapiens
aaagagagagacctcatctttcatgcttgcaagtgaaatatgttacagaacatgcacttgccctaataaaaaatcagtgaaatggtctctggta

SEQ ID NO: 15697 - DNA, 1528 bp, Homo sapiens
gtcccaaagcctggttggtgatggttttttcttccttgttggaccatgacaatttaggtattctgtgattgttgtgctataaagtttctttgatgtgtttgtcaaaacatttggaaaaagtcaacctcccagtttaaaggatgggaagaccccaatcaccaggttattggatctgtccagtgagagattcatccaccaaggatgaagaaaggaggacttttaaaaatttaaggtaagatagtaatagcttcaaaagaacacatacagagtaatcctgagagtaagcaaaggaaccatgagaaccgaagctagaattgctattgaattactttattttctcttcccttattgggtagagatacatcattactggcctcaggggtttacccaaagaaagggtatttttgagcaaataatgtgatttcctggctattttgttgggggcttaagatttttttttttcaaatgcatttttagtcactaaaaattaactgtcgtaccatctagaactatactgtccagtaccatagcctctagccgtatgtagctatttgtattaagattaattgaaattttaaatccagttcctcagtcacactagccactttctaagtgctcagtagctctgtgtgaccagcggctactgtattggatattatagaaggttctttcattcaagatcatcattcttgacagacccataaatatttcctataaagactgtagaagtgtgttctggagggtttgctctccaaaaagaattgtaatatagagtagaattgggatagagtattgaagacactgggtttagacattggatattttaatgattgtgtgttctaattcatgtgctgccaactgagttatctagtgatatgacctcactgtcttgaccaaagccagaatagaaggcaggattcctgaattctatcttaaaatttgcaatgaagagccttttccctaaattatcccattatgtaattcttggtcagctcaagaactgggttctttttctaataattaactcactaaatctgagccagtgtccaaggacagtttgtcattaaggagtactgagacttcttagctttggtactgacagttttcttttgcctcttgacataattggtatatggatctgataactgaggtcccatcttccctactcattcctatgggaatgatgctttggaaattattagatatatcctattcccttcctcccatttttttcctgctagtgcaaaaggtagatgagtaggaagattaggactcctgagttgcccatgatttcatctaatttttggattcagaatgtattttatgaataatatgcagagatgcatattaggaatgtgaagccagaatgggtcagttgtagctgctgcaaagttctgtagctgatggtcatttaattgcatgggggttattttatctttcatgattgtggtgcacctgatgctggcggggtatttgtgtgtttttgtattgttatttgattacaaaaataaagcaaaaactaacaaat

SEQ ID NO: 15698 - DNA, 336 bp, Homo sapiens
gcttaaaggggaaccatttgtgaatgaatatttggaacttaccaagtcctaagagacttttggaagaggatatatatagcatagtaccataccacttataaagtggaaactcttggaccaagatttggattaatttgtttttgaagttttttgtatataaatatgtaaatacatgctttaatttgcaatttaaaatgaaggggttaaataagttagacatttaaaagaaatgattgttaccataaattagtgctaatgctgaggagaactacagtttttcttttgaatttagtatttgagatgagttgttgggacatgcaaataaaatgaagaatg

SEQ ID NO: 15699 - DNA, 234 bp, Homo sapiens
gaaaagccacctgcctgcagggacaccagcagcctacctcctaccccagctgtctgttgagagcagtgctgaccccagcagttagggactggctgcatagcatacttgttgggggtaaaacttgttgcttttatgtgtgcttgaaaacatttttcaaagttacacaacagaaatgcaatcatattgtttatttttaagtgttctataatgttaaataaaactttgatcatctgc

SEQ ID NO: 15700 - DNA, 1929 bp, Homo sapiens
tccccaaaacctcagaaacctcataattcttaacacctggcatttccatttctaaagatggacaggccctttggcgtggtaccaaccagataatgactgcatcaggatgaaagctgctgaactcggcatggcgcctcctcttctctgttgggatgagtgactttattgatttgagcagcatatgctgtgattggctgccctgcaaatttgtttcccttaaggaaccctcaccaactatctctgctggatttgggagttccgcatcttttgtggagggcagagtatggacatcttacacccggtggtcaagtgtgtaataaacttgagcattcgaatgggagaaaaagcaaatcgcacaatgacatattttgagtaataaccgtatttttcacagggtgacaaattgggccaataaatctgccatctttgaactcatctttggtggctagactgctacggcagcttctctgatgggaaagttccttttttggcttaacactcaccctttcttcacactcacatttaccaatgactctgctccgtttttggagcagactgttttaagttgctcaggagcctgatggaaccatgaaccgagactcttctctgtttcctgccaagacctcatctgcactaatgccttctccctgaccttgacacttccccctttagctataaaagcacttaccagccgaacgtggaacagtatcacaaaagattccatctcccaacgatttcagaactctgagctcagagagactccagattttaaaaaataatttgagtgcttggaaactattagctttttaagttccttccaaatatgttagtacctaccctttactttttccccaagaccatctcagggtggagcattctgtctaagagaagaaagataaggaggctcccacccacctctcccaagagcagacattaaacatctttgtgctttgaagagagtgaattttggatagtcttgtgattctcagactaacttccagaattatactttaacccctcccagatatggtccgcctttggcattgtgtgtacatctgcagttttgcatggtgggttgttaatatttcaaatgtgtggtttatgaatacgtctgtataatcggcttctggagtgaaacagcaaaccccaaatcttcaaagttggaaggaactttaaaaatcatccggtccaatctctttcctctttctgccacctcccaaggcagaaatcccctcttcagcttcttttgtaggtgggaatccagcctctgttagatatgtccagagatggaaactcactcccctacaaaagatggagcttaatggagaaattgcaactttcattaaaaaacaaattcagatgaaatatcagtaactgtcttggacagtgctgaaatcaggtggttaaacgggtaaacaaaatatactgtattttgagaaatggcacaaaaacaggcagtcatctttaagggctatgcctaggcaaactactaacatgcattgtgagaatgccgtgtatacctcacgtactgtgtactttgtacatatattttaccttttatacctatgttcgattttgttttgttttgttttgttctggctttgaggcttgttttgttgtctgtgtctgtctgaataacctgcgtgtctaaaaccacgtgaaatgtgaatgattattggcaatattaccttgacagaatcatgggactttgagaagagggaggacagaggcctctgtcgcactaacgctctcgtggttgctcgactgttgtatctgtgatacattatccgactaaggactctgggctggcagggccttctgccgggaaagctagaaacactaggttcttcctgtacatacgtgtatatatgtgaacagtgagatggccgtttctgacttgtagagaaattttaataaacctggtttcgt

SEQ ID NO: 15701 - DNA, 467 bp, Homo sapiens
ggaaaagtaaggaaaacgattccttctaacagaaatgtcctgagcaatcacctatgaacttgtttcaaatgcatgatcaaatgcaacctcacaaccttggctgagtcttgagactgaaagatttagccataatgtaaactgcctcaaattggactttgggcataaaagaacttttttatgcttaccatcttttttttttctttaacagatttgtatttaagaattgtttttaaaaaattttaagatttacacaatgtttctctgtaaatattgccattaaatgtaaataactttaataaaacgtttatagcagttacacagaatttcaatcctagtatatagtacctagtattataggtactataaaccctaattttttttatttaagtacattttgctttttaaagttgatttttttctattgtttttagaaaaaataaaataactggcaaatatatcattgagcc

SEQ ID NO: 15702 - DNA, 2629 bp, Homo sapiens
tcggcgcatgaagacctcaggatatgatttgtaaagcctaaaaattaaggccaagctgagctttcagggtttacttaatgtgtattaacatacttcttgaaaataatgatggaacatatctttaaccaaatgtttggcataccatattagaagttttggagctatatataatttcgagtactttcaaagatagatttatgccatgttaatttgctttgaggttcctgttgcctttttaagttgaacatgttttggtttcactttattccactgttaagtagtatgttttaaacttttcacaaatgtaatgttttttaaaaagtaagccttcagaggattgaaactgtataaattgtttatctcttaaacatctacacagccgcttagatgtagaatttttgttgttgttttctgcaaaggcagatacatttaaatatattcctagtcctgggactgcaaaactgttcggtggctttttgtccccatgctttagataagctgggataggcaccttgctattcagttactataataatatgtgataggcattcctcatcttcttcacaataataggacatctgttgaatagcattcctcgaatataaccctaaaaacgccatactttaaattgtctggttcttgtaatattgtgtttcctgccaagagtttgaccattctgcttgagaagtgtagagcttactcttggagtaccaaactgtgcaatatttttacatcataagatgtattagtttacaggctgtgctttgaaattatagtagtattttgctgtggctccattaattaaatgagatatatatttagtgcagaaaaaagacatttaaaacagctattagttcacctgtgaagagtctgtacattttgatttctattaagagcacatttatttacatttgtatattattttaaatcctcatagtcaaaaaattctccagatggacttttaatttgtaagatttgaactgtgacttgtatacatctgtttagaatcaattatatttgaaaagctgcctgtgttttaacagtcaagtgtgctaaagtttgtcaatttaagctgcttttgatttcagctaccaagatcacaggtgcactctacacataacactgacagacccataacattacatacatcttagtgaattctatcacatggtaaaatgaacagctttctttgtaactcataaaattctcttaggacatttttataaagtcacctgtttatagttctatcttttcagattccatttctttttacataaaacagcatacatatcaaaaactgtagcctagaatacagtttaatttttggcttttgtttttgtttaaaaaattgcagtgaagaatgggatgtttgtgtttatggctatttgggcacctttagtagaaacagacaaaagtaaggaaacgataataggacaagcatacttgaaaatttctgaatacttaaacaaaagcgcaacatcttgaaaaccagtctagtcattgaaacctatgaaatgacactgaaagatcctgggctgcttcttaaataagtagatcagcaagacttgtttcagagtgacagtggagtcgttaccgctggaggactaaagggccctgtggcagctgtcactggaactttgcctcttgatcaggaaaaatgcttcaccagtccgtaaagccaagttgtatttttttaattgcccttttttccttctgtatttttaaagaaggatgttaatttttgactatatattttaaaaaaatctaagcagggggacatgcaaaaacaatcatcatccacttggatgtcattttatagattaacactgtgtgcttttgtatggaaaaaatatatataatttaatagtataaaaaataaaatatatattcatttgcacttacgtgaaacacaaactttgctctacaaaatttcgtgtttcttagtgattttaaaatgcatgtattgcatgtaaaggaaaaccattacaattaatgtttatcacacctttatcttggtctttgttgatttgggttttgttggggtttttgttactgtttttaaattacagtaggcttctatatatcctggatttctgaactggtcttgttgacaaggattcccaagaaatggatcttttcactggctgactctcccatatctgcaagagattctgcaggaactgggtgtgcacacggtgttgtagccagttcaggtactgaatatttaggatttggtgaagttcactgtattgctatatttttgtagataaataaaactcaataaattgttaatcattctctttttgctgtatagaattgcttatatcactctttctttcatgacattggttaacatttaaatgttcctcctgtacttgtgttgtctgtgaccgcttatagagttttattgttattggtgtttacctgaatacctatgcgtacacacacacatatttccttaatacttctgaactcattatcttttagaataataatactactacactttaccagcaattaacttctccctacccaaaatgtttttcttcctgtctgaaaatggaactaatttgtcttattcgtgcttatatctgtattaaatgcaataaagttagtttttgaaatgtaa

SEQ ID NO: 15703 - DNA, 2882 bp, Homo sapiens
caacagtgaacacttaatgaaagaatgtggctttcttcagtcaaagcatttttattatccacgtgatggctaagtggataatttaaaagcttagtaatgtctggtcattcactgatttgtgatgtcaataggatggcaccttggaaagaaaaatgaagaacaactttatcaaggaagctagtatttaaaaacaaattcatgagcaagctgcaaatgagaatgtgttatatgccaaggaacaatgaagtagaatataatgtatactaagggatttcaagttctcagaatttttgagtagttgcttacgtgaagctcaagatacctgtagaaagaaatatggtatatttgtatagtttttaatagaaagatctatgtttataaaccagcacttggccaaaaacaaaattgtaaaggaaatttaaattctggagaattctacagggttgctctaagaactgtcttctcagcagttgatccagctgtacggaaatttagggtatttaaacttttaaaggatcatgagctgtttcttgggcgatgaatgttctcaatcagaaaactgacagtagaaatctcacttctggggaaaacagttgtggaattcttacttcattatgaatgtatttaaaaaacaaacaccaaataattggaatatattgcaggcattaagctcattaaaaacaaactggcttgcagaagggtccgatgtgccaagtgatcatgattctgctggaaagaggattttaaatattgtgggagttctcccaccctaagtcttacataatgccaccagtccatccaaaacctatatatcacctatactatatatatcatatatatagttgaatggcagtattcaggctcaacgtacagtttgatcctgagtatgcttggtgtttgccttcagaaaaaaaaaaatacattgtaaataacctcagctgggatgaggagtgacagaatatcaaaataatttgtggctgtggatttttttaactgctagtagtggaatactggaaaagcttcatttctgaagatgaattttatttttaaaaaatacatgcacactcaaaacttttagctttgatcacaagtggacaaatttctgaaaccaaaggcaactaagttgctgtgttagctcttgctggattttgagcctaggtcctactgtctgccagtactcatgtgagttgtatgtgcccccagtgctacatacgcaggtatgcgtaagtgtgtatgcttgttttaaacaaacactcaacgtacatatgtacataatctacacatatttatatcacatatctagttttattactatagactatacgaattggtggttaacatgaaatgttaccttttaacagactgtttttaaaaattaaaaatgtatgtataggttttgaaatttttttaaaaggggagaaagactgttaagaggaggctatttgatgacataacacttgaatattttatgcctcattctgtttatcagttctcgcaatctgtataaatgcattttagaactgatagacagtaaacttgaatttatctttgataagaatacatgccactgtacattcagatattatttaaatttgcaaacacattgttctatatgtaagggtactgtatgtaaaactctgtattaaaactattccacatatcctaaaatttcagcttgcctttttgcggccttatattttgatgtaaagattaaaagaatgtgcaaaacagtcagaaatttttattgccttttgagattctccaacttgacaaatgtgccaaagatcaacagacagaaaatatcatcctgtgtatttacttgtcatactttaactttgtgaaagatcttactgataaatgaaaagctttagcagaggtggtattgtggggtaattgcttaaatttacatatcaaagtaaaaaagtagtgcctgtattccatgtgtggagtaaatttgctaatgtctatattttatgattgatactattatttttcctttgcattttaaaatagtggctctaatattttccctgtcatggctacattctagacattgaatttatatcttctttttttcagatacggagcaaatagcatccttaacctatgaataatggtgttgcctagattcttgtcacacacacagaagaccctttgtacctagtaacattcatcctcttgattcctggtgaacacggttaaattcatgcacatttgttcttgtagtttctaaaaattagatcaatttatttgttagccagcaaattgaaaattccattattagattaatgaaatttttgctctgcttatatgtatacgaactggaaatctgaatttttaaatttagatctttaaatcaaattatttttatgcatattttcatttaatatagagtataccaatcgattgaagcctttcacaagtagtgcgctgagcttttcttattgaagagagtgaattagtttctgagaagtcagtctattgtgaaaagtttcagatgagattattttcttttagtctttttaaatatcactatatgtatttaaatagaagcaataaactagagagagtgtttcttgaaaagacaatgttttatttgccaccaggcagaacagaatgagcattggtagagaaggctccctcttggtatgttactgataaacttgtacttcctcatacttgtttgtggttctactgacttatttccaaacttaagagtaatgtacttcgaaaacaacttggttattctttaaatttcaggtaaaaccccttttcctaacactcatcttatttccactgtcttatttcctctcagatgttcatatttcacatgttcaaaatgaagcgtactatttcccctccaataaacgaagtctcctgcc

SEQ ID NO: 15704 - DNA, 2058 bp, Homo sapiens
aatggtagcatttgatttttttcaaggttcccactggaatgatcacggagctctagtatctacgtaattgaaattccccttttgatcagatatgggaataggaagctaattaattgatgatatatttttaactctgccttctccaaggtatacagataactacagacttcattagtgtttgatttcatagactggcattaaagcctttgtctccaaaatttgaaggcctggagacaggcatcccagggtataagcttccagctggatcacctttaactagcttacaaaaagacccttacacaaatactttccatttgtgagttaaaacagggttttttgacatcgaataaagcttcttttgtaagaagtttcttttatattgtaacaattggtgttgttagactgactatgtgttttatgaattgatcaatgagccatacatttttgctaggatgtatattttaataactacaaaaaaagagagtttaaaaaactattaagggtctgtctttaaaccacctaatagaggaatttaaaagtgaaggttgcagttgctagattttgccttggctaccttcagattcccacaatacttgtacataatgaactgtgcatgcttttacattctctaagggcttaacttcttaggcactgtaagactataagaacgcagtaatagccataactggatttccttggttctcctgttttaaaatctgagccttaatgtagttttaatatatcctttttgtattacttttctttattagtagcctaataaagaagactttgagtatcttttgctctcctctagatgcgttttaaaaactattccaaatttaattgatattgtattgagtttttcagggttattttaggcctgatttgataacaatgcgttgttttggtgcctccattaatgttgtattaaatcaatgggtcttttaaattgattaatatgtcattgaatcataccttctgattttctgtgatcatccaacggttaagtctttgccgttattgtcaatatatcaaccaaattttaaataactttttttactgtgtattactatattcaacgtcccagatataacaatattttgtattttcaccactgtttatggtattctcagaatgcgataaatcagggacttgggtaataaaatgtttctggaaaattcattacaatgtcaatctttgattatgcacaatcctgctgaggtgaatgtgattgtgaaaagtacttattaaatgtggaagttagtgtagagggcagtacccgtcttagagagaagtacagaaaaccacgttttgaaattgaatttaaaaaagaaaggaaaattgtgtaactcggctgtttctattttcataattaaaaacttttgagagtccttgccagttttgtaacaaagagaccaacaatcattaatgaaaaccttgtaaattattttagattttcaggaacaccatgccattccctcattttctacttgtcattcaggttgatttcaatgtgaaaatgttttgtgaacaaacacttatttttatcctatgtgttagcctcgcttcatagttaaaaagccgagttataaagctcttaattacatctcaattggtatcagcaatagacctaaaggagaggtattgattgttactaacctctgtttcctaatgagttaaagtaatgtcactcatgacatagattgataacaggcctgtagtcaaaacttactgtgctaatggacttatttatattttttaaaaattcaaactgtggtcttgaaccccaattctcagcttattaattatagattatttaattgtattagggatatgtcatgttatatttacttttggataaaacttgcattagatgcataataactcagtaagttttaaaaacaatgttaatttttccttgtttagaagttaagcaccttatcaagatattaagttttaaaatcttgttttataactttgtaacttgagagtaatggatgctgtagtgatgtctttcacatatgtgaagatgaacaataaaattgtttatttacaagt

SEQ ID NO: 15705 - DNA, 217 bp, Homo sapiens
catgaacagtttaattgaacccatccactctgggcaggtgactggaatagctgattaaaacataaatgctgcttttaggttaaccacaaaggaacaactcaggatcagtcgtgattgctaaagtattcacttttatcttttaggtaagagaaaagaaaaagataaggaaagaagagagaagagagacaaagatcactacagaccaaaacagaagaag

SEQ ID NO: 15706 - DNA, 103 bp, Homo sapiens
ccagcccttgagctccccaaaaacctcacccgaggctgcccactatggtcatctttttctctaaaatagccacttaccttcaataaagtatctacatgcggtg

SEQ ID NO: 15707 - DNA, 1616 bp, Homo sapiens
gcaggcacaaatcttgggtcttggggactaacccaatgcctgtgaagcagtcagcccttatggccaataacttttcaccaatgagccttagttaccctgatctggacccttggcctccatttctgtctctaaccattcaaatgacgcctgatggtgctgctcaggcccatgctatgagttttctccttgatatcattcagcatctactctaaagaaaaatgcctgtctctagctgttctggactacacccaagcctgatccagcctttccaagtcactagaagtcctgctggatcttgcctaaatcccaagaaatggaatcaggtagacttttaatatcactaatttcttctttagatgccaaaccacaagactctttgggtccattcagatgaatagatggaatttggaacaatagaataatctattatttggagcctgccaagaggtactgtaatgggtaattctgacgtcagcgcaccaaaactatcctgattccaaatatgtatgcacctcaaggtcatcaaacatttgccaagtgagttgaatagttgcttaattttgatttttaatggaaagttgtatccattaacctgggcattgttgaggttaagtttctcttcacccctacactgtgaagggtacagattaggtttgtcccagtcagaaataaaatttgataaacattcctgttgatgggaaaagcccccagttaatactccagagacagggaaaggtcagcccgtttcagaaggaccaattgactctcacactgaatcagctgctgactggcagggctttgggcagttggccaggctcttccttgaatcttctcccttgtcctgcttggggttcataggaattggtaaggcctctggactggcctgtctggcccctgagagtggtgccctggaacactcctctactcttacagagccttgagagacccagctgcagaccatgccagacccactgaaatgaccaagacaggttcaggtaggggtgtgggtcaaaccaagaagtgggtgcccttggtagcagcctggggtgacctctagagctggaggctgtgggactccaggggcccccgtgttcaggacacatctattgcagagactcatttcacagcctttcgttctgctgaccaaatggccagttttctggtaggaagatggaggtttaccggttgtttagaaacagaaatagacttaataaaggtttaaagctgaagaggttgaagctaaaaggaaaaggttgttgttaatgaatatcaggctattatttattgtattaggaaaatataatatttactgttagaattcttttatttagggccttttctgtgccagacattgctctcagtgctttgcatgtattagctcactgaatcttcacgacaatgttgagaagttcccattattatttctgttcttacaaatgtgaaacggaagctcatagaggtgagaaaactcaaccagagtcacccagttggtgactgggaaagttaggattcagatcgaaattggactgtctttataacccatattttccccctgtttttagagcttccaaatgtgtcagaataggaaaacattgcaataaatggcttgatttttt

SEQ ID NO: 15708 - DNA, 519 bp, Homo sapiens
ttgtactgtctgatgttgtgaaatagccaatctccaccagtcctgtatactgttcaaagtaatttttttctatgaacaatccctttttaaataaatcagaatgcttaaaatctgaatggatggaacttaaaactactttgttgaaacatcaacctgggcagaaaaaaaaaaaaaaagacatgtaaaattttgttatttccagtctgtatatgaaaaaataggtcatcaaaaggaaaaaaaataactttgattaactagtgttaaacaaaaaataggtttactaaatatgttaatctattcttttaacataagcctcacctttcattttaaaggtttccatagaatttagttattttatctttcagccatatgctagtttttttttctcttgccaacatgcgtaaaaagggaagccaattacaagtgcaaataatgtggtattcttttgtaactcaagtcttgaaatgttctgtagtgttaagcaaagtctcctcttgcttgatactaaataaacttttg

SEQ ID NO: 15709 - DNA, 1906 bp, Homo sapiens
accaaaagtgctttaaaaaccagcctggcgaggacagccctggacccactccactgtctctaagtaaacacagcactgcccgcttttagcgtcttcacttcttcacagagttccagtgtgtggtattctttcgaggtattctttccaggccgagattgagcacctcatgtacctacgccacagacagccagagggaaagcgacccagacagcagcccctcctcgacaggcccaccctgcagctcaggcaccaagaaaacagccgatactggcagccattgcagctccaaactgcagaggcaaggccaattttaacttttcaatttacagtcgattttgaagagcttctacatatcggttatgtaaattcatatatgtatattttggaatcagttcttataaacagctcgattcagttttagctaaatttatagtttaggtagtatgttacatttgaatttttgtcttaagaaaagttgactgttcagatatttttctactgtaaagaaatatacttttctattaaagatctgtacatatttttacagtaaaatgctttatggaactagttttagagccctctatggctttaaggccttgcttactgcctgcaaattttgagaaatttaaaaataagcattctaacacttttattcccacagaaaaattccaagtcaaattatcaaatcaaatacaaaaataagtcttacctcttgtataagcatgttgtactaaaaaaaaattttgaaacattttgtatattggagatctctctcatcttactgttctttgctttaaattcctggcacttctttttactgtctataagagaaaacctatcataagcccaattttttttttccacttagggtaaatgtttggctcctctcatttcattatctttttttttttttttttaaagacagattctcactcagttgcccaggctggattgcggtggcgctgtctcagctcactgcaacctccgcctcccaggttcaagtgattctcctgcctcatcctcctgagtagctgggattacaggcgtgtgccaccatgcccaacctatttttgtattttttagtagagacggggttcaccatgttggccaggcttgtctcaaactcctaacctcaactgatccacctgcctcagcctcccaaagtgccgccgggattacaggcgtgagccaccatgcctggccttcattatctcttttttaaaaatgaaaaagtttataatttacattcagtaaaatcaccctttttagtgtctagtctgtgaattttgacaaatgcatggttttgtaaccaatcgataggacagttctgccacccaggacattcccctctgttcctctgttcctctcttctcctgccccctagcaaccactggtgttttctgtccctcttgttcattgacatttattttaaaataaaatattttaaaatctactttttggtgtacagttctgagttttggcaaatgcagtcaagtcactaccaccaccacaattaacagctatatcaccctccagtaaattccctgtggtcagctccttccccaccttttaccgtggcaaccgtcaagctattctctgtccctataccaggtgtcatcaaatttttttctggaaagggccatgcagtaaatagttcaagctttgtgggcttttatagtctctgttgctgctgctgaactcagctgttgtagcacgaaagcagccaggtaattactagatgaaggaatgcaggtggctgtgtttcaatagagctttatttctgcaaactgaaacttgagttttgtgtaattttcatgtgtcatgaaatactgttttctccaaccatttaataatgtaaatacttgctagcttatgtgccattaaaaaatgacttgatttggcttac

SEQ ID NO: 15710 - DNA, 1566 bp, Homo sapiens
acgtggctgagtctgccaagtggaactgtgccctatgtgtggggactggctgccccctagagcctgccaggagcagaagcctggaggggtggcagggcagagcagcccaggctcagcatggagcccacttaccgtgtggccagccgcgagacccatggccacgcaccttctctcaggccttcgggccccctggttaaactgcaccaagggtgtttcctgttggggtgtgtctcaggcaggcagctgcgtcttgttggtgataacctctgctgggaggttactttgttgcctagaaagttctggaatccacaaccaggggctggcactggagccagcagcttggccgagtcacaggtgacccgtggccctcacgtctctggttttacctttccttacttcattcattcactcacccagtccttacgaatcaccgaggaacactgggctgagcacatgacagggagcctggagccccggggcctccagcgaggcctgagaagggtggttcgggtaaccactgtgggctctctcccatcacagaaggtggacagggcctacccaggtggaggggaccaccctgcgatcaggtgtttgcgacaggggttgggccagctgaggcaagctgtcttttttcccttttctttttaatagatgcaacatttttataataatcctagagaccttttttctaccaaagatcacagaccagaaaaagttccatctaaaatatcatgcccaggaaagcacatgggatcaaaagtaaaatagcatcatgtgtgatctcgtcttccagcgtgccgctcagttccccgaatccgtgtgcacacgtgtgatctcgtcttcagtgtgccgctcagttccctgaatccgtgtgcacactgcgtatgtgtacgcgcagcatgctatactgaactcaacaagatcttggctgtacataaatatttgtaaaagagaccctttgcacctttttactgtaatgttgagacttcattacttaaatgttctacggaaggttctggtgtggttgttggagccggagggagcgtgtcagcacgtgctgagggcatggggcctgccccctgggcacccatccacaagctgggccacggagctccagcttctcaggacaaagccccggggctggcgcatcctgagggtctctgggggtgtttgccaggctcctgggatgggccgctttcagaagccctgcagtgcctccagatggaaaggcgggcccggcctccggttgggtctgcattttggagagtccacaccacggaccaggttttcccccaaggcttggctttgtgtagctactaacttcttggggcattctgagagtgtgggcagagagaattatgtggcctcatcctcccccaaggctgtgcttgcagcccgggcaccttcccactttctagctctggagaggttggattttgcttttgtaaacacatgaatccttatgataaaagtctgtcagtcaaaaatacatttataaattatttaatgccagtcctcatgtaacctcaggtatcttcagcttgtggagaataaatctggtttaat

SEQ ID NO: 15711 - DNA, 476 bp, Homo sapiens
ctcaggaccttggctgggcctggtcgtcatgtaggtcaggaccttggctggacctggaggccctgcccagccctgctctgcccagcccagcaggggctccaggccttggctggccccacatcgccttttcctccccgacacctccgtgcacttgtgtccgaggagcgaggagcccctcgggccctgggtggcctctgggccctttctcctgtctccgccactccctctggcggcgctggccgtggctctgtctctctgaggtgggtcgggcgccctctgcccgccccctcccacaccagccaggctggtctcctctagcctgtttgttgtggggtgggggtatattttgtaaccactgggcccccagcccctcttttgcgaccccttgtcctgacctgttctcggcaccttaaattattagaccccggggcagtcaggtgctccggacacccgaaggcaataaaacaggagccgtg

SEQ ID NO: 15712 - DNA, 589 bp, Homo sapiens
gcgggtgggcggcggccacgcactgggccacggaggagggatgctgctccgcccgctcctgccgcagacgggcacagacacgctcgcgggcagcgggccaggcccgcaccccggcctcagggcgctcagacggcggccaggcacagggcccgcagtgctgggaccagagccagatgcaggacaggaggcggcccggccagcgggcacagggcaccagaggccgaaggtgcctcagactccgccctcctcgggccgaggcccagcgggcagatgggcggacggctgtggaccgtggacaggcccagcgcggccagcgtcccagggtacccgcctgagctcctgctgcggaggagctgcctgcttggcccggccggcctggcaccgttttttaaacacccccatccctcgggaagcagccagctccccacaccttccagggccctaggcccctcctagacccaggtggagggcacagccctccgaccctcatggcccccaggggcaggactgagtcccctccaggaagaagcaggggggaatctattttttctctccttttcttttcttcaataaaaagaattaaaaaccc

SEQ ID NO: 15713 - DNA, 592 bp, Homo sapiens
gctctggggggccccgctgcagcccacactgggtgtggtgccccaggcctctgtgccactcctcacacacccggcccagtgggagcctgtcctggttcctgaggcacatcctaacgcaagtctgaccatgtatgtctgcgcccctgtcccccaccctgaccctcccatggccctctccaggactcccacccggcagatcggctctattgacacagatccgcctgcagatggcccctccaaccctctctgctgctgtttccatggcccagcattctccacccttaaccctgtgctcaggcacctcttcccccaggaagccttccctgcccaccccatctatgacttgagccaggtctggtccgtggtgtcccccgcacccagcaggggacaggcactcaggagggcccggtaaaggctgagatgaagtggactgagtagaactggaggacaggagtcgacgtgagttcctgggagtctccagagatggggcctggaggcctggaggaaggggccaggcctcacattcgtggggctccctgaatggcagcctcagcacagcgtaggcccttaataaacacctgttggataagcc

SEQ ID NO: 15714 - DNA, 820 bp, Homo sapiens
gccacgggactgccacagactgagccttccggagcatggactcgctccagaccgttgtcacctgttgcattaaacttgttttctgttgattacctcttggtttgacttcccagggtcttgggatgggagagtggggatcaggtgcagttggctcttaaccctcaagggttctttaactcacattcagaggaagtccagatctcctgagtagtgattttggtgacaagtttttctctttgaaatcaaaccttgtaactcatttattgctgatggccactcttttccttgactcccctctgcctctgagggcttcagtattgatggggagggaggcctaagtaccactcatggagagtatgtgctgagatgcttccgacctttcaggtgacgcaggaacactgggggagtctgaatgattggggtgaagacatccctggagtgaaggactcctcagcatggggggcagtggggcacacgttagggctgcccccattccagtggtggaggcgctgtggatggctgcttttcctcaacctttcctaccagattccaggaggcagaagataactaattgtgttgaagaaacttagacttcacccaccagctggcacaggtgcacagattcataaattcccacacgtgtgtgttcaacatctgaaacttaggccaagtagagagcatcagggtaaatggcgttcatttctctgttaagatgcagccatccatggggagctgagaaatcagactcaaagttccaccaaaaacaaatacaaggggacttcaaaagttcacgaaaaaattgaattaaaagataaaaatt

SEQ ID NO: 15715 - DNA, 1493 bp, Homo sapiens
ccgccaccttcacaccgtctgccctggccaccatcctgggcctgggggctgcccacagatgggcagtctcagccatactctgttccagctggagtagcctcctgaccagcctggcccaccctgctccacccactgggcccccccagttattgatacccctctgtgctgggctccacgctaggcagaaggaggagtggcattggcatcctgacccagctctgccctcaaggtggggatggatgggcaaaggagagtcctgcctggccctacgatgaggccactcatgtgggcctaggtaggggaggatggtgcctggagcagagggacccacaagtgcctcccgagcctagatcctggctcggaccactgcaagggccgaggcagggccagaccagagcatcctgggtacaggcctgggctctccagggcctgggcctgattcaggtgcagtgggcactcctgaagggtcagagcggcatctgccaggcagcccctctggcttccgctgaggtggttgcaggcctggggcagagcctgggtggtcagaggccggggctagaggcagatggaagggaggcatttgctgacagaggacggggcacccgggctccccactgcagtcggccttgcctcctcctcctcctctacctccagtcaggctggacgggagggtagccttgtggctgagaggggtcagactaggtggcacaggggctcctggaaagacagcaggcttcctgctgggcgttcccttgttggagggaatagagtgggggtgggactctgcaggggtgtccttgtccactcgcacccctcgccgcccaccagggccatgctctgtgacttgggctgatccccaccctttctgggcctacagcaccacaggccgctgtacccccttagagctgcccctctctggcctggccggcaggcgtcttcttaactcctctgtcctctatattcagcatgttccttgtcagctgctgggccggccctgccttgcgctagcagagcctctcctggcagcttctcaggtctccctaatggagacaccaggctactaggacactggctggggccaccccctcctgcctaatgcctcaccttacagctggggaaactgaggcctggaatggcccagagtcaccaaggcaaagttggggctggtcccagcctgaggctccagctgatgccctcagctcccagagagggggtgccccatctagctgggtgcaggggtcactgcttgtcagctcagggccctgtgcccgcttgcctgttcccctacatctgtgcctgcacatccagaactgcctccttgccgctgcctccaggaagcccaccttgagccagagtcaagggctgcagcactgcccgatagaacacgcccgccctcactgctgttcttgccttacagccaccatgggaaagctgcaacctttctgttttatttaaagaaagcccaacattaaagggttttcattgcaagcgtg

SEQ ID NO: 15716 - DNA, 155 bp, Homo sapiens
ggaccccaccttggagggtctgaccatcttcacctgttccgcagagaaatgttgctctccattattcccttctaagccagagacccttatccactgctcctctaggtggcccatttatggtttgttgtaagagaaaaattaaaaaaatattgttt

SEQ ID NO: 15717 - DNA, 618 bp, Homo sapiens
ccgcccagaccctgtcccccgatcccccagctcaggaaggaaagcccagccctttctggatcccacagtgtatgggagcccctgactcctcacgtgcctgatctgtgcccttggtcccaggtcaggcccaccccctgcacctccacctgccccagcccctgcctctgccccaagtggggccagctgccctcacttctggggtggatgatgtgaccttccttgggggaccgcggaagggacgagggttccctggagtcttacggtccaacatcaggaccaagtcccatggacatgctgacagggtccccagggagaccgtgtcagtagggatgtgtgcctggctgtgtacgtgggtgtgcagtgcacgtgagagcacgtggcggcttctgggggccatgtttggggagggaggtgtgccagcagcctggagagcctcagtccctgtagccccctgccctggcacagctgcatgcacttcaagggcagcctttgggggttggggtttctgccacttccgggtctaggccctgccccaaatccagccagtcctgccccagcccacccccacattggagccctcctgctgctttggtgcctcaaataaatacagatgtcccc

SEQ ID NO: 15718 - DNA, 1078 bp, Homo sapiens
aaaccagaggaagccgctcatgacacccgggagctcacagaggctctgaagtttctattcaagaaaacaactccagatggggctgatctggaagacaagtaacatcttccttttcttggtgctcgcctgccgtgctctaggtgcttttagagatgctggtctgtgtgctagggaagcgatgaaccatactgttagtctattaaacataactcaacctggctggctttccatgactaccaaacgctgggaatatgccagacctgtgcccgtggaagactctggcctcccagcacacctccaggaacaaactccctggcccgcaggatagggatagcagccccaaccgtcaatacaaagggattttactgagtgggctcatgggttctttaagttccccctcttaacgatcaacggtaattcaaacgtcccaaaaggagaaatgctttcttagcatatcttttacctggagtatttccccttctgcctttacagcaatcatgccagttctaccacttttgcaagaaagctccaagagagtcagtgtagctgaaactttgtcactgggtcacctatctagtccatatgtctgcaggaattatactgataaatggacaactcaccatgcaatcaatctcccgctctatcctgttccctgaccggcatggtttctacttcctgtcagcacaactaggacgtctggtttctgctgggctgccctctcatgggaagcctttaatcactctagctcaatatatcctctggggaccatcaacatttcctattaaagataactacacctggccgagcgcggtggctaacgcctgtaatcccagaactttgggaagccaaggcgggtggatcacaaagtcgggagatcaagaccatcctggctaacacagtgaaacccctcctctactaaaaatacaaaaaattagccaggcgtggtggtgggtgcctgtaatcccagctacttgggaggctgaggcaagagaatggcgaacctaggaggcagagtttgcagtgagctgagatggtgccactgcactccagcctgggggacagagctacactccatccc

SEQ ID NO: 15719 - DNA, 1650 bp, Homo sapiens
cccacggcccctccccacccccacccggctcacccccggccctgccagcactctgtctggtaccttcccctcctgcccctgcaccagctttggagaatggatttggagtgtcttgggcgatccagccagcgcaggccccccggcccggttgcttcctcagttcccggctgtgtccttggtgtcctttctccaccacctgtgagcagcaagactgccgcacgtgggcgctgggtccagacctcggctgccacgccccaggacctgcagccctcatgggggctggggatccccatcagcacagccaggcagagatgatacccaccacacacctgggggcccccacacccagtcctcacccttaacttctgccatgggaattcctccatctgcagcggtcacacgggcccaccctgcccttccccaggtcggcctctccgctgtctggagggaaggggatttggagggaggctgtcgtcgcccccaggaaagacgggcctgggggaggcgggacagtgggagaggcgcgctgaggatgagagggcacagggaggtgggttggggtgaggccacatgcggaggggcggggcgggggggggctggggggacaggcaccaagtatgaagaggatggggccagcggggcctgtctggctctggcgtgagcaccgctatgggagaccctggcttggaaagtgaacttgcagccttggatggggaagggccagatgctgggtgggtgcctgtcaccttgaggtgaccatctagggcagtacctgctgggcttaggacagcgcctgaggctgggaatacctgtctctgctctagcagaggctaaagcaggctagagcagtggaggggtggagttgatgaaaggagaggagtagatgagatggaatttttccagcctcatcctggcctgccctctagactccagtccccaagccctcagcctagtgggtgtcatggatggatctgggggtgtcagacaggctaccctgtgccagggagggggcagaatgggcctgcagcttcctgcagaggaagcaggactgggtagcagagccgggaaggtgggtggcccattacaggggggtccccagggtgtcctctggcagggctgtgactgctgcaagctctgccttcaccagtagctggtgccaggacagagctctgggacagcaggcagaggccgagcctgggccacagctcagccactgacttgggtatcagtttccccttctgagaagtacagagtgagacttaaagaacccctagatccccaccagttcaacactccattaactgggaagcccagagtcctgtccggcctgccaagttcatcctggtggacagcgggaggcctccgctaactgttctcttcttttccttattaataaaacacacaatgcctagctggggggtcggaaggcaaatgccctagatggtggggtcacgtctttctccttctccttcctccttctgctggctgaagtgatgactggagctcagcaaccactttgcaccatgaggcagcactgagcacggtagggcagcctggtgagaggggcctagctcgctgccgacagaagtcactgcctacctcagggtccccttacctgggtgggaaataaatttctgctgtgttgaagct

SEQ ID NO: 15720 - DNA, 2930 bp, Homo sapiens
gctggtagagcagatcacccccaaagcaagaagttccagatgaaatatgcataagaagcagcctcaaaactaacaaaaaagattcgcacattcctcagttagaggaggagcagagatgaagaaaaggagaagaaaagcgctggaaagagaagaaaaggaacctccttctgtgcagcaggctcctggcccagggagtgtggtgtgcggcagagtgcgtgcagggaagcagcctctgaaatcgtgcagggaagcaccctgtgaaatcgtgcagggaagcaccctgtgaaatcgtgcagggaagcaccctgtgaagtcgtgcagggaagcaccctctgaaatcgtgcagggaagcaccctctgaaatcgtgcagggaagcaccctgtgaagtcgtgcagggaagcaccttctgaaatcgtgcagggaagcaccctctgaaatcgtgcagggaagcaccctctgaaatgcctagaaatagctgccgggctttcacttggttcccaaatttcttcaaaggtcaaaaccatcacagtgggcaactttacaccccagtgttcactgtcctcaggccactgcagagccatcctagtggggcagtgggcgcggggcgggggctcctgactccggtgaggtcaccctggaggggagtcccaggaatcagcctgatgttcagaatgccttcctggcatctcagaagtgtactgggggagacgtgaggacctttcagccaagtgtcagcgttcttattgcaggagaacattaaagccacaacccagaaacttctcaggagcatggcgcacccacaccagccccgggctccgcctggacagcacctcctgggccgccctgaccagcagacaccatccttccagcctctcttggccacccggaccagcgggcaccaccctcccagcctcacgcggccaccctgaccagcaggcaccatccttccagccttgctcagtcaccctgacccagagggctgccctgaccagcgggcaccatcctcccagccccactcagctgccctgaccagcgggcaccatcctcccagcctcactcggccagccgagctctgtaggcctcagagtgcagagaacctcaaatgttgtgactttgctctgctgcagggacctgccatggagtgtcccttgtgcgagcattttgagagctatgccagcatccatccctgcaggtcccatccctgagccatttctcaggagagcaggaagggagcagggagaggggtgctcccagccagccccggaaccagaggtctggggacgcagccgaccagccctccttgtctgggcctctgtttcctcttcgacacagggaagcagggaggggccgatcagcgacttaggcctgttggctgtggtggggtccacctgcgtttctggggagcccacggaccctggggtgtacctgggtttcattcccagtgacctctcctattggtccccatttggggcgctgagatgtgatcgtttctttcctgagaatgagctgaggtaaaaacatgctggggaggaagatgggccctgggggcagcgagctgcgcctctgcaccgggagaaaggccgtgtccccagagctgaggcggtggtgggcagggctcctgagaagccggggcagggcagggtgtctctgaggtcaatgaggaacagctgaggtccagggacgcaggaaggatggggtgaactccgggatggggccggcagggagcctcacgcttacagagcctggtgttggcactctcctggcttcctccgcaaacctagccacgtggtcagggagcccgggcctagcagacggcccccaccttgacagaatccccagggtcgtgcgtggcggtgggggcgacttcacagccgagaccgggcctaacgctgctgtctcgcagtcacccctgcaggccgctcagggcagggctctggcctgacgggggttcctggacacgcctctgagccggcagcccctacccgcacccgtgcaccttccacgcccgtctccagcagcccctgcccccacccgcacccctgcacctgccacgcctgtctccggcagcccctgcccgcacccgcacccctgcacctgccacgcccgtctccggcagcacctgccacgcccgtctccggcagcacctgccacgcccgtctccggcagcacctgccacgcccgtctccggcagcccctgcccgcacccgcacccctgcacctgccacgcccgtctccggcagcccctgcctgcacccgcacccctcacggctgtctccggcagcccctgcccgcgcccgcacctctgcacctcccacgcccctctccggcagcccctgcccacacccgcacccctgcacctcccacgcccgtcttgccctggggcccaggtgcaggtctgtgaggagggcagccccgtgctcccgtggccaccgctcagccaaatggattcagcgagggtttttagtgtttgtgcctgtgtccccgtgtgcctgtttcctggtgaggctggatgcctggcatgtctgaacactcacattccccaggcatgcatgtgcagccgccgccgccacccatgtactgtggcgctgacccctcctgtaacagctgtggtcttggcctctcgtgttggtggcagatgtcccatttcccagttactttctgttgtccaaaagtttaactgtcctgccagccaaagctgctgagcattactctgatagaccatcagtccttggtaagtgtcctgtgcatctgggataagcatccgtttgttttcagctgcgctttctgtgacttgctctgcgtgagtcctcggtccacgtgggccgttgcgctggttcccagcctgcccgacacactcactgcgacgcctcccttgcctactgcttgctggcttctgtgttctctgcagtaaacattgatttctgactcg

SEQ ID NO: 15721 - DNA, 125 bp, Homo sapiens
ccgggcgggggctcggggctcggcctcctacctgcccccaacccaccctccaccccgtcccccacggtgggcactgcccagcaccgcatgccacgtgtccggaataaattctttttgattgttgg

SEQ ID NO: 15722 - DNA, 1194 bp, Homo sapiens
gccggggctgcggcggaagagatgccggcggcctggtgggcgcgaggccgaggccgggggaggctcctgtccgccccgtgcgcggtgaggaagtaacagccggctgcgcgcctggttctcgggttgcgaaagcctcgccaggcctgcatccgccttggcttgggagcaatcaggagagacagggctcggggaaggcgagcgctgcccgcgggaggcgattcccagaggcggggaggtctcaggggtctgtcccgggccggccgcccgcctctgagactccccgcctcccacggtcagctgctgcggggcagtggccggtgattgaatcggtcattcctccgcaaccaggcctccatcaaaaccctgcatgagatgagggcctcgggcttcgggttggtgaaggcggggtgggggggcagttaggaagggggcgcccagacagggcatggaagcctcgcgtcctcccccgtaccttgcgggtcggtggttcatccatgtatttcaacgccttttcacagccggttcatatggtcccgacttctgtgtgcttagaaaattatggaacttggccgggtgcggtggctcccgcctgtaatcctagcactttgggaggccgaggcgggcggatcacacggtcaagagatcaagaccatcctggccaacatggcaaaacccccatctcgactaaaaatacaaaaaattaattgggcgtggtggcgtgcgcctgtaatctcagctacttgggagcctggggcaggagaatcacttgaacctgggaggcggaggttgcagtgagcggagatctgggcactgtactttagcctgggcgacagagagacccatctcaaaaaaaaaattggaacctgagaagggggtcgtggggtccccggggcccaccgtctgcacttggcatctgaagtcggggtggtcttgtgggactgaccccttaccctgtgggttctgcactagctccgggcaattggtgacagaatcgagttaaattgtaggacatcgcgttggtgtctgagagggagttggagagctggttggtgtggagggaaaggcttacacacatgtgatttcagaagcgttctgtgggtagaggaatcgttttctctttgagactgttatgagtatgtacaaatgttatttcctgtaaaatattttcattttttaaaatgttattttctagat

SEQ ID NO: 15723 - DNA, 1568 bp, Homo sapiens
gggccaggatccctgcacgcctcagccctggctccagctggcagcaagcaccgagcatgccctccccacccagaggacctccgggcaatgcctgtcccgcctcatgctggaggctgcctcgggcacctgcctgcccattaaagactggtcagacctgtctgagcccagtgatgggagctgtggcctcttcacccacacacagaaggatgccagtccctctgtcggtctgaggtcagcttcctggggctgccccaccctgagggctccttacagggtgctcctcacagccatcccatctgtacccccgggctctgtccaccctgctgctgccctgggcacagaccctgaggtctcagtcctgcctccagccaagtttctgcctggtgcccagtgattcctgctgggcaccccttcgctcactgcccctccaccatgcagcagccagacacacccacagcacccgcagacctctaggccgggtcccagacatggccttcccccaaaatacttcctgctgtcctgtctgtgcacagagcaagggactccccacctctgcgccctgtgctggtcatcatgggctctgtgctggtcaacccagcaagtgtcccgtttgcccaggagtccctggtgtcgtggcccaggtctcatggtggccctaagcctgccagccctgctgcccgccttgctgtcctgctctgagcatgggtgccaccctccagctcctgggcgtgtcacttctctctgagcctggggcctgcatgggcccccagccctccccagcctgcttgggccgctcctgctggcctccacaggccgtgagctgtcagtgtctcaagcaggggaagtgagggctgcctccaggcctccgtgtactgggtggacaatggcccccaaaggccgtcggcaagaacaccacctccaggacccctacagcagtgggctcaggacttgggcaccaagaggagagggtgggaagggctgcagagtcagggctgcacccaagaggagccacggagccggagccggagcggaggcccccaccgagggccccagggcctggcaggttccggaagagacagggccagcgggagtcattccctgcagccactagggggcagccgccacccgctcagcagccctgggaggcggcacgggcaggtgcgccttgggagggctgaggcaaagaccccgggtagaaaggcggcccccagctctgcgagacccctgccctcttgtccagtcccttccgagggtccgcaggtgagagcagcctgccctgcatcccaggctctggttccagggtccagggccctgcgctgccacctccctcgtgcttcagccaagaaaatgggggtgcaagtagggtgtttggggtcccagagacgcaggcgccgcggcgcgatcttcctgggcaggagggcagggctccccaacctgcctgagccggggtgggggtccaggtcccccacttgcccttgtgggaaaatccctgtctcagcagaatgggccaaggtcacgcaggtctccccagcacgtgttaatttggttaataaaactgtggatcaagg

SEQ ID NO: 15724 - DNA, 155 bp, Homo sapiens
cctgtgcccgggcatggcctggcagctctccagcagggcagagtgtttgcccaccagctgctagccctaggaaggccaggagcccagtagccatgtggccagtctaccatggggcccaggagttggggaaacacaataaaggtggcatacgaagg

SEQ ID NO: 15725 - DNA, 482 bp, Homo sapiens
ccaggccagcccagtgacctttctcctgctgcacttggagggaggggacatacacacagtctcccatctctcctcccctccccctggggtggcccaccgcatgggtacagggggttccaggaatccaaatccagcatggcttggaggagctctgttggtgagaggtcgccctgcctcactggcaccctgggggcacagctggaagagaggcctggcccatgctcctctcagggcaggcacatgtacggggcatacaaggcacagcgcctgttggaacaggtggctgtgttcctgctctggcccccgtggggctgggcctccgcccctgcaccagtcacatgcactggacgagggccgaaactcctgtctgctatcgagccctggtgctatgtggccccggagccacagcacaatcatctcagtggcgaagcacaccacttgattctatttttttttaacacattaaatctgtttttaaagat

SEQ ID NO: 15726 - DNA, 2247 bp, Homo sapiens
aataattactttcccgcccagtgagtgatgtttggaaatgcgtggaattaggattcatgtggtttctaagatttggacatgtcagaattttgtgagtcatggatggggctgcttttgcagtgggtgccacctgccactgtgcagccctactcggctcagcccttctcctcagctgtgagcactgtcctcaggagagtcacagggcttgacacctgactctgagctggaacagtaggggcagggagaagacaggtctcaagaaaaggtttttaagaagtttcatccccagttaagcagagtccatccttgacttaaatcccttattacagcacaactgtgtatctaatcttacgatttaggagaatgttacctaggacattttgatgtgttaagttgaagaaaggtaactcgtgtatgaaccccgagccatttccctgttgtcctgaggaggaactccaggcctcccatcgtgtgccctaaggcctcctgcgtcctggagccctgcctcccactgcctgacttcctgccacacggttaatgctgcagcaacaccgactgcttcatcttccctgtgctccacgtggcttcctacctctctcgcctttgttcttgttgaagggtctcttctcagctaattaactctgaatcatggttcaagacaagcctcaggcatcatgtcaatgggtgtttccctcaagcttagttggcagcactctccacacttctgtggctcagtgattactgctattactatatttacttgcatatgtcagaatgatgtgatagactatctctgtcactatgctgttgggttcctgaggacagtgatcatatctgattgatttccatgtgtccactgtctagcacagggcaataaaaaatacacccctaaatctatgtgtaattggcatctctcttgctttgtcctttctatactgccattctaaaaattttcagctgttggctgttttttttgttgtttgttcattttgtatcagtataatctacgattctgttagaagtatcttctcagccctgctactgtctgctgctcctacttagaagttgcaggcaatatcctgtgcacatccacgccctcctgtgtgccaccttacagctcatgcagaactgtctacttgatctggagggcattgacacctggctcagctggaacagtggggacaggaggaggcaggtctcaagagaaggtctttacttacttgtctgtatctttctgtctcactcgaaaggcacagtctcaatgcgctacgtaactcttctgttgtagcagttctgaggttgaactgagctcttgtcattttccatgctctctggctcattgtgtcatttcaaaatgtattgatatctataaggaatagtcctcaatgttgggaaaacagatgagcaacccactaccctgaagtcatccaccgtgtagtggggaagacggagatcacagtagggtgagttaagtatgtgccctcaggtgtgaaggagcacaggtgagggggtgcctgctgtggcacagagctgggaaggccttacagaagaggtgacatttcagctgggccagagatcagtagagagcagctgaagaagaaaatagggtccaggagaggaatctgcagaaacatggagccatgacagatggctttttggctaggactgttcgaaagcaggcgaggtaaatggacagtggacagccgcctcgccaaactgttagtctttacctctgaatttcatctggacatgaaccccaaagtccagttttgtaacgatataatttttttctcatgaggccatattttgagttcttaaatactaccaaccctgaacgtctcaggacaaataattcaaaaaagagatctacattttctggaaaatcagcattactagagatgtttcaaatgtagattttaccagaccattttaatcaactttattgagattcaattttcatatagtaaaacgcctatttaagtgtacaaggttttgaaaaatctatacacctgtgtaaccaccaccacctgtgtaaccaccaccgccagaaccaaaaacgtttctgtcacccaaagaagttcccttttgccttttcctagttaagcccactccagccccagataaccactttctatcctcatagattagtgttgcttggtttagagcctcatacaaatggattcatttactatgtgttcttttgcgtctgatgtctcactttggcatgtttttagactcatccaagct

SEQ ID NO: 15727 - DNA, 855 bp, Homo sapiens
gggcgcccgaagagtggggtgctgcgcctctgcgggagtactgggtcctgagggagagctgcagtgagaagttgctcttcagcctggaaaatcaacctgaattcagagaagccttcttagtcctcagagctccccagtcccccgagaagtttactgggaaaactgccaggtgggagaagcagagccatgggtacgccggagatggcgggggctctggagatggcgggggctgcgccccggcgccgggcatcctggggatgtgctgagagtgtgcgcgaccccggagccacgtgccaggccgggctcagaggcggagaagcctgcctggtgcccacagccgtctggctcagggactccaccctggccccgagtcgccgtctgctgggcctttccttcctggctctgcaccccatgctggctgcccggtctggcttcccttcttgtctctgtcttgggcgaggcagctgtgagcattgcacagaggcaaagaccctcctgcagcctctgcgctgggccgtagaaacaagagcctttgtaatactgaacctcattcaaggattaggagtggtggttaggtcagggccacccccagtgctgcaggaacggcctccacccagctctgttggtcagagcctgggtcatgcacctggagttgggagatcaagttgggtctcagggcagtgaggtggccatatccaccacatcgcatttcgtgggggaagaggtgacctctttgttttaaacttaaggtgtctgcttatccagccagaaataaaaatctgccagtggtgttcccaagggaagacccccgtgggaatgggtcgggacactgccgtgtttcaggttagccaatta

SEQ ID NO: 15728 - DNA, 210 bp, Homo sapiens
gccgccctactcccttcacctggccctctgttcctgccccagccccttccccagacccctctccagtctcctgcaccccttagccctccctgctttgcctggcccgttgaagttccagggagcttgcccgggtctcctcgggggagcagatgagggccctgcccccgccccactgacttcctccaataaagtcatgtctgcccccaacct

SEQ ID NO: 15729 - DNA, 574 bp, Homo sapiens
ccgagctccagctcgctgtgcccgctcaggtggcacggctggcctggaccctgcccctggcacggcagtgccagctgtacttcccctctctcttgtccccaggcacagcctagggaaaaggatgcctctctccaaccctcctgtatgtacactgcagatacttccatttggacccgctgtggccacagcatggcccctttagtcctcccgcccccgccaaggggcaccaaggccacgtttccgtgccacctcctgtctactcattgttgcatgagccctgtctgccagcccaccccagggactgggggcagcaccaggtcccggggagagggattgagccaagaggtgagggtgcacgtcttccctcctgtcccagctccccagcctggcgtagagcacccctcccctcccccccacccccctggagtgctgccctctggggacatgcggagtgggggtcttatccctgtgctgagccctgagggcagagaggatggcatgtttcaggggagggggaagccttcctctcaatttgttgtcagtgaaattccaataaatgggatttgctctctgc

SEQ ID NO: 15730 - DNA, 157 bp, Homo sapiens
cgctggagctgggaggtccaggctcgctcagccccacagccctgtgcacggccattaaagcttcccacagacactggtcgctgggcctgtgccagcgctcctgggtggtgctgcctcctctggggtggctcaccgggccccggcaccgtgccccttc

SEQ ID NO: 15731 - DNA, 46 bp, Homo sapiens
ccacccagccacccatgtccagaataaaaccctcctctgcccacac

SEQ ID NO: 15732 - DNA, 90 bp, Homo sapiens
gatctgcctgtccgggctgggacagagactccccaaggaccccattctgcctccttctggggaaataaatgagtgtctgtttcagcagct

SEQ ID NO: 15733 - DNA, 189 bp, Homo sapiens
ccctgtccagtgtctgcttgccatcctgccagaacaggccctcaagcccaagagccatcccaggcctgttcaggcctcagctaagcctctcttcatctggaagaagaggcaagggggcaggagaccaggctctagctctgggccctccttcagcccccatcatgggaataaattaattttctcaatgta

SEQ ID NO: 15734 - DNA, 503 bp, Homo sapiens
tgaggaggagccgaggccccagcttcatccagcttcaaccaatgcctggacctgtccacctgagaggcccctggggcctccccagctgctggccagaccctggcgctgccacagtcctggcactgcccaaggccatacctgcctagccctttggctccatcctgtggatgcccactcacccctcagactcctgctgcccatgctgtggccggacttgtcagcagggggcctggtgggaggagcgactgccctgcccaaatgaactgccacagcagggacagctggaccgcagagtttatttttgtatttctactgggcctgcacactccagcccaaagggtctgtggccggaggccccacgagcaggccccagcagtcaccggctctggtcttgggccggccccggtgcccacctgtacccccacctcgcccatttggccgcgtgcactgagtgtcactttgctgcagctcgtttctttccaataaaagtttctgtgacttag

SEQ ID NO: 15735 - DNA, 1164 bp, Homo sapiens
ggcccctgcagccggacaccagctccagggtcccctttgccaggctttctcagaccaggccttcctgcagctgtctgcaggccccctgggtccccttgttcagagactgtgctcttctgagaagcagagctacgcttaggctccagtaaggattggaggcactttccagccctgtgcagtgttgctaccagcaagaatgaaggttgtgcagagcagtactgtgaggtaggcaccgtgactcggctgcctgtgcagaaggtggaggtggcaggcggatggccagggagccatgagaagactcttcctgggcacggcgtggggactggacagaaaaccactgcaagccccaaggagccagctgaagcctcccaatccccagggcactgcagagtctgggcagaggtgggcgcataggtacaagtgctgctttgtcagcctcactccctgcagctctcagctccctgttccctgagacctggcctcaaagggctgacccagccatacgtagatcctggggtctttctaggactgtgcctccctgcttgacctatgctccaggaccctgccctcaacccttgtcagctccctaagtcttcctgtttcccagtctcagattgagtgggtgctctcattggcctctctagctaggccgtctccctggtcagcttccttgagcctgggccactcctccctggccttcttacctctgccaagagcctccagatgtgcctgcagcctagtccctgcccaagcttctcccccagccaccctctgcccctgtggtagagcccactataggcccaggcgccttacgtgcttctcccctggacctatgtgcatccctcacctgccagttatgtggctgccaagccccacaggctgtcatggtggctcttgccacacttcccttcctgagctgacctgacctcactgccacctcttgcattgggatcctgagggctggcccctgctcactgatgggccctcccaggcccgtcaagccctggtgaaggagcttagcttgtcttcttggcaattcacaatgcctcactccacaccctaaaactggagcgtcccctatggtctcctgctgtggcttgggtgccgggcgtctcccgcctccaggatctcctctcacctgcccccattaaagctctgccactc

SEQ ID NO: 15736 - DNA, 1164 bp, Homo sapiens; identical to SEQ ID NO: 15735

SEQ ID NO: 15737 - DNA, 392 bp, Homo sapiens
aggccccggaggagctgggccagccgcccacccccacccccagtgcagggctggtcttggggaggcagggcagcctcgcggtcttgggcactggtgggtcggccgccatagccccagtaggacaaacgggctcgggtctgggcagcacctctggtcaggagggtcaccctggcctgccagtctgccttcccccaaccccgtgtcctgtggtttggttggggcttcacagccacacctggactgaccctgcaggttgttcatagtcagaattgtattttggatttttacacaactgtcccgttccccgctccacagagatacacagatatatacacacagtggatggacggacaagacaggcagagatctataaacagacaggctctatgcta

SEQ ID NO: 15738 - DNA, 271 bp, Homo sapiens
gcctgggcaggtggggaccccgctccccaacacctgtctttccctcaatgctgccaccatgcctgagtgcctgcagcccaggaggcccgcacaccggtacactcgtggacacctacacactccataggagatcctggctttccagggtgggcaagggcaaggagcaggcttggagccagggaccagtgggggctgtagggtaagcccctgagcctgggacctacatgtggtttgcgtaataaaacatttgtatttaatgagttggcattaa

SEQ ID NO: 15739 - DNA, 162 bp, Homo sapiens
ggtgcagccgcccagggccggcggggcccttttcaccttgggctgacggaggtggcggggctagaggtgtagacaccccgagccccgtgggcactcgcactggggggctgtgacagcagctgggccaggaggccgtgtaatgaccacacactcctctcaagc

SEQ ID NO: 15740 - DNA, 665 bp, Homo sapiens
taaagtccctgtaccccgtctcccagggcacaagctccctagcctctttggatccattgcccctgagctcccagagtcacccctccacctccgcagccagtgaagtgtgttgtgcctgctgaagtgatcaccccccgcccccagccctgcatcaggccacaggtcttggctttctccttatcaccatttgctgttatcacggcacacagcagggaatcccaggcccccccgccaagtggttacccaagtcaccactcctgacccaaaaatcaggcatggcattaaaacgttgcaaattcctttactgttatcccccccaccaccaggaccatgtagggtgcagtctttactccctaacccgtttcccgaaaaaggtgctacctcctttccagacagatgagagagggcaggacttcaggctggatccaccactgggctctccctcccccagcctggagcacgggaggggaggtgacggctggtgactgatggatgggtagtgggctgagaagaggggactaggaagggctattccaggctcagccctgctcctgcagctttgccgctgagtgtaggaaaaacaggcatgacagaccagggtgagggttgtgcccagctgggccacggccatgcgtggggtggcccaataaacaccgtggactccc

SEQ ID NO: 15741 - DNA, 217 bp, Homo sapiens
ggctgttgctcagcatgcaggggccctgtcgcgggcacagcccaaggctgcctccccacggtgcgtgccctggtgctgcgggtgcagcacggaaaccccggcttctactgtacaggacactggcccctctcaggtcagaagacatgcctggagggatgtctggctgcaaagactatttttatcctgcaactcttgataaagggctgttttgccatgg

SEQ ID NO: 15742 - DNA, 166 bp, Homo sapiens
gcaccccagctggggccaggctgggtcgccctggactgtgtgctcaggagccctgggaggctctggagcccactgtacttgctcttgatgcctggcggggtggggtggggggggtgctgggcccctgcctctctgcaggtccctaataaagctgtgtggcagtctg

SEQ ID NO: 15743 - DNA, 42 bp, Homo sapiens
gctgagtggctggagtggtcaataaagccacatgtgcctgtg

SEQ ID NO: 15744 - DNA, 3695 bp, Homo sapiens
tgaagtagctctgggtgagacacaggccgccctgcagtctctttaggtaggcagggcctttgctgggacccctggtggaggccttcacaaaagcactggttactggtttcctgctgggtctaccttgcttctgggcacacctcaagcctcccctgctttctgcagtgccccacgcggttttccctgcacttgctccataattggctgatcatctgtgggccccggggctggatgtcaggcctccattgccctgctcagtttggctgcatttggctgccgtctggggtcctggtcctttgtgcaaatgctttgggattccagttgtgagctgagagagatgatggcctctctgggcctttcctctccctttactgagagctcagtgcttctggggttgaagttggacagaggcctgcttcagggaagctgggagtccccaggcactcacgcctcttacgtgttccctaccctgccacccagccaccccactgggctgggctcgggctggagggggtcatcaaggtacacatgtgcctggaagttgaatttgtggctgtttttttttctgtccacgttggtcacccttatccttatctctgctgtcacccccaacatggccacccggcaacaactgccatccagcctgtcgccccgcccttcgcggggcagccccgtcggcactgccggccagtccttgctcttcccacctttcggaggcccaagatcctactgtggccggccagggccagcgagggaccccccccatgcagagctggaggttggggtgatgtcttttcggaagagcttcaagggaggtgttggggcctccccggccaccttccattgctaccccaggattcccgagtgcaacgttcccggctcgcgccccacacacggctcagcgcacactgcgcggcttccacctttactgacggagcatgcgcgaggccgcaccggccaatctccggcgcccacgtcatccgcgcgcccgcggccctagcagtggatctcgtaggcgaccggcgggggcacgcggagtcccggccccgccccctgttccgggccgcagtcagcgggcgcctccgccggaccctcggcgaagagcggcttggagcggttgatgacgaacatctcgtggccgcgctcgtcgcggagctcctctagctgtgcgaacgtacaggggccgtccaagtagtcgttgacgaacagcgctccctcccccggaggcccccgcgccttttttcgcctgcggcgccggcgacagatcatggcgaccaggagcagcgccgtgagcgccagcagcgcgatggccgccgcaatggccgtctgtgtggccacgcccagggcgcggaaggccatgctgcccgcctcgggccggggctcgctgccggcggggcgggcggccggaggcggcggttgcgcgggctgctgcggctgctgccgggacgcgttgaccaggagccggaagggcacgcgggcagcgccgccggcgttggaggcctcgcactcgtacttaccggcgtgcgccagcgtgatgttgctgaggaagagcatgccgctgcccgtgtcggatgccgagtgtccgcccaggcccagcaacccgccttctagctgggcctgggctcgcggccggccctcgcgaggctggggcacctttctccaggtcaccaatggctgcgggtagccggaggcttggcaggcaacccgcaggtcctcacccaggttggctgtgagctccagcggctgcacgtggacagagggcggaatgcagatgaggctgctgtgggatacgtccaggagactctggagcgccaggcgcgggggctctgcacacatgatcttcctgtccctggaggtgagcagccgctggccgccctccttgatccaggcacccagccagtgcagggcgcagtcacagcgccatgggttctctgtgggagagcagcgttaggcaggtggcttgagggtgctgctaaaacagcctgtgcagttggggttttgcaggccaggacagaggcctctttcccacctcccacagcgttttcacacggagtccaaggccctgccaccccttccttgaccccaagctccttggggcggcaggcccttcaccctcgcccccctcccctttagctctgtgatgcctgcctgttacagatcacttctccgtcggtctctgagaaagcacctgctccttaagtcttcctgcaacaagtgccactgtttttaggaacctgggcgtccacatagacatctcaccagcactgaaacctcacaagtcctctcagccttgcctttggatgccctctcttgggaatgtccccagtcctggtcagctgtctctctcctttgcaattttgtctgcctcccctcagcctaaaagtgtgcagaaccctcaattctgttaagtcaccctgtggagttcctgtcttctgttttccccaggcagggtgcctgagctgtattccccagcacacccactcccgcagccctccagtgtggctgcaggcggtggtgcagccttccagactgctgcccagttgcctgatgtcagagcccctccacacatgagcctgctccctactgccaacaccgtggcccagacagagacgctttccgaggaagaggtacctgtgaggcgcaggacttgcagactggccaggggctgcagggcctctcggctgatggtgcccagctggttcctgctgaggtccagcagtgctagggaggacagccccgctagagcctggtcctccagcagctcaatgctgttttcttgcaggtgaagctcctgcagtcgctgaagtaaggacagcagatcgtgaggaaaaagggcgccgaggttgggggcatgtctctcttcttaccaagctagactgggttgccttttctaactattccagccctacagggcgaggggccataatggagtatcccgcccctttagaccccaggcgctcaccggcaggtgcaagaaggtgaaatccagcagccgcgccagctggttgcccgccaggtagagcacgcgcagctgggccaggcctacgaaggcgccgctgcgcaagccgcgcagccggttgctagtgagcgccagctccagcaggcgcggctgcgcgcggaaggcgccggcctccagggcgcgcaggctgttgttgtgcaggtagagccggcgcagagcggcgagtggcgccagggctcccggctctaggcgggcgatgttgttgtcctgcaggaacagtgtctgcaggccggggaaagaggaggcgcttaccccgttgcgggggtcttcctctccctgggggcaccccgtcctcccgcagctccacacggtgcccacctgcgtccctggcgggattcccagcgggacgacgcgcaaccgcagggcgccacactccaccgtggcgctgtagcagcggcaggctgctgggcagccggcggcgcggagcggcagtagtagcagcagcagcggcagcagtgcgggggccctcagggccatctcccgaggcccggttcctcaccggcccttccgcggttcagccgcagacgcgtgccctcctgaaacacaggttggcaggccagtctcggcagtcgagagccagccaatagatggaatggaggcctgcacctgcgtctaacttttgacgctataaataggttcaagaaactaataaaacgttctggttttctcctttgac

SEQ ID NO: 15745 - DNA, 749 bp, Homo sapiens
tgacggggacgacaggccgaggattcacgctggaagcccacccaagccggcggggccctagcgcagaaattcagaaccccctgtcctgaaggtgaagcaaagtctaaagaaagggccagctcccatcaggagctcggcttcttgctccagccgggcactggggagggaaagggcaccaggcagcccgtggtgtggcctcaggaaccactatcagccaccatttcctggggccttccggaaatgtccaggagcgggcagaagggagagagggaggggcagctatgctcagtccccaaagagcagggcacagggggcgccacagacgcatatgcagctgagctccccacaggccggcccgggtcttcgtgcagaaccattgggcacagccaggccttagcgccaggctccgtgtggcggtcaattccaggtgctgtaaagccgactaacagggtacagggagccttagctggctgccatgtctcctgcctgtaatcccatcactttgggaggctgaggtgggaggtttgcttaagcccaggagtttgagaccagcttgggcaacatggtgaaacttctctacaaaaaatttaaaaataagtcaggtatcgtggtctgtgcctgtacgctgtagtcccagctactcaggaggctgaggtgggaggatgggttgagcctgggaagtcaaggctgcagtgagctatgatagcaccacggcactccaacctggttgacagagtgacaccctgttt

SEQ ID NO: 15746 - DNA, 52 bp, Homo sapiens
accacttacatataaatgtgtatatatgtgaataaacctatagccttaactt

SEQ ID NO: 15747 - DNA, 752 bp, Homo sapiens
ggggggctgcgtggcaagtgtgccccgacatggtggccttttatgagtataccatgtagttgttgagtcttttccgcgttagaaagaatagagagtctactttttgcctatatttgatatttggacctctgtttctttatttaatgaactctcacacacactgtgactccttggtgaacacgtgcagggattgtacatttgattgccttattgcagaaatattcacctatcagtccatgttttgcagaaactggagatgtgaatttatgatgctctcccataatacagcagtaatgatttgcagtttctcacaaaatgattttcatgctgctctgtgttgtagttctgtttcagaacttccgtacctttttcttgtatgtagcacgtataaatgcagctgtcatgcagttcttttcttttgctagaaaattagtcaggaggtaagatgaatcttccaaagttatgttaaattttgtttaacttgacaaattaaactttgttcttattaaacaaatacgtaaacaaatactggaaaagcaaagcttatatttgggagtaaaatgtatcttaaaatgcatgttcatcttttgctgagggaggaatagcttcttgtatgtccactggatagtaacagtggttcttttttggaattttatttttacctcttttgaacttctaaatcggtccctttattttcttaaaacatttgctctcttttttgtttacagattaaagaagtatggatcaatttt

SEQ ID NO: 15748 - DNA, 402 bp, Homo sapiens
aatggaatatctctttaagaacagctcctctttaacaaaaaaacttaaaagacaaatgtgagatgggcttagagttagttctctgggaacttgaaagacatttatgccatattatttattcacgtgtttgttcctggtgggcaagatgccatctgaggcttcagatgagaaattggggtaaaatggaaatttttcacttatttgcaattatatatatcttgaattactacataaaacttgattctgtttctctacttattgtaaaaattgaaaatggacattctgttaagttaaatgtatagtttgaagctcatatatttttatgaagttttgaatcaccttgtatctgaaagtctctgctttaagaatgctttctgggtattaaaatgttctagtttaagt

SEQ ID NO: 15749 - DNA, 724 bp, Homo sapiens
ccctcagtgccccaacaggactgattcatagccatacctctgatggacaagcagtgattcctttggtgccatataccactctcccttccactctggctttactgcagcgatcttcaaccttgtctactggcataagtgcagcggggatctctactcaaatgtgtcagggtcttctacggatcaaactacacatgcgttttcattccaaaagtgggttctaaatgcctggctgcatctgtatgaaatcaaggcacactccaggaagactgccacgtcgcgccaacacgtcatactcaatgcctcagactttcatatttctgtgttgctgagatgcctttcaatgcaatcgtctgggctcgtggatatgtccctcaggtgcggtgacagaatggtggcaccacgatatgtgttctcttgtgttgtttttcctttttaaacccccatgaacacgaatactctgaaaaaaataaaaagctttctggaagaagacacctttctgatagaggctcacacctacaaatgcttcactctgtccttccgagacctgacaagctttgaggacctcacagctcccctgtgtgttcatctctagggatgtttgcaatttcccagtcagctgttctgtcgcagaatgtttaatgcacaattttttgcactagtgtgttatgaatgactaagattctgataaaaaaaataaattatttacacagggtttatacacact

SEQ ID NO: 15750 - DNA, 429 bp, Homo sapiens
acatcccagtccacctgaggaactgtctcgaactattttcaaagacttaagcccagtgcactgaaagtcacggctgcgcactgtgtcctcttccaccacagagggcgtgtgctcggtgctgacgggacccacatgctccagattagagcctgtaaactttatcacttaaacttgcatcacttaacggaccaaagcaagaccctaaacatccataattgtgattagacagaacacctatgcaaagatgaacccgaggctgagaatcagactgacagtttacagacgctgctgtcacaaccaagaatgttatgtgcaagtttatcagtaaataactggaaaacagaacacttatgttatacaatacagatcatcttggaactgcattcttctgagcactgtttatacactgtgtaaatacccatatgtcct

SEQ ID NO: 15751 - DNA, 3721 bp, Homo sapiens
taaaacagagagaagagattctccccgggccacagatctagctgggaagagaaccgagagctcaggctcatgccaaggggcaagttatgaaccaaccattttagggaagccccctacccctgagcaggtccccccagaggctgggctggggacccaggttgctgtggaggactctttcctcagtcatcaccactggctgtgggtgaaacttgccctaaaaacaggaaatgtgtctaagatcaatgccgcctttggagataacagtcctgcctattgtccacctgcatgggggttgagtcaacaggactacctgcagagaaaggccttgtctgcccagcaagagctcccatcctcatcccgtgacccctcaaccttagagaacagctctgcgtttgaaggtgtccctaaagcagaggccgacccattggaaacctcaagttacgtatcttttgccagcgatcagcaggatgaagcacctacccagaacccagcagccacgcagggggagggcaccccaaaggaaggagctgacgctgtttctgggacacaggggaaggggacaggtgggcagcagagaggaggggaaggacagcagagttccacgttgtacttcagcgccactgcagaagtggccacatcctcacaacaagaaggcagcccagctactctgcaaacggcccactctggaaggaggctgggaaagagcagccctgcccagcctgcatcgccccacccagtgggcttggcgcccttccccgacaccatggccgacattagccccatcctaggcacaggcccatgtagaggcttctgccccagtgcaggcttccctggaagaaccctcagtatctcagagctagaggagccgctggagcccaaaagggagctaagtcaccatgcagctgttggtgtgtgggtgtcattgccacagctgaggactgcccatgagccctgcctcacgtccacccctaagtctgagtctatccaaacggactgcagctgcagggaacagatgaagcaagagccgagttttttcatctgaccacagtcatggtgggataagacaacaggctgacaaaccaagctggccatttggtaccgtgagaaaggaaatcccacttctgacacctgtgtccttgggcacatcactgtcacctctgaatctccatctgcatccctgaaaaatgaagaaacagggctggatgattttgcaggtccaatgcaaacatcacagaccccacccatgcataggagagactctaacatactttagaggaggagaaagagattccagtcaaaattgtctgctaccttttatgagctgtaggttcccttattttatctttttgctgtggcttctaggaaacacaaaggtaaaacccagattcctattttatttgaggttcttgttacaattagctttgcctcacatttagcggttatgaatctcattttaatatattctaactgtattatgttatgaaatctcttggtaagataatttgcatgctttctgggagtaggtaaggcctgtgtgcttgtaataactaacataactgaaagtgcaaatgtcattctaagattcccatatcttttggttaggggacaatattagagcttttaaaaaggaagggtagactcacttagctcagcctcacccatgctaagggcacatgcacacattttctgcaattcactctcagaccatcagcatcctcctggccagctgcataaatgtatttttctgtgaaatgtgctgctcccctttgtgcaggctggccagccaagagttcccttccagctcccactgctgctttccaccccatctcctttatgtccaagctttgttcccacttccattcaatgtgagacactatccatgatttaagcccatccaaaaagaagggaggaaacgtccattcctctcgcactctccttctctctgactcctccactctaaagtgttctttgtggctaggtatttccataatttctttaagccttcctttgtagctgattaaggaagtctagtcataaactatcaaagagaaaggcacacagagagctggatgctatttagggatgggtatttttgttttgttttgtttcatttcatttgtttatttgttgagacagggcctctctgtcacccaggctggagtgcagtggcatgatcatggctcactgcagcctcaacctccagggcttaagcaatcctctcacctcagcctctcgagtagctgggactactggcaggtgggcaccatgcctggctacttttttgtattttttgtagagacaggttcttgccaggtggctcaggctggtctccaactcctgagctcaagcgatctgcccatctcggcctcccaaagtgctgggattacaggcgtgagccaccgtgcccagccagaatgggtagtttttattctctccaaacacttttggattagggtacaatattagagctctaaaaaggaatagtagaataacttagctcagcctgacacatactaagggcacctgcagacactttctgcaataagctctcagaccatcagcatcctcctggccagccacataagccaatcggggatgcagacaagtggctacaaactttccatacaacaggtgaagataacgagactttgggtcggatgcaggggctcacaccggtaatcccagcactttgagaggctgaggcgggaagatcacttgaggccagaagttcgagaccagcctgggcaatgtagtgagaccccatcactactaaaaatacataaattatcctggtgtggtggcacacacctgtagtcccagctgctcgagaggctgaggcacgagaatcagttgaactgggaggcagaggttgcagtgagctgagatcgtaccatggcactccagcctgggcgacagagcaagactctatctaaaaaaaaagcttgttaatagaacaaaatcattcatagttccattcactgtgctatcccagcatctcagtccttcctccatgcagtctctcgcccagccaggtgagagcatgagcacttccctgagtcctcaccagccctccccatttgtcctccaagactccactcaaacatctcctcttggtgccttcctgggccctccccagctccagctctcccagacctaccctctgtccccaggttgtattccactgccctttgccctctggtgacctcttcctaaacttgaagccctgcctccctgaaggctaattaagggttgcagtcctccttctgggctaactccaaggtccagcagagtgtccagcaaaagtaggcgttagagcattcaacagcatgaattcactaacgagcggggctgtgggcatgaatttcagcttgagtgcatatcctggatcaacggcatttgtgttatggggtaaaagtaagggtgggatatggggaatttgctcattcttttcaaactttctagcccttgaatagcctggaaagctagaaatactcttcattcattcattcatttaaggaatattagttgagtatgacaggcactgagtatgcagaaatcaaggcatgtacttgctgttcgaggccctgtggaccaacatcggcttctcagatggcttcctcacttcatgcctccagaaagcatattgcccggtgatgaaaaggatcagaaaatatacactatatttattagagaagactaataaatggacacttaattcaaa

SEQ ID NO: 15752 - DNA, 102 bp, Homo sapiens
gctgggagtgaccagaagaaatgacgcagaagtgaaatgaactttttataagcattcttttaataaaggaaaattgcttttgaagtatacctcctttgggcc

SEQ ID NO: 15753 - DNA, 119 bp, Homo sapiens
gggatgagaacagagagaaatatattcataatttactttatgacctagaaggaaactgtcgtgtgtcctatacattgccatcaactttgtttcctcatctcaaataaagtcctttcagc

SEQ ID NO: 15754 - DNA, 197 bp, Homo sapiens
cgttctgctgtccaagagaatgtcatgctgggaacgccatcatcggtggtgttagcttcacatgcttctgcagctgagcttgcagaatagagaaaaatgagctcataatttgctttgagagctacaggaaatggttgtttctcctatactttgtccttaacatctttcttgatcctaaatatatatctcgtaacaag

SEQ ID NO: 15755 - DNA, 121 bp, Homo sapiens
gcttgcagaaaaagaaaaatgagctcaaaatttgctttgagagctacagggaattgctattactcctgtaccttctgctcaatttcctttcctcatcccaaataaatgccttgttacaaga

SEQ ID NO: 15756 - DNA, 121 bp, Homo sapiens; identical to SEQ ID NO: 15755

SEQ ID NO: 15757 - DNA, 117 bp, Homo sapiens
gcttgcagaaaaagaaaaatgagctcaaaatttgctttgagagctacagggaattgctattactcctgtaccttctgctcaatttcctttcctcatctcaaataaatgccttgttac

SEQ ID NO: 15758 - DNA, 124 bp, Homo sapiens
gcttcctagatagaaaccaaagcagtgcaagattcagttcaaggtcctgaaaaaagaaaaacattttactctgtgtaccttgtgtctttctaaatttctctctccaaaataaagttcaagcatt

SEQ ID NO: 15759 - DNA, 315 bp, Homo sapiens
aaataccatctgccatatgcagcaagggatctgcagactttttttctgccattctggtgagaaaaagcgtgacatttgctctgatccctggaataggtgttgcgtatcaaatacagatgaagaaggaaaagagaaaccagagatggatggcagatctgggatctaaaatataagctcccggaaggcagggatgttgaagtatcccaagggcttaaaggaatgtgtggcttatagtaggtgttcaataaatatttgttgaatgaatttagcaccaaaggtgaagagctgataaaagacatttttttaacttcctta

SEQ ID NO: 15760 - DNA, 1533 bp, Homo sapiens
cgtttgtggctgtggaatttccatggagaaaagagagcatctgaacacctggaccatcttttgcacctggcagaccctctgcactcaccccagcgtgttctgtgaacttgagtgacaacgcgtgcttgcagggtgctttttggacgactggggaagaggtggggagggggtggtggggggaagcatggacgagaacatggagcaaatgttttacaacctgaacctcagaactgtgatcctccaaggagcgcgctacttgaagaaaagaaaaaaaaaaaaaaaaagtcgaatggcttctcagggattttgttttccgtgcacatataagccatagttacagtacaggtggcagtatttagagcactcagatttcagttctgttaaatgtgaaagagggatcgactgacgttcattgctgttccataactagtgtaaaatatgtatatgtttatctttatttttataatatgcaaatacatttaaatttatacagtttgaagcttctagcgttagttcacactgggtgcaatattctgcatgagaactgtgccaagatggggctgatttcttattttagtataagacttttttgttttttctttattctttaatcctcttcacattaaaaaaaaaatctctctgttagcccatggattaagtgttggttcatagagattgccaataatcagaaagaaccttaaatgtgcatttaagacagtgtcccttcccttcttttcaatgaaggtccctgcctatataaatcatctggcacgctggtgggaaatcctttgctcttccaacgtgttattagtgctgggcagagatggggcacactcaggggccaaagaggacaaaaagtccatgcaaaacttgagtcttttaatggcttaagataatcaggagtcagttctgaatcttacaaagtgctctgcttaataagtaccttacttagcagagcactttgcaaacatattacttattagcagagctctttgtagaccttccacatctggctgtcagatcttaaggttgtgaatttaggctccagttacattcactggagagcataatcccacacgggttatttataaatacagagcctctgattggacggtctcctgccaagaactagtaatacccttgttttaaaatcttcacaaggtaaaacttaaaaagccaaccaaacaaattgctctccattctacttttaattgggccaaacagcatatgctacagtagtaacatgtttttcggagagtgtaaaaaactctgtttacatttgcctcctccgtgggttgatcgaaaatgtataaaactgactgcttctcgccagcctcagacaagaagagtgagttgctggtactcgctactcttttacttcttttgtaaagtattgactcttggaaggctacagtatacaaagtctcaacatgttttttaaaagaaataaggagcaagcgactgccctgctagaaatcacaaaccgatttttgtagaatattttgtgccccaggcattaatttcactgactcc

SEQ ID NO: 15761 - DNA, 4537 bp, Homo sapiens
tgactgcaggtgacagggcgtggcggagctgccacagacaagcctagctctgctcactgtgcagtggagatggaaggccagggaggagcaacgtggaacttccatgaggccccgtttgggaaaataaaaggatcctcttcacttctttcttaaacagcaaatccagccaggttcagattacacaaccagtgtctcactcaaaggagcagtggtggctggcgcgctttcgcactgtggcagccacgagagtctgtgcacgtctgtgctggaaagggtatggatgggaatcaagcctatgccagtgctgatgaagctggaggagtctctcctctgctctccactcagatgtgggacatcagtcgccaaaagccactcagccccagccacctcgcgtgagaccctcactgttcattgtgttcatctttgggtgctctctgccagccaggcctttcctgcaagctgctgtgcttccccgtccacgtgtatctctgctgtgacacactgagctgacgcacatttccagtgcagctgcagaagagaaatgggattggctcttgttttctgcaagttcatgttttgcattttatgttcttccacaattgatctgatgttcaggaaaagataataaaggcaaattagttagtggttgagacaggcatttcctcctcccgcttcttgaccccacagatgtattccagcagagagcaacacaccagtcatcaaaacccactggctcctgtgcggtgtcacagattgcagggttctgacaaggcaggacagtcaagagtggggacactttcagcttctacttttgccttctagggggagctttctaagtccccacatttaccccgagtcaccggaaaaatctgatttttcccccgaaagctcaatgactttaacgtgcttggctggtttgtctcattctttatgaaagaattttggggccgggcgcggtggcttatgcctgtaatcccagcactttgggaggccgaggcaggtggatcacgaggtcaggagatcgagaccatcctggctaacacggtgaaaccctgtctctactaaaaatacaaaaaaattagccaggcgtggtggcgggcgcctgtagtcccagctacttgggaggctgaggcaggagaatggcgggaacctgggaggcggagcttacagtgaaccgagatcacaccactgcattcccgcctgggcagcagagcgagactccgtctcaaacagaaaaaaaaagagaattttgaatctcctttcccaaagagtcatcttttctgctgtgtttaggacatttgatttgcatatccaatatctcctcgaaaccttcagaaaatggttttatcgtgactgtgattcacactatctagaacactttaccagcacccagggacatggacttgggtgttcttatttatggtgtgtatgtaaagagataggggagaaaaacctcacccaagttcttatacgttattttaaacgtttgccaactctgaaatttcagagattcattgttcttaaccatattggactaaagtctgttggttagtgctgttgtaaaagagacctctggggccgagtgtggtggcttatgcctgtaatccctgcactttgggaagccaaggcgggcagctcacctgaggtcaggcgttcaagaccagcctggccaacatggtgaaacctcgtctgtactaaaaatacaaaatttagctgagtgtggtggcaggcgcctgtaatccagctactcgggaggctgaggcaggagaatcacttgaacccaggaggtggaggttgcagtgagccgagatcacgtcactgcatttcagcctgagcgacagagtgaaactgtctcaaaaaagagagacttccgggacagtcattatcagataggccccaaacctgtgatttttcttgggcaagattggtgtttacttaggggtgctttaaaaatatatttttacaagtatacttgtaggaagttggttttttattttctatttttgtttgtttttggagtttggttaaacgactcttttattttctgttttgccttatcttactaaagtgaagttttcctaaggcaagcaagaagaggagtggaagcacagttgcctggatttggaggcagagttgtcaggcttttcaagctaagagtcttgtgcttggattttccagattaatttgaaaagacctcccatttgtggctttgtacataaccaacaggcagatactgagtgccttggctcctagagttttgtggttgggttaggttgtttttgttgttgttttgttttggttttgttttcatttctgaagtttaagatgccttgactttttaaatgctcttaaggctattcgatgtaattcttactcctaaaactggctgttcttagcctgaaatctaatgctttgttttttgtacctctcccaggtgggtaacactctaggatgacatgatgttataattttaggggaaatcacatttttaccttatgctgttactgggcagaaccacgttttatgtaaacataccagacatcgggtaacagacagtactttaaatgttataaatttggtgatcagaactattaatagcataaatcgaactcaaatggaagcaaaactgatttcatgcaggtcctgaattttactttgccttaagaagtgccctccccacaatgcaggagaggcacagagtgcactgtcattgacatgttacccgactaaggatcactctgttcataagaaaaaggcctgaagtgactctgtttaataaagtcagtttaattttatctaataatgatcttaagacattcccatgtcaaaatttgaaatatggtaattcagtgataactatctcttctaaagcagccgtaaaccctccccactacccgtctttctcccagctcaccctggctttttttgctgggggtgctggatgcaagcccccagccagcacacctgggatgctcaccctgccgcacagttcagaaggcaagtcctcacctgctcgcaaagacccttcttctccaataaaagactctacttgcctgagtttcctcatcagggctgtcattcagtgatgtatgggggtctgaagaatactgccttctatctgtcttctgtttaccacttgctcctctgctaccctcctgccgcaaacagtcttcttccttttggcccagttctgtcccgtgaaattctcagaaggcctcgggagctgcgctgatgtattctctccttgtttgatagctcatcatcagtagataagcctacacacttcagagggtgacaggtttcttacttggagacttcactgcaccttgacttgtagatttgccttcagacagctcttggttatggttacaagtggcccccgagtcccagaatctttcccaggttgccccagaaagaccagccacctgtcacaggtgcagttgtccggcaatagggaagcaacttcatttttgttttatatttattccctcaagtgccctgaggagcatttgcaaactgggtacaataaataagctggattatacaaagatatttaataaataagctttcagtatctattggaagacatgaagcatttgagtgggtttctttatttaaaaaattattctactggagctggtgagaaataatgaagctgtacagttctccagaaattaaaacaatgtcagagtcaatgggagaatttaatttacctttaagatttcattttaatggtggcaaaattatacattcttagaagatgtaaatttggaactgttaggagattgctctgtggttttgatcttttcaaaccattttctttttgaaaaaaggcattagttgtagtcatggacattaaatgggccatatatgcttatcaatcaaaaaagtgttccttttttggaactgcccattttctggatcttccctctcaatggataggggatgaaaaccttggttgccttttatttgtttcctcttctaaaatttctcacctgaatgtagtcctgggagagtcccgatcacgtctctcctgacatgttcactgaaatcggagacaagaagttacatggatgatgggatcttatagggtcacacaaagacaatttggcagcttatcttaatttcctgcagtgagacaacacatgtggaactgggaaggacagctgttgttacgagcagtttttcctggtcatggttgtaaagctctgtaacccacattgtaaagccgtgaatgtttttagtcttgttgacgagtttttagagactgctggacctctgagggctttgagagtgcagctgtgatgatgtttcactattacttcagtgtgaatgtagaaccaaggactcatcttcattttatacctaaaagtgccttgtcaagaaatttttgcatgttttaaaagataaatatttttgtacacagagttcaaggggaaatgcactttaaaaatcccaagaatggatgttctttgtgtggtatgagaggttggtttgtatctcaaaagcaaaaatgtaataaaggaagacaaaacaa

SEQ ID NO: 15762 - DNA, 543 bp, Homo sapiens
acaagatcaagctagaaaacaatcacgagcttgggagctctgtttttattcatattttttctacaaaactgagcaacgttcagtccactggagatgtccatagtacatggacaaagaccaaggacttgccaaggacacagcccatgccatgctgtcctgggactcttaagtccagaagtgtcagagagctctgcggcccgtcccacacgcagtgtgaagaaagggggtgtctgcggatctgcccggttatcggaggtcagcccggctcctatttatttgtctgcagagcccgaaagatggaactgattggaaaggctccagtttagcttttgtttgtgggtttgttttctgctagcaagtgttgctctctgtcttttccctgttgatctcctgttacttttctccttggcttctgttggcactcacctcatttgactttgaggtgctttttttctagtcttgaatatatttgatgactctgcagaaatacttgggcaaagcaggtaacttcagagtcattggataaagtttgttctcaactcc

SEQ ID NO: 15763 - DNA, 1969 bp, Homo sapiens
agctggaggcgccccgtccggtcagccctcgcgccctctccttcttgtgccttgagtggcagaggagccgtccagccacaccagctttcctcccaccgctcagggcagggaggtctgaactgcggccccagagcctttggcctaagctggactctccttatccgagtgccgcctctatccccttccccacgttccagcccctgcagcccacattttaagtatattccttcaagtgagttttcctccagcccctgagagttgctgtctcccagtggaatgttcactgacgtcttttcttggtagccatcatcgaaactaatggggggacagacttgatagccaaggtcccttctggtccagttttctgatttagggttctctcaagattaataaaggaagatggggaaatttgactcattaatgagctcgctaacctacgatctggtgataattttgtgtgcacagcccaaggaccacgaggctttctgcactttctgcacccccttccaaagtgaccacaaaatttcaaagggactcatacaatttgagaaaaaacagtcaacctgatttgagaaattaaccagtatggctaactatatcacagaaaatgggattgagttaaaactattttattttaaatatacattttaaagcagttctttttttttgttaatttgtttattatacacacacttcaagagaatatgcacagtctaggccgggcacggtggctcacgcctgtaatcccagcactttgggaggccgaggcatgtggatcacctgaggtcaggagtttgagaccagcctagacaacatggtgaaaccttgtctctatgaaaaatacaaaatttgctgggagtggtggtgcatgcctgtaatcccagctacttggaaggctgaggcaggagaatgtcttgaacctaggaggtggaggttgcagtgagctgagattgcaccattgcactccagcctgtgcaacaagagtgaaactccatttcaagaaaaaaaaaaaaaaaagaatatgcacagtctgaatgtataccaggagtgtgagagacacatgcccacttcatgcaactcctaaactcaaagtctaaatcagatatttttattaacaatgacaacttgttgccaactccctgtttctaatgaccaaagacccagggtacctaaaaggactttgcaaccaagcaaagtcactgtcttcaaatctggatacacactttcccctctgtagattcaaaaggtgcttccttcccggctgtctccagcttccttactctcttttctgggatttctttttctcttctttctgctcttcctccactgctgaactggtccctaactgaaacagcccctgacttatcccaagcatgcttcctttagctgctgtgagaatttgtcttcctcaccagccaggtcctcaggcaaagtcctcagccagtgctttagagcaacttcccgcaaatcagaaactcactgtgattccaaaaatgtttctgagccctggacccctgcccccaaaatattttcatctttcccccaaacctcctttaaaggagcatgcataacagtgtgctgaaagacagttgttggttttttgattttagcatattatttcctgtatgaaatatgttttatataatctcctattatttttatcttatgttttgtattgttgataaatcctttttgtccttctaagatgtcctattgtaaaatcacttataaggtatgattactctttatgctattactttatatgccatttggtaataaatagtaaattgttgatgatatgattgactgatgcgcagtccagagcatgtatgaataatctcataaaacagtatcacagacattaagctaaactgtttcgtttttttgaaagaacaactcatactttggaacagttgtcaatattaatttgttgcaaatatttaatttaaataaacatttttgtaccatg

SEQ ID NO: 15764 - DNA, 27 bp, Homo sapiens
atccttcccagccggggccttccgacc

SEQ ID NO: 15765 - DNA, 1805 bp, Homo sapiens
gagcatcttgaccaagttgagaaggggaccttaagtttggtttgcggcaaacagcacttgcaagaaatataaccctcccttcccccaatacacagaaccaccgccaccaccaccaacaccgccacaccaacaccaccactacaaaaaaaaaagaattaataagtcacaaccccttcaaataagctttctttccagtcgctgtatgtatacaaagatattctctatgttttgtaagtaaaaacaaaaagaaaacctttcttttgttttttacacataagaaacagtattgaaaaatcccacgctatggttcatagggtggagaaggaggagttatctccactccaaaagaaaaaaaaaaagttttttaccttacaccaagtgtagatcatttatgggattggtgctgattgaaagaacaaaacaaaacaaaacaaacacaaacaaacaaaaaaccttcaactgccttatgcccttaggtgctgagtttcattaagtactgtcacgttttctcatgcaaaactctctggtgatttttgcaccagaagagggaaaattaaacaattaaatgaaacaaatctaaaagtgaaacaaaaaccaaccaacaaatacaacacaaagcaattattcttcctatctgattatttgtattgaagaaaacaaatttaccaaaagcaaaagcataaacccctccctcttttcagtttctccccctcctctcctgaccttctccccactttgcagagccttctaggagctcaagggctgtttgaaactcaaatggctggagaagctacttgaaggctgattatgtgccattttagcatttgcctagcaagaatcacattcgtttcccagtgaaaagcaaaccagaacaaaacaaaaagccaccgcaataattcggtaaggacaggatattctaaagcaaattaaaggagatttctgtacacatagtcagtaataataaaactcagcatagtagcaaaaagaacgacatcagtttaaaggcacaatacttaatcagtgactggcaacaacgattagttccatcattttaaggctgtgaatggtagacatttatcacatgtgatattgtgtaaagcctcttctgtttccatttggtgggaagccttaaattgatctggaaagaattcttcatttttcatttgtgcttttttaaaaaaaaaaataacacaaagaggaaaactagaatatatatatatatatacatatatataaaaagtcaaaattgtaataactgacccatttcaaagactgtttggtgcttctgtctttcaccattgtggttggctgaaaatcattcagctcacctggtgcatctgggttgaatgggaaattttgtgtgtgtagtatgtgtgtgtttgtgtgtgtatgtgtgtgtgtgcccatagcacacgtatatatgtgtgtgtccctgctgcaaagtcttgccagagatatacaaaactgatgtaagacgaacttggatcacggcttggttcagcagagcatgggggcgggggctctggagtggtggggaagtgatgctgcctgcccacgagccctggtttgggtggcaagactcacaccagcagcggactgcaggccttagaggccatgccatttgggtgaggatttgattccactgtttattttctcattgtatcaagttgaatttctgcaggtgttgcaagtatgttcaacgatttaaatttttttttatttttcaaagtattgttcctttaaagaatatttctgttctagggcatcgtttcaatcgcatcgtatctctacttgggcacaaaaaa

SEQ ID NO: 15766 - DNA, 55 bp, Homo sapiens
ggagacttttttgtttttcattttttgtttttttttcccggggtaggggtgcata

SEQ ID NO: 15767 - DNA, 2903 bp, Homo sapiens
ggagccctcagactgggcggaggggctggagcggagggcttgggctggaggggtgtcagaggaagctgaggccaagttactccagtgggtctcccggaggcaggggtccctgggactggcgactcaagggccccaggacctattcagtggtgctctcccacccaggggccctgggtgtggatgccagtgtctctgtgactggctcttgcttactacccaaagagctctgcagaagggccgctccaaccaagatgttaaaggagacctgggttcccaccataatccatccctccacggtcacgttcctgtttcctggaatcactggtgctatgaactgggattcccaaagggaggccccccaacaaagctgtcatttttgcagaaggctgtcccgcaagggccttgggggaaattaggcatgtcagatgtgcctgtctcacgtgctgttgctgtcctctaagtattgtctcaaattcaccctaagtacatgactcagcaacattgacagggagctactaggaagggaaaatcgaaaggcatgacaaatgggcacttggggacgcagccccagtggctggcagccagtgtctctggtgagcctgacactataaggctgtgtaaattgtaaattctggcgtgtgctgggacatgtgatgggggcactagcgtagcttgggtgcaacaagcacagatgtccccattgtctcccctggccacatgcatctccaaagagcctcttcactgccacccacaccccagggtgacagcctgggagaccactggtgactgaaccaggcaggtcctgaaagcattttccataactgaattctcctgcaggggcgtgaccggggcctcctggtggattctggtggtgtcaccttactgccctctctggaaagacaatctagggagcccagaggcccatcctgagcctcctctgagattttgtgcctgacctaaacaactagttttaataagactgttactgatgtgttgttcacttgttagtaactgatttttgtccaaatgcggaagccacttgtgtaggtcaactacagtgcgtaggatttgattttaagagtttctccctcccaacaggcttgaggatcagcaagttaagaccccagcaggttagggaggtcagtctggggtcatacggcatggcaggggtccctcggccagacccgtagaatcctgagataaggagtgtttctgacctttggtgtcatctagtcgagtcctctcattagtaaaggagcaaagtgaaacctgggggaggagaaggacttccctcaggttgcacagctgtttaggctatagaatattgatgtgtgaaaccattattgataatgcctagtagatcacatgtcaatgaacttgaaccccaaagatggtcgtgatgctttgccaaacccgcacactgccaacccctctactctccacctcagcccccacccacatctcccagagtattgcaattcagaacatttgggtcaaggtggagcaaggcactgacagtggccccacagggcatgtgtcactaatcactgtcccatggtctacgcacggcatctggctgctctgtctactgtgacttcttcctgtgtaatctcagtggggcccgtgtccacccacacatcgtgacccacataggggagaggttgcttttcttttgtgggctgagagtaggacaatgcaaatgaatgatctctagtagacagaaaagaacttggtctcttttttaaaatttcaaagagccagaagttctatgcctccttcaaagtaggcagaacaacgcagccaagatctactgtctgccatgctctgtgcaatgaagtctgcaggcctgaggaccatgtactgctgtccttcctcagagctctgcacaaacactgccaagtcctgaagacgcattcctttcctgccaacctctttccagataagcccttgaggtctcgggctgacctacacacacacacacacacacacacacacacacccccacacacacacacacgacagagaacatgccataaacatccttgaacccatgcaggaaagcccatcccatattctgaaaaaatgccaaattaggtttttctttctttttggaaatcagtcattacagtaaccgaaaccattgggttcagcgaaaatggaaagatttagctgaatgtagtcagtccaattaagttggatgcaactgagtgatttagttgcttgggtaacccagtgcttgcttgctttcttcattctctgggtggaaactaagatcaagacacatgtttggggataagttaaatgtctgagctattttgctcggtttatcctaagagaactttattatgggatgaggaggtgacccaagatgagaagtggagggggacagcgatgttttctaaacatcgtccagtgttgactggcttccttactttgcacagtgaacacaactaaccacattaattcagctttgtgaagtccctgctctctgtgggtctatgagtcagcagcaacattggcctaacctccgtcccagcctcctggctcaccacatgtgtacagtgctgtttgcagttgtactcattatccatccatctctctgccatccccaagcatcgctgggtgtaaaacgcaaactctccaccgacactgccatgcgtggtcatgtcttgatgccttcaggggctcagtagctatcaaagaggcctggagggcctgggcaggcttgacgatgcctgaccgagttcaagacccacaccctgtagcaataccaagtgctattacataatcaatggacgatttatacttttattttttatgattatttgtttctatattgctgttagaaaaagtgaaataaaaatacttcaaaagaagatatccatataaaaataaaaggagag

SEQ ID NO: 15768 - DNA, 2598 bp, Homo sapiens
tctgccgtgggcctgtcgtgccagtcctgggggcgagatcggggtagaaatgcattttattctttaagttcacgtaagatacaagtttcagacagggtctgaaggactggattggccaaacatcagacctgtcttccaaggagaccaagtcctggctacatcccagcctgtggttacagtgcagacaggccatgtgagccaccgctgccagcacagagcgtccttccccctgtagactagtgccgtagggagtacctgctgccccagctgactgtggccccctccgtgatccatccatctccagggagcaagacagagacgcaggaatggaaagcggagttcctaacaggatgaaagttcccccatcagttcccccagtacctccaagcaagtagctttccacatttgtcacagaaatcagaggagagacggtgttgggagccctttggagaacgccagtctcccaggccccctgcatctatcgagtttgcaatgtcacaacctctctgatcttgtgctcagcatgattctttaatagaagttttattttttcgtgcactctgctaatcatgtgggtgagccagtggaacagcgggagacctgtgctagttttacagattgcctccttatgacgcggctcaaaaggaaaccaagtggtcaggagttgtttctgacccactgatctctactaccacaaggaaaatagtttaggagaaaccagcttttactgtttttgaaaaattacagcttcaccctgtcaagttaacaaggaatgcctgtgccaataaaagttttctccaacttgaagtctactctgatgggatctcagatcctttgtcactgcctatagacttgtagctgctgtctctctttgtccctgcagagaatcacgtcctggaactgcatgttcttgcgactcttgggacttcatcttaacttctcgctgccccagccatgttttcaaccatggcatccctcccccaattagttccctgtcatcctcgtcaaccttctctgtaagtgcctggtaagcttgcccttgcttaagaactcaaaacatagctgtgctctatttttttgttgttgttgtgactgacagagtgagattccgtctcccaggctggagtgcagtggcgccttctcagctcactgcaacctgcagcctcctagattcaagcgattctcctgcttcagccttccgagtagctgggatgacaggcactcaccaatatgcctgggtaatttttgtatttttaagtacatacaggatttcaccatgttggccaggctagtttcaaactcccggcctcaggtggtctgcctgcctcagcctcccaaagtgttgggattacaggcgtgagccactgggccctgcctgtattttttatcagccacaaatccagcaacaagctgaggattcagctcataaaacaggcttggtgtcttggtgatctcacataaccaagatgctaccccgtggggaaccacatccccctggatgccctccagccttggtttgggctggagtcagggcctgtatacagtattttgaatttgtatgccactggtttgcattgctggtcaggaactctagtgctttgcatagccctggtttagaaacatgttatagcagttcttggtatagagcaaactagaagaaccagcaatcattccactgtcctgccaaggtacacctcagtactccccttcccaactgaagtggtatgaggctagctctttccaaaagcattcaagtttggcttctgatgtgactcagaatttaggaaccagatgctagatcaaataagctctgaaaatctgaggaacattgtaggaaaggtttgttaagcatctcttaagtgccatgatgagcataacagccggccgtcgtggctcacgcctgtaatcccagcactttgggaggccaaggtgggaggatgacaaggtcaggagttcaagaccagcctggccaacatgctgaaacctcacctctactaaaaatacaaaaattagctgggcatggtggcacatgcctgtaatcccagctacttgggaggctgaggcaggagaatcgcttgaacccgggaggcggaggttgcagtgagccaagacagtgccagtgcactccagcctcggtgacagcgcaaggctccgtctcaataattaaaaaaaaaaaaaaaaaaaaaaaggccgggcgcagtggctcaagcctgtaatcccagcactttgggaggctgaggcgggcagatcacctgaggtcaggagttttgagatcagccttggcaacacggtgaaaccccatctctactaaaaatacaaaattagccaagcatgctggcacatgcctgtaatcccagctactcgggaggctgaggtacgagaatcgcttgaacctgggaggcagaggatgcagtgagccgagatcacgccattgcactccagcctgggggacaagagtgaatctgtgtctcaccaaaaaaaaaaagaaaaagaaagatgcttaacaaaggttaccataagccacaaattcataaccacttatccttccagtttcaagtagaatatattcataacctcaataaagttctccctgctccc

SEQ ID NO: 15769 - DNA, 1199 bp, Homo sapiens
ctaactctttggatctccctttaaagtgaccctaatctggctgcattgatggccagattgtctgctgcctttgcacatctagtgctggtttcagaaatttaatgaaacttttctttttccttcgacctcctgaatcatgtggttctgcaaatgaataccttcaactaggatttagaccactaagaacttgcacagaaaaacacgcattgaatgtgtgtcgaacctctacattgtgaagttgcactatgtaccatactctaaaatgaaataagaactctttatgtctgtgagagagtgtgtgtgtgtgtgtgcgtgcgtgtgtgcttgtgggggttgggtagtgtgtgtgtattttctctggctttaaaattttaaaacaaacaaacaaaaaagccatagagagcagaacttgccgagggtcatttattgcccaagtttacaagagtagcgatacaagtttttgcaaattgaatttgcctcagatatatctgtcctaatgcttatatttgcacaagtatgtaaaatatcgtgttgaggatcattctttgttggaaacactgctcttgctgaactgtcttgaccattgactatgacacagtttcttatttatgtaaatacttgcatcacagtggccgacaggcattggatgcagaacctagagccagttttcaggaacaattgtaaacctgacatggtactgtgcatctattcataaaacactcaaaactgtgaaaatatggtttacatttaattgtacataaaggtaaagggagaactcaattcagtaccagttagtttgtacattttagggggcttttcacattaactgcccatttgtgtaatttatagtttgacatgatgtgtttgttttaaaaaaaaatgcatagtataaacccattaaggatctgggaaaagagaagaagtttaatatagaactaagcttttaaagtttgtttttgtttttaattctggtctcggtgcaaatgttagttatgccttattcatatcacagttagatcaccatgctgcaacatggtttatattcatgctgccctagaaacttttgtaattatttgttgcaaatttgtgactgtccttattaactttcttttatgtaagtaatttgtaaaagtttcttaaaatttttgcttttgcttatttaattttgaataaaagctaaattcctaatactttttctt

SEQ ID NO: 15770 - DNA, 2448 bp, Homo sapiens
tcactgaagcaacgcaaccgcttccaccaccatggtgtttgtttctagaacttttgccagtccttgaagaatgggttctgtgtctaatcctgaaacaaagaaaactacaagctggagtgtaggaattgactatagcaatttgatacatttttaaagctgcttcctgtttgttgagggtctgtattcatagaccttgactggaatatgtaagactgtgcaaaaaaaaaaaaaaaatttatgtgtattcttattcaaattgcttctgagaagcaaaactctttaaatacattatggaagataatgaagatacttcattctcttgtgatatcagtgtatgcgtacctgtgtcgctttatttgcagtgtgttgagggactggtgtatccactggaatagttggtactcttggatgtgttttctcaccaagatgagcaaagaaaggtttgcacagaggagtgtgaatgtgtgtttgttgctggctgaatggcaatagatgtctaaggtggattcagtgtctggcacactgagacacctccaagaaggagattgatgcatcaggttcagtttaacctggaatatctgactacccctgaatccacccagaaagggggcccaacacccttgtccatttatgggtattttttttcgaagttattaagcatattccttttccacgaacctcttctgtactttgattgtaataggttggctcttacacccattccaaatgcagtttatttttagacccgattgcaaatagtgatgtagttttaaccagtatggattagttcagggatgaactgctccctctagccttactggctctgatccacagggttttgttttgttttgttttgttttttgtttaagtcgagatataaaaactgaacacgataacacttactcttaaatcaagcatcaacactttttccctgttagaattctttgcatttttgtgtttgtaacagaaacgccttaagacactatgtttgggaatataggaaactatgtgtgtcccaaggaaatccctgtaaatttaactcacctacaaaaggctttttccccgcctttggttgttaacggcattcctgaaagccacatgtgtttattcattgggcttgttcttatcagcaaataggttttctggttttatgactttttgtcttattttatttttcctacatttctttttttttttttttcctttagaatgccctggaaatatatttaagtggtaatgaaaaatagtaatcatagtaaaacgcaacaagaagaaaaccaacccaaaccagtgaagttttttagaacctttagaagggtggtctttattcaggttttactgtaatggtaaggattgactcaagagacagtattagtaaatttattgtgtatggatcaaaagtgaataatgtatgaatgagagctgtaagaaggatttttattttgttataatttagttaccattttcagtgttatttcaaaggttctttgaagaattttggggcagggcatcagattagagttttaaaatttgagtattttggatatcagtgttcctcatgaagatatacatggatattcaattttgatggcttccagatttgtaagattgtatgttgtatataccattctattaagaaacatgtccactgtgctttcaaacatagataaagcatgataaagattattatttaagatatacttgtatttatacctcagatattcttttgggttttgtacctcaaggcttttttcttcttattgtaaatacactttacgtgaatacagtctaagtgaagaaaataaataaaaggaagaggtttataacttgctctatatctgtacagattataatcaataagtgcactattattaaatgtttaaagtaagggaaaagtctgggctgccttccttaatattgcatctcactcccacccttaaaaccacagattgcaaagcatagcattttagcatcaactacaatcaaaagagcgatttgctgaaggaaaaatcggactgcaaatcattccaaggccaaactgcaactgagccacccactcccaaacaggaaaccctggtgaaggttcaggaagcacggagattctctccaacaaaggtccagttaggaaacgacgctgagaggatgacgacaacgtgcaacagcagaaagatgcttgcaagcagagtcagggtcaccagtgaatgccacaaaagttctctttcccactgtttaatttgacaagagaagaatttgaaggatatgaacattttcaagaactctgctgaggtcacttagagcgccatcacaacttatttgtgtgactaattgcctagattgtaagctctttgagggcagggcttgtctcttacacatctttataatcccctgcagcggctttcagtattttgtacttgtaggcacctaataaatttattatttgctatactg

SEQ ID NO: 15771 - DNA, 51 bp, Homo sapiens
gccggtgtgtgcctggcagaacactgcactccaatttcctcgggcagccac

SEQ ID NO: 15772 - DNA, 578 bp, Homo sapiens
agtgactgatttctcctcacaccagaatagccttttgttcctgtccgtctgcttcacagttctgctcggtttcccttgtgatcagtccagagcttcttcgaatggtccacagagcaacttccagtgtgagcagggattcgccaccaccttctcttgtgatttactgtactgctcaacacagagggtgtgattgacacagcagtggaaaaagcgtcgtcagcaggaaaactggatcatgacttttgctcgaaagggagaataacataggtgcctttgctacgcgaagtgaagcacacagttttagatttttgcaggacctggatatgaactgcacatatatacattacataaatgaaattcccagtatccaatggcaagatgaaatggttaaccctgtaagaaaacttattctacattctgaaagcacaattttccattcatctttttggatgtaaacttttatccccgacttttaaaattttaaagcattatgtaatgcttgctttactaaaatttaaattcaatacatggtttttaacaaaacagaacaaaacaaaacaatacagaatctctccctg

SEQ ID NO: 15773 - DNA, 2206 bp, Homo sapiens
tgcatcatattttcattcacaactatgaaatcgctgctcaaaaatgattttattaccttgttcctgtaaaatccatttaatcaatatttaagagattaagaatattgcccaaataatattttagattacaggattaatatattgaacaccttcatgcttactattttatgtctatatttaaatcattttaacttctataggtttttaaatggaattttctaatataatgacttatatgctgaattgaacattttgaagtttatagcttccagattacaaaggccaagggtaatagaaatgcataccagtaattggctccaattcataatatgttcaccaggagattacaattttttgctcttcttgtctttgtaatctatttagttgattttaattactttctgaataacggaagggatcagaagatatcttttgtgcctagattgcaaaatctccaatccacacatattgttttaaaataagaatgttatccaactattaagatatctcaatgtgcaataacttgtgtattagatatcaatgttaatgatatgtcttggccactatggaccagggagcttatttttcttgtcatgtactgacaactgtttaattgaatcatgaagtaaattgaaagcaggacatatgagaaaactgaccatcagtatatttgtccagataattggtggatcaaaaatgccacttaacaggaagtttagtttgttatgcactttaaatggaataattagcttgttacaattctaggacatggtgtttaaaatttaaatctgattaatccattttaacaaacaatgcaaacatcttcagtgcagaaggaagagtggtttcaactgtttggagtcttttatgaagtcagtcaacatttacaaccaaagggcgggggggggggtggggggtgcgtctttagtcctaaagggacaataactctgagcatgccccaaaaaagtagtttagcaaccttttgttggtagtcaacccatccccagggccatagtgtagagtgtgaaaagctaccctgaaacccagtaattctaccctgaaagtgactgcctgcagaaagaccagcagttgatattaaagcgcaaatgaattcaacctcagccctgaaaataacagaattctgaagtttcctatgactaattcacaaaaaaagtaattgtaaactagtactattatggaattactctactgttctttctttaatagtggcaaatgaaagcataagcttaagcattttttcatattctgaagtctcaccacacataataaccaagtggtagactcacagccgtccaacttaaaaaggcaaaaccttaccttggaattggaattactgtaaacagcctactgaaaatgcatttttatcatgtaacattcttctacttgtttaacattgctgattttctctggcagcataattttgtggttaagagaatgaattctgaatgtacactttctgtctcaaaccctggctgtaatttcagctagttaataattctttgtgttcagttccactatctaggtattttcttcaaaaggtaaatacaatggtttctgaaagaatcatttgcattatcagcctgtttgggatgtctgagatcagtgcctctgggttgttaatactgtattgctgtatggtatatgtatgctgatttactacttatgcgtaagtggtatgcatgggatgtctgaaatcagtgcctatgggttgtcaatagtattaactattagtgttaactgttagtattaactattagtattattaacactaataatagtactattactattactatttttattttaaaataaaatttacctttaaaataataatagtactattgctagtactagtactattgctattactagtactattactagtactagtactatgacactgttaatagtactattaacaacccataggcacttgggatgtctgagatcagtgcctatgggttgttaatactatattgctgtatggtatatgcatgctgatttaccacttatgcatagatatatctttaataagtaatctaaaaatcctttttgtatttgagagaatctactaagttcagtccagtcaagaaaagaacctaatagcaccaatacaaattgaggacttaatttactttggaatgttgaattgcatttgttccattaaaaaaaacagaaatttgcg

SEQ ID NO: 15774 - DNA, 1683 bp, Homo sapiens
gatcaggtgggttgggcgggacatcctctgctaccatctcattaaaaggcccttcacctctggacaagtcatctgcacaactgacttccaagatccttttgtgactcctccaaatgactttggttcccgtgttgtacctgacttccacatggccttctctcctggtccctggtgctgtttgggcctctgctcccatgctcatacctcttcttactccaattactccaccatcacctctctcccctatcacccccagcctggacacctctcatgcacggactggagggctgctccaaccagtcctcagttctctgccacccattgacctagagtcttgaacccaatttaatttattgggttctaggagaactgctgtgttctcaccctaacttggaagagtgatgtttcagtcaagcaaagcgattcctaccatacaatataacacttgtgtgaggctctgtcctaaatatctcaattaccaatatgtggtttggtagtatttctcgccatgctttgctcatgcgcaatgagactacaactagggtgtaaattttaagtatcccatctaaaactcatacaatgataggaaaaatccatttgtttttcatttgatttttactgaggaatcagctcaatcttcaatgaatactggtctctttccaaagcatttttgatcaaagtaaagactgagtcaagggctttttttttttctttttcttgttttaagagacagagccttgttctattgcacaggctggactacacgcattcacctagagtctagaacacaatttaatttattgggttctaggagaactgtcatgagtattgataatatgagagttctttatattcaaacattattctcaaccagagatagggatgtcatagaagaaaatccattcattcaatcattaattcacatgtccattatgtacctccatgagctggacataacagctaataagagataattgtctctggttttacagagctaattgtccctaagagatgtagacaaatgaacaagcaattacaatacatctaagctatactgggggaggaacagggctggataggtatgcagaggagataaaaaaattttaattccttagaatattttttaaaaattgattcttattttaccttctcatcttcttattttccaaattacagcatatatatatatatatatatatatatatatatatatatatatatatatattttttttttttttttttttttttttttaagttttgaagtgtagtcgagcttgggcaatttatccaacccatttaaaccaaaaataaaacttttcatgtattacctggtcatttcaaacaaaaatattttgatcatgaaaaagaataccaatattcttttgttctaaaaatctcttatgggattacatgttatatttttggtttctctctactgatcaacagactacattttcacaactcttctttcctttacgttttaacacacagacccaagattcatactattaagattctagtagaactctagatggtatgcctctgtgtatctcagcatttttattcccactcttgtataatgaacatgttaacacctacctcacagggttgttgtgaggatcaagtaagatattgtgtgtgtgaagatgctctgtgaaatcataaagtcctttaaagatgt

SEQ ID NO: 15775 - DNA, 247 bp, Homo sapiens
agtgcgatagtgacattatggaagagtcaaaccacaaccattctttcttgtcatagttcccatcataaaataatgacccaaggagacgttcaaaatattaaagtctattttctactgagagactggatttggaaagaatattgagaaaaaaaaccaaaaaaaattttgactagaaatagatcatgatcactctttatatgtggattaagttcccttagatacattggattagtccttaccagtagac

SEQ ID NO: 15776 - DNA, 1489 bp, Homo sapiens
catgaaatagtccttttatttttatttcgagctacacacatgcttgtatataggttttatctctggttgaatccctcgaacaatagacagtacctttcccccccctttcatggcccattttattgtctgcctttcagtactaagtatgaccgttcctatctcagatcttaataaaaagaaaaaaaaaaacgcattcaggttaaatttggccttaatttaatatacttgttagcaagcgtgtgtgacagagagtggggaaagctacatcattgaatattttgataaactttaccgacttgagtttggtttatttttcccttttcctaaattaactagcactgactgtaatttatttccctgtttcacgtctctcccttccattctgcaggagttttagctatttgagatcgtggaccatcagttttgcactttagagagtgtttctgactctaaacctgttttatcagaaaatttgttttttcttgatcttagctggaaaaatctgccaactttacacagtatttacttggttttgacccacagaatatagcacgttgtgcaaactgtcgattcagcgaaacttaaaaaagacaagaaactactgaggagcttagtaactgctgtttctgtacgtagtgtttaatcttccaagcacatctagtgtctgtcagtttctaattggcatgtgtaggctgctctgtgactgaagaattttcaaaccagctttacacccttcaggaaaaatcccttgtgattggatgtttactatctgccaggaaactggtactcaagatgttgaagctacagttattttatgatagcacacttcccttgatctgcttatttttattccatcaccatttaccctttttttttttttaaattttgtagccattcttatgatgctcttgatttgttggttacacaaatcaattttattaaaaatccaaagataagtctttaggtatattttgtaccaaattaaattagaagacaaaaattgtgctttcatagttgctacaaaggtaaataatggagagatttggtacaaaacaacaaaatatatatatattctcatatatatatatatagctgataaaattacctgaggagtgtaatgcttatttttttgtgtatatctttgcaatctattttatatatattgacaaaagagactgtgaaatacttagccatgcagaatatgtgaccagaccagagcatgtgtaggaagactttacggtaatcattaactctaccccgaaatgatggactacaagttataatgtgtgttacctacacttcaatcagtaatattagcaaatctccaaatgttagtcacattggtttgtctcccttgtacattctttattcatgatattacagtgctgtaactgggtggtcctttttaaacaaaacattatttgcaaaacagagggtattatttgtttttaaagcttttgtaaataaaggcttcaaaatgttttcttat

SEQ ID NO: 15777 - DNA, 908 bp, Homo sapiens
agacatcactgcctttttctcagttggttgttaggttgagaacattaaaaatcttgtggccaaagattttgggcaacaagtacctactaagtaaagatataattagagataccatatgagtcacatccaccacacttaaaagtattcaaaaataagtcatcttgaaatgtagttcagaaggaactgggagaacatgttcatcatagaaccaacaattttaaaacataaactacctgagaagtcatgtaggtccaaccatattatttctcaggtgagaaaacaggctaataacttccatgattaaacacattactagtgggagaactccagagttcttttctgactcccattggtgctcctcctacaaggcaaggaatctttatattaggtttattctagcatgaccccttttaaggtttaaactggtgataaatatattatttgctcatgtcattcttcagtgctttgaagattttatagagaagaactcaggctcttttactgcattgagtcttaaaaggggggttgaattccgaagggatcaaataaatccaacgtagtagttgcatcagaaaccatattaggaaaaccctccttaaacggcaaaaggcagagatcagttccttgagtataaagtgttagggatggaagaatgaaactaaatgaacccattatctactcctaagtaattaagtgatgtgcacagatacacctagctataggtaaacaggaaaattggttgtgcaaaaaacaagtgaggtttttcttgactataagttttcccttttggaaaaattcgctgtggatttgagtatattttctcttagacattaaattgagactgagaatttaaaactttttgtagcaatgtattgataatagaaagcattaaagctgttttgctaagt

SEQ ID NO: 15778 - DNA, 1831 bp, Homo sapiens
agtttccctttggagttccaaagtaaaggacacataagcaacacttccaaaaacaagggaacaaggtggtttattgtaaaaacaggaaatggtgcatgtcattgagaactactttaatgcagctatgaaaagggaaaaaagtgcccagttcttgatttcttagatactgaagaggacgtagtcatttcatttatcaaatataaggaaaattattcaccattttgaagctcaccctagactatgaaaattatattcactgcagagcaattacttctgtcattacctgaagtgatcagtatctatcttccttgtcatagcatgcatctctcaaaaagcctccactcctttccctcacatctgtgatcatcatgattcttttagttcacttctagatgcatattttgtgttttctaaagcatctgacattatcctcctttccgaccctcttatacatatttctaaaaacaggcacattggtgagatgcaccctttttagttaatagatgcattcctaaggagcttttaattgcttatctttcaggcataatcatcactttaacttttccttggagcatatattttgaattgtgagaataattttgttgcttttctctgagatctatagtctgtttctcctcattatttaaaaatgctaaaccttgtatctcactttttctctaacactgatttaatagctaacgaggtagaagcaacattcattctcctggtcttacatatgaatttaagtatcagctttcttgtaataaccttttattactgttctagagactacactaccgacagtgtgggccagccaccagcctgatctcaaagtatcacattataaagttagtagataaaacatctgtgagtgaaaatccagtttcaagaaccagagaattgggttgtcatgtctgtttaatgaagggaataggttttgtaatctatcattttagaaattatgtaactggctaatatggtttaattaaccttagtaacatctcatgaccactgactgctgaaagttctgaaaagaatttttgttttgttacactgcacatttaagggagagtccctcccctatcttatgagttaaaaaagacttcactaggtgacctaaattaaacttagtggggaaaagtggccatgtttggacataaataaatggtattcacactgtatggttttaatatattagtacattctagaatgtaaaaggattaaactttacaatttagatcaatattttgaatatgtgaaaggattaatttaaactttacaatttacatcaatattttgaatatctgattttttttaatgggagaattattacatttcgctgaaatgaggacgagggcaagaaagcaacattgctgatctctctagtatgaaagatttggagggagtgttgcaatatatataaatgaaaacatttaattgtgttcatcatatttaaaaatatagaatatattagagaactgtgatttaaaagtactgttaatgtaaaaaataaagcaagtgtaattaattctttcagaatataaaatttgggcattctctgctgagcagttcccaaattaagtacaaggaatgtttattcattttctgcaatatactatatgtaatagggaataccttgctaaaataaaacttaggatatagtggtaatggctttcacatttttataacataacataactcacttcacaaccttcttggagctgtccactcttagaaactctgttgcctaatattgaggatgtggctttaatttcttccgtttgacagtgtatgtctataaaaacaataaacattttttaaaaaatgacaa

SEQ ID NO: 15779 - DNA, 2131 bp, Homo sapiens
cacctccccaaagtccacagactctctgaaagcattttgatgcaggtctgcaggactgaccccaaggaggaacgtgggcacaagaggtatatcagcacacgtgtgatcaccgtagggtaactggagcgtcaccaccggcggaatcgcagcttctgagactggaactctggaggaagacttttgcctccgtccaaaagattcctccaaaaaaagatttaaaaaaagatttcggcatcgacacggacgttgttgcacaaagcacttaaagaacgagagcatcttgttcattgcctttttcacctaagcatagggggaaaaactctcagggccctattaagatttataacctttgtaatgttcttcaccacagacaccttcttgtgagttttcagtctgactgtgggggtggggggtgtgaatgaaatggatgtcacagagtgtcatgtgtctgatgcagcctcctctgctgtgtattaaatgtcaaaatctgaatatatctggatatgtactaatcaaataataatcaatcaatcagcatatacatttcagccaaagccatagaagaaaaagcaatagttgcttgaattatgatcatctaccaccaactctgctcagccctgtaacagggtagggagagggtataacaggaagagctttgacttgtccctgtctatacattctctgtatcttttgggggtaacttcttggcagtttttcagtgttcagccatgtcagttgaaactagatttttctgtagattttttacttacccatgtgagcctaacactatcctgtaattcattttctcaggctatgtgtaaatgtagaaccctaatttttctataaaaaaacaaactaactaactaactgtgtaaagaaagaaaaagggaagtaccaatgggtttttccaccttatttttacctttgatctacccttgcagatttaacctgtcttcttccctcccattattctcattttccttttacctttctccaccatccagagccacaaaagcaaaccttctacctcctacctacttttctctgggacaaggataaaggaatatgattttccagagccccagagccagctcatcttccaggtgctgaaaccactttccaaataaactaaagcctggatttgatattacaaattttgggaaatcttagaataaagaacgagaacaaggaagtcattggctagtataattaagaaaggtaggattcagtgcttaccgatgatgcagtacttgatagaagaaaacagtctgggaggatagcgctcatttttcagttaccctttaaggagtccctttgtctttgggaaagtagcagaatggtccgcttctttcccatgagtggaaaatgtggcttgtccaactctcctccaggttgcatttcagtttctttccaaaacttattacctcccctaatcctgagactttggaaaaggtggaaggaagaactgttgctttatctccccctccctgcatgtgtcaacattgtgatgtcagtatttactaatctacattcagtggctgtacaaataacagctgtagtaagaagagattcaggatgctagaggtgaatatttgggtcatttacatgtacactacatagcaagttgatactcatgttgcatgttcttttaaattagtgattttgtgtcttaagtctttaacttccaatacttcatcatgtatgtaaccttccatgtttgcttctgataaatggaaatgtaggttcactgccacttcatgagatatctctgctcacgcttccaagttgttctcaatgacattagccaaagttgggtttgccattcatcccctaggcatggtaaatcttgtgttgttccctgctgtcctccgtattacgtgaccggcaaataaatctcatagcagttaatataaaacatctttggaggatgggagagaacaggagggaagatgggaaacaaaatagagaattcttaagattttgtttaaaccaaatgtttcatgtagaatgcaaaatgttggcacgtcaaaaatatgaatgtgtagacaactgtagttgtgctcagtttgtagtgatgggaagtgtattttactctgatcaaataaataatgctggaatactcaagaattgc

SEQ ID NO: 15780 - DNA, 199 bp, Homo sapiens
ttgctgctgttgggctttcgtttctgcaattcagctttgtttaaagtgatttgaaaaatactcattctgaacatatccatgcgcaatcatgataactgttgtgagtagtgcttttcattcttctcacttgcctttgttacttaatgtgctttcagtacagcagatatgcaatattcaccaaataaatgtagactgtgtt

SEQ ID NO: 15781 - DNA, 1109 bp, Homo sapiens
gcacacgtctggcctacagaatgcggcctctgagacatgaagacaccatctccatgtgaccgaacactgcagctgtctgaccttccaaagactaagactcgcggcaggttctctttgagtcaatagcttgtcttcgtccatctgttgacaaatgacagatcttttttttttccccctatcagttgatttttcttatttacagataacttctttaggggaagtaaaacagtcatctagaattcactgagttttgtttcactttgacatttggggatctggtgggcagtcgaaccatggtgaactccacctccgtggaataaatggagattcagcgtgggtgttgaatccagcacgtctgtgtgagtaacgggacagtaaacactccacattcttcagtttttcacttctacctacatatttgtatgtttttctgtataacagccttttccttctggttctaactgctgttaaaattaatatatcattatctttgctgttattgacagcgatataattttattacatatgattagagggatgagacagacattcacctgtatatttcttttaatgggcacaaaatgggcccttgcctctaaatagcactttttggggttcaagaagtaatcagtatgcaaagcaatcttttatacaataattgaagtgttccctttttcataattactctacttcccagtaaccctaaggaagttgctaacttaaaaaactgcatcccacgttctgttaatttagtaaataaacaagtcaaagacttgtggaaaataggaagtgaacccatattttaaattctcataagtagcattcatgtaataaacaggtttttagtttgttcttcagattgatagggagttttaaagaaattttagtagttactaaaattatgttactgtatttttcagaaatcaaactgcttatgaaaagtactaatagaacttgttaacctttctaaccttcacgattaactgtgaaatgtacgtcatttgtgcaagaccgtttgtccacttcattttgtataatcacagttgtgttcctgacactcaataaacagtcactggaaagagtgccagtcagcagtcatgcacgctgat

SEQ ID NO: 15782 - DNA, 8440 bp, Homo sapiens
agtccatctgcggccaggaagtgctggtcatggagcaaaatagggtttttcaagatctttctggtaatccgtgaatatatttaaaaaaaaaaagtctgtgacaaaacggtgcattagtaattttttctattgtatatttttgttagtttctgtacagattgtctttgctcttgatttcttttgctttgatgatttttgcaacttgatagctaatgcaccttttctgtgaggaggaggggatcgtgatttcagaatgaattatgtatcccttctcttttggttttctcttgtttgcagtctgctcagttgttttatgtattctcatatcaactgttaaacttttttttaaggttaaagaatttaatccattgtgaaacacttaactggacaaactgtagttttagtaaattctagctggagttaatatacgcctttatatgtgaaatcttgcccagtcacagaggtagaattgagcactcacagatgctccagtaagaatcacagtgctgggaatctagttgctccaatatgaggcagcttcatgtgcagcttagcacttgttgttgagatcggaccctgctggaagcagggaaaagaagcgtgaagatcgtaggattgagaacttagggaagcacattagcttgcttgaagtgctgattccatttcagccaagcaagggaaagaggaagtggagtcattttgcctttgaaggctgaggaaagattgatacccagttaattttgtttgctaaaggatgggggcaataatcggcccttgaggagctgcagcagtaggcatgtgctcagtctgcaggaattgttacctcactcccacagggtctagactagaaatccatcatctctatcgttgatatccttccatccaggaatagatttttcttactctacatatgtgtgtgtgcgtgcgtgtgtgtgcgtgtgtgggcatggggttgtgtcctggttgtgatattgaggtcttccttcctaacaaattaatactaaaatgaaacagcttttcttgtgtccttaagacaaaataaggaaggaaaacgtagctgcagttgtccacgatggatattggttctttaaaatatatctgaaagtagtagtcagaatgaattatggttggaaaactgaggaatcttctggttgcaggtgcaaagtgactttgtttattcttgtctcagtctccttgatagccacttcactctgctactactcaactttctcctaaaaatacttcatctattttcagtcctttctttctgtctactcaaaatggttctattaactttgcagtcatgagcttgttccagttacagtccctttgaagttcagggtgataaacagaatattcttctgtagaggaagagaaaggagtgaaagtttagcccactgagacctagagctttgtgatttcctaaccttgaaactctgtaatccctaaagttaaaatctccgcaagtggcacaacttcagaactaatagtatcactttgatttttctttttcctcccttagaaagtttctctagttctatagtttatttgttgaaggtactatgaccaaagaatcagctgctctacaggaatagcatggttccagtgaattagagaaaacctgctgtaaagccatggtagtgtctaagtggtatgttattatgatgtactagcatttatttacagaattatttattaacgtttacttccttcccctctgtaaatgtccatgactattgcccagagaaggcttacccctctctagggttgcagttgctttctttgtaataagtattttgccacacctgtaaaaaaaaaaacctcacttttaactctctgccttgtttgggtaaaggcagtaactaagtttatgtttcagaactgcaaaacaaacaggatagttaccaatatggcccatgtatcagattgatttttgtagcctctcactgaatccaacatatccacaagcaagttatctgtctttctacctgataatctaaattatcaggatatttgttttctgcctaaatgtttatactaagccgaggggagagaggtacctagaccatgtcatctacaagcttcagtaactaaagaaaaaggaacttccctgagtggcttgaatgtgtttgcccacagtctatatctatgtatatagaatgtctgtatgtattttacttatttaatatacattgaatggtaccttgctacagtatttctgacatttagagtagtgttgaaatactcggctagcatcagcaccactatagcactgtccgtgtcatatgagtcactaatattaactccagggacttctggataggctaatagatcattggatacgaagggctcttttgaagcttcagtataccatgtttgcatagtttatctttaaaaacaactttaaaggttcttttgtgagccaggatctcagactgccgtagcatgatgctgtccatctttagcgcatgggctgagaacacctcttccctgaggcttctgaaggttgctgtctgtcatgagtgcatgaaggaggccaagagtttatgctatgggaggaaacagtcactgatttgcctagattctgagagtctggcccatagccaaccacattttcctttgggataatttatttcctgtggcatctagccagaagaaattgaggatgtttcctttcacagctgctccaagcctgttgcccaattcacggtacaagggagcaccccttccctttcctctgaaggtacgccacccacctccgtcgcccacctcagcgcccaggagccttgggacttccttccatatgataaatcattcttcttcacgtcaatacacttcatattaatttctagtacagaaaatcttgacagctatcagaatgccttggtcatagtgttgttgcaaaattgaccatacaggtggcccatgtataaaatctgaattttaggggtttgtccccacctcgcatgctggcttttacagggaggtgtctgggattcctcattagcaatcaaaacttaattactgggatgcagagtccttactttatcgccagcccgtaggcatttctgaagtgcacttttttgaaacatcattttgctaactctcagcagtgtctaattaaactgagcaatacttttgtgaattttaattaatctcagcaaaaccatgatgggagagagtcctctgatggaaatgtagtccctggattatgtgtaacctttttattcctcttagatgcagaggatagaaagcattttttggtgcagtggtcttgtggcaaacacaagaccctctatgcgtctccaactgttatcctaatctagaaaatgaggactggcccctgggcaaaagtgacatgaggaatttactctggaagaggaaaatctgggtggctttccaaggctaagataggtttgtatttcaccctgtggccaagctacagaacttctgagattgtggaagaatttttgcaaccagcagggaaagaggcctcttactgcctaaacacaaagttacactgagcttttctactgtcctttgcctattgctccctctatcatgtaaagatctgggaaggatgagaggcagggcctgcttgtcatgagctgcactcttttctttttaactaatcattgacaattggaagaaaattgacgttaaagaagtttctccattgtcttactaacaaaaccttttgggtttcattaattgtccttgaaattgagttcctttggcatttttccttgcagtcatcagttaagcatgttgcatcctgaattcacagaagtttagctttgcaggtttgaatctctgtaatttaactcccgtggacttggtcgagttttcagcaggttgggagccacctctcttcatttcagcagtgagtcatcccttgacttttcaaatgacagaattttttccaattgtaaaattagcactgtaaaacaaagaaccaaagtggcatcctaagagttgttaaacctgaagtctagtttatgaggaattgtccaagttggagtttaaatagtatctgcttttgtctcaaagcatctaagttattctgacagaaaatggtaagtcagctttgcaggcagatgcgcctctgggcctcctaccttgctccacagctttctggccatcttgtctcccaggccatgccactgctctgccacatgtcagcaaatttctttccaccagtcttatagcatcttacatgatcaaatcatcacagaataaccccgtgatagattattgatagcaatagagaggggctttgtcactgatttttctctcagattccttttccatctctcatccataaaggaaggactgaaatccaaaggcattctccttttgtacctacagtatccagaacccacgtgggcagccttctgcttatgacaataattggcccattgcatgcagagagaatgtcttcatagagagaatgtcattaaatacttgaatctgcatgacagtttgacttgaatgcaacagcaggaaaattttgcaagttacataattgtatatacagtaggttttcttaagtctcttcggttcatcctttgtaatttgtgtgtgtatctgtagtattgcaggcttttggagactattcttacaggcagtatgtcagtcatcaaagaaaatgctgtcacctgccattgttgtatttgtgggtatttatagttgtatgtatgtaaatgcatcagtgtgtagattgcatatcagtgtatggtacatgtacatcaaaattatttttgtccttaatcagtgtgatatgaaaagcaagtacaacctcataggactgattatataatgaagttgttgagagtatatatagtggtattgttttattaaacttaaactcaaataatattttgattaaaatttttaataagactttatgctagaaaattctttgagctttgaatcaccagggcaaaaatgactttcaactaaccttgtgaatcttttgcagtgtactgtgtgcaataccaagggcatagctccctgtaatttgggaaatacagaaagaaaagaaaaaaaaaaaaaaaggcagcctgtgcagtcttagtaactttagtattaagagcacttaaagtcaaactgacaattttgggcttattacaaaatgtgatgctttaaagcacacgttctttattgttgttgtaattagtccataaaaaatatagctttcggaagaattaagtacccaccatatcatttatgtatttgtgtatgttttacgggagatcaaaccactctcgtggtgccgcatccgtactcgcttgacttggaagaaatatcacaagcactaaagtatatcagggcatcccaggattgggtactgtatcctaggtttgcagttgcagaaattagcatctagtgtcacaggtaaaagaatttcaggaccaggtttaaactttattttaaatatttttatacttaggtctctttttcctgcctctccccaaagaagagccactggccttagttgtttgagcttactgcttatattatagagtgtaaataggtaactagagactaaaattttattaaccagcatgtttggtatatttaaagcagtgactgagtgtgtttgagtgagtggctgagtgcagtgtcttttgtttaaacacactgcctcgtgtctttgtagctgattcagagagtttgaattgtggggtgggagactaacttcagctccaggctgcagtaatgtgttggtagttacacttgaggcatttttttgttgttgttaattaactctatagtctcaaactatttttgcaaatatatcatttttcctaattggttcttgacgtgcagtggactggctctgtgaatgattggcagggtcttagttttgcgagagtatttccttctaagaattattgtgatctgcagaaacagccatttgattcaaaaatcatgtagaaaaggagtaggagaagcaaaacgtttcatttttgggccttaaccatttgaaatgtttggactttaaacataaagccatggagtttataaagccaagtaaccatttgatatggataataatatctactctagagagagtatatatatgcacattgatttttaatgctgttaagatacttttgtaaaactgtaggaacaagagtaattagaccaaattgaagcttaggggacagtaaagtggttgctttccatttagggtaaccatgcatgtggttagtcctctcctcctgagattcagaaccagttgactgtccccttaggtgtataaggagaaaagttgacatgtctgggacctctgacatgtgtacacatgcttgcacacatgcacacacagtgaatgttttaagttatacaaacataagaccttaagatgcaaagagccagaatattctaaagaggtgatgaacagagggggtggaaactgcatcacagatgttttccaagggccagggtggaatctgagctctagtgtctgactttgagatgcattatatttttaacacataaatgaggggatccatatcacattctttcttgtggaccaccaaattgaaggctttcttgtaattcacaagcagcagctctccagcatctctccgtagcctgggtgaagtcccagaagctggtgtgcatcattttccaaggtggcagagctgcttgctctgcagatcattcctttgagagaggagtacaagtgaagaaacaaggaggcacttcctgtaggagcactgatgtgccttgtccacactcccctctgagctttactggtaagagagctccgactgaacatgctgagcagttgagcacttttccatcagcaacaacagcgaggatggaaatggaaaggaaccgaactaaaatgcatttccctttgcagggcagagagctaagctcttaggaatagtgttatagaaataagcaccctaacttcaattcctgaaaatgttggttaatggagagaattttggagtttcacttaatattttcccatcggtcgccataaataagtcttcaggcgctcctagaagagtcccagcccaaggctcgattaaggaccacactgcaggtctgaggctcactgctctgagtcctgaacaccagagccctgcagagagtggtgataacacatcatctctgcaaagaggaacctctcccccggccgccacttcactcaggcttctactgagcagcaaggacagcctgggtttcaaatgccacttcccctgctttagggatccaggtgtcctgatagcgtgaccctgctgaggcaaggtatcaactccgagagtgactgagtcactgagcgtggcacatgaacaaacgtcatgacaaagattctctgagtgaagttaacaccacgtattttacctttgcaaaaaacaaactggcaccctgagttctaactacggacggacgatatctttgcctccacacccagattcctggaaatggctaacgtttcctttctaggggaagggtcgaggaatactcaagtgctagcttagcagctttgttcagtccagatcagagctgttaggtaaaggcctaaccacctccctgcagtctcttatatctcaagctttaggaacccatttctaaatgtacactagcggagaatttatattgtcagccttgattaccataggacaggcagaaaggcgataatttgtatcttttaatataaaagaagcttttaacttttccagcctattataataactgagttatattcactgtggctcaaactaattggcattgtggaacatttctttaccttcaaagttttctccaccaatcatttcagttctattgcagtcctggtgccatatgtcccctgcaaattgtgaaagtaattagtgacaaaatagcagcctgctccttttcaatggcgaaactgtcggcattagcagttttgggtaagctggcggtactataacacgtactggaaacctgttcctcatcaccacctaccagattctggaaatgccgtcttctagaaaacgatggcgtttgtggtggtcttcttttgaaaggaacagtaatttgtgtggatattgttaaagtgtttaaagaatattttgacaattaagtttacattttacaattgctttattttttattaaaatagttgtatataaatattaccctatttcactgttgttcaagtaaatctaaaccttgtagacaagtgagtcatctgatatgtatagaagctgtgatatatagagtacatttattgtgtaaatgtttatgaatataattgttcctgtgtttttataagttggggatattttgttgttttacggcaacaaaatttattgcatttaaatggtttttatgtaatagaaatcacgcaaaatagtgaaggatttaaaatatgtatatgatacatgtaaatgtacaaactttagaaagaaataaatccaacaaatttcaatca

SEQ ID NO: 15783 - DNA, 1618 bp, Homo sapiens
actcccagagaaggattgtgggagacactttttctttccttttgcaattactgaaagtggctgcaacagagaaaagacttccataaaggacgacaaaagaattggactgatgggtcagagatgagaaagcctccgatttctctctgttgggctttttacaacagaaatcaaaatctccgctttgcctgcaaaagtaacccagttgcaccctgtgaagtgtctgacaaaggcagaatgcttgtgagattataagcctaatggtgtggaggttttgatggtgtttacaacacactgagacctgttgttttgtgtgctcattgaaatattcatgatttaagagcagttttgtaaaaaattcattagcatgaaaggcaagcatatttctcctcatatgaatgagcctatcagcagggctctagtttctaggaatgctaaaatatcagaaggcaggagaggagataggcttattatgatactagtgagtacattaagtaaaataaaatggaccagaaaagaaaagaaaccataaatatcgtgtcatattttccccaagattaaccaaaaataatctgcttatctttttggttgtccttttaactgtctccgtttttttcttttatttaaaaatgcactttttttcccttgtgagttatagtctgcttatttaattaccactttgcaagccttacaagagagcacaagttggcctacatttttatattttttaagaagatactttgagatgcattatgagaactttcagttcaaagcatcaaattgatgccatatccaaggacatgccaaatgctgattctgtcaggcactgaatgtcaggcattgagacatagggaaggaatggtttgtactaatacagacgtacagatactttctctgaagagtattttcgaagaggagcaactgaacactggaggaaaagaaaatgacactttctgctttacagaaaaggaaactcattcagactggtgatatcgtgatgtacctaaaagtcagaaaccacattttctcctcagaagtagggaccgctttcttacctgtttaaataaaccaaagtataccgtgtgaaccaaacaatctcttttcaaaacagggtgctcctcctggcttctggcttccataagaagaaatggagaaaaaaatatatatatatatattgtgaaagatcaatccatctgccagaatctagtgggatggaagtttttgctacatgttatccaccccaggccaggtggaagtaactgaattattttttaaattaagcagttctactcgatcaccaagatgcttctgaaaattgcattttattaccatttcaaactattttttaaaaataaatacagttaacatagagtggtttcttcattcatgtgaaaattattagccagcaccagatgcatgagctaattatctctttgagtccttgcttctgtttgctcacagtaaactcattgtttaaaagcttcaagaacattcaagctgttggtgtgttaaaaaatgcattgtattgatttgtactggtagtttatgaaatttaattaaaacacaggccatgaatggaaggtggtattgcacagctaataaaatatgatttgtggatatg

SEQ ID NO: 15784 - DNA, 902 bp, Homo sapiens
cagcagaaggtgctccttgaattcatgatgcctcagtgaccacctctttccctgggaccagatcaccatggctgagcccacggctcagtgggcttcacatacctctgcctgggaatcttctttcctcccctcccatggacactgtccctgatactcttctcacctgtgtaacttgtagctcttcctctatgccttggtgccgcagtggcccatcttttatgggaagacagagtgatgcaccttcccgctgctgtgaggttgattaaacttgagctgtgacgggttctgcaaggggtgactcattgcatagaggtggtagtgagtaatgtgcccctgaaaccagtggggtgactgacaagcctctttaatctgttgcctgattttctctggcatagtcccaacagatcggaagagtgttaccctcttttcctcaacgtgttctttcccgggttttcccagccgagttgagaaaatgttctcagcattgtcttgctgccaaatgccagcttgaagagttttgttttgttttttttcatttatttttttttttaataaagtgagtgatttttctgtggctaaatctagagctgctaaaagggctttaccctcagtgaaaagtgtcttctattttcattatctttcagaaacaggagcccatttctcttctgctggagttattgacattctcctgacctcccctgtgtgttcctaccttttctgaacctcttagactcttagaaataaaagtagaagaaagacagaaaaaataactgattagacccaagatttcatgggaagaagttaaaagaaactgccttgaaatccctcctgattgtagatttcctaacaggaggggtgtaatgtgacattgttcatacttgctaataaatacattattgcct

SEQ ID NO: 15785 - DNA, 3556 bp, Homo sapiens
ggggctgcctgggaaggcgagtctggggacctggcactgggaggcagggctctcccgtgcatcccccctgctcagcaattcagacccctttgagagacgccactccctgggacacagacccaggacccccgaggggagggcaggatggcctttccttccctctctgatgtcccagtgctcaccagccctgcagcccaccagacgtcaggccctgactcctctggctttcccaggagatgggtccaggggtctgtctgctttggttaagggctccctaaactttggcctttgttcgaaatagatatcctctccccctcctccagggaaggtggccacagcaagtacagcggctcccctctgcttctcatcccaacctctttttcctcctggacacattggaatgccttggaaatagaaagaagccatatatgaccagaagccttggaaccagccccatcagaacctgagctattttcctctggccgcagaggtgtaggggtggaatgagccgcggggaagctggctttgaaacctcagggctgtcccagccccggcaagccacaggaaggaggggagagacaggcagcccagcagtgtggagaccctgccacagccagaggagggcagagggagaatccaagggttgagagccagtggcgggtgatggccagcccctggggcccagcccctgtttactggttcttgcaaatgggagctgagcagcctctggacagccagtgacctttgacctcggtgaccactcttctttaagccatagaccctgaggccctgggctgggtgctgggaagggagggttgaaaccaccgtgaaccagagggtgtggctttccaggcaccctcagggagcctccccatctgtccagctggggccagaggctgggagtccctacctgcttcacgttggccggcggctactctggaatgtttttccctccccagaatcaagcttttgcttgatccagaagagcccatatcactaagatggcatatatgtgatctgggcattttcctcctctgcctacagccaggtttagcggcaaacctttcccccttagcaccttcagggctgagttctgggtttctagaggtcaggacggctcctcagagcgccaggaagccagagccccaagcaggacgaaaaagaggcatacacacagcagtgtgaatagcctggccaccagccatcctccctccacctcaagacccccatttgtcccagactaaaggatccagagagcagctccctttctcaggagcttgggcagtgccccagggagtccagggtttctctgcagatgtgcggagcgggaggcggtggtagagagagataaaaggtggagtttctctgttgtttggttcagggattttatttttaattttatgagacagggtcttgctctgtcccccaggctggagtgcagtggcatgatcatagctcactgcagcctcatactcctgggctcaagcaatcctcctgcctcagccttccaactagctgggactacaggtgcgcgccaccgtgcctggctaacttttcattttttttgtagggacggggtctcgttttgttgccaaagctggtctcaaacttgtggcctcaagcaatccacctgccttggcctcccaaagtgctgagattgcagatgtgagccaccgtgcctggccagatttttcttttattcttctttctttttcttttttgctttcttgtcttttcagaagcaagccagacctagcaggctgttccatgttctatttttgactgtagccacagctgctgttctcaggacagcatcccttcccacatgcctgcgcctgctgcctgctgagatgaggaggggagcgtctgggaacttgcgagtccaaggccagtccccatttctgcctcgctcaccgctggcccttagagaccccgaggtaggggtggggagatgcttctctccttgccccccgccctcatgggtcctagcccttccctgagtgcgggctgaggccagagtcaccttttctgtggctggctctaccttcctgtccctgaggttaaacggtgcccatcctgccatcctcaaacgacagaggagcttttctggaatttcaaaccattgctcttagtcccaagctaggcttaaacctggaatctacaagccaaaagtccctccctgcctgagggcagtaccctccattgggcacagtccagacccaagtcaaagatgccccattccttgcgcctcagccctcagttccttcatttccaccaggccgtgccttgtttgagtttttcctcccagtgagactgccccacggagacagaggaaagggctggctccccctccccaggctggagacccccccccaactccaggaaagagcagtcagagtccagtgctctgcctcagacgttgcctgagaagaagtggctgccacacccaggggaaggccctgaggcggaggctgtgctccgccatggtgtcccggtaccttccatacacagaggagtgcagccttctccatatctccatggccctgtcccaggccggcccagatgtgtcccccccaggccttgtcctacgtccaaggtggcagatgtcttccctgggctgccaccagcccccgccccagagtggcccaccgtggcactagaatgcaagtatcctgcgaccttgcaacctcaccttcctgtgggtgttctttcctgccctgtccaaaagcgccctcactattcttggaccatgccagattctgcctctctggaaagaggctctggacagcagaagcctccaagcacagagcctggccccaggccccagacagggtgggcttcctgcccttccctctgggcacgcctgctggccgacccactgacccactcggatggaccaacctgctctgtccccaaaggacgcctgcaggagagagcagcactccgcatcacctcaccaaggatcggactctgcccctggacctgggaacgactggactgtcacggggttccctcctagctctcccagtgaactcctgccaggcacacacagcccctatagcactgagctcacatgggactgggatatgggggcatctcttccccagagaggcactcagtgagcctcctgtgcctggccccagcctgggccatctcttaggtgagacagttgcccgaaactaagccaggcctggctggaggagcagcagcttggggagagggatttccctgcagacctcaagccatcatgcggtgggtgctgccatgacagaggctgcacccctgggccagcggggctgctcacccacctcttgtgcaaggtggcctttgtgctgcgcctgcaggcagagctggagcccccagcagaggcaggctgggacggaccagcatctggaagatgtacatagttatttttctctttgtggtttcttgtttggtttggtttgcttttgacagcttcattttatttttgacgtcactttttggccatgtaaactatttgtggcaattttatgtttttatttatgaataaagaatgccatttctcacgccctct

SEQ ID NO: 15786 - DNA, 1258 bp, Homo sapiens
gctgtgggaaccgagtcagaatatttttgaaagctacgcagacaagaacagccgcctgacgaaatggaaacacacacagacacacacacaccttgcaaaaaaaaaattgtttttcccaccttgtcgctgaacctgtctcctcccaggtttcttctctggagaagtttttgtaaaccaaacagacaagcaggcaggcagcctgagagctggcccaggggtcccctggcaggggaaactctggtgccggggagggcacgaggctctagaaatgcccttcactttctcctggtgtttttctctctggacccttctgaagcagagaccggacaagagcctgcagcggaagggactctgggctgtgcctgaggctggctgggggcaggacaacacagctgcttccccaggctgcccactctggggacccgctgggggctggcagagggcatcggtcagcggggcagcggggctggccatgagggtccaccttcagccctttggcttcaaggatggagatggttttgccctccctctctgccctcgggtggggctggtgggtctgcagctggtgtgggaacttccccacggatggcggtggagggggttcgcaccgtgctgggctccccctgactgtagcacggagtgttggggctgggggccagctccaggagggcttgagagctcagcctgcctgggagagcccttgtggcgaggcattaaaacttgggcaccagcttctttctcggtggcagaaattttgaagtcagagagaaacggtcctttgttggcttctttgctttctcgtgggtcctttggcaggcctccctttggggagagggaggggagagaccacagccgggtgtgtgtctgcagcaccgtgggccctcaagctttcctgctgtcttctccctcctcctcctttcccctttctctttcctcatttcctagacgtacgtcaactgtatgtacataccggggctcctctcctaacatatatgtatatacacatccatatacatatattgtgtggtttcccctttctttcctttttttaagcaacaaaactatggaaataataccccaacagatgagcgaaaatgtattattgtaaagtttattttttttaatactgttgtctataatggggaaaaaggacattggccccgcagtgccctgccccagtcagcctggctgggctctggtgggggctcctgatccgcatccaagcttaaccaaggctccaataaacgtgctaggaagc

SEQ ID NO: 15787 - DNA, 437 bp, Homo sapiens
cagaggcagcagagggatggtccaccgccccttggcttctgctggtgactcctcctggccactgcatcagaagaacctcctctgccccttctggagcccgaggcctggcctgtcttcgttggggctgataaattgcctctcccagggcctgctgggtgagtcaccatcccaaagcaggaagggtgccctggagagaaccaccctcctcctactctttttccacttcctcctctttctttccccagctgaggaggaacctggggcatttagggcagaggacaaaaggatgtcagcaattgcttgggctgcttggctatgcaagcctcctgcctgctgatggccacttcagggacagcctgggcccaggcacccagggggatggcggcagcttcctgcacctttcagatttcttggtggcattaaagcattttcagaac

SEQ ID NO: 15788 - DNA, 428 bp, Homo sapiens
agaggtgggggaggtgacagggagctaggcagccgtgctccctccagtgcggacttgtctccctctgagggaggcaagaggctggcgatcagggatcttgttgcattgggagcaggggcggctctcctggtccccaggagagatgctttgaggagcattcctctagattgcacaagggacagtgcctttaaccaagcgaggagtccaaagctcaggacctgactaccctgagggcacgctgacgcctcttcccagggggatggggagctttctgcacccccagtggcatctcctcatcacgttctgtgccgtccttgggaaaggcctgcattctgatccttccaggcccttcgagcatggaggggcactggggaaggtcccccgagggaggagcacgttgctgagtaaagaggtgttactcaccttgc

SEQ ID NO: 15789 - DNA, 1279 bp, Homo sapiens
agggatgctaggtgtctgggatcggggtggggacaggtagaccaggtgctcagcccaggcacaacttcagcaggggatggcgctaggggacttggggatttctggtcaaccccacaagcaccactctgggcacaagcagggcactctgttcccctcccccttaagccaacaaccacagtgccaccaagctcacacctgtccttctcaggctggcatctcccccaccctgtgccccttttcatggtaccaggcccgcactgggggcaattgacttcctccaatccccactcctccgagacccaggagacaaacagcccttccttggggaaacttgggaatcattctggcttaaacaacacctcctcctgctgctcactcccgctgagcccactctactgccccagctccgtttctaccaccgcatcctcactgggctcactgcaggcatgctgaacaaggggcctccaaccttctgccctcctgccaaaagatctggggagtgtgaggagagggtggcatcaggagctgctcaggcttggcggagggagcggcatgggcgatgtcactcagccccttcccggtccgcccgcttccctccttcatgatttccattaaagtctgttgttttgtgactgctgccagtgtggttggccctgcccctgcaggccacatggtccagggagggagggggacatggaaatctgccttagagacaaatggagtagggcagcccggagctggggcccaagggacaggacaccactgcctgctcttcgtctggggcctggggccttgcctcccactgaggagactttgggtggggtggggggctgtcccccaaagatgctcctgagtgcaagagcaggcaaggcagagtcctggggcacagccacgaggtgacctccctgtgcagagactcccgagccctactccacccagcaagctccagtccgccccatctctcccgtctaccctgacctggagatccagaagtatggcccagaagagcccttgccccgcctgtctgcccttggtggcagtggccatggccgacgccaggcccagccaccctgggactgagcctgactgcttcagacagccgacccctccttgtccccgctccacgcccgcagcctcctggtggcgctccgccctctcccgcttcctttgtgtatctcagccctacaaagaaaaacactcccactcttgtcatacctaattgttcctgctgtggtttggggaattttttttattaaataaagttttttattataagggt

SEQ ID NO: 15790 - DNA, 467 bp, Homo sapiens
ggtctgctgcatctgcccccttcttacctcgtgccctgcagggctccagggctatttggagggaccttgggctgcacatctggcctgcctgcaccagctgcctgggccccaccctcctgactcctgctgatggttaagggccgggagcagatgctgccaaggccacatgcagggatgcacccacaatgtaccaaagcaggctgggcccagggttctatttattgccttgctctgccctctcccttccccggttgtgggacaagagccctccctgaacccctgcaaccctccctgaacccctgcaaatgaaaccaaacgtccacctgggtgtgttcattccttcctgtccttcaaagtacttgatagcctttcataaggcctggcacatgtgtcctggttgtgtgtgtgtgtgttggtgagtgaggtcaggtttgcgagtgttttgataaataaatacataaaggggc

SEQ ID NO: 15791 - DNA, 1328 bp, Homo sapiens
ggggtgccgaggcctctggtctcctcagggtggccactggaggatgggtgggggcctctgtgagcaccacgtatgcctgtgtgaagacaagcgaccaacctgcattcatgcccttgtatccgcacacgcccagtgtgtacaggcgcaccccgtggactggcccaggaggacgtgcatcatcactgcaatcagcatgaacaccaggcacccctgggacacctaacgcccagttcccgtgaccccaactgcaggccccccctactctgcagcctttcccatgctctgccccctgtctcatgcacgagtggtgcggggtgctgggagcgaggggggccgcatcctcctgtccttgtgcttctccttctgcccctctggtctttcctgttggtgctccaggcattgtttacctgctcttgctccccgctgtagcccacagccatatctgtcatgcttccccggggccactcacccctgccccaccccgtctgcatgctcacatggacgcggacggacacactcattacacactcacacgccccgactgcacccggtgtccatctataaacatgtcagggcacgtgtgcatacaagcagattcagcactgcctaccaggctctcctgttaccttgcctctctgcttggagggggccccctctgctcacccccagcgtgccccccccggaactgataaggatgagaatggtggtgccagcttctgagggcctgcttggcctcctgggggcaaagcccctctgcccgaagcaataacaacagcagcagaagcaatcccggggagctgccaggggtgtctgtctctgttctccttggcgtttccttcatggccgtgaatcccagctcacccatggacagaagacctcccctcatctgaaagcctttctgccttccttcctgtagctgtcgctttctcaggcttggactgtcccctggttcaccctgtctttgggatgtggcccttgagctgggcgggctccttgggtggattagagagctggccgagctgcaagcacctgagttacctgcgagggtgcccagagtggagcttggcctgagggcgtgttgcagccctggccccaccagtccacagaggcccccaggagcactgcctttcagtggaccgggtggggcctggtgggaggggccccactagctgagcttctgctgccctctgctgtctgctgagatgccaggctagtggagagggcacaccatgtgcccaaatggtgtgatgctccttgtagcaggataccagggtactggggggcaatgctatgattaacttgcttcaaataaaaagttcccgccccat

SEQ ID NO: 15792 - DNA, 1650 bp, Homo sapiens
ggactcctggggagctggggggcgagggagagatgagcggaaggtggaggtgggtagcccaggttcagggagctggctttctctctcctgcccccctgctccctccactctgcccagctgccctcccctcgccccttggcattggaggcaacagacggtggtcctcttggtaagtgtggcccacacccagcctggtggacatggaaaggcttctcagcctctgtagttggcagctgggctggacttctggagaacttcccctttcctctggtttccttgtcctactgttctttgcctcgtccaggtctctatctcccaaagacctgcccacctcctgggctctcccagggaagcccctctgggccaaagcccatgggtagcttggctgcctccagaagagatgcagagagctgtggggcgatctttcttagtcccactcaccccactcagggccaaccacagaatgccccctccctgctgagctgggtctctggggcttcccactccaggcctggatcccttccttctataaatagtctcctgcaccaccgtgactccctggctgctccttgccccaaagaaccctcttcctgcatgggagagctgtccctccttctccacctgcccaccgggacactccccctgctctctagaaaggaactctctttcttctcttggcactgggggcgtcaggctgtcggatgttccttccttccataccccagcataccttctccttgcttagagtgcaggggtctgagacagcagccactggggttgaggagggggaggagacccctgagacccagaggtgccccttcctcagctgggagtgggccgcctcatgctctgctggggcctggcatggaacgtgagacctgtaagctgtcccgcgggccccggcaccccgcccagctgtgcactttgctcactcgctctgccatggtgccatgactgtactgtgcccatgcgtgacctggactgtggaccctctgctgctccgcctctcccctccccactggctctgtctgctctcctgccaccctgctggccgggagcccctccccggggagttcttggtgaagtccttcccgggcctccttgtgtttttgcctcattcctactgtcacacaggtcacgagggtggactccctacaatcaacaaagcaaacagagagcctgtgggaggggctgacagcagcagccggctgtttgggggatgatggaggtgacatcaggcagaggagagtgcagcctcacagtgactttctcagaggtgacagagatgatggatgagcagctggattttcgtgatgaaggacggaagcagcagcgggccggcaaggccatacctcggtgagggacaggtggacaacggtcacctatctgtagccaggggcagttgtgtggccagctgtctctctgggatgagtcaggaggcctggaggcttggggagaggtgtggagaaggagagaacatggcccaggccctttccttccccctgtgctgacagcattgctgtgggggtggcccactgccctcccctggccctcatgtccccccggggctggggtccgcctgcctgtgctgtgcttgcgacgtgcatcaataaaccaccatggcctgagggccctgctcgtctcagtcca

SEQ ID NO: 15793 - DNA, 986 bp, Homo sapiens
atccccgtcactcttggaggactcctgtgacgtggtcagcctcattcatccttgcccttctcagggctagctgctcctctcacaggctggggacagaggtggccctggttcacttgccggccctttgcaatgaatgactcttcctgagcctggcaccaggagccctaggcaggccgccgtctccccactcacagccccagcaggtaagcagtgtagacaaacccttggggcttttttatttggagaaccgtccagcatgcatcctggcccacggcctgagcaagctgcagcccttctgaggccatgggcttcgttggctaagttgggggtcttagccttgcatgcgttgtgggcatcaaatctacctccaaaagacccatcctggggagccctctggcccctcgttgccttttcacttcaaaacctcttttttctgggagaggccctgaaccctgtgcgggagagctggtcctccagccctggcaggccctcagccagcttcccagcaagacaaagggcacccttgtggctttgggacctaagtggttggggttcccgaggtcactgaggactggtacctcgggaacgcaagctgtcagtggaactgtcccacaagaattcacaggtctcaaagcaggaacagtgggtttgtgtctcacctgagtatctggaattttattttttcaagtaaaattttcaatgaaacgtccacatagtattgtgctgtaacttaggcgagcagaggaaaccccttcctgggcctgctgccctccacggagcagcagcaccctccagcaggcagcccagcatgccaggggtgtgtgcgcacctccccggccctggcccaccttctggagcgaactgcaccgtggtccagcagaggcgctgggtgggagggcacgcgggcaagcctaggagagtaggaagagctgtggaggacacactctcagtttgtttttgactttggtttatttaaaaaacaagcc

SEQ ID NO: 15794 - DNA, 2812 bp, Homo sapiens
ggatcgggcccccagatccccacttttcccctccagtgcctcccggctgctagcctgaaagcagcgggaaagccagccacggaggcgtaggggccgcgccctggcctctccatggacgtgcggccccttgcttccccttcgatgcccccggttcccaacctttcacgccggccagcggtcaggggccagggctggaggcgccttcccctcgcggtcccccacttagccaaggcgtgggggcggaaaggtggcgtctagcccgctttgttcagttcggatcgccttgatccaggggccgccgggccgcgccaaggacctgcaagggactgaaggcggagcccatccaaccctcgcccgacccaaacacctcattgtttcccccacgtctccctctataccccctcgaagactcgagagggggagggggtaaggagcgcaccaaagcgcagagcttgctgcccgccgcacgcacgcgcgcctgcgtgcggggatgcgcgcgagtgtgtgcgtgctcgcgtgtgtgtgtatgtgtgtgtgtgagtgtgtgtgtgtgcgcgcgcgcaagcgtgtgtgtttaagactcttgagctgaactgggctgtgtttaccccaaactcttccccacctcgggtccccaagccgctgggagatgtcccatgctgggggtccgcacgtggctggaggaggtggtcttccatccgctctgaaatcatgtttcttagagaaatgcctcggatgccgccgacgcggtgctgctgccgccgcttcgggtttggcccctcagaacccctccttttctgagcgcttccctcttaggcctcagggcagtttgatctgtggggagaaagagcagccatcgctgagcctgccttttaaaatatatgtgtatttccttagccccactctaagaaatctatgttcctgagtttgccccctgccctcccactccttccccttctcccctctaaaccttctcccatctctttcaaaatcttttcccagaaaggcaggcttcaaccagccactccagctttgtgtcttctctcaattacatagcaatttctccttcccaccatcatggggaagctggctctgcttttgccctttgtcatcaccaacacaacagatagaatttaaatataagtatatggtgtgcgtgtgtatgtatgtgtatgtatatgcatgcatgtgtataaagatgcacatgcgtacatatacataacatacacacaatatgtattcctagcaaaataaaatctctaaggtacttggttatccagtgcagtgcaccggaataaagagaatttgtaggcgtatacagctttaaatgatttattttttatgaaaatgttaactgatgagattatatctacatacgtgtgttatgtgtgtggatatagatgcacacatatctgtacatatacatgtgagtgtacatatatacacatatacacatctatgtatggatatgtgtgtatacacatatacacatctctgtccaaaatttcctcaaagatatggggattttttcatgaatccatgtggatgaatgaggtgtctcctttccatacccagtctcaccttctccccaccctacctcacctcttctcaggcacccctcttccccagctgtcctgccagcccttctcgtacagggtggctcctttgaagtggagtaatagggaaggttgctctctgccacagcttgcagcatggtcttgactgaatgtactgttcctgttagcgttacttctcctgtggtcagtaagttgcccagagagaaggaacaaaggtctggagtttacagaatgtctgtttttaaagtcactttatgcgttttccacttttttcttttttaagaaaaagaagtaccatttttgttttgttttgttttgatttttggtggtggataaataatactaaaaggactctagtggaaaggggggatatcgaagagcagggggttgtgaatttccaggtacttggactttttgtagaaggagagagaagaagatgaagtttgccaggagggcccatattttttcagctgaagggtaaaatctttctttgcagagacagtattttgctgaatactttttataatgtgatgattattaaaaaagcaaaaattttggtcacttccaagctagaaggaggaatcagataccctttaatattttttcctcgctccttctggtatatgcatgtcactgcatgataattgagttttcctttgttttaataaaactgttctcagacattaagctaaactaagagaaaaataactttgttgccaaaaggttgtgctatccagattttttatatgtctgcatgtttaaaaaaaaaaagcaacaaaagaaaatgcactctaacttatgtgaactgagagaaaaaaatcaggttttaaacaggaaaacctatggggaatgatattttttgaaagacttttgtataaagttgagtacttagaaaaaagacaaaccagatgtaatatattttgtggatgtttttatttcttggatttatagtaccttatactaaggttaaaaaaatatgcttgatattgtgaaaaggtgaaattcttcaccaacatttcatttgctcctttgtcatattgtaatgccaatataatatagttaatgaaaacagcatttttaaaaaccgaaatattgaaatggtgtaatgttgtaccatttgcactgtgagcaaatgctaatacagtaaatatattgtgtttgctgacaatcagccggcctataaatctccttattttatttcttgtttttatagcataaagctttagtttggcctg

SEQ ID NO: 15795 - DNA, 118 bp, Homo sapiens
atagccggctttgccatccgggcatgtggccacactgcccaccaccgacgatgtgggtatggaaccccctctggatacagaaccccttcttttccaaataaaaaaaaaatcatccagg

SEQ ID NO: 15796 - DNA, 2536 bp, Homo sapiens
gtgtgattctcttcaggaagtcagaccttccctggtttaccttttttctggaaaaagcccaactggactccagtcagtaggaaagtgccacaattgtcacatgaccggtactggaagaaactctcccatccaacatcacccagtggatggaacatcctgtaacttttcactgcacttggcattatttttataagctgaatgtgataataaggacactatggaaatgtctggatcattccgtttgtgcgtactttgagatttggtttgggatgtcattgttttcacagcacttttttatcctaatgtaaatgctttatttatttatttgggctacattgtaagatccatctacacagtcgttgtccgacttcacttgatactatatgatatgaaccttttttgggtggggggtgcggggcagttcactctgtctcccaggctggagtgcaatggtgcaatcttggctcactatagccttgacctctcaggctcaagcgattctcccacctcagccatccaaatagctgggaccacaggtgtgcaccaccacgcccggctaattttttgtattttgtctagatataggggctctctatgttgctcagggtggtctcgaattcctggactcaagcagtctgcccacctcagactcccaaagcggtggaattagaggcgtgagcccccatgcttggccttacctttctacttttataattctgtatgttattattttatgaacatgaagaaactttagtaaatgtacttgtttacatagttatgtgaatagattagataaacataaaaggaggagacatacaatgggggaagaagaagaagtcccctgtaagatgtcactgtctgggttccagccctccctcagatgtactttggcttcaatgattggcaacttctacaggggccagtcttttgaactggacaaccttacaagtatatgagtattatttataggtagttgtttacatatgagtcgggaccaaagagaactggatccacgtgaagtcctgtgtgtggctggtccctacctgggcagtctcatttgcacccatagcccccatctatggacaggctgggacagaggcagatgggttagatcacacataacaatagggtctatgtcatatcccaagtgaacttgagccctgtttgggctcaggagatagaagacaaaatctgtctcccacgtctgccatggcatcaagggggaagagtagatggtgcttgagaatggtgtgaaatggttgccatctcaggagtagatggcccggctcacttctggttatctgtcaccctgagcccatgagctgccttttagggtacagattgcctacttgaggaccttggccgctctgtaagcatctgactcatctcagaaatgtcaattcttaaacactgtggcaacaggacctagaatggctgacgcattaaggttttcttcttgtgtcctgttctattattgttttaagacctcagtaaccatttcagcctctttccagcaaacccttctccatagtatttcagtcatggaaggatcatttatgcaggtagtcattccaggagtttttggtcttttctgtctcaaggcattgtgtgttttgttccgggactggtttgggtgggacaaagttagaattgcctgaagatcacacattcagactgttgtgtctgtggagttttaggagtggggggtgacctttctggtctttgcacttccatcctctcccacttccatctggcatcccacgcgttgtcccctgcacttctggaaggcacagggtgctgctgcctcctggtctttgcctttgctgggccttctgtgcaggacgctcagcctcagggctcagaaggtgccagtccggtcccaggtcccttgtcccttccacagaggccttcctagaagatgcatctagagtgtcagccttatcagtgtttaagatttttcttttatttttaatttttttgagacagaatctcactctctcgcccaggctggagtgcaacggtacgatcttggctcagtgcaacctccgcctcctgggttcaagcgattctcgtgcctcagcctccggagtagctgggattgcaggcacccgccaccacgcctggctaatttttgtatttttagtagagacggggtttcaccatgttggtcaggctggtctcgaactcctgacctcaggtgatccaccttggcctccgaaagtgctgggattacaggcgtgagccaccagccaggccaagctattcttttaaagtaagcttcctgacgacatgaaataattgggggttttgttgtttagttacattaggctttgctatatccccaggccaaatagcatgtgacacaggacagccatagtatagtgtgtcactcgtggttggtgtcctttcatgcttctgccctgtcaaaggtccctatttgaaatgtgttataatacaaacaaggaagcacattgtgtacaaaatacttatgtatttatgaatccatgaccaaattaaatatgaaaccttatataaa

SEQ ID NO: 15797 - DNA, 2279 bp, Homo sapiens
aagaatctcttcaggaaaccagagcttccctcatttaccttttctcctacaaagggaagcagcctggaagaaacagtccagtacttgacccatgccccaacaaactctactatccaatatggggcagcttaccaatggtcctagaactttgttaacgcacttggagtaatttttatgaaatactgcgtgtgataagcaaacgggagaaatttatatcagattcttggctgcatagttatacgattgtgtattaagggtcgttttaggccacatgcggtggctcatgcctgtaatcccagcactttgataggctgaggcaggtggattgcttgagctcgggagtttgagaccagcctcatcaacacagtgaaactccatctcaatttaaaaagaaaaaaagtggttttaggatgtcattctttgcagttcttcatcatgagacaagtctttttttctgcttcttatattgcaagctccatctctactggtgtgtgcatttaatgacatctaactacagatgccgcacagccacaatgctttgccttatagttttttaactttagaacgggattatcttgttattacctgtattttcagtttcggatatttttgacttaatgatgagattatcaagacgtagccctatgctaagtcatgagcatatggacttacgagggttcgacttagagttttgagctttaagataggattattggggcttacccccaccttaattagagaaacatttatattgcttactactgtaggctgtacatctcttttccgatttttgtataatgatgtaaacatggaaaaactttaggaaatgcacttattaggctgtttacatgggttgcctggatacaaatcagcagtcaaaaatgactaaaaatataactagtgacggagggagaaatcctccctctgtgggaggcacttactgcattccagttctccctcctgcgccctgagactggaccagggtttgatggctggcagcttctcaaggggcagcttgtcttacttgttaattttagaggtatatagccatatttatttataaataaatatttatttatttatttataagtagatgtttacatatgcccaggattttgaagagcctggtatctttgggaagccatgtgtctggtttgtcgtgctgggacagtcatgggactgcatcttccgacttgtccacagcagatgaggacagtgagaattaagttagatccgagactgcgaagagcttctctttcaagcgccattacagttgaacgttagtgaatcttgagcctcatttgggctcagggcagagcaggtgtttatctgccccggcatctgccatggcatcaagagggaagagtggacggtgcttgggaatggtgtgaaatggttgccgactcaggcatggatgggcccctctcgcttctggtggtctgtgaactgagtccctgggatgccttttagggcagagattcctgagctgcgttttagggtacagattccctgtttgaggagcttggcccctctgtaagcatctgactcatctcagagatatcaattcttaaacactgtgacaacaggatctaaaatggctgacacatttgtccttgtgtcacgttccattattttatttaaaaacctcagtaatcgttttagcttctttccagcaaactcttctccacagtagcccagtcgtggtaggataaattacggatatagtcattctaggggtttcagtcttttccatctcaaggcattgtgtgttttgttccgggactggtttggctgggacaaagttagaactgcctgaagttcgcacattcagattgttgtgtccatggagttttaggaggggatggcctttccggtcttcgcacttccatcctctcccacttccatctggcgtcccacaccttgtcccctgcacttctggatgacacagggtgctgctgcctcctagtctttgcctttgctgggccttctgtgcaggagacttggtctcaaagctcagagagagccagtccggtcccagctcctttgtcccttcctcagaggccttccttgaagatgcatctagactaccagccttatcagtgtttaagcttattcctttaacataagcttcctgacaacatgaaattgttggggttttttggcgttggttgatttgtttaggttttgctttatacccgggccaaatagcacataacacctggttatatatgaaatactcatatgtttatgaccaaaataaatatgaaacctcatattaa

SEQ ID NO: 15798 - DNA, 236 bp, Homo sapiens
aagactctttttaccagaggtttcctcttaggtgttaggagttaatacatattaggttttttttttttttaacatgtatacaaagtaaattcttagccaggtgtagtggctcatgcctgtaatcccagcactttgggaggctgaggcgggtggatcacttgaggtcagaagttcaagaccagcctgaccaacatcgtgaaatgccgtctttacaaaaaaatacaaaaattaactgg

SEQ ID NO: 15799 - DNA, 1146 bp, Homo sapiens
agaagcctgcgtggtcaactcctgtcttcaggccacaccacatcttccatgggacttccccccaacaactgagtctgaacgaatgccacgtgccctcacccagcccggcccccaccctgtccagacccctacagctgtgtctaagctcaggaggaaagggaccctcccatcattcatggggggctgctacctgacccttggggcctgagaaggccttgcgggggtggggtttgtccacagagctgctggagcagcaccaagagccagtcttgaccgggatgaggcccacagacaggttgtcatcagcttgtcccattcaagccaccgagctcaccacagacacagtggagccgcgctcttctccagtgacacgtggacaaatgcgggctcatcagcccccccagagagggtcaggccgaaccccatttctcctcctcttaggtcattttcagcaaacttgaatatctagacctctcttccaatgaaaccctccagtctattatagtcacatagataatggtgccacgtgttttctgatttggtgagctcagacttggtgcttccctatccacagcccccaccccttgtttttcaagatactattattatattttcacagacttttgaagcacaaatttattggcatttaatattggacatctgggcccttggaagtacaaatctaaggaaaaaccaacccactgtgtaagtgactcatcttcctgttgttccaattctgtgggtttttgattcaacggtgctataaccagggtcctgggtgacagggcgctcactgagcaccatgtgtcatcacagacacttacacatacttgaaacttggaataaaagaaagatttatgaaacgtgtctgtgtttcctttgacccacagcacctgggccctgagcagcaggcttcctatgttcagtggccagaagcagagcttcaggtacattcgtggttttctccggtggacatgggtcctcagatcccctccagcccagtgtggccaccagggcacctccttcaatagactccaaaaggggcagctcctaccatctgggagaagcaatctaaggagatcacaaaaagtaacggaacaggagtcataatctttcttgaactcctgtggtttttactgaaacttg

SEQ ID NO: 15800 - DNA, 306 bp, Homo sapiens
tccagctcacagctccacgaagactcaaaaggaaaagccatttttgcctcagggtttctcctctttattttcctgtggttttgttttttctttcccttttttgttcctccaaacaaaaacaaaatgcaggccgagcgcggtggctcacgcctgtaatcccagcactttgggaggccgaggcgggcggatcatgaggtcaggagatcgagaccatcctggctaacacggtgaaaccccgtctctactaaaaatacaaaaaattagctgggtgtggtggcgggcgcccgtagtcccagctactcagga

SEQ ID NO: 15801 - DNA, 2506 bp, Homo sapiens
tgccagctcaggtgacaaccattatgatcaaaaactgccttccccagggtgtctctatgaaaagcacaaggggccaaggtcagggagcaagaggtgtgcacaccaaagctattggagatttgcgtggaaatctcagattcttcactggtgagacaatgaaacaacagagacagtgaaagttttaatacctaagtcattcctccagtgcatactgtaggtcattttttttgcttctggctacctgtttgaaggggagagagggaaaatcaagtggtattttccagcactttgtatgattttggatgagttgtacacccaaggattctgttctgcaactccatcctcctgtgtcactgaatatcaactctgaaagagcaaacctaacaggagaaaggacaaccaggatgaggatgtcaccaactgaattaaacttaagtccagaagcctcctgttggccttggaatatggccaaggctctctctgtccctgtaaaagagaggggcaaatagagagtctccaagagaacgccctcatgctcagcacatatttgcatgggagggggagatgggtgggaggagatgaaaatatcagcttttcttattcctttttattccttttaaaatggtatgccaacttaagtatttacagggtggcccaaatagaacaagatgcactcgctgtgattttaagacaagctgtataaacagaactccactgcaagagggggggccgggccaggagaatctccgcttgtccaagacaggggcctaaggagggtctccacactgctgctaggggctgttgcatttttttattagtagaaagtggaaaggcctcttctcaacttttttcccttgggctggagaatttagaatcagaagtttcctggagttttcaggctatcatatatactgtatcctgaaaggcaacataattcttccttccctccttttaaaattttgtgttcctttttgcagcaattactcactaaagggcttcattttagtccagatttttagtctggctgcacctaacttatgcctcgcttatttagcccgagatctggtctttttttttttttttttttttttttttccgtctccccaaagctttatctgtcttgactttttaaaaaagtttgggggcagattctgaattggctaaaagacatgcatttttaaaactagcaactcttatttctttcctttaaaaatacatagcattaaatcccaaatcctatttaaagacctgacagcttgagaaggtcactactgcatttataggaccttctggtggttctgctgttacgtttgaagtctgacaatccttgagaatctttgcatgcagaggaggtaagaggtattggattttcacagaggaagaacacagcgcagaatgaagggccaggcttactgagctgtccagtggagggctcatgggtgggacatggaaaagaaggcagcctaggccctggggagcccagtccactgagcaagcaagggactgagtgagccttttgcaggaaaaggctaagaaaaaggaaaaccattctaaaacacaacaagaaactgtccaaatgctttgggaactgtgtttattgcctataatgggtccccaaaatgggtaacctagacttcagagagaatgagcagagagcaaaggagaaatctggctgtccttccattttcattctgttatctcaggtgagctggtagaggggagacattagaaaaaaatgaaacaacaaaacaattactaatgaggtacgctgaggcctgggagtctcttgactccactacttaattccgtttagtgagaaacctttcaattttcttttattagaagggccagcttactgttggtggcaaaattgccaacataagttaatagaaagttggccaatttcaccccattttctgtggtttgggctccacattgcaatgttcaatgccacgtgctgctgacaccgaccggagtactagccagcacaaaaggcagggtagcctgaattgctttctgctctttacatttcttttaaaataagcatttagtgctcagtccctactgagtactctttctctcccctcctctgaatttaattctttcaacttgcaatttgcaaggattacacatttcactgtgatgtatattgtgttgcaaaaaaaaaaaaaaagtgtctttgtttaaaattacttggtttgtgaatccatcttgctttttccccattggaactagtcattaacccatctctgaactggtagaaaaacatctgaagagctagtctatcagcatctgacaggtgaattggatggttctcagaaccatttcacccagacagcctgtttctatcctgtttaataaattagtttgggttctctacatgcataacaaaccctgctccaatctgtcacataaaagtctgtgacttgaagtttagtcagcacccccaccaaactttatttttctatgtgttttttgcaacatatgagtgttttgaaaataaagt

SEQ ID NO: 15802 - DNA, 2849 bp, Homo sapiens
ccagggagaggttattcacaacctcaccaaactagtatcattttaggggtgttgacacaccagttttgagtgtactgtgcctggtttgatttttttaaagtagttcctattttctatcccccttaaagaaaattgcatgaaactaggcttctgtaatcaatatcccaacattctgcaatggcagcattcccaccaacaaaatccatgtgaccattctgcctctcctcaggagaaagtaccctcttttaccaacttcctctgccatgtttttcccctgctcccctgagaccacccccaaacacaaaacattcatgtaactctccagccattgtaatttgaagatgtggatccctttagaacggttgccccagtagagttagctgataaggaaactttatttaaatgcatgtcttaaatgctcataaagatgttaaatggaattcgtgttatgaatctgtgctggccatggacgaatatgaatgtcacatttgaattcttgatctctaatgagctagtgtcttatggtcttgatcctccaatgtctaattttctttccgacacatttaccaaattgcttgagcctggctgtccaaccagactttgagcctgcatcttcttgcatctaatgaaaaacaaaaagctaacatctttacgtactgtaactgctcagagctttaaaagtatctttaacaattgtcttaaaaccagagaatcttaaggtctaactgtggaatataaatagctgaaaactaatgtactgtacataaattccagaggactctgcttaaacaaagcagtatataataactttattgcatatagatttagttttgtaacttagctttatttttcttttcctgggaatggaataactatctcacttccagatatccacataaatgctccttgtggccttttttataactaagggggtagaagtagttttaattcaacatcaaaacttaagatgggcctgtatgagacaggaaaaaccaacaggtttatctgaaggaccccaggtaagatgttaatctcccagcccacctcaacccagaggctactcttgacttagacctatactgaaagatctctgtcacatccaactggaaattccaggaaccaaaaagagcatccctatgggcttggaccacttacagtgtgataaggcctactatacattaggaagtggcagttctttactcgtcccctttcatcggtgcctggtactctggcaaatgatgatggggtgggagactttccattaaatcaatcaggaatgagtcaatcagcctttaggtctttagtccgggggacttggggctgagagagtataaataaccctgggctgtccagccttaatagacttctcttacattttcgtcctgtagcacgctgcctgccaaagtagtcctggcagctggaccatctctgtaggatcgtaaaaaaatagaaaaaaagaaaaaaaaaagaaagaaagagggaaaaagagctggtggtttgatcatttctgccatgatgtttacaagatggcgaccaccaaagtcaaacgactaacctatctatgaacaacagtagtttctcagggtcactgtccttgaacccaacagtcccttatgagcgtcactgcccaccaaaggtcaatgtcaagagaggaagagagggaggaggggtaggactgcaggggccactccaaactcgcttaggtagaaactattggtgcttgactctcactaggctaaactcaagatttgaccaaatcgagtgatagggatcctggtgggaggagagagggcacatctccagaaaaatgaaaagcaatacaactttaccataaagcctttaaaaccagtaacgtgctgctcaaggaccaagagcaattgcagcagacccagcagcagcagcagcagcacaaacattgctgcctttgtccccacacagcctctaagcgtgctgacatcagattgttaagggcatttttatactcagaactgtcccatccccaggtccccaaacttatggacactgccttagcctcttggaaatcaggtagaccatattctaagttagactcttcccctccctcccacacttcccacccccaggcaaggctgacttctctgaatcagaaaagctattaaagtttgtgtgttgtgtccattttgcaaacccaactaagccaggaccccaatgcgacaagtagttcatgagtattcctagcaaatttctctctttcttcagttcagtagatttccttttttcttttctttttttttttttttttttttggctgtgacctcttcaaaccgtggtacccccccttttctccccacgatgatatctatatatgtatctacaatacatatatctacacatacagaaagaagcagttctcacaatgttgctagttttttgcttctctttcccccaccctactccctccaattcccccttaaacttccaaagcttcgtcttgtgtttgctgcagagtgattcgggggctgacctagaccagtttgcatgattcttctcttgtgatttggttgcactttagacatttttgtgccattatatttgcattatgtatttataatttaaatgatatttaggtttttggctgagtactggaataaacagtgagcatatctggtatatgtcattatttattgttaaattacatttttaagctccatgtgcatataaaggttatgaaacatatcatggtaatgacagatgcaagttattttatttgcttatttttataattaaagatgccatagcataatatgaagcctttggtgaattccttctaagataaaaataataataaagtgttacgttttattggtttc
